United States Patent Application Publication US 2017/0114356 A1 - sequence listing, part 19

SEQ ID NO: 24381 - DNA, 3025 bp, Zea Mays
aaaccgttcgccgtttccccatctggccatctctttccccacccccacccacacgcactccagtcaccgccggcgccaagccgatctccgaccaccgcagccatgtctttcgccgccgcgctccacctacgccccacctccgccacgacgcacccgcgcctccaccaatccacccgcaaatcgtacttcctccgcttacagccgtctcgccgccgcctacccgtcccgcgcctgtccctcacgcccaccaccgccagcaatagcaacagctctcctcccccaccgtccccttcgcccgcccccgccgccccgggttccctgctcgccaactggtccccgccgcgcgcgatctggcgggggctgtcggcgctgctcctcgcgggccaggtcttccaccgcgtcctcacgggccgcgtccaccgccgcaacctcctggcgcagctccgtagggtgggtcccgggagcgcgggggtcgcgctcctcaccgctgccttcgtgggcatggccttcaccatccagttcgtgcgcgagttcacccgcctcggcctccaccgctccgtcggcggcgtcctcgcgctcgcgctcgcgcgcgagctctcgccggtcgtcacggccgtcgtcgccgcgggccgcgtcggctccgcgttcgccgccgagctcggcaccatgcaggtgtcggagcagaccgacaccttacgcgtcctcggtgcccaccccgtcgactacctcgtggtccctcgcgtgctcgcctgcgtgctcgcgctcccggtcttgacattgatcagcttcgcgctcggcctcgcgtcctcggcgttcctggccgattctgtgtttggcgtcagcgtcagcatcattttggagtcggcgcgcagggcgctgcggccatgggacttgatcagctctttgctcaaatctcaagtgtttggtgccattatcgcggtggtgagctgtgcctggggagttacaacccatggaggagccaagggtgttggcgagtctacaacatctgccgtagttgtttccttggttggaatcttcattgcagactttgctctctcgtgcctgttcttccagggtgctggtgattcgctcaagtatgcaatgggttgaggtgggtcagtgcagaggaagttttttcctttctaggaggatagcatagtcttgtacattaaaaagagtggtgcactggattctagtaggtgaacattgcaacttctgccacagtccaggtgacatgcatagttgtttccccttgatacctacgaaaatcattacctttgttgtactgaactgctgctcaattatttgccagtgattcatgtataaccttattcatgaaagtattggtcggattgaatcagtgtaacccatgcatatccttgaaaattatgtaaaatcatttgtaaccccacgagtgactgattgtttgtttaagccccatgtggactgtaaccctgcctaccccagcctttcccctcatccccacccagaacggagcccggactcaagtggcgtggaagaaatgccatcacgagtgcatgtggctgcggtggggctgagggacgcggcgctcctcgtctccagcgtccatctccaacagcagccttctcaccaaggcagattgcagtgactgagattgtattttcaattggttatctgctagacatacagagatctagaagcccccaagcctctacccaccacatagatcatcttcttctgcagctacgaaaattatagcaagaccttgatatcagcgctccctgcaagcatgctcatgtgcacgacaagaagcagcatacctgcaatgaacccgagtatccgagggtatttctgcctggaactagcatcatatttttttttgttattgcaagaacttgagtcttgctgtacttatctgctctcaaatacaaaacatctcaagatgttcttgtttagattaactgaatctgtctaccttttccgattccttatatgcagtctgcctgtccgagctttagcctgagttcctaatatgtgcttctgcaccccccctgtccgagctttagcctgaatctgtctacctcttccgattccttatatgcagtaatttaagatgcatctctctggctgaggattatccacactgattgtagcatattactcattaacagactcagtgattttttccccattttctactgctacatgtacacttgaaaattaacaacgatacccattatattataggaccatttattgtattattgtctcatattctttttttgttgcaatctactttggtttattgtgcatattcgctcgtttgtctcatggtgttatagggtgggagaaagcaatcggatcagagaaagaggaagtaaatttatattctgccagttgaggcatctttaggcttgatgtttgtagcacttgaaggaataaataattgaaggcaggtatcgaaggaccttctgttctgtctcgcaacatcaagtaaatcgaggagaagctccaaagaaccttgcatcctgattagtgttagcacagctgagacagtttgaacagtacacacatctcagttctcatttatttatttatttatttatacgatttgattgatgtacaaaatttagcggaacgaattgaaccatatacacgaccatgacagcacagaagagagaccgccaaagcagtgagtagaatttgctttccttcgtgcttgcatcttattatctgttactactactatatatattacgcctctagtagtagtagtcgtcgtcgtttatgcaaccttgcaggagaaaacttccttggctcttgctgctaactccgggaatacccgagttggacggaagtccttgttgaggcaaacgacggtcgctctgccttccatgacgagctgccaaatgccaagagactaggagcacgcctccgcttcatgtgtaccttacgatccggcagggcctcgatcatgtgctccacaatcatccgcacgcctttgatttggacaggcttcaccttcacgacgaacctgtcgccg

SEQ ID NO: 24382 - DNA, 3023 bp, Zea Mays
aaaccgttcgccgtttccccatctggccatctctttccccacccccacccacacgcactccagtcaccgccggcgccaagccgatctccgaccaccgcagccatgtctttcgccgccgcgctccacctacgccccacctccgccacgacgcacccgcgcctccaccaatccacccgcaaatcgtacttcctccgcttacagccgtctcgccgccgcctacccgtcccgcgcctgtccctcacgcccaccaccgccagcaatagcaacagctctcctcccccaccgtccccttcgcccgcccccgccgccccgggttccctgctcgccaactggtccccgccgcgcgcgatctggcgggggctgtcggcgctgctcctcgcgggccaggtcttccaccgcgtcctcacgggccgcgtccaccgccgcaacctcctggcgcagctccgtagggtgggtcccgggagcgcgggggtcgcgctcctcaccgctgccttcgtgggcatggccttcaccatccagttcgtgcgcgagttcacccgcctcggcctccaccgctccgtcggcggcgtcctcgcgctcgcgctcgcgcgcgagctctcgccggtcgtcacggccgtcgtcgccgcgggccgcgtcggctccgcgttcgccgccgagctcggcaccatgcaggtgtcggagcagaccgacaccttacgcgtcctcggtgcccaccccgtcgactacctcgtggtccctcgcgtgctcgcctgcgtgctcgcgctcccggtcttgacattgatcagcttcgcgctcggcctcgcgtcctcggcgttcctggccgattctgtgtttggcgtcagcgtcagcatcattttggagtcggcgcgcagggcgctgcggccatgggacttgatcagctctttgctcaaatctcaagtgtttggtgccattatcgcggtggtgagctgtgcctggggagttacaacccatggaggagccaagggtgttggcgagtctacaacatctgccgtagttgtttccttggttggaatcttcattgcagactttgctctctcgtgcctgttcttccagggtgctggtgattcgctcaagtatgcaatgggttgaggtgggtcagtgcagaggaagttttttcctttctaggaggatagcatagtcttgtacattaaaaagagtggtgcactggattctagtaggtgaacattgcaacttctgccacagtccaggtgacatgcatagttgtttccccttgatacctacgaaaatcattacctttgttgtactgaactgctgctcaattatttgccagtgattcatgtataaccttattcatgaaagtattggtcggattgaatcagtgtaacccatgcatatccttgaaaattatgtaaaatcatttgtaaccccacgagtgactgattgtttgtttaagccccatgtggactgtaaccctgcctaccccagcctttcccctcatccccacccagaacggagcccggactcaagtggcgtggaagaaatgccatcacgagtgcatgtggctgcggtggggctgagggacgcggcgctcctcgtctccagcgtccatctccaacagcagccttctcaccagcagattgcagtgactgagattgtattttcaattggttatctgctagacatacagagatctagaagcccccaagcctctacccaccacatagatcatcttcttctgcagctacgaaaattatagcaagaccttgatatcagcgctccctgcaagcatgctcatgtgcacgacaagaagcagcatacctgcaatgaacccgagtatccgagggtatttctgcctggaactagcatcatatttttttttgttattgcaagaacttgagtcttgctgtacttatctgctctcaaatacaaaacatctcaagatgttcttgtttagattaactgaatctgtctaccttttccgattccttatatgcagtctgcctgtccgagctttagcctgagttcctaatatgtgcttctgcaccccccctgtccgagctttagcctgaatctgtctacctcttccgattccttatatgcagtaatttaagatgcatctctctggctgaggattatccacactgattgtagcatattactcattaacagactcagtgattttttccccattttctactgctacatgtacacttgaaaattaacaacgatacccattatattataggaccatttattgtattattgtctcatattctttttttgttgcaatctactttggtttattgtgcatattcgctcgtttgtctcatggtgttatagggtgggagaaagcaatcggatcagagaaagaggaagtaaatttatattctgccagttgaggcatctttaggcttgatgtttgtagcacttgaaggaataaataattgaaggcaggtatcgaaggaccttctgttctgtctcgcaacatcaagtaaatcgaggagaagctccaaagaaccttgcatcctgattagtgttagcacagctgagacagtttgaacagtacacacatctcagttctcatttatttatttatttatttatacgatttgattgatgtacaaaatttagcggaacgaattgaaccatatacacgaccatgacagcacagaagagagaccgccaaagcagtgagtagaatttgctttccttcgtgcttgcatcttattatctgttactactactatatatattacgcctctagtagtagtagtcgtcgtcgtttatgcaaccttgcaggagaaaacttccttggctcttgctgctaactccgggaatacccgagttggacggaagtccttgttgaggcaaacgacggtcgctctgccttccatgacgagctgccaaatgccaagagactaggagcacgcctccgcttcatgtgtaccttacgatccggcagggcctcgatcatgtgctccacaatcatccgcacgcctttgatttggacaggcttcaccttcacgacgaacctgtcgccg

SEQ ID NO: 24383 - DNA, 1980 bp, Zea Mays
aaaccgttcgccgtttccccatctggccatctctttccccacccccacccacacgcactccagtcaccgccggcgccaagccgatctccgaccaccgcagccatgtctttcgccgccgcgctccacctacgccccacctccgccacgacgcacccgcgcctccaccaatccacccgcaaatcgtacttcctccgcttacagccgtctcgccgccgcctacccgtcccgcgcctgtccctcacgcccaccaccgccagcaatagcaacagctctcctcccccaccgtccccttcgcccgcccccgccgccccgggttccctgctcgccaactggtccccgccgcgcgcgatctggcgggggctgtcggcgctgctcctcgcgggccaggtcttccaccgcgtcctcacgggccgcgtccaccgccgcaacctcctggcgcagctccgtagggtgggtcccgggagcgcgggggtcgcgctcctcaccgctgccttcgtgggcatggccttcaccatccagttcgtgcgcgagttcacccgcctcggcctccaccgctccgtcggcggcgtcctcgcgctcgcgctcgcgcgcgagctctcgccggtcgtcacggccgtcgtcgccgcgggccgcgtcggctccgcgttcgccgccgagctcggcaccatgcaggtgtcggagcagaccgacaccttacgcgtcctcggtgcccaccccgtcgactacctcgtggtccctcgcgtgctcgcctgcgtgctcgcgctcccggtcttgacattgatcagcttcgcgctcggcctcgcgtcctcggcgttcctggccgattctgtgtttggcgtcagcgtcagcatcattttggagtcggcgcgcagggcgctgcggccatgggacttgatcagctctttgctcaaatctcaagtgtttggtgccattatcgcggtggtgagctgtgcctggggagttacaacccatggaggagccaagggtgttggcgagtctacaacatctgccgtagttgtttccttggttggaatcttcattgcagactttgctctctcgtgcctgttcttccagggtgctggtgattcgctcaagtatgcaatgggttgaggtgggtcagtgcagaggaagttttttcctttctaggaggatagcatagtcttgtacattaaaaagagtggtgcactggattctagtaggtgaacattgcaacttctgccacagtccaggtgacatgcatagttgtttccccttgatacctacgaaaatcattacctttgttgtactgaactgctgctcaattatttgccagtgattcatgtataaccttattcatgaaagtattggtcggattgaatcagtgtaacccatgcatatccttgaaaattatgtaaaatcatttgtaaccccacgagtgactgattgtttgtttaagccccatgtggactgtaaccctgcctaccccagcctttcccctcatccccacccagaacggagcccggactcaagtggcgtggaagaaatgccatcacgagtgcatgtggctgcggtggggctgagggacgcggcgctcctcgtctccagcgtccatctccaacagcagccttctcaccaaggcagattgcagtgactgagattgtattttcaattggttatctgctagacatacaggttatacagcacttataaaacattatttcttctggttgttttaggtatctatcttgatttattgtatatatttttgttcttgttagttgcacctcattttaaactctgatgaaccagttcaggaaaagaattgatccagtgaggtcaacatcaaaccctaattgatacatctttaattcataattgctaggtattactccctttgtcctagtatacaaggcataaccacctcggattcaaagacaaagaaatgtatttaattctctctatcaacactagtgctaccgtattgatgtacgcatgtttaaa

SEQ ID NO: 24384 - DNA, 1624 bp, Zea Mays
ctctctttgagaaagccagtccggttggtaattccactataacttgataactttatggaataaatacctcggagcccctgttgatggattctggcaagcaaaaagaagacctaaacccgactctaaaagcttcagttgcctccctctctccgccaatggctaggttagctatctctctctctcgctacgcccctgaccattataagaaatgacacatgccatcccaatttgaaacatataagagtcgtggcttctcacagttatattttttattttcaaattattagtgtacatatatatttacaatctctctcctttatataacataaaagacatgagttgtagtggtagacgtcaagtgctttatacgaagcaaatagggtttgaatcttccacaacttattttttttggatattctgtgcgggggaggaagcaaatcgaatcagtcttttacctcaacaccagctgacatcgccagccatgaaactgttggtctgacgagcgcgcctttgcttggaaccgtagtattatctcttagtcaccgtcaagccatgtcgctcacattagcatctggtgcttataatttgttgtttgttttctccaagttttgaagttagagtagcaaacaattaaggacttgggatgcagaacattaaggatttgtaccatttactataggggcaaggaggtttctagtgagtcatcgatctaaaatcttttatgctctctttgtgtttactgtttagagttgtttagttctgatatgaactaagggcatgtttgcttcgcaccttcctgcgccaggcaagaattttggccaggtgtctagaactcaacgtcggagaattcaagatgcttaatgccccctcagaattcaagatgcataatatttcttatgtgatgcttacacttgtcctagcactactacttgtcaaaacagtggaaaagttactagattgttcaatcatcactactatgtagttgtgttgcacctgcacttccaatcatcacttactaagttactaattagtagaaaaggctacattattgtggatactttttcataatttacatcattatttgcacctccatgttatgtttgtattcatgggaatattcaaagattcatatcacgagttcacgaccgcatggtgctaagggattatgccatgcaacaaacctgtgtttgaacaaaaactatttagagccagcatctgattaacaaaaactatatattttgaacaaaaactatattgataggaatgcttagcccatatatggtcatcatttggagctgtacatcttagtctctgattatgctaattgatttttgctggtgtgctagggtagtctcagatggaattttcactgaaggcagggttttgatccttgaataatttatgcattgttcgatgggctcctgatactgccaggagtgacccttccactgctgctaacttcgagcttgatcaaaaggtctttctactcatatgcaaggtgtaagactatcgagttatgtggtatattggtgttgatcattcatgtaatcactttgaggctatgggtgtttgccttgctcatacttatttaatttgcttccatctatgagattagaaaaaaaaa

SEQ ID NO: 24385 - DNA, 2043 bp, Zea Mays
ctctctttgagaaagccagtccggttggtaattccactataacttgataactttatggaataaatacctcggagcccctgttgatggattctggcaagcaaaaagaagacctaaacccgactctaaaagcttcagttgcctccctctctccgccaatggctaggttagctatctctctctctcgctacgcccctgaccattataagaaatgacacatgccatcccaatttgaaacatataagagtcgtggcttctcacagttatattttttattttcaaattattagtgtacatatatatttacaatctctctcctttatataacataaaagacatgagttgtagtggtagacgtcaagtgctttatacgaagcaaatagggtttgaatcttccacaacttattttttttggatattctgtgcgggggaggaagcaaatcgaatcagtcttttacctcaacaccagctgacatcgccagccatgaaactgttggtctgacgagcgcgcctttgcttggaaccgtagtattatctcttagtcaccgtcaagccatgtcgctcacattagcatctggtgcttataatttgttgtttgttttctccaagttttgaagttagagtagcaaacaattaaggacttgggatgcagaacattaaggatttgtaccatttactataggggcaaggaggtttctagtgagtcatcgatctaaaatcttttatgctctctttgtgtttactgtttagagttgtttagttctgatatgaactaagggcatgtttgcttcgcaccttcctgcgccaggcaagaattttggccaggtgtctagaactcaacgtcggagaattcaagatgcttaatgccccctcagaattcaagatgcataatatttcttatgtgatgcttacacttgtcctagcactactacttgtcaaaacagtggaaaagttactagattgttcaatcatcactactatgtagttgtgttgcacctgcacttccaatcatcacttactaagttactaattagtagaaaaggctacattattgtggatactttttcataatttacatcattatttgcacctccatgttatgtttgtattcatgggaatattcaaagattcatatcacgagttcacgaccgcatggtgctaagggattatgccatgcaacaaacctgtgtttgaacaaaaactatttagagccagcatctgattaacaaaaactatatattttgaacaaaaactatattgataggaatgcttagcccatatatggtcatcatttggagctgtacatcttagtctctgattatgctaattgatttttgctggtgtgctagggtagtctcagatggaattttcactgaaggcagggttttgatccttgaatagtaagttttcagttaatgggccatgttgatttgattatagcagacttttttctgtatgcggggatagtagccttgacagcattaagtggcattagtgctacattcctcagcttgcctgcagggatcaggcagggaaaaattattggtactaagtatttatttagaattacaattcaccttggttttgttatagatcaatatgaaaggatgttcgatttgggcataagctaaaaagaacttgtgagagtatttgattctgcaaagcactttcgaacactaaaatgagcttaattcgaatatcccaattaataatgatttatctgtatatccttttcatctaataatagcattacttgcatatagataacatcaggtgttgttttttgtcacgtgatgcttccccttttccttccaagaagatttatgcattgttcgatgggctcctgatactgccaggagtgacccttccactgctgctaacttcgagcttgatcaaaaggtctttctactcatatgcaaggtgtaagactatcgagttatgtggtatattggtgttgatcattcatgtaatcactttgaggctatgggtgtttgccttgctcatacttatttaatttgcttccatctatgagattagaaaaaaaaa

SEQ ID NO: 24386 - DNA, 1055 bp, Zea Mays
acattcagattccgacttcctggttcctgcagcaggatgcgttcgtgactccctacaccccagcgccgcttccgcgtgggatgatcgagctctcagcgccgccacacgcttcgcggtccccagcgccacgtgggatgaccagacgctcagcgccgccacacggtcgggctccccagcgccgcgtgggagtgggacgaccgtacgctcggcctgacgctcgacgctccctgccagatccgacttggcgctcctcgtctcgggtgactcgggtccggtgccgctcctccctctccgcctgtctcaacactccgcccgctcggctcctactatccttcactgtcgtggcaccgccgtgactagtcatctcagatggaattttcactgaaggcagggttttgatccttgaatagtaagttttcagttaatgggccatgttgatttgattatagcagacttttttctgtatgcggggatagtagccttgacagcattaagtggcattagtgctacattcctcagcttgcctgcagggatcaggcagggaaaaattattggtactaagtatttatttagaattacaattcaccttggttttgttatagatcaatatgaaaggatgttcgatttgggcataagctaaaaagaacttgtgagagtatttgattctgcaaagcactttcgaacactaaaatgagcttaattcgaatatcccaattaataatgatttatctgtatatccttttcatctaataatagcattacttgcatatagataacatcaggtgttgttttttgtcacgtgatgcttccccttttccttccaagaagatttatgcattgttcgatgggctcctgatactgccaggagtgacccttccactgctgctaacttcgagcttgatcaaaaggtctttctactcatatgcaaggtgtaagactatcgagttatgtggtatattggtgttgatcattcatgtaatcactttgaggctatgggtgtttgccttgctcatacttatttaatttgcttccatctatgagattagaaaaaaaaa

SEQ ID NO: 24387 - DNA, 641 bp, Zea Mays
acattcagattccgacttcctggttcctgcagcaggatgcgttcgtgactccctacaccccagcgccgcttccgcgtgggatgatcgagctctcagcgccgccacacgcttcgcggtccccagcgccacgtgggatgaccagacgctcagcgccgccacacggtcgggctccccagcgccgcgtgggagtgggacgaccgtacgctcggcctgacgctcgacgctccctgccagatccgacttggcgctcctcgtctcgggtgactcgggtccggtgccgctcctccctctccgcctgtctcaacactccgcccgctcggctcctactatccttcactgtcgtggcaccgccgtgactagtcaggtagtctcagatggaattttcactgaaggcagggttttgatccttgaataatttatgcattgttcgatgggctcctgatactgccaggagtgacccttccactgctgctaacttcgagcttgatcaaaaggtctttctactcatatgcaaggtgtaagactatcgagttatgtggtatattggtgttgatcattcatgtaatcactttgaggctatgggtgtttgccttgctcatacttatttaatttgcttccatctatgagattagaaaaaaaaa

SEQ ID NO: 24388 - DNA, 692 bp, Zea Mays
acattcagattccgacttcctggttcctgcagcaggatgcgttcgtgactccctacaccccagcgccgcttccgcgtgggatgatcgagctctcagcgccgccacacgcttcgcggtccccagcgccacgtgggatgaccagacgctcagcgccgccacacggtcgggctccccagcgccgcgtgggagtgggacgaccgtacgctcggcctgacgctcgacgctccctgccagatccgacttggcgctcctcgtctcgggtgactcgggtccggtgccgctcctccctctccgcctgtctcaacactccgcccgctcggctcctactatccttcactgtcgtggcaccgccgtgactagtcatctcagatggaattttcactgaaggcagggttttgatccttgaataataacatcaggtgttgttttttgtcacgtgatgcttccccttttccttccaagaagatttatgcattgttcgatgggctcctgatactgccaggagtgacccttccactgctgctaacttcgagcttgatcaaaaggtctttctactcatatgcaaggtgtaagactatcgagttatgtggtatattggtgttgatcattcatgtaatcactttgaggctatgggtgtttgccttgctcatacttatttaatttgcttccatctatgagattagaaaaaaaaa

SEQ ID NO: 24389 - DNA, 2551 bp, Zea Mays
acattcagattccgacttcctggttcctgcagcaggatgcgttcgtgactccctacaccccagcgccgcttccgcgtgggatgatcgagctctcagcgccgccacacgcttcgcggtccccagcgccacgtgggatgaccagacgctcagcgccgccacacggtcgggctccccagcgccgcgtgggagtgggacgaccgtacgctcggcctgacgctcgacgctccctgccagatccgacttggcgctcctcgtctcgggtgactcgggggatgatttttttggcaggttggtctatagttaaaaaggaaattgtgatggtaagggagcaatcttgttatagtgttatatatgcaaatgcaccagacccgtgactgcatctcatgggcaatacaaaccctttcatttgctccagtttcaaagcataaatgtcaaccaaaggtcagtcatggaatgcattgccaaagtagatttcaaattgcattatgtcctatatctcgtattctatcccataatttcagaatcggatatagatcattcaaatattgatgtctacgttatatacgtaccagaaatctgattttgggtatttggattcagatacgattagatattagatgttcagattcaaatacggactatctatatatggttttaactctttcaggataaacaaatatcaagaaaaatccatcctattattatccctaccttcgagcgagtgaactcaagtgaatttagagtttttttaacttcagatataactagtgccgctacatagttgactgaatcagtgaatcttgacagatataggaaatgaatcttgcattcataatgattttctagcaactttctactatttttcttctaaaatgaccttactgttatttacaagtaacattacaacagtagtagtgaacgggtattttaatacatggatttgtgttacagcagctagtattttttaaaccgtcattatatccatgaattcttaacttagtttatttttcttctaaatagagatagattgaggggtatctgagggtttgggttctaataccacctcggatgaccaatctgtgcaaatgccgatcagaagggtaaaggtttcgaagtactttcaacatgagttaattgaggtcgatagtaaggctatttcaaatactgtggggcaaagttgacaagtaaaaagagttcaagcacaaatagccttagaaaccatgttgtagtcacacgtcctaaaatttcagctgaggaccacaagcgattcattgctataatgaaaaaaagaccaatagaaggttcatttgtgtttgacccttgaatgccacaccttgaaattcccaaatttcaggatgtggataagaagacaaattaatgcaacacttttcacataatgttaaaattgtgccaagcttaatatattctacaaggaatctaacttatgaaaaataattatttattttctaaaattaaatgagcttgtgtatgttgcttgtttgcttttgtgtgctcttggtgtttcttgagtgcaaacagtttcaaatgtatttttgtatcaaataggttctctcgaaaatttaccagatttttctggcaattattcccatttacctagacctatttatatttattagaatgctctaaaatattttaatggactataaatattttattcagattcctcatgtccaagtagacttctatgatgtttcctagaatttttcgtaccttcgagatactttccactcgttggagtcgtctcctacgagttcctagactcaatcatcatgatctttggaagatctaatatgaggactccaaaagtacaatggcaaagatattattgtgatatgagagacaagttagagtcctaaacataaatatatagaacaatatcccaacatacaagacagagtcataagcagatatgacaagattctaacggataagaaaggcacacttgttattatagagagttagattctaataggactaggttaccatattagatcattcatgtgaccaactcgtattcaccactgtaactgcccacctccttggactatataaggagaggtaggggagcttcgagagcgcacaccagaacataacatataaataattaccaaaataccgggcgtagggtattatctgacgaccagagcctgaacctacctaaatctaatctaccacataaattcactatgggaaaatcctcgatagagggtctgaagcccaacctacagagcgacagatgtttgctaaggaaggcaagtgtctacttgatcacattgtttgacctatataatatttactattactagtaagttgtccgtacccgctgctatggtttctatatatcatatagatagaccttgcttaaacgacaatcaagggtaattaaacaatgtgcttatgaagcgaggaatgaggttagctgtgaggtctctcagtacctagattcgtgggtggagccgtagccgtagaagagattctttttttctttgcgcgaggaagcggaaaagacaaaaccctctgttgacgcttt

SEQ ID NO: 24390 - DNA, 2088 bp, Zea Mays
gcacctgtcgtccggctggggctgggcgaactggagcttgaatcggctggagcttgaactggagcaagaacctgtcgtgtttcctctgtgtcagcatgaaaatcaatcaacttccatctcctttctatcaagaggtttgacatggtagatctgccattatcagaacaagatgaattaatggacatgctttggaatatctcttgattgaaacaccccagtatgcagaaaatggctctcttgatgatattttgtttacaccagctagaagatctagggctttcaagatcgcagcgatgagatgccctcttccccgaccaccagatcacagcgatggagctggatccggtcgccgctggggcatcctcctcgccagccagtcgcagatgtccctgatggcaagcttcagcaatcgtcaagtacaaagacatcctcccgtgcaaaattcaatttgcccaatcctaatctcttctatatagcctcacagatcgcagcgatggagccggatctggtcgccgctggggcatcctcctcgccgccgccttcaccggtgtcggccacgtccccgccgtggcaaatgcgagttgaacaagtggagcttatcaagagtttcagaattcgggtatgccagggtgcatgccacaagaggtgatatgctggttcagtttgtaagctcaagtacgatggaggttttggaccaatttagaattgtgaagcctgatccggcaaggaggctatggaacaagccagtttaaccatagctgtagtgcatgcaaaagatggagctggagctacttccttatattattgttatgctatataaaagatggcgttgaattacacatcagcgtgttgtctaagttctatacttatctgtgtggtgtatggttctttatgacatttccacatgatagttctttctccctctgtaaaatatattgatcgacaagtgtcattttatagttgtagctaacatcctaacaagggctcctgaacttgagttataatttacagttttgtcagttctaaatttctgaaactacaggaagtaaaaccagcgttgcaaacagggttcctggactagatatctctatctctactactctttaaggccttagtgtaggcgtccacagtataccgtggtgcacggttctgcctgaatacttcaagcatgaatagaaagtaacatatgagcaattctatatccccgcctcataaaaatgactgtgtcattgcaatacacgggcactgtactatgtagaggtgaaatagttagattaagataacaaaatttatacatagttaggatcacaaatggattacgaaacattttctaataacagtataaaacacacatatataacttgtcgtggtattttatatttccgttgcaacgcacgggcactcacctagtcatcaactgaaaattttcatactggcaaaacaaaaaaaaaaggaatccttaaatccatccttttaatagaaagatatggcagtatctaatggctagataatgatagatcccagcagagcagtatggagccagcgacccacatcatgcttaatcagcatcaagaaggttcttttcacaagcagaatgatattttttcagactgagtgagctaacatgaagtattccctctgatcccaaatatattttcactaaagttcacttgattaacaaaatactagttacagaaaaaacattagtgatgctactgctaactccttaattaaatgccctcactcggttttcaatatatttgagatggtgaatcaaacattttccatgaccatgaaatatccctgatgttgttggcacttggcagttaggtactattgaaataacgccattcaagttcatatgtcacaagcaaaaataatcgtgagcagtaaccaaagtaggatggcacataacttggacaattctcattaatgtgcaaaaaccttgcctgaaggacaactgatgttcacgatcaagcatttcaaaaaatattattcaatccaacatcgggcctgtttggatcggcttctggccgtcagaatcggtttctggccaccaaacgcttcgcttctcagcccgtttctgta

SEQ ID NO: 24391 - DNA, 2625 bp, Zea Mays
cgtccaactcgcatccaacgcccctgccgcatcccgcgtccctcccgcactcgtctctgccgcaccgtacgcgcaggcccgcccgcccgctcccattccccacccccacctatggcggcgctctccgcgcccctccgcgccatcgccgccggatcccgcgtcgccgcgtccgaccccgtcaaggtctcgtgcgtgaggagcactggctcagctcacttcggctgcgcctccatcgatctgccctcgcgttctatgggtccggcggcgaagggaaggcaagatgtacaccgcgaggaagaagatccagaaggagaagggccttgagccctccgagttcgaggactccgttgcccaggtgagcatagcgccaacccacctcctctctcctccttttactgcgtttattttccttgaactgctgctctgtttgtttgtggttcccaatgtgtcggggttgtgatgtgctttttggcttgttgtacctgcatgctttatttgatctggagaacgggaaccaggagctcaagagcgacctcaaggacctgtacatcaacaatgctatccagatggatgttaccgggagcaggaaggctgttgtcatccacgtcccataccgcctgcgcaaggcctttaggaagatccatgtcagactcgtcagggagctggagaagaaattcagcggcaagaaaatggctctcttgatgatattttgtttacaccagctagaagatctagggctttcaaggtagaacttttgcagaatacatgtttttattatatctgtttgataggcttaacaactatccgtgtatttgaaccagatcgcagcgatgagatgccctcttccccgaccaccagatcacagcgatggagctggatccggtcgccgctggggcatcctcctcgccagccagtcgcagatgtccctgatggcaagcttcagcaatcgtcaagtacaaagacatcctcccgtgcaaaattcaatttgcccaatcctaatctcttctatatagcctcacagatcgcagcgatggagccggatctggtcgccgctggggcatcctcctcgccgccgccttcaccggtgtcggccacgtccccgccgtggcaaatgcgagttgaacaagtggagcttatcaagagtttcagaattcgggtatgccagggtgcatgccacaagaggtgatatgctggttcagtttgtaagctcaagtacgatggaggttttggaccaatttagaattgtgaagcctgatccggcaaggaggctatggaacaagccagtttaaccatagctgtagtgcatgcaaaagatggagctggagctacttccttatattattgttatgctatataaaagatggcgttgaattacacatcagcgtgttgtctaagttctatacttatctgtgtggtgtatggttctttatgacatttccacatgatagttctttctccctctgtaaaatatattgatcgacaagtgtcattttatagttgtagctaacatcctaacaagggctcctgaacttgagttataatttacagttttgtcagttctaaatttctgaaactacaggaagtaaaaccagcgttgcaaacagggttcctggactagatatctctatctctactactctttaaggccttagtgtaggcgtccacagtataccgtggtgcacggttctgcctgaatacttcaagcatgaatagaaagtaacatatgagcaattctatatccccgcctcataaaaatgactgtgtcattgcaatacacgggcactgtactatgtagaggtgaaatagttagattaagataacaaaatttatacatagttaggatcacaaatggattacgaaacattttctaataacagtataaaacacacatatataacttgtcgtggtattttatatttccgttgcaacgcacgggcactcacctagtcatcaactgaaaattttcatactggcaaaacaaaaaaaaaaggaatccttaaatccatccttttaatagaaagatatggcagtatctaatggctagataatgatagatcccagcagagcagtatggagccagcgacccacatcatgcttaatcagcatcaagaaggttcttttcacaagcagaatgatattttttcagactgagtgagctaacatgaagtattccctctgatcccaaatatattttcactaaagttcacttgattaacaaaatactagttacagaaaaaacattagtgatgctactgctaactccttaattaaatgccctcactcggttttcaatatatttgagatggtgaatcaaacattttccatgaccatgaaatatccctgatgttgttggcacttggcagttaggtactattgaaataacgccattcaagttcatatgtcacaagcaaaaataatcgtgagcagtaaccaaagtaggatggcacataacttggacaattctcattaatgtgcaaaaaccttgcctgaaggacaactgatgttcacgatcaagcatttcaaaaaatattattcaatccaacatcgggcctgtttggatcggcttctggccgtcagaatcggtttctggccaccaaacgcttcgcttctcagcccgtttctgta

SEQ ID NO: 24392 - DNA, 2642 bp, Zea Mays
cgtccaactcgcatccaacgcccctgccgcatcccgcgtccctcccgcactcgtctctgccgcaccgtacgcgcaggcccgcccgcccgctcccattccccacccccacctatggcggcgctctccgcgcccctccgcgccatcgccgccggatcccgcgtcgccgcgtccgaccccgtcaaggtctcgtgcgtgaggagcactggctcagctcacttcggctgcgcctccatcgatctgccctcgcgttctatgggtccggcggcgaagggaaggcaagatgtacaccgcgaggaagaagatccagaaggagaagggccttgagccctccgagttcgaggactccgttgcccaggtgagcatagcgccaacccacctcctctctcctccttttactgcgtttattttccttgaactgctgctctgtttgtttgtggttcccaatgtgtcggggttgtgatgtgctttttggcttgttgtacctgcatgctttatttgatctggagaacgggaaccaggagctcaagagcgacctcaaggacctgtacatcaacaatgctatccagatggatgttaccgggagcaggaaggctgttgtcatccacgtcccataccgcctgcgcaaggcctttaggaagatccatgtcagactcgtcagggagctggagaagaaattcagcggcaagaggtttgacatggtagatctgccattatcagaacaagatgaattaatggacatgctttggaatatctcttgattgaaacaccccagtatgcagaaaatggctctcttgatgatattttgtttacaccagctagaagatctagggctttcaagatcgcagcgatgagatgccctcttccccgaccaccagatcacagcgatggagctggatccggtcgccgctggggcatcctcctcgccagccagtcgcagatgtccctgatggcaagcttcagcaatcgtcaagtacaaagacatcctcccgtgcaaaattcaatttgcccaatcctaatctcttctatatagcctcacagatcgcagcgatggagccggatctggtcgccgctggggcatcctcctcgccgccgccttcaccggtgtcggccacgtccccgccgtggcaaatgcgagttgaacaagtggagcttatcaagagtttcagaattcgggtatgccagggtgcatgccacaagaggtgatatgctggttcagtttgtaagctcaagtacgatggaggttttggaccaatttagaattgtgaagcctgatccggcaaggaggctatggaacaagccagtttaaccatagctgtagtgcatgcaaaagatggagctggagctacttccttatattattgttatgctatataaaagatggcgttgaattacacatcagcgtgttgtctaagttctatacttatctgtgtggtgtatggttctttatgacatttccacatgatagttctttctccctctgtaaaatatattgatcgacaagtgtcattttatagttgtagctaacatcctaacaagggctcctgaacttgagttataatttacagttttgtcagttctaaatttctgaaactacaggaagtaaaaccagcgttgcaaacagggttcctggactagatatctctatctctactactctttaaggccttagtgtaggcgtccacagtataccgtggtgcacggttctgcctgaatacttcaagcatgaatagaaagtaacatatgagcaattctatatccccgcctcataaaaatgactgtgtcattgcaatacacgggcactgtactatgtagaggtgaaatagttagattaagataacaaaatttatacatagttaggatcacaaatggattacgaaacattttctaataacagtataaaacacacatatataacttgtcgtggtattttatatttccgttgcaacgcacgggcactcacctagtcatcaactgaaaattttcatactggcaaaacaaaaaaaaaaggaatccttaaatccatccttttaatagaaagatatggcagtatctaatggctagataatgatagatcccagcagagcagtatggagccagcgacccacatcatgcttaatcagcatcaagaaggttcttttcacaagcagaatgatattttttcagactgagtgagctaacatgaagtattccctctgatcccaaatatattttcactaaagttcacttgattaacaaaatactagttacagaaaaaacattagtgatgctactgctaactccttaattaaatgccctcactcggttttcaatatatttgagatggtgaatcaaacattttccatgaccatgaaatatccctgatgttgttggcacttggcagttaggtactattgaaataacgccattcaagttcatatgtcacaagcaaaaataatcgtgagcagtaaccaaagtaggatggcacataacttggacaattctcattaatgtgcaaaaaccttgcctgaaggacaactgatgttcacgatcaagcatttcaaaaaatattattcaatccaacatcgggcctgtttggatcggcttctggccgtcagaatcggtttctggccaccaaacgcttcgcttctcagcccgtttctgta

SEQ ID NO: 24393 - DNA, 3013 bp, Zea Mays
cgtccaactcgcatccaacgcccctgccgcatcccgcgtccctcccgcactcgtctctgccgcaccgtacgcgcaggcccgcccgcccgctcccattccccacccccacctatggcggcgctctccgcgcccctccgcgccatcgccgccggatcccgcgtcgccgcgtccgaccccgtcaaggtctcgtgcgtgaggagcactggctcagctcacttcggctgcgcctccatcgatctgccctcgcgttctatgggtccggcggcgaagggaaggcaagatgtacaccgcgaggaagaagatccagaaggagaagggccttgagccctccgagttcgaggactccgttgcccaggtgagcatagcgccaacccacctcctctctcctccttttactgcgtttattttccttgaactgctgctctgtttgtttgtggttcccaatgtgtcggggttgtgatgtgctttttggcttgttgtacctgcatgctttatttgatctggagaacgggaaccaggagctcaagagcgacctcaaggacctgtacatcaacaatgctatccagatggatgttaccgggagcaggaaggctgttgtcatccacgtcccataccgcctgcgcaaggcctttaggaagatccatgtcagactcgtcagggagctggagaagaaattcagcggcaagaacaagatgaattaatggacatgctttggaatatctcttgattgaaacaccccagtatgcagaaaatggctctcttgatgatattttgtttacaccagctagaagatctagggctttcaagatcgcagcgatgagatgccctcttccccgaccaccagatcacagcgatggagctggatccggtcgccgctggggcatcctcctcgccagccagtcgcagatgtccctgatggcaagcttcagcaatcgtcaagtacaaagacatcctcccgtgcaaaattcaatttgcccaatcctaatctcttctatatagcctcacagatcgcagcgatggagccggatctggtcgccgctggggcatcctcctcgccgccgccttcaccggtgtcggccacgtccccgccgtggcaaatgcgaggtactgtttcttagttctcaggctaggagtagggtttccttattattggggtgtacccagttggcgtggtgtgcgtcttcgcctcaaacgacatggcgtttggttgaatgagatttcttgtaataattattcaatgaacattcagatttgagatatacttttaagttcataaccttaaattgatatcgaatactgtacatgctcgttaacaaaatcttgccttgatatcagttgaacaagtggagcttatcaagagtttcagaattcgggtatgccagggtgcatgccacaagaggtgatatgctggttcaggtcagtttttgtatttccattccttttcgcaatattttctctcctttcacatgtttgaattagtactttggagattgatgtggggcattgaataacgaaaattccagaaaattcagaaagagggccatttgggaatttcactctgaacaattgttaatctctcttcttcagtttgtaagctcaagtacgatggaggttttggaccaatttagaattgtgaagcctgatccggcaaggaggctatggaacaagccagtttaaccatagctgtagtgcatgcaaaagatggagctggagctacttccttatattattgttatgctatataaaagatggcgttgaattacacatcagcgtgttgtctaagttctatacttatctgtgtggtgtatggttctttatgacatttccacatgatagttctttctccctctgtaaaatatattgatcgacaagtgtcattttatagttgtagctaacatcctaacaagggctcctgaacttgagttataatttacagttttgtcagttctaaatttctgaaactacaggaagtaaaaccagcgttgcaaacagggttcctggactagatatctctatctctactactctttaaggccttagtgtaggcgtccacagtataccgtggtgcacggttctgcctgaatacttcaagcatgaatagaaagtaacatatgagcaattctatatccccgcctcataaaaatgactgtgtcattgcaatacacgggcactgtactatgtagaggtgaaatagttagattaagataacaaaatttatacatagttaggatcacaaatggattacgaaacattttctaataacagtataaaacacacatatataacttgtcgtggtattttatatttccgttgcaacgcacgggcactcacctagtcatcaactgaaaattttcatactggcaaaacaaaaaaaaaaggaatccttaaatccatccttttaatagaaagatatggcagtatctaatggctagataatgatagatcccagcagagcagtatggagccagcgacccacatcatgcttaatcagcatcaagaaggttcttttcacaagcagaatgatattttttcagactgagtgagctaacatgaagtattccctctgatcccaaatatattttcactaaagttcacttgattaacaaaatactagttacagaaaaaacattagtgatgctactgctaactccttaattaaatgccctcactcggttttcaatatatttgagatggtgaatcaaacattttccatgaccatgaaatatccctgatgttgttggcacttggcagttaggtactattgaaataacgccattcaagttcatatgtcacaagcaaaaataatcgtgagcagtaaccaaagtaggatggcacataacttggacaattctcattaatgtgcaaaaaccttgcctgaaggacaactgatgttcacgatcaagcatttcaaaaaatattattcaatccaacatcgggcctgtttggatcggcttctggccgtcagaatcggtttctggccaccaaacgcttcgcttctcagcccgtttctgta

SEQ ID NO: 24394 - DNA, 2413 bp, Zea Mays
tctactttctagtctctactactaattaagtacctattgtagacgttcacagccaaccatggtgcacggttctgccacatccagagcgtccaactcgcatccaacgcccctgccgcatcccgcgtccctcccgcactcgtctctgccgcaccgtacgcgcaggcccgcccgcccgctcccattccccacccccacctatggcggcgctctccgcgcccctccgcgccatcgccgccggatcccgcgtcgccgcgtccgaccccgtcaaggtctcgtgcgtgaggagcactggctcagctcacttcggctgcgcctccatcgatctgccctcgcgttctatgggtccggcggcgaagggaaggcaagatgtacaccgcgaggaagaagatccagaaggagaagggccttgagccctccgagttcgaggactccgttgcccaggagctcaagagcgacctcaaggacctgtacatcaacaatgctatccagatggatgttaccgggagcaggaaggctgttgtcatccacgtcccataccgcctgcgcaaggcctttaggaagatccatgtcagactcgtcagggagctggagaagaaattcagcggcaagatcgcagcgatgagatgccctcttccccgaccaccagatcacagcgatggagctggatccggtcgccgctggggcatcctcctcgccagccagtcgcagatgtccctgatggcaagcttcagcaatcgtcaagtacaaagacatcctcccgtgcaaaattcaatttgcccaatcctaatctcttctatatagcctcacagatcgcagcgatggagccggatctggtcgccgctggggcatcctcctcgccgccgccttcaccggtgtcggccacgtccccgccgtggcaaatgcgagttgaacaagtggagcttatcaagagtttcagaattcgggtatgccagggtgcatgccacaagaggtgatatgctggttcagtttgtaagctcaagtacgatggaggttttggaccaatttagaattgtgaagcctgatccggcaaggaggctatggaacaagccagtttaaccatagctgtagtgcatgcaaaagatggagctggagctacttccttatattattgttatgctatataaaagatggcgttgaattacacatcagcgtgttgtctaagttctatacttatctgtgtggtgtatggttctttatgacatttccacatgatagttctttctccctctgtaaaatatattgatcgacaagtgtcattttatagttgtagctaacatcctaacaagggctcctgaacttgagttataatttacagttttgtcagttctaaatttctgaaactacaggaagtaaaaccagcgttgcaaacagggttcctggactagatatctctatctctactactctttaaggccttagtgtaggcgtccacagtataccgtggtgcacggttctgcctgaatacttcaagcatgaatagaaagtaacatatgagcaattctatatccccgcctcataaaaatgactgtgtcattgcaatacacgggcactgtactatgtagaggtgaaatagttagattaagataacaaaatttatacatagttaggatcacaaatggattacgaaacattttctaataacagtataaaacacacatatataacttgtcgtggtattttatatttccgttgcaacgcacgggcactcacctagtcatcaactgaaaattttcatactggcaaaacaaaaaaaaaaggaatccttaaatccatccttttaatagaaagatatggcagtatctaatggctagataatgatagatcccagcagagcagtatggagccagcgacccacatcatgcttaatcagcatcaagaaggttcttttcacaagcagaatgatattttttcagactgagtgagctaacatgaagtattccctctgatcccaaatatattttcactaaagttcacttgattaacaaaatactagttacagaaaaaacattagtgatgctactgctaactccttaattaaatgccctcactcggttttcaatatatttgagatggtgaatcaaacattttccatgaccatgaaatatccctgatgttgttggcacttggcagttaggtactattgaaataacgccattcaagttcatatgtcacaagcaaaaataatcgtgagcagtaaccaaagtaggatggcacataacttggacaattctcattaatgtgcaaaaaccttgcctgaaggacaactgatgttcacgatcaagcatttcaaaaaatattattcaatccaacatcgggcctgtttggatcggcttctggccgtcagaatcggtttctggccaccaaacgcttcgcttctcagcccgtttctgta

SEQ ID NO: 24395 - DNA, 758 bp, Zea Mays
cgtccaactcgcatccaacgcccctgccgcatcccgcgtccctcccgcactcgtctctgccgcaccgtacgcgcaggcccgcccgcccgctcccattccccacccccacctatggcggcgctctccgcgcccctccgcgccatcgccgccggatcccgcgtcgccgcgtccgaccccgtcaaggtctcgtgcgtgaggagcactggctcagctcacttcggctgcgcctccatcgatctgccctcgcgttctatgggtccggcggcgaagggaaggcaagatgtacaccgcgaggaagaagatccagaaggagaagggccttgagccctccgagttcgaggactccgttgcccaggagctcaagagcgacctcaaggacctgtacatcaacaatgctatccagatggatgttaccgggagcaggaaggctgttgtcatccacgtcccataccgcctgcgcaaggcctttaggaagatccatgtcagactcgtcagggagctggagaagaaattcagcggcaaggtttatatgctaattgtagctactacataaacctgaacggggtaatgcatttagtgggtttgccgcatcagcactggtgccgacgttgacagctgttgatcacaaagccgatgggtgaatttctatttttagtgcgaggccttaatgttagtgcgaggacttcatgttagtgcgaggacttcacgttgacagcactactacataaacctgaactgtgtgattaaacactgaggtg

SEQ ID NO: 24396 - DNA, 1930 bp, Zea Mays
acctctaccgacacgtgggtctacccgccaacctgtccgtttccgccgcctctgacacgcgggcacaggcacgggcctcctccaaaaaaccccccccctccccagcttgtctgcccctctctccatttcgcggaggaagaaaaaggggaccaaaaaacggaaaaggggataggaggaacggatcagcggtggaagcttccagccctagcgcagcaatggcgggttggtgcgagcaggcggtggcgctgctacagcgccccgcggtggcggagatggccgtcgacgtgctgctctgcgcggtgccgatctgggccgccgtcatgatcggcctcgtcgtcggctggtcctggcgcccgcgctggacgggactgctcttcctcggcctccggagccgcctccgcatcctctgggtgccgccaggcctcggggcccggcggctctggttcgcctgcaccgcgctctccgcctgctccgtcgcgaccaagctcatctcctccgcattccgccgctgcagaggcaagcaccaggacagggcctcccccgacgatgatgccgctgcgaccagagacggcggatgtcgcgccgacggcaggctatataggttttgatgattgattagctccgttcgcattgcaccatggaaggattcgcaacataaacttgcctgctgctggggtttcatcgtggctgtggtttatttcttcctcttttgatggttttaaacaaattttgagggtgagcatgatacagtcactgagaaggacctagaacatctcctgcaacttttagataataaggaaagcggggatacagcttggcagaatttgatggagcgtagaacctccaacatgacatacaatgcctggcggcgtgagcctgaggagggacctataatgtactgcagccgcactatttttgaggatgctactcctgaactggttagagatttcttctgggatggtgattttcgtctaaagtgggatcccatgcttgcatattgcaaatctttggatgagttccctcagaatggagcaacaattgtccactggataaaaaagttcccgttcttttgcagtgaccgtgaatacatctttggaggacgcatatgggaatctgggaagacttactattgtgttactaagcctccgttccgcagggtgttccatatccatcattgcccaagaaagaaaaaccgaggcgtgtggagctgtacttctcaagttggcgtattagagctgttcaatcgcctaaacatgtgggtcagcaatctgcgtgtgaagtaactttggttcactatgaggacatgggtataccaaaagatgtagcccgggttgctgttcgtcatggcatgtggggtgctgttaagaaacttcagtctggattcagagcataccagcaaatgagacacacagaaactaccctgtcacacagcgtcatcatggctcgaatgaccaccaagatatccatcacagcttcaaatgatcccttggaccatgacctctcggttgccgataaaatcagtgacgagaatgacagctccaatgcagttcaacatggttttgattggaagtggttggtggttgggggtgcagtggctgcggtttgtgtgctcaacaccggtctggtaggcaaggccgtcttgcttggagcagcgagaaggcaagcaaagaagtgatatgaggagcagccttccagccagacattcatcagattgtagctacgatcgtacaggcaaaaaaatgttgagaaaataggtggggttcaacagagataactgctgtttgaggcgtatgcaatgggtctatcggatctagtttcacagtatagtctattttatttagagataaaaatcgcttgtttaagaataagtaaagctctttatttaagaagaggtgtttgagaattaagacggaatgaccgttttcttcct

SEQ ID NO: 24397 - DNA, 1834 bp, Zea Mays
acctctaccgacacgtgggtctacccgccaacctgtccgtttccgccgcctctgacacgcgggcacaggcacgggcctcctccaaaaaaccccccccctccccagcttgtctgcccctctctccatttcgcggaggaagaaaaaggggaccaaaaaacggaaaaggggataggaggaacggatcagcggtggaagcttccagccctagcgcagcaatggcgggttggtgcgagcaggcggtggcgctgctacagcgccccgcggtggcggagatggccgtcgacgtgctgctctgcgcggtgccgatctgggccgccgtcatgatcggcctcgtcgtcggctggtcctggcgcccgcgctggacgggactgctcttcctcggcctccggagccgcctccgcatcctctgggtgccgccaggcctcggggcccggcggctctggttcgcctgcaccgcgctctccgcctgctccgtcgcgaccaagctcatctcctccgcattccgccgctgcagaggcaagcaccaggacagggcctcccccgacgatgatgccgctgcgaccagagacggcggatgtcgcgccgacggcaggctatataggttttgatgattgattagctccgttcgcattgcaccatggaaggattcgcaacataaacttgcctgctgctggggtttcatcgtggctgtggtttatttcttcctcttttgatggttttaaacaaattttgagggtgagcatgatacagtcactgagaaggacctagaacatctcctgcaacttttagataataaggaaagcggggatacagcttggcagaatttgatggagcgtagaacctccaacatgacatacaatgcctggcggcgtgagcctgaggagggacctataatgtactgcagccgcactatttttgaggatgctactcctgaactggttagagatttcttctgggatggtgattttcgtctaaagtgggatcccatgcttgcatattgcaaatctttggatgagttccctcagaatggagcaacaattgtccactggataaaaaagttcccgttcttttgcagtgaccgtgaatacatctttggaggacgcatatgggaatctgggaagacttactattgtgttactaagttcaatcgcctaaacatgtgggtcagcaatctgcgtgtgaagtaactttggttcactatgaggacatgggtataccaaaagatgtagcccgggttgctgttcgtcatggcatgtggggtgctgttaagaaacttcagtctggattcagagcataccagcaaatgagacacacagaaactaccctgtcacacagcgtcatcatggctcgaatgaccaccaagatatccatcacagcttcaaatgatcccttggaccatgacctctcggttgccgataaaatcagtgacgagaatgacagctccaatgcagttcaacatggttttgattggaagtggttggtggttgggggtgcagtggctgcggtttgtgtgctcaacaccggtctggtaggcaaggccgtcttgcttggagcagcgagaaggcaagcaaagaagtgatatgaggagcagccttccagccagacattcatcagattgtagctacgatcgtacaggcaaaaaaatgttgagaaaataggtggggttcaacagagataactgctgtttgaggcgtatgcaatgggtctatcggatctagtttcacagtatagtctattttatttagagataaaaatcgcttgtttaagaataagtaaagctctttatttaagaagaggtgtttgagaattaagacggaatgaccgttttcttcct

SEQ ID NO: 24398 - DNA, 2143 bp, Zea Mays
gaccccggtcccgttcccacgcggagccgcggacacaccttcctcctcctcccgtcgccatggacgtctgctcctccacgatctagcctgtggctattggttagcacgccggcgccggcgccggcgaccctaaagggagcgttgacgttgtatcccgagattttatgctctaagctttcgagccgcgtcatgggaaggaagcctgacgcggtagccaaatcgtatcattccggtggcggcggcgctgccgcctcctcgccgagggcagcgaggaaggcgtcgccttctccggtgttcctgggaaccgcgctgttcgttctagggtttgtgtccctctttacgggacacgtggtcaccgacgctgactgggcgcggatccgcagtcgatggcgacctaaacagcatagaaactacgaacctatcgatatttgggaatccaagtattccagcatgtactacggatgcagcgagagaagcacgggtttcagatctgctgtgccagagaacagttccactggttacttgttgattgctactagtgggggcctgaatcagcagcgcatagggataacagatgctgttgtagttgcctggattttgaatgccacacttgttgtacctgagttagaccaccactcgttctggaaagacgacagtgacttctctgacatttttgacgtggagtggttcatttcccacctatcgaaggatgtaactattgtcaaaaggatcccttatgaagtaatgttgtcaatggataaactaccatggactatgcgcgcacctaggaaatcggtgcctgagttttatattgatgaagttctgccaatactcatgcgaaggctttgcaattaacaaagtttgattataggctcactagcgatcttgatgaagatttgcaaaagttacgttgccgagtaaattttcatgctttaaaatttacgagttctatacacgccatgggtcagaaacttgttcaaaagctgagactaatgaacacacgatatgtcgccattcatttgaggtttgaacctgacatgcttgcattttctggctgttactacggtggcggtgaaaaagaaagaaaggaattgggtgaaattaggaaacgatgggatacattacctgagttgagtgctgaagatgaacgcagcagaggaaaatgtccactgactcctcatgaagtcgggttaatgctccgagctcttggttttggcaacgatacacttctgtatgttgcttctggagaaatatatggtggagatagtactctccaacctcttaggggactcttcccaaatttctatactaaggagaagcttgctggggatgatttaaatcccttccttcctttttcttcacggctggctgcaattgacttcattgtttgtgatgagagtgatgtctttgttacgaataataatgggaacatggccaaagttttagctggacggaggcgatacatgggccacaagagaactattcgcccaaatgcaaagaaactcaatgtactatttcaaacacggaatcaattgagctgggataccttttcacggaaggtacagagagttcagaggggtcttatgggggagccggacgatatcagaccaaaacaggatgacttccatgaatttccatcatcttgcatctgctcaagaaaacctgggaacatatcggccacaacatgaaaaccaaccggacagggcaaatgcagcgaggatgctgctagttgggcacttactttgacagtagggaaacatatgcttacgttgaaagaaacacggtagaattaacaaggcaaggagggatgcatagtgcatatatgtcatggctcggtaagatgccacgtcaaggagagttgccaactggtgatgtcatgcctgtaaattattgttcgtacatgattaattctttaaacatgttgtccgctcgctgttcctcatccgctttcagactacgtcttggctatgcaccatcattgggcttaggtgggtctttgtagatcaagtagcttgaatcggctcgttagtgatagtgaattagtgatgggaggatagggtttagaggtttctcggtcggaaccgttgtcatgaccttttattaatgaaataaatattgcagggtggtctttggccgagttttt

SEQ ID NO: 24399 - DNA, 2118 bp, Zea Mays
gaccccggtcccgttcccacgcggagccgcggacacaccttcctcctcctcccgtcgccatggacgtctgctcctccacgatctagcctgtggctattggttagcacgccggcgccggcgccggcgaccctaaagggagcgttgacgttgtatcccgagattttatgctctaagctttcgagccgcgtcatgggaaggaagcctgacgcggtagccaaatcgtatcattccggtggcggcggcgctgccgcctcctcgccgagggcagcgaggaaggcgtcgccttctccggtgttcctgggaaccgcgctgttcgttctagggtttgtgtccctctttacgggacacgtggtcaccgacgctgactgggcgcggatccgcagtcgatggcgacctaaacagcatagaaactacgaacctatcgatatttgggaatccaagtattccagcatgtactacggatgcagcgagagaagcacgggtttcagatctgctgtgccagagaacagttccactggttacttgttgattgctactagtgggggcctgaatcagcagcgcatagggataacagatgctgttgtagttgcctggattttgaatgccacacttgttgtacctgagttagaccaccactcgttctggaaagacgacagtgacttctctgacatttttgacgtggagtggttcatttcccacctatcgaaggatgtaactattgtcaaaaggatcccttatgaagtaatgttgtcaatggataaactaccatggactatgcgcgcacctaggaaatcggtgcctgagttttatattgatgaagttctgccaatactcatgcgaaggcgagctcactagcgatcttgatgaagatttgcaaaagttacgttgccgagtaaattttcatgctttaaaatttacgagttctatacacgccatgggtcagaaacttgttcaaaagctgagactaatgaacacacgatatgtcgccattcatttgaggtttgaacctgacatgcttgcattttctggctgttactacggtggcggtgaaaaagaaagaaaggaattgggtgaaattaggaaacgatgggatacattacctgagttgagtgctgaagatgaacgcagcagaggaaaatgtccactgactcctcatgaagtcgggttaatgctccgagctcttggttttggcaacgatacacttctgtatgttgcttctggagaaatatatggtggagatagtactctccaacctcttaggggactcttcccaaatttctatactaaggagaagcttgctggggatgatttaaatcccttccttcctttttcttcacggctggctgcaattgacttcattgtttgtgatgagagtgatgtctttgttacgaataataatgggaacatggccaaagttttagctggacggaggcgatacatgggccacaagagaactattcgcccaaatgcaaagaaactcaatgtactatttcaaacacggaatcaattgagctgggataccttttcacggaaggtacagagagttcagaggggtcttatgggggagccggacgatatcagaccaaaacaggatgacttccatgaatttccatcatcttgcatctgctcaagaaaacctgggaacatatcggccacaacatgaaaaccaaccggacagggcaaatgcagcgaggatgctgctagttgggcacttactttgacagtagggaaacatatgcttacgttgaaagaaacacggtagaattaacaaggcaaggagggatgcatagtgcatatatgtcatggctcggtaagatgccacgtcaaggagagttgccaactggtgatgtcatgcctgtaaattattgttcgtacatgattaattctttaaacatgttgtccgctcgctgttcctcatccgctttcagactacgtcttggctatgcaccatcattgggcttaggtgggtctttgtagatcaagtagcttgaatcggctcgttagtgatagtgaattagtgatgggaggatagggtttagaggtttctcggtcggaaccgttgtcatgaccttttattaatgaaataaatattgcagggtggtctttggccgagttttt

SEQ ID NO: 24400 - DNA, 2059 bp, Zea Mays
gaccccggtcccgttcccacgcggagccgcggacacaccttcctcctcctcccgtcgccatggacgtctgctcctccacgatctagcctgtggctattggttagcacgccggcgccggcgccggcgaccctaaagggagcgttgacgttgtatcccgagattttatgctctaagctttcgagccgcgtcatgggaaggaagcctgacgcggtagccaaatcgtatcattccggtggcggcggcgctgccgcctcctcgccgagggcagcgaggaaggcgtcgccttctccggtgttcctgggaaccgcgctgttcgttctagggtttgtgtccctctttacgggacacgtggtcaccgacgctgactgggcgcggatccgcagtcgatggcgacctaaacagctgctgtgccagagaacagttccactggttacttgttgattgctactagtgggggcctgaatcagcagcgcatagggataacagatgctgttgtagttgcctggattttgaatgccacacttgttgtacctgagttagaccaccactcgttctggaaagacgacagtgacttctctgacatttttgacgtggagtggttcatttcccacctatcgaaggatgtaactattgtcaaaaggatcccttatgaagtaatgttgtcaatggataaactaccatggactatgcgcgcacctaggaaatcggtgcctgagttttatattgatgaagttctgccaatactcatgcgaaggcgagctttgcaattaacaaagtttgattataggctcactagcgatcttgatgaagatttgcaaaagttacgttgccgagtaaattttcatgctttaaaatttacgagttctatacacgccatgggtcagaaacttgttcaaaagctgagactaatgaacacacgatatgtcgccattcatttgaggtttgaacctgacatgcttgcattttctggctgttactacggtggcggtgaaaaagaaagaaaggaattgggtgaaattaggaaacgatgggatacattacctgagttgagtgctgaagatgaacgcagcagaggaaaatgtccactgactcctcatgaagtcgggttaatgctccgagctcttggttttggcaacgatacacttctgtatgttgcttctggagaaatatatggtggagatagtactctccaacctcttaggggactcttcccaaatttctatactaaggagaagcttgctggggatgatttaaatcccttccttcctttttcttcacggctggctgcaattgacttcattgtttgtgatgagagtgatgtctttgttacgaataataatgggaacatggccaaagttttagctggacggaggcgatacatgggccacaagagaactattcgcccaaatgcaaagaaactcaatgtactatttcaaacacggaatcaattgagctgggataccttttcacggaaggtacagagagttcagaggggtcttatgggggagccggacgatatcagaccaaaacaggatgacttccatgaatttccatcatcttgcatctgctcaagaaaacctgggaacatatcggccacaacatgaaaaccaaccggacagggcaaatgcagcgaggatgctgctagttgggcacttactttgacagtagggaaacatatgcttacgttgaaagaaacacggtagaattaacaaggcaaggagggatgcatagtgcatatatgtcatggctcggtaagatgccacgtcaaggagagttgccaactggtgatgtcatgcctgtaaattattgttcgtacatgattaattctttaaacatgttgtccgctcgctgttcctcatccgctttcagactacgtcttggctatgcaccatcattgggcttaggtgggtctttgtagatcaagtagcttgaatcggctcgttagtgatagtgaattagtgatgggaggatagggtttagaggtttctcggtcggaaccgttgtcatgaccttttattaatgaaataaatattgcagggtggtctttggccgagttttt

SEQ ID NO: 24401 - DNA, 2040 bp, Zea Mays
gaccccggtcccgttcccacgcggagccgcggacacaccttcctcctcctcccgtcgccatggacgtctgctcctccacgatctagcctgtggctattggttagcacgccggcgccggcgccggcgaccctaaagggagcgttgacgttgtatcccgagattttatgctctaagctttcgagccgcgtcatgggaaggaagcctgacgcggtagccaaatcgtatcattccggtggcggcggcgctgccgcctcctcgccgagggcagcgaggaaggcgtcgccttctccggtgttcctgggaaccgcgctgttcgttctagggtttgtgtccctctttacgggacacgtggtcaccgacgctgactgggcgcggatccgcagtcgatggcgacctaaacagctgctgtgccagagaacagttccactggttacttgttgattgctactagtgggggcctgaatcagcagcgcatagggttgcctggattttgaatgccacacttgttgtacctgagttagaccaccactcgttctggaaagacgacagtgacttctctgacatttttgacgtggagtggttcatttcccacctatcgaaggatgtaactattgtcaaaaggatcccttatgaagtaatgttgtcaatggataaactaccatggactatgcgcgcacctaggaaatcggtgcctgagttttatattgatgaagttctgccaatactcatgcgaaggcgagctttgcaattaacaaagtttgattataggctcactagcgatcttgatgaagatttgcaaaagttacgttgccgagtaaattttcatgctttaaaatttacgagttctatacacgccatgggtcagaaacttgttcaaaagctgagactaatgaacacacgatatgtcgccattcatttgaggtttgaacctgacatgcttgcattttctggctgttactacggtggcggtgaaaaagaaagaaaggaattgggtgaaattaggaaacgatgggatacattacctgagttgagtgctgaagatgaacgcagcagaggaaaatgtccactgactcctcatgaagtcgggttaatgctccgagctcttggttttggcaacgatacacttctgtatgttgcttctggagaaatatatggtggagatagtactctccaacctcttaggggactcttcccaaatttctatactaaggagaagcttgctggggatgatttaaatcccttccttcctttttcttcacggctggctgcaattgacttcattgtttgtgatgagagtgatgtctttgttacgaataataatgggaacatggccaaagttttagctggacggaggcgatacatgggccacaagagaactattcgcccaaatgcaaagaaactcaatgtactatttcaaacacggaatcaattgagctgggataccttttcacggaaggtacagagagttcagaggggtcttatgggggagccggacgatatcagaccaaaacaggatgacttccatgaatttccatcatcttgcatctgctcaagaaaacctgggaacatatcggccacaacatgaaaaccaaccggacagggcaaatgcagcgaggatgctgctagttgggcacttactttgacagtagggaaacatatgcttacgttgaaagaaacacggtagaattaacaaggcaaggagggatgcatagtgcatatatgtcatggctcggtaagatgccacgtcaaggagagttgccaactggtgatgtcatgcctgtaaattattgttcgtacatgattaattctttaaacatgttgtccgctcgctgttcctcatccgctttcagactacgtcttggctatgcaccatcattgggcttaggtgggtctttgtagatcaagtagcttgaatcggctcgttagtgatagtgaattagtgatgggaggatagggtttagaggtttctcggtcggaaccgttgtcatgaccttttattaatgaaataaatattgcagggtggtctttggccgagttttt

SEQ ID NO: 24402 - DNA, 2150 bp, Zea Mays
gaccccggtcccgttcccacgcggagccgcggacacaccttcctcctcctcccgtcgccatggacgtctgctcctccacgatctagcctgtggctattggttagcacgccggcgccggcgccggcgaccctaaagggagcgttgacgttgtatcccgagattttatgctctaagctttcgagccgcgtcatgggaaggaagcctgacgcggtagccaaatcgtatcattccggtggcggcggcgctgccgcctcctcgccgagggcagcgaggaaggcgtcgccttctccggtgttcctgggaaccgcgctgttcgttctagggtttgtgtccctctttacgggacacgtggtcaccgacgctgactgggcgcggatccgcagtcgatggcgacctaaacagcatagaaactacgaacctatcgatatttgggaatccaagtattccagcatgtactacggatgcagcgagagaagcacgggtttcagatctgctgtgccagagaacagttccactggttacttgttgattgctactagtgggggcctgaatcagcagcgcatagggcttgcagataacagatgctgttgtagttgcctggattttgaatgccacacttgttgtacctgagttagaccaccactcgttctggaaagacgacagtgacttctctgacatttttgacgtggagtggttcatttcccacctatcgaaggatgtaactattgtcaaaaggatcccttatgaagtaatgttgtcaatggataaactaccatggactatgcgcgcacctaggaaatcggtgcctgagttttatattgatgaagttctgccaatactcatgcgaaggctttgcaattaacaaagtttgattataggctcactagcgatcttgatgaagatttgcaaaagttacgttgccgagtaaattttcatgctttaaaatttacgagttctatacacgccatgggtcagaaacttgttcaaaagctgagactaatgaacacacgatatgtcgccattcatttgaggtttgaacctgacatgcttgcattttctggctgttactacggtggcggtgaaaaagaaagaaaggaattgggtgaaattaggaaacgatgggatacattacctgagttgagtgctgaagatgaacgcagcagaggaaaatgtccactgactcctcatgaagtcgggttaatgctccgagctcttggttttggcaacgatacacttctgtatgttgcttctggagaaatatatggtggagatagtactctccaacctcttaggggactcttcccaaatttctatactaaggagaagcttgctggggatgatttaaatcccttccttcctttttcttcacggctggctgcaattgacttcattgtttgtgatgagagtgatgtctttgttacgaataataatgggaacatggccaaagttttagctggacggaggcgatacatgggccacaagagaactattcgcccaaatgcaaagaaactcaatgtactatttcaaacacggaatcaattgagctgggataccttttcacggaaggtacagagagttcagaggggtcttatgggggagccggacgatatcagaccaaaacaggatgacttccatgaatttccatcatcttgcatctgctcaagaaaacctgggaacatatcggccacaacatgaaaaccaaccggacagggcaaatgcagcgaggatgctgctagttgggcacttactttgacagtagggaaacatatgcttacgttgaaagaaacacggtagaattaacaaggcaaggagggatgcatagtgcatatatgtcatggctcggtaagatgccacgtcaaggagagttgccaactggtgatgtcatgcctgtaaattattgttcgtacatgattaattctttaaacatgttgtccgctcgctgttcctcatccgctttcagactacgtcttggctatgcaccatcattgggcttaggtgggtctttgtagatcaagtagcttgaatcggctcgttagtgatagtgaattagtgatgggaggatagggtttagaggtttctcggtcggaaccgttgtcatgaccttttattaatgaaataaatattgcagggtggtctttggccgagttttt

SEQ ID NO: 24403 - DNA, 2757 bp, Zea Mays
cacgctccactctccagaccccggtcccgttcccacgcggagccgcggacacaccttcctcctcctcccgtcgccatggacgtctgctcctccacgatctagcctgtggctattggttagcacgccggcgccggcgccggcgaccctaaagggagcgttgacgttgtatcccgagattttatgctctaagctttcgagccgcgtcatgggaaggaagcctgacgcggtagccaaatcgtatcattccggtggcggcggcgctgccgcctcctcgccgagggcagcgaggaaggcgtcgccttctccggtgttcctgggaaccgcgctgttcgttctagggtttgtgtccctctttacgggacacgtggtcaccgacgctgactgggcgcggatccgcagtcgatggcgacctaaacagcatagaaactacgaacctatcgatatttgggaatccaagtattccagcatgtactacggatgcagcgagagaagcacgggtttcagatctgctgtgccagagaacagttccactggttacttgttgattgctactagtgggggcctgaatcagcagcgcatagggataacagatgctgttgtagttgcctggattttgaatgccacacttgttgtacctgagttagaccaccactcgttctggaaagacgacagtgacttctctgacatttttgacgtggagtggttcatttcccacctatcgaaggatgtaactattgtcaaaaggatcccttatgaagtaatgttgtcaatggataaactaccatggactatgcgcgcacctaggaaatcggtgcctgagttttatattgatgaagttctgccaatactcatgcgaaggcgagtaagtaacctgcaaaacctgtgtaatggcctggaacttatcttgcatattgtttgattacaatattttggctggctgggtgttaagatgagcagtagataatagtttatcttttgcatggttcaaaaaactcgacctgcggggtaatacaacctcggacattatattaagaaaaagatctcacgcagattgagaaaatcccgaacccttgtctcacccatgcacaatggcaccgtaggccatgtaagaacgaccgcgaccgggaaccgggtcttagacctgtgctttgatgtgggatatacaaggggatttttttacctctagcctaaaattcgctctcacggagagtcgaactcaggacgtgaggagtgctactcagaccacctaaccaactcaggctagaggccctttggccttttgcatggtttagttatggccctttgtgttcaaaacatgagcatatgttataatttcctttggaaggtatttgctatgtgtattaatcataaataaatatatcaggtgtcaagtgactgtagacaaatgcaaagtagacatacttccctattgactgaacagtcttaatctttgcaggctttgcaattaacaaagtttgattataggctcactagcgatcttgatgaagatttgcaaaagttacgttgccgagtaaattttcatgctttaaaatttacgagttctatacacgccatgggtcagaaacttgttcaaaagctgagactaatgaacacacgatatgtcgccattcatttgaggtttgaacctgacatgcttgcattttctggctgttactacggtggcggtgaaaaagaaagaaaggaattgggtgaaattaggaaacgatgggatacattacctgagttgagtgctgaagatgaacgcagcagaggaaaatgtccactgactcctcatgaagtcgggttaatgctccgagctcttggttttggcaacgatacacttctgtatgttgcttctggagaaatatatggtggagatagtactctccaacctcttaggggactcttcccaaatttctatactaaggagaagcttgctggggatgatttaaatcccttccttcctttttcttcacggctggctgcaattgacttcattgtttgtgatgagagtgatgtctttgttacgaataataatgggaacatggccaaagttttagctggacggaggcgatacatgggccacaagagaactattcgcccaaatgcaaagaaactcaatgtactatttcaaacacggaatcaattgagctgggataccttttcacggaaggtacagagagttcagaggggtcttatgggggagccggacgatatcagaccaaaacaggatgacttccatgaatttccatcatcttgcatctgctcaagaaaacctgggaacatatcggccacaacatgaaaaccaaccggacagggcaaatgcagcgaggatgctgctagttgggcacttactttgacagtagggaaacatatgcttacgttgaaagaaacacggtagaattaacaaggcaaggagggatgcatagtgcatatatgtcatggctcggtaagatgccacgtcaaggagagttgccaactggtgatgtcatgcctgtaaattattgttcgtacatgattaattctttaaacatgttgtccgctcgctgttcctcatccgctttcagactacgtcttggctatgcaccatcattgggcttaggtgggtctttgtagatcaagtagcttgaatcggctcgttagtgatagtgaattagtgatgggaggatagggtttagaggtttctcggtcggaaccgttgtcatgaccttttattaatgaaataaatattgcagggtggtctttggccgagttttt

SEQ ID NO: 24404 - DNA, 2194 bp, Zea Mays
atgaaactcagcccacctacgtacggttcgtcacgctccactctccagaccccggtcccgttcccacgcggagccgcggacacaccttcctcctcctcccgtcgccatggacgtctgctcctccacgatctagcctgtggctattggttagcacgccggcgccggcgccggcgaccctaaagggagcgttgacgttgtatcccgagattttatgctctaagctttcgagccgcgtcatgggaaggaagcctgacgcggtagccaaatcgtatcattccggtggcggcggcgctgccgcctcctcgccgagggcagcgaggaaggcgtcgccttctccggtgttcctgggaaccgcgctgttcgttctagggtttgtgtccctctttacgggacacgtggtcaccgacgctgactgggcgcggatccgcagtcgatggcgacctaaacagcatagaaactacgaacctatcgatatttgggaatccaagtattccagcatgtactacggatgcagcgagagaagcacgggtttcagatctgctgtgccagagaacagttccactggttacttgttgattgctactagtgggggcctgaatcagcagcgcatagggttgcctggattttgaatgccacacttgttgtacctgagttagaccaccactcgttctggaaagacgacagtgacttctctgacatttttgacgtggagtggttcatttcccacctatcgaaggatgtaactattgtcaaaaggatcccttatgaagtaatgttgtcaatggataaactaccatggactatgcgcgcacctaggaaatcggtgcctgagttttatattgatgaagttctgccaatactcatgcgaaggcgagctttgcaattaacaaagtttgattataggctcactagcgatcttgatgaagatttgcaaaagttacgttgccgagtaaattttcatgctttaaaatttacgagttctatacacgccatgggtcagaaacttgttcaaaagctgagactaatgaacacacgatatgtcgccattcatttgaggtttgaacctgacatgcttgcattttctggctgttactacggtggcggtgaaaaagaaagaaaggaattgggtgaaattaggaaacgatgggatacattacctgtaagactcttgaaacttggagttgagtgctgaagatgaacgcagcagaggaaaatgtccactgactcctcatgaagtcgggttaatgctccgagctcttggttttggcaacgatacacttctgtatgttgcttctggagaaatatatggtggagatagtactctccaacctcttaggggactcttcccaaatttctatactaaggagaagcttgctggggatgatttaaatcccttccttcctttttcttcacggctggctgcaattgacttcattgtttgtgatgagagtgatgtctttgttacgaataataatgggaacatggccaaagttttagctggacggaggcgatacatgggccacaagagaactattcgcccaaatgcaaagaaactcaatgtactatttcaaacacggaatcaattgagctgggataccttttcacggaaggtacagagagttcagaggggtcttatgggggagccggacgatatcagaccaaaacaggatgacttccatgaatttccatcatcttgcatctgctcaagaaaacctgggaacatatcggccacaacatgaaaaccaaccggacagggcaaatgcagcgaggatgctgctagttgggcacttactttgacagtagggaaacatatgcttacgttgaaagaaacacggtagaattaacaaggcaaggagggatgcatagtgcatatatgtcatggctcggtaagatgccacgtcaaggagagttgccaactggtgatgtcatgcctgtaaattattgttcgtacatgattaattctttaaacatgttgtccgctcgctgttcctcatccgctttcagactacgtcttggctatgcaccatcattgggcttaggtgggtctttgtagatcaagtagcttgaatcggctcgttagtgatagtgaattagtgatgggaggatagggtttagaggtttctcggtcggaaccgttgtcatgaccttttattaatgaaataaatattgcagggtggtctttggccgagttttt

SEQ ID NO: 24405 - DNA, 1428 bp, Zea Mays
cggaggcttgggctcggccgtagcattgtacctgactgcatgtggcgttggttctctaggagttgttgatggagacgacgttgaacttggcaacctccatcgtcaggtcatacacgtagaagcatacgttgggcaacctaaggtgaaatctgcagcagctgcttgccgggcgatgaactcttctgtcaacgtgttggagcatcatctcaaactgaaatcgaaaaatgctttggatgttgtgaggcaatatgacatagttgttgatgcaaccaacagtcctgctagtcggtacatgcttagtgattgctgtgtccttctcaacaagcctctcatatccggttcaacaattggtctagaaggacagttgatggtttataaccataatggaagtccatgttaccggtgtcattttccaaacccaacgacgacatgccagactgctagttctgctaattatactcttggggttgttccaggagtgaatggctgcctacaagctcttgaaactataaaggttgcaactcgtgttggtgaacccctttgtggaagaatgctactcttcgacgcattatcctcccgttttaagactgttaataagatacataaaaggtcatcaacttgcacagtctgtggagataatcctgatttaactcaagacagctttgttacgtttgattatgatagcttgacgcagtctacaaagtctagcaagccgatggcaatccagacgccgctcccaaagagcgcccggaccagctgcagagaatacaagcgggtggtcgacagcggcaggacgcacctgctgttggacgtgcggccggtgcaccacttccagatcgcctccatagccaactcggtgaacatcccgctgcacgagctgcgggagaggcttccccggctcagggacgccctgaccgaagtggcaggcgtgtcgcactcgcacggcaagcactattgccctctgtacttcgtctgccagaatggcgacgactccgaggcggccgtcggcgtcctccgggagagcggcttcccttacgccggcgctatagccggcggccttgagtgttgggcgcgagaagttgatcccggtttccctgtgtactggtgattttacaggaatagtatttataaggttttggttttttttttttgaccgatggggttgtgattgtgatagccaacaaaaataactgccatgaaaactgtgaagctgcaagctggactccagttctggcccaaaagagaaaagacagtgctggattttgctttatattttagcctgctgccctcttttctcaggaaaatgggcctgccatccattggcccataagcggtggcgcgttaacagtctggcagaatcacaagtagcatgaacaccagttattgatacagccaccctttatgtactactagttagtaccatataat

SEQ ID NO: 24406 - DNA, 1279 bp, Zea Mays
ttcactggactatcggccccacgcttgggaaaccccacacgacagtggcttcaacacgttacaacgccagcgcctaacggaaaatatctcgagaggtcggggtggtcggtatcatgctagttgtttcgttcgctggttaatgagtcgagctctttcccttctcgcttcaaaccaaaccaaaatcggagcggcggagcaaaacgatccgtagcctcgcttaccttcgattcagctcgaccagggcactaaccgggaagccaatgccgcgcgagtcgcgagatctgtagcgccaatcggcttcaccggcggcggggtgggcatggaagcgcagaacggctcctgcggaggggcgcccgtggtgctcaacgtgtacgacctgacgcccatgaacaactacctctactggttcggcctcggtattttccactctggaatcgaagttcatggtatggagtacggatttggagcacaccagtttccggcaagtggagtattcgaggtggaaccgaaaagctgtcctggtttcatctacagaagatctgtgtggatgggcacaactgacttgtctagagcagagttccgctcgttcattgaaaatcttgcaggaaagtacaacggcaacacgtatcatttgatttcgaagaactgcaaccattttacagatgatgtctgtaagagcttgaccaagaaatcaatccctgggtgggtgaataggctagcaagagtgggttggtatcaccagtttaacctgtctttgtcctgtcatgcttcagagtttaggtatctgatttctttccccccaatgtttaggttcattttttaattgtcttctaccagaaagcatccaagtttccacagtaagacacgttcctactcaatctgcattttctggtactggtgatgattaggagtgataaagttcaccgcaaaatgatggatctgaatgttatcaggtacgtggtccaacatctgaactgaaggaggagcacgttattctcctaacagagatcatcccgttcctaggcgagttgcttgaggacgtggagctttctatcaagacactgtcgcaggagatcttgaaagagacgtaaactctgagccgtgaccgtgagagcctccagcagtgtacttctgacgtagaacatcagccatgctcatttcctgaaaaccacatcgacgtatgtaccttgtaatttatgtaggttacccttaaaaggtgtatgtaaataaattcgaatccttacaaatttgggccaataatcatggttcgaaatttttt

SEQ ID NO: 24407 - DNA, 2399 bp, Zea Mays
ttcactggactatcggccccacgcttgggaaaccccacacgacagtggcttcaacacgttacaacgccagcgcctaacggaaaatatctcgagaggtcggggtggtcggtatcatgctagttgtttcgttcgctggttaatgagtcgagctctttcccttctcgcttcaaaccaaaccaaaatcggagcggcggagcaaaacgatccgtagcctcgcttaccttcgattcagctcgaccagggcactaaccgggaagccaatgccgcgcgagtcgcgagatctgtagcgccaatcggcttcaccggcggcggggtgggcatggaagcgcagaacggctcctgcggaggggcgcccgtggtgctcaacgtgtacgacctgacgcccatgaacaactacctctactggttcggcctcggtattttccactctggaatcgaagttcatggtatggagtacggatttggagcacaccagtttccggcaagtggagtattcgaggtggaaccgaaaagctgtcctggtttcatctacagaagatctgtgtggatgggcacaactgacttgtctagagcagagttccgctcgttcattgaaaatcttgcaggaaagtacaacggcaacacgtatcatttgatttcgaagaactgcaaccattttacagatgatgtctgtaagagcttgaccaagaaatcaatccctgggtgggtgaataggctagcaagagtgggttcattttttaattgtcttctaccagaaagcatccaagtttccacagtaagacacgttcctactcaatctgcattttctggtgagtttgtgcctggaaattcttcttattaggatttgtgcagttgacctgtttttttttaataaaaactgttacgtaggcggtagacgcctagaccttgttgtgaaactttacatttttaactgtcctataaacatcaacaaattgaacctccgttggactggtattccttggtgtaatgagtggctgaccatcctgaatactttactagcaagtaatctggtagacttttggccatattcgaaataaccacccagcctagtaaaaaagaggtaatgataatgtatagctagtaagttagataggactgagttatcaacactaagattattagtttctcagaattcattttcttcagctcaatatcttgtgaccttctataagccactccagattctaactgagacttcaaacaagggcggatctacacccgggccacccggtccagggcccggggcttgatccatataactgagccttagacccgtgctctggcgtgggatagacgaggagatttttttaaccacggcctggaattcgctcccacggggagtcgaactcagtaactgagtgctactcataccacctaaccaactcagatgatgatatggattcggtatcttcatcggttcttggagacagtgatctgggagagttagaccaacaccttctgccatcgtcaactgctgacgtccattctatagacgtgccaccaaatctagccaaggatcttctctgaattatccaaccctttggattccacgtagcaggatagcttaaattgctgcagttgatgtccacttagtgcctctccaggtggcataggaatgcaggagtgtagatgaatgctgctgattgtgttgattctttgccactgaatttgttacatacgcacacacagctctcgacagaaatgacgtgctttctaattattttcctgttatgacttgtgacttcatcgtagatttgtaggtacctttgtgttcgagtaatactgtacgcactgctgcactagagtctagaaaatgccgtcactaagggggcgtttgtttgggattataatctacccagattatataatctaacaacttagttctaaagtggttggaatatataatctggatagattataatcccaaacaaatgcctcctaattatggcacaaatggaagttgtgccttttgaaagtgctcatttggaagagaagaaatgttctaaaaatttcaggggattattaggatttgggaaatcaatctttgtatgtattgacaaagaaacatacatactatatgtatgcttagtagataaagatcatgtcaacaaatgcatgtaacatatactctcttcgtcccaaaatagtattcgttttagagtgttaatggattcatacaatatttgatgtatgtgttttatatgcgtgtctagatttattgtcatccattttaataaggacaaaaaagtgttaaaacgactaatatattagaactaagggagtatctcttaataggaattggttttgcaacaatcagttatcttgtaaaagtaattgatggccaacatataatccgaaaagactaaccggattcaaat

SEQ ID NO: 24408 - DNA, 2322 bp, Zea Mays
ttcactggactatcggccccacgcttgggaaaccccacacgacagtggcttcaacacgttacaacgccagcgcctaacggaaaatatctcgagaggtcggggtggtcggtatcatgctagttgtttcgttcgctggttaatgagtcgagctctttcccttctcgcttcaaaccaaaccaaaatcggagcggcggagcaaaacgatccgtagcctcgcttaccttcgattcagctcgaccagggcactaaccgggaagccaatgccgcgcgagtcgcgagatctgtagcgccaatcggcttcaccggcggcggggtgggcatggaagcgcagaacggctcctgcggaggggcgcccgtggtgctcaacgtgtacgacctgacgcccatgaacaactacctctactggttcggcctcggtattttccactctggaatcgaagttcatggtatggagtacggatttggagcacaccagtttccggcaagtggagtattcgagagttccgctcgttcattgaaaatcttgcaggaaagtacaacggcaacacgtatcatttgatttcgaagaactgcaaccattttacagatgatgtctgtaagagcttgaccaagaaatcaatccctgggtgggtgaataggctagcaagagtgggttcattttttaattgtcttctaccagaaagcatccaagtttccacagtaagacacgttcctactcaatctgcattttctggtgagtttgtgcctggaaattcttcttattaggatttgtgcagttgacctgtttttttttaataaaaactgttacgtaggcggtagacgcctagaccttgttgtgaaactttacatttttaactgtcctataaacatcaacaaattgaacctccgttggactggtattccttggtgtaatgagtggctgaccatcctgaatactttactagcaagtaatctggtagacttttggccatattcgaaataaccacccagcctagtaaaaaagaggtaatgataatgtatagctagtaagttagataggactgagttatcaacactaagattattagtttctcagaattcattttcttcagctcaatatcttgtgaccttctataagccactccagattctaactgagacttcaaacaagggcggatctacacccgggccacccggtccagggcccggggcttgatccatataactgagccttagacccgtgctctggcgtgggatagacgaggagatttttttaaccacggcctggaattcgctcccacggggagtcgaactcagtaactgagtgctactcataccacctaaccaactcaatgatgatatggattcggtatcttcatcggttcttggagacagtgatctgggagagttagaccaacaccttctgccatcgtcaactgctgacgtccattctatagacgtgccaccaaatctagccaaggatcttctctgaattatccaaccctttggattccacgtagcaggatagcttaaattgctgcagttgatgtccacttagtgcctctccaggtggcataggaatgcaggagtgtagatgaatgctgctgattgtgttgattctttgccactgaatttgttacatacgcacacacagctctcgacagaaatgacgtgctttctaattattttcctgttatgacttgtgacttcatcgtagatttgtaggtacctttgtgttcgagtaatactgtacgcactgctgcactagagtctagaaaatgccgtcactaagggggcgtttgtttgggattataatctacccagattatataatctaacaacttagttctaaagtggttggaatatataatctggatagattataatcccaaacaaatgcctcctaattatggcacaaatggaagttgtgccttttgaaagtgctcatttggaagagaagaaatgttctaaaaatttcaggggattattaggatttgggaaatcaatctttgtatgtattgacaaagaaacatacatactatatgtatgcttagtagataaagatcatgtcaacaaatgcatgtaacatatactctcttcgtcccaaaatagtattcgttttagagtgttaatggattcatacaatatttgatgtatgtgttttatatgcgtgtctagatttattgtcatccattttaataaggacaaaaaagtgttaaaacgactaatatattagaactaagggagtatctcttaataggaattggttttgcaacaatcagttatcttgtaaaagtaattgatggccaacatataatccgaaaagactaaccggattcaaat

SEQ ID NO: 24409 - DNA, 1774 bp, Zea Mays
ttcactggactatcggccccacgcttgggaaaccccacacgacagtggcttcaacacgttacaacgccagcgcctaacggaaaatatctcgagaggtcggggtggtcggtatcatgctagttgtttcgttcgctggttaatgagtcgagctctttcccttctcgcttcaaaccaaaccaaaatcggagcggcggagcaaaacgatccgtagcctcgcttaccttcgattcagctcgaccagggcactaaccgggaagccaatgccgcgcgagtcgcgagatctgtagcgccaatcggcttcaccggcggcggggtgggcatggaagcgcagaacggctcctgcggaggggcgcccgtggtgctcaacgtgtacgacctgacgcccatgaacaactacctctactggttcggcctcggtattttccactctggaatcgaagttcatggtatggagtacggatttggagcacaccagtttccggcaagtggagtattcgaggtggaaccgaaaagctgtcctggtttcatctacagaagatctgtgtggatgggcacaactgacttgtctagagcagagttccgctcgttcattgaaaatcttgcaggaaagtacaacggcaacacgtatcatttgatttcgaagaactgcaaccattttacagatgatgtctgtaagagcttgaccaagaaatcaatccctgggttcattttttaattgtcttctaccagaaagcatccaagtttccacagtaagacacgttcctactcaatctgcattttctgatgatgatatggattcggtatcttcatcggttcttggagacagtgatctgggagagttagaccaacaccttctgccatcgtcaactgctgacgtccattctatagacgtgccaccaaatctagccaaggatcttctctgaattatccaaccctttggattccacgtagcaggatagcttaaattgctgcagttgatgtccacttagtgcctctccaggtggcataggaatgcaggagtgtagatgaatgctgctgattgtgttgattctttgccactgaatttgttacatacgcacacacagctctcgacagaaatgacgtgctttctaattattttcctgttatgacttgtgacttcatcgtagatttgtaggtacctttgtgttcgagtaatactgtacgcactgctgcactagagtctagaaaatgccgtcactaagggggcgtttgtttgggattataatctacccagattatataatctaacaacttagttctaaagtggttggaatatataatctggatagattataatcccaaacaaatgcctcctaattatggcacaaatggaagttgtgccttttgaaagtgctcatttggaagagaagaaatgttctaaaaatttcaggggattattaggatttgggaaatcaatctttgtatgtattgacaaagaaacatacatactatatgtatgcttagtagataaagatcatgtcaacaaatgcatgtaacatatactctcttcgtcccaaaatagtattcgttttagagtgttaatggattcatacaatatttgatgtatgtgttttatatgcgtgtctagatttattgtcatccattttaataaggacaaaaaagtgttaaaacgactaatatattagaactaagggagtatctcttaataggaattggttttgcaacaatcagttatcttgtaaaagtaattgatggccaacatataatccgaaaagactaaccggattcaaat

SEQ ID NO: 24410 - DNA, 1569 bp, Zea Mays
tcagctattcgcgggaccgtatccgagcaggacagcaggttgttcagcgatcactcgagcggtcgagccctcgcgccgcggagagtgtctccagtctcaagtacagcggaggatggagagcggcttgcttgacaccgccgcggctgccggtctctgcccggtggcggccgggcgccgccgcgtcgggagcacgggcacggcgaggtgcttcctcagctgctcctgcgcttccagagactgcagggtgagcgcgtcctactcccactccatcagccggatgctgagcggggtacgggcggcggcggcgccgggggccaccagcactggtggacggcgctggagaacaacttcgtgctggaggccaccgacgacgagtacggcggggtcgtcgtcgacgccgatcggctgccggccgacagggccgccttcgcgcgctccctcgcggcgtcgctctcctactggaagtccgtggggaagaaaggggtgtggttgaaattaccggtggatctagccgagttcgtccctttagcagtgaaggaaggcttcaagtaccaccacgcggaggaagcgtatttgatgatgacgtactggatccccgatgaaccgaatatgctcccagcaaatgcttctcatcaggttggggttgggggttttgtgatcaacgaccaaatggaggttctagtggtgcaagagaagtaccgcggatcgtcgctggatggcgtatggaaactccccacaggcttcattcttgcgtctgaggaaatctacacgggggccagcagagaggtgaaggaggaaaccggggtcgacaccgagttcgttgacgtcgttgctttcaggcatgcccacaacgtggcgtttcacaagtccgacctcttcttcatctgcatgctgaggcctgtgtcgagtgagatcaagattgacgagacagagattcaggcagcgaagtggatggcgctggaggagttcgtgaagcagcccttcatccaggaagaccacatgttccagaagatcatggacatctgcatccagcgcctccgcaagtgctactgtgggctgacgccgcaccacgtcgtctccaagttcgacgacagaacgtccacgctctactacaatgtcgccgagcccgaggacgtgaactgcagcgccgcctgatgtaatatgatgtgagggggagggggagccaccccagcatctactagtctaatttttgctgcgcagaagtttcatgatgcagcagtgttagtcgtgcgattactgagagtgaaatactagtggcagactgcgcgaggcaatagagttgccgagcctgtacatatacgtgtagggcatatgcataaccagagagctgtatatcccggggcggatccccgggcaggaggaaaattttcattgccgccgtaaattacaatttaactttagctcgccctaaatcttatttatctctcttttttctttgtcctgagatccgcctgtagctatattagcttatagctcagtgctcgtgcgttgcaacgagatcatataatagctcgataacttatatatacaaatgtgtgttatactgtt

SEQ ID NO: 24411 - DNA, 1827 bp, Zea Mays
tcagctattcgcgggaccgtatccgagcaggacagcaggttgttcagcgatcactcgagcggtcgagccctcgcgccgcggagagtgtctccagtctcaagtacagcggaggatggagagcggcttgcttgacaccgccgcggctgccggtctctgcccggtggcggccgggcgccgccgcgtcgggagcacgggcacggcgaggtgcttcctcagctgctcctgcgcttccagagactgcagggtgagcgcgtcctactcccactccatcagccggatgctgagcggggtgcggtcggcggcgcgcaagaggctcttcaggagcgacccggccgagctgctgggcgtcgccaactggtcggagacgggcggcggcggcgccgggggccaccagcactggtggacggcgctggagaacaacttcgtgctggaggccaccgacgacgagtacggcggggtcgtcgtcgacgccgatcggctgccggccgacagggccgccttcgcgcgctccctcgcggcgtcgctctcctactggaagtccgtggggaagaaaggggtgtggttgaaattaccggtggatctagccgagttcgtccctttagcagtgaaggcttcaagtaccaccacgcggaggaagcgtatttgatgatgacgtactggatccccgatgaaccgaatatgctcccagcaaatgcttctcatcaggttggggttgggggttttgtgatcaacgaccaaatggaggttctagtggtgcaagagaagtaccgcggatcgtcgctggatggcgtatggaaactccccacaggcttcattcttgcgtctgaggaaatctacacgggggccagcagagaggtgaaggaggaaaccggggtcgacaccgagttcgttgacgtcgttgctttcaggcatgcccacaacgtggcgtttcacaagtccgacctcttcttcatctgcatgctgaggcctgtgtcgagtgagatcaagattgacgagacagagattcaggcagcgaaggtgcgtctccatctttatttcaaggggatttcatcacgttttttcttttaaacgagcctgcaaaactagtactggagaaaaaaaacatttcaggcttcatttcacgatattcagataatgaatgaagttcgggacagtgatcgatcgataagcttgcgctaacccaccgagagagacgtttattttcagtggatggcgctggaggagttcgtgaagcagcccttcatccaggaagaccacatgttccagaagatcatggacatctgcatccagcgcctccgcaagtgctactgtgggctgacgccgcaccacgtcgtctccaagttcgacgacagaacgtccacgctctactacaatgtcgccgagcccgaggacgtgaactgcagcgccgcctgatgtaatatgatgtgagggggagggggagccaccccagcatctactagtctaatttttgctgcgcagaagtttcatgatgcagcagtgttagtcgtgcgattactgagagtgaaatactagtggcagactgcgcgaggcaatagagttgccgagcctgtacatatacgtgtagggcatatgcataaccagagagctgtatatcccggggcggatccccgggcaggaggaaaattttcattgccgccgtaaattacaatttaactttagctcgccctaaatcttatttatctctcttttttctttgtcctgagatccgcctgtagctatattagcttatagctcagtgctcgtgcgttgcaacgagatcatataatagctcgataacttatatatacaaatgtgtgttatactgtt

SEQ ID NO: 24412 - DNA, 1843 bp, Zea Mays
cggagcttctgcacgcacacacaaaaacagatagacacgggacaacctccgccgctgagagttttcgtgcgcttgtgccatcctcttcctccgctgcgtacagtggtacgggcgtacggctctatcgacagacgaacatggacatggacttcaatggagacgccgacagcttcgccctcgacttcatccgcgacctcatgctcggcggcgacagcagcatccccgtgcccagccctgtcgccgcttcttccgacgacgtcacctgccccgtcctgccacctcaactggagttccagtccgtttcgttcttaccgcaccaacagcgtcaaggctacatagacctgacgacgtccgagtgcgtgggagctgctccggccgccgcaactgtcgttggcgaggcggtgttccgggcgcaggagccggcgccaccagtgatgataaagtttgggaccgagccgtcgtcgcccttggccaccacgaggcagccgctcaccatctccgtgcccccgagctcgtacgcctgggccgccgtcgaggactaccgcaagtaccgcggcgtccgtcagcggccatggggcaagtacgcggcggagatccgcgatccgaagcgccgcggctcgcgcgcgtggctcggcacgtacgacacccccgtggaggccgcgcgcgcctacgaccgcgccgcgttccgcatgcgcggcgccaaggccatcctcaacttccccaacgaggtcggcacccgcggcgctgacctctgggcggccccgacggcgaacaagcggaagcggcagcagatggtggagggcgaggacgaccccgagcccgaggtcgaggtggtcccgatggtgaacaaagcggtcaagaccgaggcgcagtcgtcgatgacgacccaggcgtcctccccctcgccgtcgtcgacggtggcgtcgactacaactgggacaaccggaggtgccgggtggctccctgtgacaccgtcgagcgggagctcggagcagtactgggagacgttgctccgaggtctgccgccgctctcgccgctgtcaccgcacccagccttggggtttccgctgctcagcgtaaactaaaccgcccgagactgcctgctaatgctagcgttaccgcagactgacggcacgcgcgggtgttctcaagactgtaaatttgcaaggggctggaccaccaagtttgtttttagataaagaaagcttatattgaagatatcaagtcattacattaagaggatacaaatctttggtacagaatttcggacctctgtctaatgcacataactaactacaaaaaaccaaaataacatagatcaaatgataaccaatccgaagtctagatcgccacttgtgcctctgggagaaaaacgctatggccaccctcaccaaggtttgtgatcatgttgcaaccataggtcaaacctccttcctctgtagaataacccaacgtgaaagccaatgtgttgctgataggataacctacaaagaggaacaatagagtttttcttttctaaaacactaaatcgtttctacaaatccaaagaacccaataccagaccgtcgctccaagtagaaacacagatttaaacattttattaaggccctaaaaccatctccaaacatatattcatattatgcgatgaattgatcggttgccatctgtacaatattccagattgactcagctaaacgtcactcaaagaaaaggtggttgatggtctcttccttatggcagaaagtacaagttaaactttcatgtcagtttcgtctggccagattatcttttgtgagaattactccttttgtagacaccataaaaaaattaattttcaagggag

SEQ ID NO: 24413 - DNA, 1671 bp, Zea Mays
attgtcgagccaacattgagcgaagaaatcgaaacaagcctccgttttcgtcaccaaatcttggtctttccgtttgtaaccagagttcttgattgaggagtgacagctgcgacctgcggtagcagtagatagcacgcaagaaacactacaagggacgagcagaactttttttttgcgccagctttcccgtcgcagaaatgggctgccttcgcctcttcaacggcaggttcaagaccaagcgctccaagaggcggccgttggcgacggcccccgcgccggcgcctgccgcctccgctgaggcgcggtccatggcgtccgcggcagccgccagctgcgcctcgttcgcgtcgtcggcgaacgtctcggagacctcggcctccggctcgggctccgcttcgtcggcgcggagcatcccggagctgtacgaggagaggggcgccctgcgggagttcggcctccgggagctccgcgtcgcgacgcgcgacttcagcccactgctcatggtcggcgagggcggcttcgggtgcgtctacaggggtgtcctccggctccccggcagcacgccggtcgccgtcaagaggctcaacctcaacggacgtcagacggaccgaggcccgcagcggctgctggtgtacgagttcatgcccaacaagacgctggacgaccacctgttcaaccgggcgtaccctgtcctcccatgggaagtcaggctgcagatcgcactgggcgcagccgagggattgctgtatctccatgagggactggaacttcagatcatataccgcgatttcaaagcgtcaaacgtactgctggacgaggagttcagacccaagctatcagactttgggttggcaagggaggggccatcagaaggacagactcacgtgtccacagcggtcatgggcaccttcggttacgcagcgccggactacgtccggaccgggcacctcaccaccaagagcgacgtctggagcttcggcgtggtgctgtacgagatcctcaccgcgcggcgctccatcgagcggaaccggcccaagaacgagcagaagctcctggactgggtgcggcggcacccgcccgagagcgaccagctcggccagatcatggacccgaggctccaggggcggtaccctacgcgaggcgccgcggaggtggccaggctcgccaacggctgcctcgcgaagctcggcagcaaccgccccacgatgagggaggtggtcgaggggctgaggcgggcgatgcggcacacggagatggacggctttgtcgtcgtcgccggtgcggcaacggagtaccagggctcgcctcctcgtgcggaggaggaggcgccggggacgccgggcgcagaggatgccagtgccgtggcgatggcagccgaggcgaggaagaggcggatgcttcatcttgctgctctagggaatgccgctgacgctcacgcgaggaggcggctcatgctcatgacggctgccgccgctgctccgacgtgatctcctgccgctgttgatgcccttgacttcattcatctacagtctcaacctatgacctctgaagtatatttgtttaatcgagtttataggcctagttttgaaattttttacatatagttttgaaactttttgcatatcttactctgttgttgtgtggtttagatggttgacatttgatttgtcc

SEQ ID NO: 24414 - DNA, 1078 bp, Zea Mays
gaagatctaggtggccacagtaaataactagaatcagaaactgacagcgaagaatcagatgtgagtggttctgatggggaagatacttcgtggatttcatggttctgtagcttaaagggcaatgaatttttctgtgaggttgatgatgactacatacaagatgatttcaacctctgtgggctaagcaaccaagttccatattatgactatgcacttgatctgatattagatgttgaatcttcccatggtgatatgttgacagaagagcaaaatgaacttattgaatcagctgctgagatgctctatggattgattcatgttcggtatattattacaagtaaagggctgtccgcaatggtaaactctctcgaattgtttctgatggatatgttattatttttatgaatttgtatatcatcatatttgatgtttgtgcagctggataagtacaggaacgttgagttcggcagatgccctcgagtgaattgcagcggccaaccatgccttcctgttgggcaatcggatgttcctcgttcaagtacggtgaagatttactgccctagatgtgaagacatctacactccaagatccaaatatctaagcaacatcgacgggacttactttgggacaacattcccccacttgttcctgatgacatacccgcatttgaagccccagaagccgctgcagcaatacgttcccagggtatttgggttcaaaatccgtaagccatgacaaatttgaaggttgaatgtataaaaggttcaaatagcgccctgttatctgctggccccgcagtgttcacacgacacgtcatcggaatacacctgacccgcggctgacctccctagtctggtttcttgctctggcctgaaattctgattgatgcttgtggtttgtttagcctagtgaatcaatccatatttttttacgatcatacgtattatggctttaatggtttaacaaccatctatatttttgttggcacggttcatattcgttttttactctgattgtttactcgttcgcttactgcttctacactatggattgcatctgtaacaatccaagaacaaat

SEQ ID NO: 24415 - DNA, 2263 bp, Zea Mays
ctagtctacaagattcaccgtgaaccttagcagcacaaagggcaacggccgcctgccgctccaaagcagcccgtggttacgtcagcgcccgcgtactgctcccttcttcctcgttgctccgcccccttttgtcgtcgcgtcctcctctcgaggcctcggcagtcggcacgaggacgcgcgatcccgtcaccgctcacctccttctccaaacactgactccgcttcccgtccccatcccgctgcgcaagatcgggaggggacgaagagaggtcgaccgggaggagatgcaccgagaccgaggcgtctctgcggcagcgatacccggtgaccggaagcggatcggcgagcctatggacagatcgtctccatctacgtcgtgggggttctccggagggcgcgagaaggagcggatcggcgtgggcaagcagccggagatgcctcgctccggcggcggatccaccgccatgtccaagagcaagctctctgacgaatcagaaactgacagcgaagaatcagatgtgagtggttctgatggggaagatacttcgtggatttcatggttctgtagcttaaagggcaatgaatttttctgtgaggttgatgatgactacatacaagatgatttcaacctctgtgggctaagcaaccaagttccatattatgactatgcacttgatctgatattagatgttgaatcttcccatggtgatatgttgacagaagagcaaaatgaacttattgaatcagctgctgagatgctctatggattgattcatgttcggtatattattacaagtaaagggctgtccgcaatgctggataagtacaggaacgttgagttcggcagatgccctcgagtgaattgcagcggccaaccatgccttcctgttgggcaatcggatgttcctcgttcaagtacggtgaagatttactgccctagatgtgaagacatctacactccaagatccaaatatctaagcagtatcctttcatttccgttatagtttgctgtcttactctaatggttgctgaaagtatttaccatcatgtgatttctatgtcgatagataattgacttagcaagctgctgacatgcctccgagtataggacttacttgtgggttttacttacatggcagcacttagagcctgtttgttttgggattataatctgtccagattataaaatctagcttattttgaaccaagtgtttgttcaaaataagttagattatataatctgtgcccttagctagagcctaaaatgtgtttttttataagatacccaaactgatagcctgcaatactattcactttattaaagcaaatgtttttgggttcttgtgcaagttattctgcattgttctgagcctctgacatgttaaactgctacatcgagctaattcatcccaaaaacttttactatgcttcagaacactgtataacctggatgcaaacgaaatgacatactccctccgtcccaaaatataatttgttttagactaaatatacatccattaaccaacctatttatgtagtttgtatgtgcgtttatattcattatcattcattcgaacgtggacaaaaaaaaagagagttagaaagaactatatttttggaatggatggagtatttttttagggaaatatgaaatgccataatacattgtaagaatggtttgtgggctgacagaaaacatgtttgtttttcttctgtaccattgtaagaattgtgtttcacgctttggaacatagtaggccattgtgccctacccttgactgtcatctagacatcgacgggacttactttgggacaacattcccccacttgttcctgatgacatacccgcatttgaagccccagaagccgctgcagcaatacgttcccagggtatttgggttcaaaatccgtaagccatgacaaatttgaaggttgaatgtataaaaggttcaaatagcgccctgttatctgctggccccgcagtgttcacacgacacgtcatcggaatacacctgacccgcggctgacctccctagtctggtttcttgctctggcctgaaattctgattgatgcttgtggtttgtttagcctagtgaatcaatccatatttttttacgatcatacgtattatggctttaatggtttaacaaccatctatatttttgttggcacggttcatattcgttttttactctgattgtttactcgttcgcttactgcttctacactatggattgcatctgtaacaatccaagaacaaat

SEQ ID NO: 24416 - DNA, 718 bp, Zea Mays
acaaacaagaatgtatttacaatttatcaagacaagtaggactcacgagatgaaaatattcaatagactaggcttttaaatagtggtacaggataaatcaacacaatgactggcatacataatagtattgaaatttcaaggaccatgcatgatggaatgcgggtaaagccgaatgttattgttcagaatccatgctttcaactcagcatgcttcatcgagtcaatgtacatacctcagtttcattttttaatgcacatctcaagtggtagcccacttgtcgaacagcacagtgagccaaggactagatgcgagcatactactaaggttatctccagcatactacatatcttactttctatcacacatcctatttcaaactccactcgacaaacagtgtattctacggtgtaaaatagtgttttgcacgaccattacgtatgatctgttgagcacggcctaaggaccacatactctaatgacaagtccaagatagtactaagtggatagtggtgccttcatctgcatcaaatccgctgacaacaaacagaactattagattgcagttctcaatcgataaacatttcatgtataataaactaattggaaagcttcaagtacctatgtagttttctcaacagatacgaagattctggacaataacaaaactgtaccaggccacagaatacctagagttccaaacttgtcattggaagaaac

SEQ ID NO: 24417 - DNA, 2096 bp, Zea Mays
gctgctgcattccttcctctattatttctccaaccctttcccctctctttctctctctcatctaccctctctctaaaagactggatacagaacgaggaaaacaaacacccgaaaagaaaggaagaagaggagaagaacaccaaacaagcagaactttttttttgagaactccataggctgtggaattgtctccaggaatcccctctgggtttgacgagattcatacagagaaatacttcttgattttccccctttcttttgctcaagaatttacctgtacaggcgaaaccgcttctttgttcccttttttttctgtgtttgttttattgggattttcctctggtccgttcttcttcacctgtgaggtggtgagaagcagagagaatcatggggaagcaaggaccctgccgtcattgtggagtcacaagtactcccctgtggcgaaatgggccaccagataagccggtgctctgcaatgcatgtggctcgagatggagaacaaagggttcattggcaaactacactccaatgcatcgcaaggacgatattgatgacgatgaacccagagttagcaagctgaagccaccgacatcaaagctgaagtcacagaagaaaaaaccaaatcacattataatggagaatgggccattttctggtcagaatttccgaaagatgggggatgtcgaccaaagttatcggtctagttcgggatctgcagtatcatactctgagagttgtgccccatatggtgctgctgatgcaagtgaaatgactggttcagcacagtcgcatgcttgggagtccctagtgccatcaagaaagaggagctgtgtcacccgtccgaagccttcccctgtagaaaagcttgcaaaagatctaaacttcatcatgcatgaagagcagttatattacccttcaggatcatcggaggaagacctactataccatagtgaaactcctgtcggttcctttgagatgggctctggaagtgtgcttctaagacatccaaactcgaaatcactggagaaagaatcagaagcaagctctattcctgcagataataaatcatatattacaagtgaatcctactcgggctctgcctcgtttgccattcacaatggaaacaaggcagcaattaacttaaacgcttcaaatgcaaggctgaagaagtcgccgctgcatatggaagacaatgctagaaggtgctataccttttatattcgtattagcatagaagggagtagggagcatcagtggtccggaaggctttaccaagtctactatgaaaccactcaaaagaccccgtgacacccaatttcagattgatgcagaactagaaggtaccatgaggagtcctctaagaggtctaaaatctggtgctttggctcagtttgaaagttcatctttgccaaaatctggctacaccaccaaagattcaacctgcactggaggagcacttaatttattcatgttacccccagaaaagttattagtggtccctcctcagtatgtcgaccctgatcaagacttgctgctggagatacctctcaatgcacgacacccagaggcagaacttctgtgtcaaccatctcagctgatgagctctataagccgcagctccacctctatgggtggggttgctgaaggagaagggtgcctgaagcaaccatagtctcaggtcacatcagcaaggagcttaggaacagccagtagttgcagtttactttagcctcctggatcttgacgcctccatttactgatcaccaatgggcgttatgcatccgtcattccctaatttacataacaatgtgcgtcatcttccaacttggcgaattgtccgttcagctaacatttgtagcatgcttttggattgggtttctgctggttgtctgtagcatatggtccgtggagaaagtattatctccgtgtgaaaaaaatatcaccttattgcagggaaatgaaaaaaagaggatactggagagttatgtatgtgaatatgtgatgctattgtttgctatgggtgctgaagtgtcagctagctcacttgtttgtccagttgagagcatgtgcaatgctgttcgttctgcattgccgag

SEQ ID NO: 24418 - DNA, 2234 bp, Zea Mays
ctccctatcgctctccacctcatctctttttcctactttgcccaattgctaattgctcatctctctagttaataaaaacatccagcttttaaactatatttcttttggattcctcccccaaatgcctttaaccaggcctttgtaaatcccctccgtgctgctgcattccttcctctattatttctccaaccctttcccctctctttctctctctcatctaccctctctctaaaagactggatacagaacgaggaaaacaaacacccgaaaagaaaggaagaagaggagaagaacaccaaacaagcagaactttttttttgagaactccataggctgtggaattgtctccaggaatcccctctgggtttgacgagattcatacagagaaatacttcttgattttccccctttcttttgctcaagaatttacctgtacaggcgaaaccgcttctttgttcccttttttttctgtgtttgttttattgggattttcctctggtccgttcttcttcacctgtgaggtggtgagaagcagagagaatcatggggaagcaaggaccctgccgtcattgtggagtcacaagtactcccctgtggcgaaatgggccaccagataagccggtgctctgcaatgcatgtggctcgagatggagaacaaagggttcattggcaaactacactccaatgcatcgcaaggacgatattgatgacgatgaacccagagttagcaagctgaagccaccgacatcaaagctgaagtcacagaagaaaaaaccaaatcacattataatggagaatgggccattttctggtcagaatttccgaaagatgggggatgtcgaccaaagttatcggtctagttcgggatctgcagtatcatactctgagagttgtgccccatatggtgctgctgatgcaagtgaaatgactggttcagcacagtcgcatgcttgggagtccctagtgccatcaagaaagaggagctgtgtcacccgtccgaagccttcccctgtagaaaagcttgcaaaagatctaaacttcatcatgcatgaagagcagttatattacccttcaggatcatcggaggaagacctactataccatagtgaaactcctgtcggttcctttgagatgggctctggaagtgtgcttctaagacatccaaactcgaaatcactggagaaagaatcagaagcaagctctattcctgcagataataaatcatatattacaagtgaatcctactcgggctctgcctcgtttgccattcacaatggaaacaaggcagcaattaacttaaacgcttcaaatgcaaggctgaagaagtcgccgctgcatatggaagacaatgctagaagttactttggaaaccaggggagtagggagcatcagtggtccggaaggctttaccaagtctactatgaaaccactcaaaagaccccgtgacacccaatttcagattgatgcagaactagaaggtaccatgaggagtcctctaagaggtctaaaatctggtgctttggctcagtttgaaagttcatctttgccaaaatctggctacaccaccaaagattcaacctgcactggaggagcacttaatttattcatgttacccccagaaaagttattagtggtccctcctcagtatgtcgaccctgatcaagacttgctgctggagatacctctcaatgcacgacacccagaggcagaacttctgtgtcaaccatctcagctgatgagctctataagccgcagctccacctctatgggtggggttgctgaaggagaagggtgcctgaagcaaccatagtctcaggtcacatcagcaaggagcttaggaacagccagtagttgcagtttactttagcctcctggatcttgacgcctccatttactgatcaccaatgggcgttatgcatccgtcattccctaatttacataacaatgtgcgtcatcttccaacttggcgaattgtccgttcagctaacatttgtagcatgcttttggattgggtttctgctggttgtctgtagcatatggtccgtggagaaagtattatctccgtgtgaaaaaaatatcaccttattgcagggaaatgaaaaaaagaggatactggagagttatgtatgtgaatatgtgatgctattgtttgctatgggtgctgaagtgtcagctagctcacttgtttgtccagttgagagcatgtgcaatgctgttcgttctgcattgccgag

SEQ ID NO: 24419 - DNA, 744 bp, Zea Mays
aaatttctctccatcaaaataatacaggatactccaaggaggaagaaattcccatcgaagaatttgagaaaaggaatttcacctatctactgaatgagcaccgctccatcggtggctaccagtgcctgttcgctgtggatggattctccagagtaaaacttacgccccaaatccccccgctctctctggtgaaagaacccaaggtgtttgcacatgggaatacgagagaccctgacattctttcactgagttggcccggttgtccttgagggcatggggacaccggacacccagattcctgtggcaggaccactaactgccagcagtgaagatgtgtttgagtcagtccgcgtgacacatatatggtatacatctctgggtcttgccatgaagctaccttacctgcaaatctagaatggggcccctcctcccctagatcccacggcttcgaaaccacagctttaaggaacactgccattttcaggtgcaaatttgtgtaacattttagagccggaagaaagacagaaagcacacggggggtggggggaatcatagcaattagcaaccttgtatttacaagttggtcgatatatttttttcccttttgaggcaactttcatactccatcttatataacaagagcttctagactttatttatcggcagcaggcatacagtcgtgctggagacgcatacttgctccattcaaagataatatatttgttttctatctgctgtggccct

SEQ ID NO: 24420 - DNA, 747 bp, Zea Mays
agcaagatcaccgtcggccagggtgaccaagatactccaaggaggaagaaattcccatcgaagaatttgagaaaaggaatttcacctatctactgaatgagcaccgctccatcggtggctaccagtgcctgttcgctgtggatggattctccagagtaaaacttacgccccaaatccccccgctctctctggtgaaagaacccaaggtgtttgcacatgggaatacgagagaccctgacattctttcactgagttggcccggttgtccttgagggcatggggacaccggacacccagattcctgtggcaggaccactaactgccagcagtgaagatgtgtttgagtcagtccgcgtgacacatatatggtatacatctctgggtcttgccatgaagctaccttacctgcaaatctagaatggggcccctcctcccctagatcccacggcttcgaaaccacagctttaaggaacactgccattttcaggtgcaaatttgtgtaacattttagagccggaagaaagacagaaagcacacggggggtggggggaatcatagcaattagcaaccttgtatttacaagttggtcgatatatttttttcccttttgaggcaactttcatactccatcttatataacaagagcttctagactttatttatcggcagcaggcatacagtcgtgctggagacgcatacttgctccattcaaagataatatatttgttttctatctgctgtggccct

SEQ ID NO: 24421 - DNA, 1871 bp, Zea Mays
gtttcatatcatacctcaattatgcattaaaaaagcggccatacatgatattctttatcacacttatcacatcgagaagtatgatcatttggaatttcctggagttgttcctcgaacgtttataggagcatttgttatctctattctctcatcacccacagtctttgtattgcgtttacttcgtgttccaaagttctatagtcttcttacagttcgattaacattgagttgtgtcactttgatgagtttgagacttctcagagttcaggtaaaaaagaagtttggccatcaagcagaagcattctttgtggtactaactgctatccagtttcacttgctgttctactcaagccgtccgcttccaaatatctttgctttagctttagtcaacttggcatactctttctggttcaagggaagctacctatgtacattacgggctctgattgttgcagcagttgtttttagatgtgatatgattctgcttcttggcccaatagggcttgcacttttgctcagcagatctgtttctctcttggaagcaataaaatgttgcataagcactacccttgtatgcataggatttaccgtgctaatcgactctataatgtggcgtcgaatcctgtggccagaatttcaagttctctggtttaattcagttctgaatcggagttcagaatggggtacccattcaattcattggtactttacatcggcgcttccccgttccatgatagtggcataccctctctgcatggttggtgctcttcttgatagaaggatagtaccatacatgtttccggtcttcttatttgttgtgctctattcaaaacttccacataaggaactccgtttcataattggctcaattcccatgtttaatgtgtctgcttcactaacagctagcagactatataataaccgaaagaaagctgggtggaatttgctttttattctcatgcttggtgcctttcttgtcagtctaggatattctactgtgactttcatggcatcctacaacaattatcctggtggctatgctttaaaggctctacatgaagcagattcttcagtgaaggaaaagatggtacatattgatgccttcactgcaatgagcggggtttctcgtttctgtgaaaatgaatatccttggagatactccaaggaggaagaaattcccatcgaagaatttgagaaaaggaatttcacctatctactgaatgagcaccgctccatcggtggctaccagtgcctgttcgctgtggatggattctccagagtaaaacttacgccccaaatccccccgctctctctggtgaaagaacccaaggtgtttgcacatgggaatacgagagaccctgacattctttcactgagttggcccggttgtccttgagggcatggggacaccggacacccagattcctgtggcaggaccactaactgccagcagtgaagatgtgtttgagtcagtccgcgtgacacatatatggtatacatctctgggtcttgccatgaagctaccttacctgcaaatctagaatggggcccctcctcccctagatcccacggcttcgaaaccacagctttaaggaacactgccattttcaggtgcaaatttgtgtaacattttagagccggaagaaagacagaaagcacacggggggtggggggaatcatagcaattagcaaccttgtatttacaagttggtcgatatatttttttcccttttgaggcaactttcatactccatcttatataacaagagcttctagactttatttatcggcagcaggcatacagtcgtgctggagacgcatacttgctccattcaaagataatatatttgttttctatctgctgtggccct

SEQ ID NO: 24422 - DNA, 2537 bp, Zea Mays
gcttacattgggacaggcctaacaacagtagcccaacacggcctgccactaactccgcgcacggacggcgaggccgacgccgccggtactgtctctgccggagtgctggatatccgcccgctgctcctcagtcgaccctccgctcccgcccatgcctcgacccaagcccgccgctgccggtggcggctggctttcagggtgggggtgggacctcatgctcggatcgattgccgcgttctacgccgtcatggcgccctacaccaaggtggaggagagcttcaacgtgcaggtatcatgcggacacattctttcagcattgactatctataacttgaagagatcctgttttcatataccaaacagaataagtttcatatcatacctcaattatgcattaaaaaagcggtactatagttcttttatgggatattgtgcttcaatgctctttttgtgaaaagcaacaggtttatttttctgggaaagcatattgtttattggcacttgttatgcccatgaaatctttctctgttattcattgtataatgatgaatagctctccattgccgagaatgaagtttagctatacctatacatagttttatgaacacccttcatctttaccttctctgtcttgagaataaatttttaccgtcatgcatttctggtccttgagttaatcacataattgaatattttttggtaggccatacatgatattctttatcacacttatcacatcgagaagtatgatcatttggaatttcctggagttgttcctcgaacgtttataggagcatttgttatctctattctctcatcacccacagtctttgtattgcgtttacttcgtgttccaaagttctatagtcttcttacagttcgattaacattgagttgtgtcactttgatgagtttgagacttctcagagttcaggtaaaaaagaagtttggccatcaagcagaagcattctttgtggtactaactgctatccagtttcacttgctgttctactcaagccgtccgcttccaaatatctttgctttagctttagtcaacttggcatactctttctggttcaagggaagctacctatgtacattacgggctctgattgttgcagcagttgtttttagatgtgatatgattctgcttcttggcccaatagggcttgcacttttgctcagcagatctgtttctctcttggaagcaataaaatgttgcataagcactacccttgtatgcataggatttaccgtgctaatcgactctataatgtggcgtcgaatcctgtggccagaatttcaagttctctggtttaattcagttctgaatcggagttcagaatggggtacccattcaattcattggtactttacatcggcgcttccccgttccatgatagtggcataccctctctgcatggttggtgctcttcttgatagaaggatagtaccatacatgtttccggtcttcttatttgttgtgctctattcaaaacttccacataaggaactccgtttcataattggctcaattcccatgtttaatgtgtctgcttcactaacagctagcagactatataataaccgaaagaaagctgggtggaatttgctttttattctcatgcttggtgcctttcttgtcagtctaggatattctactgtgactttcatggcatcctacaacaattatcctggtggctatgctttaaaggctctacatgaagcagattcttcagtgaaggaaaagatggtacatattgatgccttcactgcaatgagcggggtttctcgtttctgtgaaaatgaatatccttggagatactccaaggaggaagaaattcccatcgaagaatttgagaaaaggaatttcacctatctactgaatgagcaccgctccatcggtggctaccagtgcctgttcgctgtggatggattctccagagtaaaacttacgccccaaatccccccgctctctctggtgaaagaacccaaggtgtttgcacatgggaatacgagagaccctgacattctttcactgagttggcccggttgtccttgagggcatggggacaccggacacccagattcctgtggcaggaccactaactgccagcagtgaagatgtgtttgagtcagtccgcgtgacacatatatggtatacatctctgggtcttgccatgaagctaccttacctgcaaatctagaatggggcccctcctcccctagatcccacggcttcgaaaccacagctttaaggaacactgccattttcaggtgcaaatttgtgtaacattttagagccggaagaaagacagaaagcacacggggggtggggggaatcatagcaattagcaaccttgtatttacaagttggtcgatatatttttttcccttttgaggcaactttcatactccatcttatataacaagagcttctagactttatttatcggcagcaggcatacagtcgtgctggagacgcatacttgctccattcaaagataatatatttgttttctatctgctgtggccct

SEQ ID NO: 24423 - DNA, 2118 bp, Zea Mays
gcttacattgggacaggcctaacaacagtagcccaacacggcctgccactaactccgcgcacggacggcgaggccgacgccgccggtactgtctctgccggagtgctggatatccgcccgctgctcctcagtcgaccctccgctcccgcccatgcctcgacccaagcccgccgctgccggtggcggctggctttcagggtgggggtgggacctcatgctcggatcgattgccgcgttctacgccgtcatggcgccctacaccaaggtggaggagagcttcaacgtgcaggccatacatgatattctttatcacacttatcacatcgagaagtatgatcatttggaatttcctggagttgttcctcgaacgtttataggagcatttgttatctctattctctcatcacccacagtctttgtattgcgtttacttcgtgttccaaagttctatagtcttcttacagttcgattaacattgagttgtgtcactttgatgagtttgagacttctcagagttcaggtaaaaaagaagtttggccatcaagcagaagcattctttgtggtactaactgctatccagtttcacttgctgttctactcaagccgtccgcttccaaatatctttgctttagctttagtcaacttggcatactctttctggttcaagggaagctacctatgtacattacgggctctgattgttgcagcagttgtttttagatgtgatatgattctgcttcttggcccaatagggcttgcacttttgctcatctgtttctctcttggaagcaataaaatgttgcataagcactacccttgtatgcataggatttaccgtgctaatcgactctataatgtggcgtcgaatcctgtggccagaatttcaagttctctggtttaattcagttctgaatcggagttcagaatggggtacccattcaattcattggtactttacatcggcgcttccccgttccatgatagtggcataccctctctgcatggttggtgctcttcttgatagaaggatagtaccatacatgtttccggtcttcttatttgttgtgctctattcaaaacttccacataaggaactccgtttcataattggctcaattcccatgtttaatgtgtctgcttcactaacagctagcagactatataataaccgaaagaaagctgggtggaatttgctttttattctcatgcttggtgcctttcttgtcagtctaggatattctactgtgactttcatggcatcctacaacaattatcctggtggctatgctttaaaggctctacatgaagcagattcttcagtgaaggaaaagatggtacatattgatgccttcactgcaatgagcggggtttctcgtttctgtgaaaatgaatatccttggagatactccaaggaggaagaaattcccatcgaagaatttgagaaaaggaatttcacctatctactgaatgagcaccgctccatcggtggctaccagtgcctgttcgctgtggatggattctccagagtaaaacttacgccccaaatccccccgctctctctggtgaaagaacccaaggtgtttgcacatgggaatacgagagaccctgacattctttcactgagttggcccggttgtccttgagggcatggggacaccggacacccagattcctgtggcaggaccactaactgccagcagtgaagatgtgtttgagtcagtccgcgtgacacatatatggtatacatctctgggtcttgccatgaagctaccttacctgcaaatctagaatggggcccctcctcccctagatcccacggcttcgaaaccacagctttaaggaacactgccattttcaggtgcaaatttgtgtaacattttagagccggaagaaagacagaaagcacacggggggtggggggaatcatagcaattagcaaccttgtatttacaagttggtcgatatatttttttcccttttgaggcaactttcatactccatcttatataacaagagcttctagactttatttatcggcagcaggcatacagtcgtgctggagacgcatacttgctccattcaaagataatatatttgttttctatctgctgtggccct

SEQ ID NO: 24424 - DNA, 2810 bp, Zea Mays
gcttacattgggacaggcctaacaacagtagcccaacacggcctgccactaactccgcgcacggacggcgaggccgacgccgccggtactgtctctgccggagtgctggatatccgcccgctgctcctcagtcgaccctccgctcccgcccatgcctcgacccaagcccgccgctgccggtggcggctggctttcagggtgggggtgggacctcatgctcggatcgattgccgcgttctacgccgtcatggcgccctacaccaaggtggaggagagcttcaacgtgcaggccatacatgatattctttatcacacttatcacatcgagaagtatgatcatttggaatttcctggagttgttcctcgaacgtttataggagcatttgttatctctattctctcatcacccacagtctttgtattgcgtttacttcgtgttccaaagttctatagtcttcttacagttcgattaacattgagttgtgtcactttgatgagtttgagacttctcagagttcaggtaaaaaagaagtttggccatcaagcagaagcattctttgtggtactaactgctatccagtttcacttgctgttctactcaagccgtccgcttccaaatatctttgctttagctttagtcaacttggcatactctttctggttcaagggaagctacctatgtacattacgggctctggtatgccttatgcccttttctgatgccttacctaccgagggaagctcggttctcaccaaattcagacataatcattatttctagtacccaagatataattcttcgtttcagcaccaaggatctggatcaacaaaggattaaagctttcacacaattaaaatcataccgaactatgtgtattgtgcaattttcattttcttgcagattgttgcagcagttgtttttagatgtgatatgattctgcttcttggcccaatagggcttgcacttttgctcgtgagtcgctgacctacacaagtccaaaccttttttatttcattacatgcatagttctgcttgtttctacagttttacttatatttttaatattgtattcatttctaggaagtggtactgttgttcagaaacattatatattttcaatattgtttctagttctacagttttctaaatgaatgtgtcgtttagaactttagattgcttgaatgaagttccaagcagctctgctcatagcctcatactgctccaaattcatctttgagttctcagagcacatcatattttgtgttcatgtagggagctagggcaatatcttatagccacataccatgcattgcaatgatcttgaagttgaagttgtagggtcgctattgtgtttaagaatcacccatacactgttttatttgatggattctatatgcattcgggacagttggtgctgagttactctaatatataaatttcactatgttatgacagagcagatctgtttctctcttggaagcaataaaatgttgcataagcactacccttgtatgcataggatttaccgtgctaatcgactctataatgtggcgtcgaatcctgtggccagaatttcaagttctctggtttaattcagttctgaatcggagttcagaatggggtacccattcaattcattggtactttacatcggcgcttccccgttccatgatagtggcataccctctctgcatggttggtgctcttcttgatagaaggatagtaccatacatgtttccggtcttcttatttgttgtgctctattcaaaacttccacataaggaactccgtttcataattggctcaattcccatgtttaatgtgtctgcttcactaacagctagcagactatataataaccgaaagaaagctgggtggaatttgctttttattctcatgcttggtgcctttcttgtcagtctaggatattctactgtgactttcatggcatcctacaacaattatcctggtggctatgctttaaaggctctacatgaagcagattcttcagtgaaggaaaagatggtacatattgatgccttcactgcaatgagcggggtttctcgtttctgtgaaaatgaatatccttggagatactccaaggaggaagaaattcccatcgaagaatttgagaaaaggaatttcacctatctactgaatgagcaccgctccatcggtggctaccagtgcctgttcgctgtggatggattctccagagtaaaacttacgccccaaatccccccgctctctctggtgaaagaacccaaggtgtttgcacatgggaatacgagagaccctgacattctttcactgagttggcccggttgtccttgagggcatggggacaccggacacccagattcctgtggcaggaccactaactgccagcagtgaagatgtgtttgagtcagtccgcgtgacacatatatggtatacatctctgggtcttgccatgaagctaccttacctgcaaatctagaatggggcccctcctcccctagatcccacggcttcgaaaccacagctttaaggaacactgccattttcaggtgcaaatttgtgtaacattttagagccggaagaaagacagaaagcacacggggggtggggggaatcatagcaattagcaaccttgtatttacaagttggtcgatatatttttttcccttttgaggcaactttcatactccatcttatataacaagagcttctagactttatttatcggcagcaggcatacagtcgtgctggagacgcatacttgctccattcaaagataatatatttgttttctatctgctgtggccct

SEQ ID NO: 24425 - DNA, 2118 bp, Zea Mays
gcttacattgggacaggcctaacaacagtagcccaacacggcctgccactaactccgcgcacggacggcgaggccgacgccgccggtactgtctctgccggagtgctggatatccgcccgctgctcctcagtcgaccctccgctcccgcccatgcctcgacccaagcccgccgctgccggtggcggctggctttcagggtgggggtgggacctcatgctcggatcgattgccgcgttctacgccgtcatggcgccctacaccaaggtggaggagagcttcaacgtgcaggccatacatgatattctttatcacacttatcacatcgagaagtatgatcatttggaatttcctggagttgttcctcgaacgtttataggagcatttgttatctctattctctcatcacccacagtctttgtattgcgtttacttcgtgttccaaagttctatagtcttcttacagttcgattaacattgagttgtgtcactttgatgagtttgagacttctcagagttcaggtaaaaaagaagtttggccatcaagcagaagcattctttgtggtactaactgctatccagtttcacttgctgttctactcaagccgtccgcttccaaatatctttgctttagctttagtcaacttggcatactctttctggttcaagggaagctacctatgtacattacgggctctgattgttgcagcagttgtttttagatgtgatatgattctgcttcttggcccaatagggcttgcacttttgctcagcagatctgtttctctcttggaagcaataaaatgttgcataagcactacccttgtatgcataggatttaccgtgctaatcgactctataatgtggcgtcgaatcctgtggccagaatttcaagttctctggtttaattcagttctgaatcggagttcagaatggggtacccattcaattcattggtactttacatcggcgcttccccgttccatgatagtggcataccctctctgcatggttggtgctcttcttgatagaaggatagtaccatacatgtttccggtcttcttatttgttgtgctctattcaaaacttccacataaggaactccgtttcataattggctcaattcccatgtttaatgtgtctgcttcactaacagctagcagactatataataaccgaaagaaagctgggtggaatttgctttttattctcatgcttggtgcctttcttgtcaggatattctactgtgactttcatggcatcctacaacaattatcctggtggctatgctttaaaggctctacatgaagcagattcttcagtgaaggaaaagatggtacatattgatgccttcactgcaatgagcggggtttctcgtttctgtgaaaatgaatatccttggagatactccaaggaggaagaaattcccatcgaagaatttgagaaaaggaatttcacctatctactgaatgagcaccgctccatcggtggctaccagtgcctgttcgctgtggatggattctccagagtaaaacttacgccccaaatccccccgctctctctggtgaaagaacccaaggtgtttgcacatgggaatacgagagaccctgacattctttcactgagttggcccggttgtccttgagggcatggggacaccggacacccagattcctgtggcaggaccactaactgccagcagtgaagatgtgtttgagtcagtccgcgtgacacatatatggtatacatctctgggtcttgccatgaagctaccttacctgcaaatctagaatggggcccctcctcccctagatcccacggcttcgaaaccacagctttaaggaacactgccattttcaggtgcaaatttgtgtaacattttagagccggaagaaagacagaaagcacacggggggtggggggaatcatagcaattagcaaccttgtatttacaagttggtcgatatatttttttcccttttgaggcaactttcatactccatcttatataacaagagcttctagactttatttatcggcagcaggcatacagtcgtgctggagacgcatacttgctccattcaaagataatatatttgttttctatctgctgtggccct

SEQ ID NO: 24426 - DNA, 2465 bp, Zea Mays
gcttacattgggacaggcctaacaacagtagcccaacacggcctgccactaactccgcgcacggacggcgaggccgacgccgccggtactgtctctgccggagtgctggatatccgcccgctgctcctcagtcgaccctccgctcccgcccatgcctcgacccaagcccgccgctgccggtggcggctggctttcagggtgggggtgggacctcatgctcggatcgattgccgcgttctacgccgtcatggcgccctacaccaaggtggaggagagcttcaacgtgcaggtatcatgcggacacattctttcagcattgactatctataacttgaagagatcctgttttcatataccaaacagaataagtttcatatcatacctcaattatgcattaaaaaagcggtactatagttcttttatgggatattgtgcttcaatgctctttttgtgaaaagcaacaggtttatttttctgggaaagcatattgtttattggcacttgttatgcccatgaaatctttctctgttattcattgtataatgatgaatagctctccattgccgagaatgaagtttagctatacctatacatagttttatgaacacccttcatctttaccttctctgtcttgagaataaatttttaccgtcatgcatttctggtccttgagttaatcacataattgaatattttttggtaggccatacatgatattctttatcacacttatcacatcgagaagtatgatcatttggaatttcctggagttgttcctcgaacgtttataggagcatttgttatctctattctctcatcacccacagtctttgtattgcgtttacttcgtgttccaaagttctatagtcttcttacagttcgattaacattgagttgtgtcactttgatgagtttgagacttctcagagttcaggtaaaaaagaagtttggccatcaagcagaagcattctttgtggtactaactgctatccagtttcacttgctgttctactcaagccgtccgcttccaaatatctttgctttagctttagtcaacttggcatactctttctggttcaagggaagctacctatgtacattacgggctctgagcagatctgtttctctcttggaagcaataaaatgttgcataagcactacccttgtatgcataggatttaccgtgctaatcgactctataatgtggcgtcgaatcctgtggccagaatttcaagttctctggtttaattcagttctgaatcggagttcagaatggggtacccattcaattcattggtactttacatcggcgcttccccgttccatgatagtggcataccctctctgcatggttggtgctcttcttgatagaaggatagtaccatacatgtttccggtcttcttatttgttgtgctctattcaaaacttccacataaggaactccgtttcataattggctcaattcccatgtttaatgtgtctgcttcactaacagctagcagactatataataaccgaaagaaagctgggtggaatttgctttttattctcatgcttggtgcctttcttgtcagtctaggatattctactgtgactttcatggcatcctacaacaattatcctggtggctatgctttaaaggctctacatgaagcagattcttcagtgaaggaaaagatggtacatattgatgccttcactgcaatgagcggggtttctcgtttctgtgaaaatgaatatccttggagatactccaaggaggaagaaattcccatcgaagaatttgagaaaaggaatttcacctatctactgaatgagcaccgctccatcggtggctaccagtgcctgttcgctgtggatggattctccagagtaaaacttacgccccaaatccccccgctctctctggtgaaagaacccaaggtgtttgcacatgggaatacgagagaccctgacattctttcactgagttggcccggttgtccttgagggcatggggacaccggacacccagattcctgtggcaggaccactaactgccagcagtgaagatgtgtttgagtcagtccgcgtgacacatatatggtatacatctctgggtcttgccatgaagctaccttacctgcaaatctagaatggggcccctcctcccctagatcccacggcttcgaaaccacagctttaaggaacactgccattttcaggtgcaaatttgtgtaacattttagagccggaagaaagacagaaagcacacggggggtggggggaatcatagcaattagcaaccttgtatttacaagttggtcgatatatttttttcccttttgaggcaactttcatactccatcttatataacaagagcttctagactttatttatcggcagcaggcatacagtcgtgctggagacgcatacttgctccattcaaagataatatatttgttttctatctgctgtggccct

SEQ ID NO: 24427 - DNA, 2046 bp, Zea Mays
gcttacattgggacaggcctaacaacagtagcccaacacggcctgccactaactccgcgcacggacggcgaggccgacgccgccggtactgtctctgccggagtgctggatatccgcccgctgctcctcagtcgaccctccgctcccgcccatgcctcgacccaagcccgccgctgccggtggcggctggctttcagggtgggggtgggacctcatgctcggatcgattgccgcgttctacgccgtcatggcgccctacaccaaggtggaggagagcttcaacgtgcaggccatacatgatattctttatcacacttatcacatcgagaagtatgatcatttggaatttcctggagttgttcctcgaacgtttataggagcatttgttatctctattctctcatcacccacagtctttgtattgcgtttacttcgtgttccaaagttctatagtcttcttacagttcgattaacattgagttgtgtcactttgatgagtttgagacttctcagagttcaggtaaaaaagaagtttggccatcaagcagaagcattctttgtggtactaactgctatccagtttcacttgctgttctactcaagccgtccgcttccaaatatctttgctttagctttagtcaacttggcatactctttctggttcaagggaagctacctatgtacattacgggctctgagcagatctgtttctctcttggaagcaataaaatgttgcataagcactacccttgtatgcataggatttaccgtgctaatcgactctataatgtggcgtcgaatcctgtggccagaatttcaagttctctggtttaattcagttctgaatcggagttcagaatggggtacccattcaattcattggtactttacatcggcgcttccccgttccatgatagtggcataccctctctgcatggttggtgctcttcttgatagaaggatagtaccatacatgtttccggtcttcttatttgttgtgctctattcaaaacttccacataaggaactccgtttcataattggctcaattcccatgtttaatgtgtctgcttcactaacagctagcagactatataataaccgaaagaaagctgggtggaatttgctttttattctcatgcttggtgcctttcttgtcaggatattctactgtgactttcatggcatcctacaacaattatcctggtggctatgctttaaaggctctacatgaagcagattcttcagtgaaggaaaagatggtacatattgatgccttcactgcaatgagcggggtttctcgtttctgtgaaaatgaatatccttggagatactccaaggaggaagaaattcccatcgaagaatttgagaaaaggaatttcacctatctactgaatgagcaccgctccatcggtggctaccagtgcctgttcgctgtggatggattctccagagtaaaacttacgccccaaatccccccgctctctctggtgaaagaacccaaggtgtttgcacatgggaatacgagagaccctgacattctttcactgagttggcccggttgtccttgagggcatggggacaccggacacccagattcctgtggcaggaccactaactgccagcagtgaagatgtgtttgagtcagtccgcgtgacacatatatggtatacatctctgggtcttgccatgaagctaccttacctgcaaatctagaatggggcccctcctcccctagatcccacggcttcgaaaccacagctttaaggaacactgccattttcaggtgcaaatttgtgtaacattttagagccggaagaaagacagaaagcacacggggggtggggggaatcatagcaattagcaaccttgtatttacaagttggtcgatatatttttttcccttttgaggcaactttcatactccatcttatataacaagagcttctagactttatttatcggcagcaggcatacagtcgtgctggagacgcatacttgctccattcaaagataatatatttgttttctatctgctgtggccct

SEQ ID NO: 24428 - DNA, 2456 bp, Zea Mays
gtgagaagatcgagcgacggcggcaggcgggcgcagtgcgcacagcagcctaggcggcccgcaacaattagcatgcaagaagggtctcttgctataggcctatagcagtatagcctagcctaactgggctgtttgcttacattgggacaggcctaacaacagtagcccaacacggcctgccactaactccgcgcacggacggcgaggccgacgccgccggtactgtctctgccggagtgctggatatccgcccgctgctcctcagtcgaccctccgctcccgcccatgcctcgacccaagcccgccgctgccggtggcggctggctttcagggtgggggtgggacctcatgctcggatcgattgccgcgttctacgccgtcatggcgccctacaccaaggtggaggagagcttcaacgtgcaggccatacatgatattctttatcacacttatcacatcgagaagtatgatcatttggaatttcctggagttgttcctcgaacgtttataggagcatttgttatctctattctctcatcacccacagtctttgtattgcgtttacttcgtgttccaaagttctatagtcttcttacagttcgattaacattgagttgtgtcactttgatgagtttgagacttctcagagttcaggtaaaaaagaagtttggccatcaagcagaagcattctttgtggtactaactgctatccagtttcacttgctgttctactcaagccgtccgcttccaaatatctttgctttagctttagtcaacttggcatactctttctggttcaagggaagctacctatgtacattacgggctctggtatgccttatgcccttttctgatgccttacctaccgagggaagctcggttctcaccaaattcagacataatcattatttctagtacccaagatataattcttcgtttcagcaccaaggatctggatcaacaaaggattaaagctttcacacaattaaaatcataccgaactatgtgtattgtgcaattttcattttcttgcagattgttgcagcagttgtttttagatgtgatatgattctgcttcttggcccaatagggcttgcacttttgctcatctgtttctctcttggaagcaataaaatgttgcataagcactacccttgtatgcataggatttaccgtgctaatcgactctataatgtggcgtcgaatcctgtggccagaatttcaagttctctggtttaattcagttctgaatcggagttcagaatggggtacccattcaattcattggtactttacatcggcgcttccccgttccatgatagtggcataccctctctgcatggttggtgctcttcttgatagaaggatagtaccatacatgtttccggtcttcttatttgttgtgctctattcaaaacttccacataaggaactccgtttcataattggctcaattcccatgtttaatgtgtctgcttcactaacagctagcagactatataataaccgaaagaaagctgggtggaatttgctttttattctcatgcttggtgcctttcttgtcagtctaggatattctactgtgactttcatggcatcctacaacaattatcctggtggctatgctttaaaggctctacatgaagcagattcttcagtgaaggaaaagatggtacatattgatgccttcactgcaatgagcggggtttctcgtttctgtgaaaatgaatatccttggagatactccaaggaggaagaaattcccatcgaagaatttgagaaaaggaatttcacctatctactgaatgagcaccgctccatcggtggctaccagtgcctgttcgctgtggatggattctccagagtaaaacttacgccccaaatccccccgctctctctggtgaaagaacccaaggtgtttgcacatgggaatacgagagaccctgacattctttcactgagttggcccggttgtccttgagggcatggggacaccggacacccagattcctgtggcaggaccactaactgccagcagtgaagatgtgtttgagtcagtccgcgtgacacatatatggtatacatctctgggtcttgccatgaagctaccttacctgcaaatctagaatggggcccctcctcccctagatcccacggcttcgaaaccacagctttaaggaacactgccattttcaggtgcaaatttgtgtaacattttagagccggaagaaagacagaaagcacacggggggtggggggaatcatagcaattagcaaccttgtatttacaagttggtcgatatatttttttcccttttgaggcaactttcatactccatcttatataacaagagcttctagactttatttatcggcagcaggcatacagtcgtgctggagacgcatacttgctccattcaaagataatatatttgttttctatctgctgtggccct

SEQ ID NO: 24429 - DNA, 2362 bp, Zea Mays
atatgagacaccgtgagaagatcgagcgacggcggcaggcgggcgcagtgcgcacagcagcctaggcggcccgcaacaattagcatgcaagaagggtctcttgctataggcctatagcagtatagcctagcctaactgggctgtttgcttacattgggacaggcctaacaacagtagcccaacacggcctgccactaactccgcgcacggacggcgaggccgacgccgccggtactgtctctgccggagtgctggatatccgcccgctgctcctcagtcgaccctccgctcccgcccatgcctcgacccaagcccgccgctgccggtggcggctggctttcagggtgggggtgggacctcatgctcggatcgattgccgcgttctacgccgtcatggcgccctacaccaaggtggaggagagcttcaacgtgcaggccatacatgatattctttatcacacttatcacatcgagaagtatgatcatttggaatttcctggagttgttcctcgaacgtttataggagcatttgttatctctattctctcatcacccacagtctttgtattgcgtttacttcgtgttccaaagttctatagtcttcttacagttcgattaacattgagttgtgtcactttgatgagtttgagacttctcagagttcaggtaaaaaagaagtttggccatcaagcagaagcattctttgtggtactaactgctatccagtttcacttgctgttctactcaagccgtccgcttccaaatatctttgctttagctttagtcaacttggcatactctttctggttcaagggaagctacctatgtacattacgggctctgcaccaaggatctggatcaacaaaggattaaagctttcacacaattaaaatcataccgaactatgtgtattgtgcaattttcattttcttgcagattgttgcagcagttgtttttagatgtgatatgattctgcttcttggcccaatagggcttgcacttttgctcagcagatctgtttctctcttggaagcaataaaatgttgcataagcactacccttgtatgcataggatttaccgtgctaatcgactctataatgtggcgtcgaatcctgtggccagaatttcaagttctctggtttaattcagttctgaatcggagttcagaatggggtacccattcaattcattggtactttacatcggcgcttccccgttccatgatagtggcataccctctctgcatggttggtgctcttcttgatagaaggatagtaccatacatgtttccggtcttcttatttgttgtgctctattcaaaacttccacataaggaactccgtttcataattggctcaattcccatgtttaatgtgtctgcttcactaacagctagcagactatataataaccgaaagaaagctgggtggaatttgctttttattctcatgcttggtgcctttcttgtcagtctaggatattctactgtgactttcatggcatcctacaacaattatcctggtggctatgctttaaaggctctacatgaagcagattcttcagtgaaggaaaagatggtacatattgatgccttcactgcaatgagcggggtttctcgtttctgtgaaaatgaatatccttggagatactccaaggaggaagaaattcccatcgaagaatttgagaaaaggaatttcacctatctactgaatgagcaccgctccatcggtggctaccagtgcctgttcgctgtggatggattctccagagtaaaacttacgccccaaatccccccgctctctctggtgaaagaacccaaggtgtttgcacatgggaatacgagagaccctgacattctttcactgagttggcccggttgtccttgagggcatggggacaccggacacccagattcctgtggcaggaccactaactgccagcagtgaagatgtgtttgagtcagtccgcgtgacacatatatggtatacatctctgggtcttgccatgaagctaccttacctgcaaatctagaatggggcccctcctcccctagatcccacggcttcgaaaccacagctttaaggaacactgccattttcaggtgcaaatttgtgtaacattttagagccggaagaaagacagaaagcacacggggggtggggggaatcatagcaattagcaaccttgtatttacaagttggtcgatatatttttttcccttttgaggcaactttcatactccatcttatataacaagagcttctagactttatttatcggcagcaggcatacagtcgtgctggagacgcatacttgctccattcaaagataatatatttgttttctatctgctgtggccct

SEQ ID NO: 24430 - DNA, 1881 bp, Zea Mays
gcttacattgggacaggcctaacaacagtagcccaacacggcctgccactaactccgcgcacggacggcgaggccgacgccgccggtactgtctctgccggagtgctggatatccgcccgctgctcctcagtcgaccctccgctcccgcccatgcctcgacccaagcccgccgctgccggtggcggctggctttcagggtgggggtgggacctcatgctcggatcgattgccgcgttctacgccgtcatggcgccctacaccaaggtggaggagagcttcaacgtgcaggccatacatgatattctttatcacacttatcacatcgagaagtatgatcatttggaatttcctggagttgttcctcgaacgtttataggagcatttgttatctctattctctcatcacccacagtctttgtattgcgtttacttcgtgttccaaagttctatagtcttcttacagttcgattaacattgagttgtgtcactttgatgagtttgagacttctcagagttcaggtaaaaaagaagtttggccatcaagcagaagcattctttgtggtactaactgctatccagtttcacttgctgttctactcaagccgtccgcttccaaatatctttgctttagctttagtcaacttggcatactctttctggttcaagggaagctacctatgtacattacgggctctggtatgccttatgcccttttctgatgccttacctaccgagggaagctcggttctcaccaaattcagacataatcattatttctagtacccaagatataattcttcgtttcagcaccaaggatctggatcaacaaaggattaaagctttcacacaattaaaatcataccgaactatgtgtattgtgcaattttcattttcttgcagattgttgcagcagttgtttttagatgtgatatgattctgcttcttggcccaatagggcttgcacttttgctcagcagatctgtttctctcttggaagcaataaaatgttgcataagcactacccttgtatgcataggatttaccgtgctaatcgactctataatgtggcgtcgaatcctgtggccagaatttcaagttctctggtttaattcagttctgaatcggagttcagaatggggtacccattcaattcattggtactttacatcggcgcttccccgttccatgatagtggcataccctctctgcatggttggtgctcttcttgatagaaggatagtaccatacatgtttccggtcttcttatttgttgtgctctattcaaaacttccacataaggaactccgtttcataattggctcaattcccatgtttaatgtgtctgcttcactaacagctagcagactatataataaccgaaagaaagctgggtggaatttgctttttattctcatgcttggtgcctttcttgtcagtctaggatattctactgtgactttcatggcatcctacaacaattatcctggtggctatgctttaaaggctctacatgaagcagattcttcagtgaaggaaaagatggtacatattgatgccttcactgcaatgagcggggtttctcgtttctgtgaaaatgaatatccttggaggtatgtttctaaccgacaaaactagttgatatgtatgctactatgctattttattttttctgttgattgctcaaatcttctttcattattgttaattaatatcaccagtccattagttttttctttctggattattgattttggactatcaggtaaaacttagatcatattagttttacaaatactcttagttataggatgcaattattgtaatactgaaccagacacccctttctttgcaaactacactttcactatatttgacaaatt

SEQ ID NO: 24431 - DNA, 1625 bp, Zea Mays
ccaagctcaagcttgtccaccacttcctttctttagacagaaatcttcctcggcatctcccattctcactcactcacctactcatgccccccaataccactttgacccaccccatcgatcaattgatcaccaccacaacccacaccccgcacggtcgatctatcttgttatatgcgtgcatggaggggagcagcagccagctgctggagacctgccttcctgctagcctctacgcggttactcctcctccatgcgcccatcctcatccccttcttgccccgctgccgaaccagcagcacatgcttctgcagatgccgtttgtcaaggagcaggctgcgaataatcatggcctgatgctctcttcggaccaccaccaccacagcggcctcctgtacccgctgcttcttcccggcatccctttctgcccctccgtcgccgccgcctgcgagaagactaccaccaccggctccggggcgctcgatgccggcgaggcgggcaccagctcggcggcggcgaaagccaccggcgagatcgctagtaccgccgccaccgcatgcaacagcccaagttcctgcaattggtacgtacgtatgacgattatggcctcacaccataactcacttgttgcttcttgcgcgcttgggagttgctgggagcaatagtggagtacgtagtgtggttgaccgattgttagggtttctagtgcgcggcgcggggctcgttcgttcgcgctgatgatctgattgggaacacatctacatctgttgatatgatgagctgagcacgcaggtggaagggcccggcggcggcagcagcgggggagaaaggaggacggatgaaggtgaggaggaagatgagggaaccgaggttctgcttccagacaaggagcgacgtggatgtgctggacgacggctacaagtggagaaagtacggccagaaggttgtcaagaacagcctccatccaaggagctactaccggtgcacccacagcaactgccgcgtgaagaagcgagtggagaggctatcggaggactgccgcatggtgatgaccacctatgagggtcgccacacgcactccccctgcagcgacgacgccgacgccggcggcggcgatcacactggcagctgcgctttcacgtcgctctagagaccgatgcatagctttgtgcatctgaacgaacctgctagcacctagcagcgcagtgctttagagacgatcgatcgatgcaccaatatatccatgcatgcaagtttgtagaaagtaaatcaatcaaatggatcagcacggtacgcgtgcctgcttaaagcctgacatctgccatgcatgaaggcacagaaagcgaggccaggccaccatgctggcttgctgctgtagctgtagcctgtaggcagtacacacattggtaatcacctggttaattgtacaaagaaggcagctcgttgttcatcgtgcgtgcagctgctaatgattgcgaaactgcaccatagcagtttctgcgagcctgcaggcaaacgaacctgagcttgcagacaaactaagcagtgtttggttgaaaagacaggtagaacggagtcgttctgtcttagttttgttgttgtttggttataaagtaactagaacggag

SEQ ID NO: 24432 - DNA, 1312 bp, Zea Mays
ctaagaaacgccaagttgccagccaaacgaaccagctaaaacaagggggggcagcaccgcggcgcggcgcggcgtggggacagagccctcgtgatcgatccgtccgtgggatctcgcgcacgccaggattggagagccgcggcctccccccgccccaaccagccatgggttcccgcgcggatcgcggctcttagacgcggaggaggagagagacagggggaggggaaggccgaggcctaggaggcgtggtgcagcgcgcgagcgcgttcgttcggcatggaacagaacgacggctcgttcctcgccgtgcgacgcctctccggcggcgccatccaccaccatcgccaccactcttcgccggctgaggtcgtgggcgtgtccacggcgtggatcgggaaggggcttacgtcgtgcgtgtgcgcgcaggggacggagagcgacgggcgcctctccttcgatttgagtcccattcaggaagagtgcttgcataggttgcagaaccggatagaggtgcagtatgatggttcaaatctagagcatcagaaatccttccatgagctccttcgtaagcagaatggtgatagagcattgtgggaatacccctttgctgtagctggtgtaaatattacattcatgctaattcagatgcttgatcttcaagcagctaagccaacgtcattggttggagcagttttcctaaatctactcttagaaaatgatcgagcgtttgacattctttactgcataaccttcaaactgatggatcagaaatggcttgaaatgcacgccagttacatggatttcaatgtggttattaaatctacacggcgccagctcgagagggagctgttgctagaagacatccagaggatccaggacatgccatcatacatgcttctcacctgctagcaattgaacttggtcatacctaacattgcagcaaggtagtgcatctccatacactcgaagaagttgcgacgttggaaccacgtataccgagctcagtatggggggcgtgggcgatctaggttcatggactgtggatgtgctgctttaaattgtcgtgtttacctacttgacaacgaccttaacaccgaatgccttttcgtttggacgatgcgctgcatcttggagctaactttcgttgtaaacaggactacaggaggatcgtggaaacttgtctgaatatgatttgtagccatgtgtatgcataatcttgccgctttactgaaaaaaggcagattaaggctaattatagccttatagtcatttgagttgggctgggtaccttgtgtggggcccataacgaaca

SEQ ID NO: 24433 - DNA, 1180 bp, Zea Mays
gtttcgctggttggagatgggcatcgttcagacttgctccctactaaaaggcgtcagaactctgaatggcccgagaggtttaccgatggatggcgcagggtgtcgcggaatctttggcctactaggctacaaccagtagcctagggtcctagtgattttgcatctccttgtgcggtcgattggtacagactacactgttagagtatattattcagatcgctatccaccgggagcggcgtcctcgtgggatacaccgcggatccatctgatctgctgcgttcgtcgtcgcgtcgtcaagcacatcaccagatcggaactcaccatcaaagcttcggcggcggcctatgtccaccttcccatcgactagcccaagtggatctggcccattgcacgtcgtcgtggtggcggctgtgatggggctgaatccccgacgtggaggcggatgcgacctccactgtcgcgcgggttacccagtgatttacaagatatgttgttgttgttgttgttgttgcgtcttttcgtttttttcctgccagagatcgggtttgcgcctccatcatccatcgcccgtcggctcacgcgtcatcgacattggcttcgacaacatcgactccttcatctttttccgactgtgccgcatggcgtggctagcgacgttctacgaacgcccacattctgtttatgcgcctctccaatgacacatcgatctccgccagttcatcgtcgccactactgattgagaggttctgccatagacatcgacatcaccattgttgtcacgtcggtatggccaaccgatcgcatgcgcgacctcaccctcccgtgacgtctgttgtctaccgcgagttccttcaccgagcatgagggttgtcgctgtatcgcctccttggcactagcgcggcttgtcgccgtccctatcgatgtgtcgccattttaggaatgttccacttaaagctccttggggaaatgatgtcataattgagtactaacatcctacttgtacccgtttaaggtttatggttagctctttgtaattacggtcatacccatgtgtaatagtccggacccaacaacctgaatctattaatacaaatctcaaccctaaattaaagttaggtttcccatactcccccctcttccccacccgtccccccttcccacactactatccaagtttgac

SEQ ID NO: 24434 - DNA, 1237 bp, Zea Mays
ggatcgacgcccatcggacgtttcgctggttggagatgggcatcgttcagacttgctccctactaaaaggcgtcagaactctgaatggcccgagaggtttaccgatggatggcgcagggtgtcgcggaatctttggcctactaggctacaaccagtagcctagggtcctagtgattttgcatctccttgtgcggtcgattggtacagactacactgttagagtatattattcagtctagatttgatctttgtttgccgccgccttcggggagatcgctatccaccgggagcggcgtcctcgtgggatacaccgcggatccatctgatctgctgcgttcgtcgtcgcgtcgtcaagcacatcaccagatcggaactcaccatcaaagcttcggcggcggcctatgtccaccttcccatcgactagcccaagtggatctggcccattgcacgtcgtcgtggtggcggctgtgatggggctgaatccccgacgtggaggcggatgcgacctccactgtcgcgcgggttacccagtgatttacaagatatgttgttgttgttgttgttgttgcgtcttttcgtttttttcctgccagagatcgggtttgcgcctccatcatccatcgcccgtcggctcacgcgtcatcgacattggcttcgacaacatcgactccttcatctttttccgactgtgccgcatggcgtggctagcgacgttctacgaacgcccacattctgtttatgcgcctctccaatgacacatcgatctccgccagttcatcgtcgccactactgattgagaggttctgccatagacatcgacatcaccattgttgtcacgtcggtatggccaaccgatcgcatgcgcgacctcaccctcccgtgacgtctgttgtctaccgcgagttccttcaccgagcatgagggttgtcgctgtatcgcctccttggcactagcgcggcttgtcgccgtccctatcgatgtgtcgccattttaggaatgttccacttaaagctccttggggaaatgatgtcataattgagtactaacatcctacttgtacccgtttaaggtttatggttagctctttgtaattacggtcatacccatgtgtaatagtccggacccaacaacctgaatctattaatacaaatctcaaccctaaattaaagttaggtttcccatactcccccctcttccccacccgtccccccttcccacactactatccaagtttgac

SEQ ID NO: 24435 - DNA, 1232 bp, Zea Mays
ggatcgacgcccatcggacgtttcgctggttggagatgggcatcgttcagacttgctccctactaaaaggcgtcagaactctgaatggcccgagaggtttaccgatggatggcgcagggtgtcgcggaatctttggcctactaggctacaaccagtagcctagggtcctagtgattttgcatctccttgtgcggtcgattggtacagactacactgttagagtatattattcagatttgatctttgtttgccgccgccttcggggagatcgctatccaccgggagcggcgtcctcgtgggatacaccgcggatccatctgatctgctgcgttcgtcgtcgcgtcgtcaagcacatcaccagatcggaactcaccatcaaagcttcggcggcggcctatgtccaccttcccatcgactagcccaagtggatctggcccattgcacgtcgtcgtggtggcggctgtgatggggctgaatccccgacgtggaggcggatgcgacctccactgtcgcgcgggttacccagtgatttacaagatatgttgttgttgttgttgttgttgcgtcttttcgtttttttcctgccagagatcgggtttgcgcctccatcatccatcgcccgtcggctcacgcgtcatcgacattggcttcgacaacatcgactccttcatctttttccgactgtgccgcatggcgtggctagcgacgttctacgaacgcccacattctgtttatgcgcctctccaatgacacatcgatctccgccagttcatcgtcgccactactgattgagaggttctgccatagacatcgacatcaccattgttgtcacgtcggtatggccaaccgatcgcatgcgcgacctcaccctcccgtgacgtctgttgtctaccgcgagttccttcaccgagcatgagggttgtcgctgtatcgcctccttggcactagcgcggcttgtcgccgtccctatcgatgtgtcgccattttaggaatgttccacttaaagctccttggggaaatgatgtcataattgagtactaacatcctacttgtacccgtttaaggtttatggttagctctttgtaattacggtcatacccatgtgtaatagtccggacccaacaacctgaatctattaatacaaatctcaaccctaaattaaagttaggtttcccatactcccccctcttccccacccgtccccccttcccacactactatccaagtttgac

SEQ ID NO: 24436 - DNA, 2761 bp, Zea Mays
ctacattatgcggtcaacactgtcgcaagggtcagcttagttgtttaaccagctaaatgtagccacttatgtcaagcaagtatggtttgatgatgactggtgatgcaaaaggaaaaaacaaacgatccaagccactcgtttctccatactgaatgctagctgatttgtttgtggattgaggtatacattgtcaaatggaatgcatattttaaaatgtgaggatatactaattactacaactttgaatagcgatttaggcatttagctttactccactagaaatataactaaacaaacgtcaatctcatatccttgccttcatttttggccttttggaataaatagtactgtggcttctgcgtccatagatgcatagagctgcaattattacattgttttacagccagtgttggctgaataaaagttaacaagtagtagcaccgtccaccacacatccataagttgataagctcatgcacatgcacaaagtcgacccagttcctctgagcgcctagaatttacgcattctatttcaagaacttctagaatttgttaggctgtttggtgtaagtggatggtggaaatctgctactgacgttgtaccatttcagatcatgataattgactacaaattaacttacccaagtggtactgcaacagctgttcttataaatggattccacacaactcatggagatgcaacggcaaagcagcaagtgaatgggttcacaaaatactttgcaatcagcttcttttggagcttcttccagtggttttactcaggtggagacaactgtgggttttcacagtttcccacttttggacttagagcttggaaacaaacatttttcttcgatttcagtctaacatatgttggcgctgggatgatttgctctcacctcgttaatctatctctccttcttggtgcacttctctcatggggaataatgtggccactggtcagtgatttgaaaggggattggtatcctgcagatatgccagaaagcagcatgagaagcctgcaaggttacaaggccttcatctgcatagcgctcctcttgggcgatggtctttacaattttgttaaggttgttgcattcactgttaagagtctacttggcagatcaagactgaagaatgcaaagaaagaggaagacattccagtgcttgatgaaattcagcgcaatgagatttttacaagagacagtatccccacatggctagcctactctggatatcttgcactatcagctgttgctgtgtttgccattcccttgatgttccatgagatgaaatggtactatgttattatagcatacttattggccccggcattgggtttctgcaatgcctatggtgctggccttactgatatcaacatggcctacaattatggaaaggtcgcgctctttattcttgcggcctgggctgggaaggactctggtgttgtagctggcctagtgggttgtggtttggtgaaatcactggtgtcaatatccgctgatctgatgcatgacttcaagactggacatcttacattaacatcacctagatcaatgattattgctcaggctattggcactgccatgggctgtgtcattggaccactgacatttttactgttctacaaggcttttgacattggaaaccctgatgggtactggaaggcaccatatgctctaatctaccgcaatatggcaattcttggtgtccagggcttctctgctctgcccctgcattgtttgcagctgtgctacggattctttggatttgcagtggcagccaatctgatgagggacctcttgccaccaaagtacggcaaatgggttccattaccaatggcaatgggggttcccttcctagttggtgcgagctttgccatcgacatgtgtgtggggagcttgatggtcttcatctggcacatcattgacagaagtaaagcatctttaatggtgccagcagttgcatctgggttgatatgtggcgatgggctttggatcttccctgaatccttgcttgccttggccaagatcagtccaccattgtgcatggcattcaggtcttcacactagagtaacaaaatgctcgacatctgagaacagttccatgtccaatcggagaagctgttggcatgccaagtttgttattaattagctgggatatgatacatgcaggtaggtaaagatgcagtgcctatctggatgttacctacatataatgacgtaatgtggtacccctgtaaaatttatcatatgcaagatgatacatcacattagagcaatggtaagtttgagaatttcaccccagtggtaatggatggatgcaagagctagcagtagccaaaattttgcaccataggttgtacccccacccctatagtttaatatggaaccacaagctacagtatacaaaccatcttccaaagacagctgaccctattgtcaatcacagctggttttggtaaaagaaaaatgcagtcaaatcttgcatgaatggttagcaaatcatgtatatatttatgtatgtctttgccataacttggattcacaagatgcaatgtagtaagaggcatcttggtcaggcatctgatacaattgtaaaatcatctgctgcgtccttttatcataaacaaaatcatcaggtgatgtatgcctatgaatagttagcaaaaggtacatatatggttatgtatattaaacacgttctgtgaagaagaaatgtaaccattcaacaagaacaatccaatgatacatttgtcagc

SEQ ID NO: 24437 - DNA, 2640 bp, Zea Mays
attgaatttcgttgctacattatgcggtcaacactgtcgcaagggtcagcttagttgtttaaccagctaaatgtagccacttatgtcaagcaagtatggtttgatgatgactggtgatgcaaaaggaaaaaacaaacgatccaagccactcgtttctccatactgaatgctagctgatttgtttgtggattgaggtatacattgtcaaatggaatgcatattttaaaatgtgaggatatactaattactacaactttgaatagcgatttaggcatttagctttactccactagaaatataactaaacaaacgtcaatctcatatccttgccttcatttttggccttttggaataaatagtactgtggcttctgcgtccatagatgcatagagctgcaattattacattgttttacagccagtgttggctgaataaaagttaacaagtagtagcaccgtccaccacacatccataagttgataagctcatgcacatgcacaaagtcgacccagttcctctgagcgcctagaatttacgcattctatttcaagaacttctagaatttgttaggctgtttggtgtaagtggatggtggaaatctgctactgacgttgtaccatttcagatcatgataattgactacaaattaacttacccaagtggtactgcaacagctgttcttataaatggattccacacaactcatggagatgcaacggcaaaatttttcttcgatttcagtctaacatatgttggcgctgggatgatttgctctcacctcgttaatctatctctccttcttggtgcacttctctcatggggaataatgtggccactggtcagtgatttgaaaggggattggtatcctgcagatatgccagaaagcagcatgagaagcctgcaaggttacaaggccttcatctgcatagcgctcctcttgggcgatggtctttacaattttgttaaggttgttgcattcactgttaagagtctacttggcagatcaagactgaagaatgcaaagaaagaggaagacattccagtgcttgatgaaattcagcgcaatgagatttttacaagagacagtatccccacatggctagcctactctggatatcttgcactatcagctgttgctgtgtttgccattcccttgatgttccatgagatgaaatggtactatgttattatagcatacttattggccccggcattgggtttctgcaatgcctatggtgctggccttactgatatcaacatggcctacaattatggaaaggtcgcgctctttattcttgcggcctgggctgggaaggactctggtgttgtagctggcctagtgggttgtggtttggtgaaatcactggtgtcaatatccgctgatctgatgcatgacttcaagactggacatcttacattaacatcacctagatcaatgattattgctcaggctattggcactgccatgggctgtgtcattggaccactgacatttttactgttctacaaggcttttgacattggaaaccctgatgggtactggaaggcaccatatgctctaatctaccgcaatatggcaattcttggtgtccagggcttctctgctctgcccctgcattgtttgcagctgtgctacggattctttggatttgcagtggcagccaatctgatgagggacctcttgccaccaaagtacggcaaatgggttccattaccaatggcaatgggggttcccttcctagttggtgcgagctttgccatcgacatgtgtgtggggagcttgatggtcttcatctggcacatcattgacagaagtaaagcatctttaatggtgccagcagttgcatctgggttgatatgtggcgatgggctttggatcttccctgaatccttgcttgccttggccaagatcagtccaccattgtgcatggcattcaggtcttcacactagagtaacaaaatgctcgacatctgagaacagttccatgtccaatcggagaagctgttggcatgccaagtttgttattaattagctgggatatgatacatgcaggtaggtaaagatgcagtgcctatctggatgttacctacatataatgacgtaatgtggtacccctgtaaaatttatcatatgcaagatgatacatcacattagagcaatggtaagtttgagaatttcaccccagtggtaatggatggatgcaagagctagcagtagccaaaattttgcaccataggttgtacccccacccctatagtttaatatggaaccacaagctacagtatacaaaccatcttccaaagacagctgaccctattgtcaatcacagctggttttggtaaaagaaaaatgcagtcaaatcttgcatgaatggttagcaaatcatgtatatatttatgtatgtctttgccataacttggattcacaagatgcaatgtagtaagaggcatcttggtcaggcatctgatacaattgtaaaatcatctgctgcgtccttttatcataaacaaaatcatcaggtgatgtatgcctatgaatagttagcaaaaggtacatatatggttatgtatattaaacacgttctgtgaagaagaaatgtaaccattcaacaagaacaatccaatgatacatttgtcagc

SEQ ID NO: 24438 - DNA, 2362 bp, Zea Mays
actgggcaccgtctgctgattgaatttcgttgctacattatgcggtcaacactgtcgcaagggtcagcttagttgtttaaccagctaaatgtagccacttatgtcaagcaagtatggtttgatgatgactggtgatgcaaaaggaaaaaacaaacgatccaagccactcgtttctccatactgaatgctagctgatttgtttgtggattgagatcatgataattgactacaaattaacttacccaagtggtactgcaacagctgttcttataaatggattccacacaactcatggagatgcaacggcaaagcagcaagtgaatgggttcacaaaatactttgcaatcagcttcttttggagcttcttccagtggttttactcaggtggagacaactgtgggttttcacagtttcccacttttggacttagagcttggaaacaaacatttttcttcgatttcagtctaacatatgttggcgctgggatgatttgctctcacctcgttaatctatctctccttcttggtgcacttctctcatggggaataatgtggccactggtcagtgatttgaaaggggattggtatcctgcagatatgccagaaagcagcatgagaagcctgcaaggttacaaggccttcatctgcatagcgctcctcttgggcgatggtctttacaattttgttaaggttgttgcattcactgttaagagtctacttggcagatcaagactgaagaatgcaaagaaagaggaagacattccagtgcttgatgaaattcagcgcaatgagatttttacaagagacagtatccccacatggctagcctactctggatatcttgcactatcagctgttgctgtgtttgccattcccttgatgttccatgagatgaaatggtactatgttattatagcatacttattggccccggcattgggtttctgcaatgcctatggtgctggccttactgatatcaacatggcctacaattatggaaaggtcgcgctctttattcttgcggcctgggctgggaaggactctggtgttgtagctggcctagtgggttgtggtttggtgaaatcactggtgtcaatatccgctgatctgatgcatgacttcaagactggacatcttacattaacatcacctagatcaatgattattgctcaggctattggcactgccatgggctgtgtcattggaccactgacatttttactgttctacaaggcttttgacattggaaaccctgatgggtactggaaggcaccatatgctctaatctaccgcaatatggcaattcttggtgtccagggcttctctgctctgcccctgcattgtttgcagctgtgctacggattctttggatttgcagtggcagccaatctgatgagggacctcttgccaccaaagtacggcaaatgggttccattaccaatggcaatgggggttcccttcctagttggtgcgagctttgccatcgacatgtgtgtggggagcttgatggtcttcatctggcacatcattgacagaagtaaagcatctttaatggtgccagcagttgcatctgggttgatatgtggcgatgggctttggatcttccctgaatccttgcttgccttggccaagatcagtccaccattgtgcatggcattcaggtcttcacactagagtaacaaaatgctcgacatctgagaacagttccatgtccaatcggagaagctgttggcatgccaagtttgttattaattagctgggatatgatacatgcaggtaggtaaagatgcagtgcctatctggatgttacctacatataatgacgtaatgtggtacccctgtaaaatttatcatatgcaagatgatacatcacattagagcaatggtaagtttgagaatttcaccccagtggtaatggatggatgcaagagctagcagtagccaaaattttgcaccataggttgtacccccacccctatagtttaatatggaaccacaagctacagtatacaaaccatcttccaaagacagctgaccctattgtcaatcacagctggttttggtaaaagaaaaatgcagtcaaatcttgcatgaatggttagcaaatcatgtatatatttatgtatgtctttgccataacttggattcacaagatgcaatgtagtaagaggcatcttggtcaggcatctgatacaattgtaaaatcatctgctgcgtccttttatcataaacaaaatcatcaggtgatgtatgcctatgaatagttagcaaaaggtacatatatggttatgtatattaaacacgttctgtgaagaagaaatgtaaccattcaacaagaacaatccaatgatacatttgtcagc

SEQ ID NO: 24439 - DNA, 2856 bp, Zea Mays
tttcttgcgcaattgctcgcccttgctgacgaggagcagcacctcatactgaagcagcacccaggtatggaatcactcgtattggcctgtcaaaatcggagatgctcctcctgtttgtccatcatttccccctcttttcggtgacctccacatttcttcctctgtcactggctcagtgctgtgtgttgtccttctggctggagcaagcggagcccagcaggaggggcggaggcggcaacaccaacaccaacaccacaggccgccgccgcgcctcgagctggctatggcgcacgcgcggggcggcgggggccacggccacggccacgaggaggaagcggaggcggccgtctgcctggacggcgactccgaggcgggcgaagcgcgcagcgcggggcgcgcgccgccgtggcgggaccagctgacggcgcgcgggatggtggcgagcctcgccgtcggcgccatgtacagcgtcatcgtcatgaagctgggcctcaccacagggctcgtccccacgctcaacgtctccgccgcgctcatcgccttcgtcatcctccgcgggtggacgcaggcgctcgcccgcttcggcgtcgctacgcgcccgttcacccgccaggagaacaccgtcgtccagacatgcgccgtcgcctgctacagcatcgccgtcggaggtgggtttggctccttcttgcttgctctgaacaagaggacctacgagatggctggggaggacacggaaggcaaccttccgggaagctacaaggagcctggcattggctggatgaccggcttcctcttcgccgtaagcttcgtcgggattgttgcgctaatacctctaaggaagatcatgataattgactacaaattaacttacccaagtggtactgcaacagctgttcttataaatggattccacacaactcatggagatgcaacggcaaaatttttcttcgatttcagtctaacatatgttggcgctgggatgatttgctctcacctcgttaatctatctctccttcttggtgcacttctctcatggggaataatgtggccactggtcagtgatttgaaaggggattggtatcctgcagatatgccagaaagcagcatgagaagcctgcaaggttacaaggccttcatctgcatagcgctcctcttgggcgatggtctttacaattttgttaaggttgttgcattcactgttaagagtctacttggcagatcaagactgaagaatgcaaagaaagaggaagacattccagtgcttgatgaaattcagcgcaatgagatttttacaagagacagtatccccacatggctagcctactctggatatcttgcactatcagctgttgctgtgtttgccattcccttgatgttccatgagatgaaatggtactatgttattatagcatacttattggccccggcattgggtttctgcaatgcctatggtgctggccttactgatatcaacatggcctacaattatggaaaggtcgcgctctttattcttgcggcctgggctgggaaggactctggtgttgtagctggcctagtgggttgtggtttggtgaaatcactggtgtcaatatccgctgatctgatgcatgacttcaagactggacatcttacattaacatcacctagatcaatgattattgctcaggctattggcactgccatgggctgtgtcattggaccactgacatttttactgttctacaaggcttttgacattggaaaccctgatgggtactggaaggcaccatatgctctaatctaccgcaatatggcaattcttggtgtccagggcttctctgctctgcccctgcattgtttgcagctgtgctacggattctttggatttgcagtggcagccaatctgatgagggacctcttgccaccaaagtacggcaaatgggttccattaccaatggcaatgggggttcccttcctagttggtgcgagctttgccatcgacatgtgtgtggggagcttgatggtcttcatctggcacatcattgacagaagtaaagcatctttaatggtgccagcagttgcatctgggttgatatgtggcgatgggctttggatcttccctgaatccttgcttgccttggccaagatcagtccaccattgtgcatggcattcaggtcttcacactagagtaacaaaatgctcgacatctgagaacagttccatgtccaatcggagaagctgttggcatgccaagtttgttattaattagctgggatatgatacatgcaggtaggtaaagatgcagtgcctatctggatgttacctacatataatgacgtaatgtggtacccctgtaaaatttatcatatgcaagatgatacatcacattagagcaatggtaagtttgagaatttcaccccagtggtaatggatggatgcaagagctagcagtagccaaaattttgcaccataggttgtacccccacccctatagtttaatatggaaccacaagctacagtatacaaaccatcttccaaagacagctgaccctattgtcaatcacagctggttttggtaaaagaaaaatgcagtcaaatcttgcatgaatggttagcaaatcatgtatatatttatgtatgtctttgccataacttggattcacaagatgcaatgtagtaagaggcatcttggtcaggcatctgatacaattgtaaaatcatctgctgcgtccttttatcataaacaaaatcatcaggtgatgtatgcctatgaatagttagcaaaaggtacatatatggttatgtatattaaacacgttctgtgaagaagaaatgtaaccattcaacaagaacaatccaatgatacatttgtcagc

SEQ ID NO: 24440 - DNA, 2755 bp, Zea Mays
tttcttgcgcaattgctcgcccttgctgacgaggagcagcacctcatactgaagcagcacccaggtatggaatcactcgtattggcctgtcaaaatcggagatgctcctcctgtttgtccatcatttccccctcttttcggtgacctccacatttcttcctctgtcactggctcagtgctgtgtgttgtccttctggctggagcaagcggagcccaggaggggcggaggcggcaacaccaacaccaacaccacaggccgccgccgcgcctcgagctggctatggcgcacgcgcggggcggcgggggccacggccacggccacgaggaggaagcggaggcggccgtctgcctggacggcgactccgaggcgggcgaagcgcgcagcgcggggcgcgcgccgccgtggcgggaccagctgacggcgcgcgggatggtggcgagcctcgccgtcggcgccatgtacagcgtcatcgtcatgaagctgggcctcaccacagggctcgtccccacgctcaacgtctccgccgcgctcatcgccttcgtcatcctccgcgggtggacgcaggcgctcgcccgcttcggcgtcgctacgcgcccgttcacccgccaggagaacaccgtcgtccagacatgcgccgtcgcctgctacagcatcgccgtcggaggtgggtttggctccttcttgcttgctctgaacaagaggacctacgagatggctggggaggacacggaaggcaaccttccgggaagctacaaggagcctggcattggctggatgaccggcttcctcttcgccgtaagcttcgtcgggattgttgcgctaatacctctaaggaagatttttcttcgatttcagtctaacatatgttggcgctgggatgatttgctctcacctcgttaatctatctctccttcttggtgcacttctctcatggggaataatgtggccactggtcagtgatttgaaaggggattggtatcctgcagatatgccagaaagcagcatgagaagcctgcaaggttacaaggccttcatctgcatagcgctcctcttgggcgatggtctttacaattttgttaaggttgttgcattcactgttaagagtctacttggcagatcaagactgaagaatgcaaagaaagaggaagacattccagtgcttgatgaaattcagcgcaatgagatttttacaagagacagtatccccacatggctagcctactctggatatcttgcactatcagctgttgctgtgtttgccattcccttgatgttccatgagatgaaatggtactatgttattatagcatacttattggccccggcattgggtttctgcaatgcctatggtgctggccttactgatatcaacatggcctacaattatggaaaggtcgcgctctttattcttgcggcctgggctgggaaggactctggtgttgtagctggcctagtgggttgtggtttggtgaaatcactggtgtcaatatccgctgatctgatgcatgacttcaagactggacatcttacattaacatcacctagatcaatgattattgctcaggctattggcactgccatgggctgtgtcattggaccactgacatttttactgttctacaaggcttttgacattggaaaccctgatgggtactggaaggcaccatatgctctaatctaccgcaatatggcaattcttggtgtccagggcttctctgctctgcccctgcattgtttgcagctgtgctacggattctttggatttgcagtggcagccaatctgatgagggacctcttgccaccaaagtacggcaaatgggttccattaccaatggcaatgggggttcccttcctagttggtgcgagctttgccatcgacatgtgtgtggggagcttgatggtcttcatctggcacatcattgacagaagtaaagcatctttaatggtgccagcagttgcatctgggttgatatgtggcgatgggctttggatcttccctgaatccttgcttgccttggccaagatcagtccaccattgtgcatggcattcaggtcttcacactagagtaacaaaatgctcgacatctgagaacagttccatgtccaatcggagaagctgttggcatgccaagtttgttattaattagctgggatatgatacatgcaggtaggtaaagatgcagtgcctatctggatgttacctacatataatgacgtaatgtggtacccctgtaaaatttatcatatgcaagatgatacatcacattagagcaatggtaagtttgagaatttcaccccagtggtaatggatggatgcaagagctagcagtagccaaaattttgcaccataggttgtacccccacccctatagtttaatatggaaccacaagctacagtatacaaaccatcttccaaagacagctgaccctattgtcaatcacagctggttttggtaaaagaaaaatgcagtcaaatcttgcatgaatggttagcaaatcatgtatatatttatgtatgtctttgccataacttggattcacaagatgcaatgtagtaagaggcatcttggtcaggcatctgatacaattgtaaaatcatctgctgcgtccttttatcataaacaaaatcatcaggtgatgtatgcctatgaatagttagcaaaaggtacatatatggttatgtatattaaacacgttctgtgaagaagaaatgtaaccattcaacaagaacaatccaatgatacatttgtcagc

SEQ ID NO: 24441 - DNA, 1890 bp, Zea Mays
ctttatcagtaaactgcccatgatctagcagtggtccaatgtttgtcctagactcctagggggaaaaaagatctgcactttgtgctgtgctgtttcttcttcttgttgttgttgtacgtagcgccgagatttcccagcaccgcttgcgatttagaaacccacagtttgttctttttcgtttaggggatggttgtacactgctgctgcttcttactaatgatacaaaggagaggtgaagttcgcagttgctgagatagacagatgagagagaaggcaacgctagctaccgcgacaaggaggaagatgagcaatctggaaagcacggcatcaagcaagttgtagccttgtagttttaggagtgtccttattgcgactttgtcaccctgaggctatccgcagtcgcgactgcaaacaggaactgtaaatttttacagctctcacaaacgatgcagcggcggactgcaacaggaactgtaaatttttacggctctcaggaacttcacagctagcgcaccttctgcggtggactgaataatctccctcctctttctattggctgctagttgggtgtggaaaggaaagaggtgaaaataaataatagaatatatggtatatggtatagggtagatatttagagtaaatatgaccgcggagtattatgggatagggtagagaatctcgctgaccaggatgaaatattccttttagagtagaaatttagggttctatgagtgcggatagcctgatgacctgagcgctcccatgcggccatgtctgatgaattatggcggcccatccgctgccatcagcaaacgcccacgaatggccaatcgttgcccagcagcagcgggcttcagtattcgtcaaccaaattgtcagtcacgccccgccgccccgccgcctttttatgattaatcagcgagagtccttttgcgccgcgcggatcgcatactagagaggaggttgagcggagtaggcggcggccagcaatgaaggtacagtgcgacgtgtgcacggccgaggcggcctccgtcttctgctgcgccgacgaggccgcgctgtgcgacgcatgcgaccgccgtgtccaccgcgccaacaagctcgcggggaagcaccgccgcttctccctcctgcacccgtgttcttcctcttcctcctccgccgcgcacaagccgccgctctgcgacatctgccaggagcggaggggcttcttgttctgcaaggaggacagggcgatcctgtgccgggagtgcgacgcgccggtgcacagcgccagcgacatgacgaggcggcacagccggttcctgctcaccggcgtgcgcctctcgtcagcgccggtggactctgcgggcccatccgaagaggaggagcaggagaacagccgcggcccctgcaacgacgaatcctgcagcagcggcagcggcgccggcggcgcgaccacggcgaccgccagcgacgggagcagcatctccgagtacctgaccaagacgctgcccgggtggcacgtcgaggacttcctcattgacgacgcgtccgctggcgacgtcggcgcctgctcggatggcctctatcagggacaaaatggacagatcagtggggtgctgcaagaagcttacctgccgtggacggagcgggagcaggtgcaaactgacgtcgcagacgagcgggccagctgggagcggtgggtgccacagatgcatgcggagttcggcggcggcggcaagcgacctagagcgtcgccttcgcctccctgttcgtactggtgattggtgaaaagttcgccgtcttcagcaagatgatttgtattgggctaattagtagagctactgtaggaacgaccgaaaaatgagccaaaaaagtaacggcctccatcgagctcgttttaaatta

SEQ ID NO: 24442 - DNA, 2218 bp, Zea Mays
gtcagcgcgtatcacgacgcgctgtttcacctttcctcctctttggtttggctccatttcttttcaaaagtggaagggcggaagagcataagcgaggtggcggaaataaaataaacaagaatatatttatgatatcgcggtgggacaaaaaataaagtaaaggagggcgaaagcgccaaagtgccgaggaagggtgtgatactgatttcagacaaggcggagggggcgagggtgaaacgacgcgtcatttgttcagcagcccacggactccggcagccattcaaggctccaccaacaaaacgctcatccccttcctgattctcggcctccgtctccgcctcttcctcctcgcctccaacgccgccaccacagccccggccccgtgttgttcctgcaccccacccgtcctgcgaggctcctccgccatgccgtcatacgcgcaccaccatagcagccctctggtaaggaacggtgccggccgtgttgtccgtagacgattgagggggacagaaagagattctttggatgtttttctttgtttcctttatttataccgagagataaacaaaaaaaaaaacccagagacgaaaaaactttttttcttgaaccgccctgcttcccctctggtgttgggaatttgtgattttgacatacgacctgtatgggtatttttccggccggtgaaggatgataccaggatggacgcgctgaagtgtaacaacaacagcgccccgccggaggagaccgcggaggacgccgacgccgccggggcgctcgtcgagaaagacgggttctcggtcgaggacttgctggacctcgaggagtttggcgagcctgacaaggacggcgccgagcctgaggacgatgacgccccgccggtacccgccgcggccgaggagaggtcgaaagacgactcgcagccgttgtcggtcgtgacgtacgacctcccgtcgccgccgccggagatggttgaactgccgtcgcatgacgtcgaggagttggagtgggtgtcccgtatcatggacgactcgctctctgagctgccgccgcaggcgcagcctccccccgctgtggttgcgtcgttggctgggcggcccccgctgcagccactgtggcgtgcagaagaccccgcagtggcgcgcggggcccgagggcgcaaagacgctgtgcaatgcgtgcggcgtccgctacaagtcgggccggctcctgcccgagtaccgcccggcgtgcagccccaccttcgtgagcagcatccactccaactcccatcgcaaggtcctcgagatgcgccgcaagaaggagggcgacatggtcgccaccgccgcgccggccgtggcgtcgttctgagctgcactcgctgtcagcaaggacgctggccacccagcggtggctgtacatttttttttcttgccataatggccctgtaccgtacctgaactctcctcccctcactcatcctagtgtggtcgttgtagtcccggttgggttaattagagtttaggagtctcaattaggccaggttagttttagctttggttccggttaggtttctactgcgacagctgcggcgcagaacttcaattcgtagcatttctaaaaagtagtttctatttcgtcttcctttctccgagtggagtaggtcgtttggtccatccatcaatggccgaaccggactgctggggtactccaccactgatgaggagggctgttgctggtgttggaatctggaaggcagaagacgagtctgttcgttcggccaaggaagaagagtgcaccttgcacttggactgtatgtattgggacaggtgcatgttgcgtgcacccttggttacatacatcacatggtgttgtcacccgtaacgacatgataggcctagttaggagagctgagtggtggtagcgaggtgttgaagcaagaaactatgactttagcttgctatctgtgtgattgcgatctgtgtgaggctgaggtaaaaaaatatgaatggaccaatggaacagtaaagtcagtggaggaaagctcttcccttggttgtgtggcatactgcaactttgtgtaatggtctccccctgactctacctggcgcagaggcagagagagagctacgtataggagaaacgaacctcttgcacttggagctgtcctagccctgccggctggcgccataggcataggcttccgtgctgcctcggtttttatttcacactgcatcacaag

SEQ ID NO: 24443 - DNA, 2449 bp, Zea Mays
cttgccagactagcttgtttgtttcccgtcatggtgggctggtggccacgggaccctagctatatatacatgacctttctgcctcttggcctggacgagaagtgtcgttgtttcaccgatcaaaccttgttttccgacaaaacacggctgcgttgactctccgccgcaaaacctctatggatttccacgagaaggatgcgcgcagctatgacgcgcatggccctgctcccgccctccccctcgtccgcctgaaccacgtctcgttccagtgcgagtccgtggaagcatcggtcggcttctaccagcgcgtgcttggcttcgagctcgtcaaacgcccggcgtccctcgacttcggaggagcatggatgcacaggtacggcatggggatatatctactgcagcgcggctcggattcgtcgcccaacgctccggcagctgcaagaccgccggcgatcaaccccaagggcaaccacatttcctttcagtgcacggacatggggctcatgaagacgaggctgggtgacatggagctggagttcgtggcggcgcgggtgtgagacggcgagacggtggtggagcagctcttcttccgcgacccagacggcaatgtggtcgaggtctgcgactgcgagaagctccccgtgatacccctcgcagatgcaggcagcaccggccttcttccaaatacgctgctgctgccggtggaaacgaacttgcatggctagttcgtggtgcttgctcattggttgcttagcacgattatttgattcgtgtgattagatttgtgagctgtaacaatactgtaataacaggcagttctgcacgctattgtacatatgttgcaagtgtccgtacgtagtgtaatgtgtatgtacaggttcggagattgccgggttaggcgtcttccaagctgaatttacgtagtgttgtgcgtaatgcttgtgcaatggcgatgaaagctggtgctcttcagtactctgtgcgagactgacgacaaaccgcgtaccccgaaatcgcaaggcaaccgccgcaccagcgttcagagcccaatgagtctggaagcctgcttggcccaatggtgcgctgtgcaaaagtgcaaaccgaaaccgaagtcagtggcagaaacggcccttatccacacacacaaaaaagtacgcgacacaagccacgctctccgcttgtggctaagctgctgcacgcgcggaacgacaaaaatccagcactagccaaagcacaggcgaagaagcaggcgagaggccaccacaaacatggcgaccacggcgtttctacccccggccaagctgccgctgcaggggcgtcggttcgctagccccaaaacggcgggacgtatcagcgtcagggtccctccggcgcgagcgcagcaagagcagcaggtgaaggaggaggaggccgaggtggcgagcgtgccgccgccacaggacgcggagaagcaggcgaggaagggggacgcgcagtccctgccgcggcagcctttggcggagagcaagaacatgagccgcgagtacggcgggcagtggctgagcagcaccacgcggcacgtccgcatctacgctgcgtacatcgacccggtgaccaacgcgttcgaccagacgcagatggacaagctgacgctcatgctcgacccccaggacgagttcgcctggaccgacgaggcctgccagatggtcttcaacgagttccaggacctcgtcgatcactacgagggggctgagctgtcggagtacacacttcggttgatcgggtcagaccttgagcactacatccgcaaactgctgtacgacggggtgatcaagtacaacatgaggtccagagtcctcaatttcagcatgggcaagcctcgcatcaagttcaacagcaaccagataccagaaaagatatagaatgtacttatccaacgcccttaaaagaatggtttctctccattcgattaccgagcaagatgtatactctgcagtcccagatacgatccagagcattccagaattcatattacgcagatgcaaagccatacaccgattctgttggcagaattttgtcacccctgcacagtaataaccacataacgagagtctgggcaaaataagggtttgctcgagtttagataccccttctgtttctagggcactcgaattgggttacagtacacaataccatagtttctgctaatagatacgtatcaccgaataccacatgaggtcagagagttgcacagagacgaccgcgctaacttaccaaacgactttctgaactggatggagtaatggctagtatgggtaaaccctctacaaacattccatgacaactcggtactttttaaattcatcgctccatggtctgaattggtcttctagctcaatgttctacagaagcataaagatacagtaagggctagtttgggaacctcaattttctaagggatttctatttt

SEQ ID NO: 24444 - DNA, 3814 bp, Zea Mays
ctcgggactagaacccgtgccttctctctccactctttatacttgcccctcctcgacggttcgccaaaaggttcgagacgcgcaccgccagccgatacgaatccgacgagctcgatcgctccacttccccgatcgcacgccaatcagcaccagccaccgtggcgatgacggaggaggcggaggcgaaggcgaagggcaacgcggcgttcgcggccggccgtttcgaggaggctgtccagcacttcagcgacgccatcgcgctcgcgcccgacaaccacgtcctctactccaaccgctcggcggcgtacgcgtcgctctggcgctacgcggaggcgctagatgacgccaagcggaccgtggcgctgaagccggactgggccaagggctactcccgcctcggcgccgcgcaccttggcctcggtgacgcgcccaaggccgtcgaggcctacgagaaagggcttgcgctcgagccgtccaatgaggcgctcaaatccggcctcgcacaggcgcgccagtccgcatcggcgccgagacgtccggtgggctccggggctgacgccgttggcaagatgttccagggccctgagctatggagcaaggtcgcggccgatcccaccacgcgtggctacctcgaccagccggacttcgtgcagatgctgcgggaggtgcagcgaaaccccggcagactgaacagctacctttctgaccaacgaatggttcaggtgctcaccctcatgctgaacatcaagttccagaaccagagcagtggggcgcctgacccggcagcagcacaatcgaacccgccgccaccaaagcagcagccagaggcgaaggcaagagaaccagagccggacccggagcccgagcctatggaggtgacagaggaggataaggagcagaaggagaggaaagcgtcggcgcagaaggagaaggaagcaggcaacgccgcttacaaaaggaaggattttgataccgcgatccagcactacacagaagccatggagctcgatgacgaggatatctcctacatcaccaatcgtgctgctgtttaccttgagatgggaaagtatgatgaatgcattaaggactgtgataaggctgtcgagagaggaagggaactgcatgctgatttcaagatgatctcaagggcacttaccagaaaaggaactgctcttgccaaacttgctaaatcatcgcaagactatgatgctgccattgagattttccagaaggcgttaactgagcaccggaacccagatacactgaaaaaactaaatgatgcagaacgagcaaagaaggagctggagcaacaagagtactatgacccaagaattgctgacgaggagcgagaaaaaggtaatgagttctttaagcagcagaaatatccagaagcagtgaaacattacaccgaagctctcaggagaaaccccaaggaccccagggtatacagcaatagggctgcctgttacaccaagctaggggcccttcctgaaggtctgaaagatgctgagaagtgcattgagctagatcccacattctccaagggatacacaaggaaaggtgctatccagtttttcatgaaagaatatgacaaagcgctggaaacttatcaagctggcctaaagcatgacccgaaaaaccaggagttacttgatggtgtaaggaggtgtgttgaacagatcaacaaggcgagcagaggcgaactcagtgaggaggaactgaaagagagacagaacaaagccatgcaagaccctgagatccagaacatcctgactgatccgatcatgcagcaggttttgacggatctgcaggagaaccctcgggctgcgcaggcgcacctcaagaaccccggagtgatgcagaagatccagaagctcgtcagcgcagggatagttcagatgaagtagacggtggctggaatgtccgggttcagatctgggacctgtgctggaaatgctgtgaacttgatcattgtttcgcattttggaaactgaacccttttgtgcgaccatagtttggtcatggctgttaatgatccatatatgggttttcccatccgatatgttccaattcgtgcctttccccctggaatgcccgtgaaaaaggaagaatattcatcaaccttgcactcgagcagtttgtagagtcgtttaatgcgatggtatggtaccgtactaccgtggtaacatccagttgaacagcggcagaggtagtatttgcccccctcgtttgccaccggatagttactaggataatgattggtaccatccggataggcatcagggaacatatgaggtacactatgcaatcaagacgtgaaagtttttttttttaatattagtacataggaaaggtgagagtgagaggctgttttgaaacataatattatagatgaggtgatgtaaacataatagatggaaccatacatacatattagtagtgcaactatataaccaagacacaagtatataaatgagagtgaaatggttgtttaaaatataacatttttttaaaaaagttctttccatcttgcattaatttatattgttacaggtgctatgttttccaaactaaagttgagaactgagttctcaacagggagcaggaaaccaaaaacatataattcaactgtcctgtcattgtgaaaactcaacaaaggccattattatcaggtgcaaaatcaatggcaaataatgctcccttagaccatgttcggttctatttcaatccatagtaaattaaaatctctctcaatccatatcaatcccctccaatcatccgaacaagccttaagagatttacactacaaagctacatacaccttgatgtccttcctatcaacctgctctcctgttgctgtatggatatatctacggaaaaccaaaactaagcagcagcttcctctgtttttgccacggagatctggttctggatgtgctgtgggacgacgtcaaacttggcgagctgcatcgtgtaggacgctcgccccttggtcatgccccggagggtgctgacgtattggaacatctcagcaagtggcacaaaagaatcaaccacctgtgaattgtgatcaacagaaatgcaagaaaaatgtttaaggtcacgttgcaaatagtaggatatgataaactaatgtacaaaagggggatgatctactgtttcataccttgagtccaccaggcttatccccgaagctgttgacctgtcctcttctagagttcaaatcaccaataacatcacccagatgctcttcaggagttatcacttcaactttcattataggctctagaagccttggaccagctttcctcattccctcacggaatgctcctctggctgcaatttggaatgctaagacacttgaatcgacatcgtgatatgagccatcaaccagcacagcccggaagtccacaactgggtaaccggctaggacaccattgggtaagctttcttccaatcctttcatcacccctggtacatattctttgggcactgcccctcccttgatttcactcttgaactcatacccacttccagcttccaaaggttcaaaacgcacaataatgtctgcaaactgcccagatccaccagattgctttttgtggacatattgtatttccgcaactttggaaatactttcacggtagttgacttgtggagctccaacgtttgcttcaacctgcacagatcgtttgcataaaagaagtaaaggtaatgtgacaggtacaaaactctgactcgacaacagctaatgaccgaataataaatttctatatagaatagaattaaagaaacatacagcgcatgcaactgc

SEQ ID NO: 24445 - DNA, 1076 bp, Zea Mays
aaacgggtattctaacaagtatgaagcaatagggctgcctgttacaccaagctaggggcccttcctgaaggtctgaaagatgctgagaagtgcattgagctagatcccacattctccaagggatacacaaggaaaggtgctatccagtttttcatgaaagaatatgacaaagcgctggaaacttatcaagctggcctaaagcatgacccgaaaaaccaggagttacttgatggtgtaaggaggtgtgttgaacagatcaacaaggcgagcagaggcgaactcagtgaggaggaactgaaagagagacagaacaaagccatgcaagaccctgagatccagaacatcctgactgatccgatcatgcagcaggttttgacggatctgcaggagaaccctcgggctgcgcaggcgcacctcaagaaccccggagtgatgcagaagatccagaagctcgtcagcgcagggatagttcagatgaagtagacggtggctggaatgtccgggttcagatctgggacctgtgctggaaatgctgtgaacttgatcattgtttcgcattttggaaactgaacccttttgtgcgaccatagtttggtcatggctgttaatgatccatatatgggttttcccatccgatatgttccaattcgtgcctttccccctggaatgcccgtgaaaaaggaagaatattcatcaaccttgcactcgagcagtttgtagagtcgtttaatgcgatggtatggtaccgtactaccgtggtaacatccagttgaacagcggcagaggtagtatttgcccccctcgtttgccaccggatagttactaggataatgattggtaccatccggataggcatcagggaacatatgaggtacactatgcaatcaagacgtgaaagtttttttttttaatattagtacataggaaaggtgagagtgagaggctgttttgaaacataatattatagatgaggtgatgtaaacataatagatggaaccatacatacatattagtagtgcaactatataaccaagacacaagtatataaatgagagtgaaatggttgtttaaaatat

SEQ ID NO: 24446 - DNA, 2492 bp, Zea Mays
ctcgggactagaacccgtgccttctctctccactctttatacttgcccctcctcgacggttcgccaaaaggttcgagacgcgcaccgccagccgatacgaatccgacgagctcgatcgctccacttccccgatcgcacgccaatcagcaccagccaccgtggcgatgacggaggaggcggaggcgaaggcgaagggcaacgcggcgttcgcggccggccgtttcgaggaggctgtccagcacttcagcgacgccatcgcgctcgcgcccgacaaccacgtcctctactccaaccgctcggcggcgtacgcgtcgctctggcgctacgcggaggcgctagatgacgccaagcggaccgtggcgctgaagccggactgggccaagggctactcccgcctcggcgccgcgcaccttggcctcggtgacgcgcccaaggccgtcgaggcctacgagaaagggcttgcgctcgagccgtccaatgaggcgctcaaatccggcctcgcacaggcgcgccagtccgcatcggcgccgagacgtccggtgggctccggggctgacgccgttggcaagatgttccagggccctgagctatggagcaaggtcgcggccgatcccaccacgcgtggctacctcgaccagccggacttcgtgcagatgctgcgggaggtgcagcgaaaccccggcagactgaacagctacctttctgaccaacgaatggttcaggtgctcaccctcatgctgaacatcaagttccagaaccagagcagtggggcgcctgacccggcagcagcacaatcgaacccgccgccaccaaagcagcagccagaggcgaaggcaagagaaccagagccggacccggagcccgagcctatggaggtgacagaggaggataaggagcagaaggagaggaaagcgtcggcgcagaaggagaaggaagcaggcaacgccgcttacaaaaggaaggattttgataccgcgatccagcactacacagaagccatggagctcgatgacgaggatatctcctacatcaccaatcgtgctgctgtttaccttgagatgggaaagtatgatgaatgcattaaggactgtgataaggctgtcgagagaggaagggaactgcatgctgatttcaagatgatctcaagggcacttaccagaaaaggaactgctcttgccaaacttgctaaatcatcgcaagactatgatgctgccattgagattttccagaaggcgttaactgagcaccggaacccagatacactgaaaaaactaaatgatgcagaacgagcaaagaaggagctggagcaacaagagtactatgacccaagaattgctgacgaggagcgagaaaaaggtaatgagttctttaagcagcagaaatatccagaagcagtgaaacattacaccgaagctctcaggagaaaccccaaggaccccaggcaatagggctgcctgttacaccaagctaggggcccttcctgaaggtctgaaagatgctgagaagtgcattgagctagatcccacattctccaagggatacacaaggaaaggtgctatccagtttttcatgaaagaatatgacaaagcgctggaaacttatcaagctggcctaaagcatgacccgaaaaaccaggagttacttgatggtgtaaggaggtgtgttgaacagatcaacaaggcgagcagaggcgaactcagtgaggaggaactgaaagagagacagaacaaagccatgcaagaccctgagatccagaacatcctgactgatccgatcatgcagcaggttttgacggatctgcaggagaaccctcgggctgcgcaggcgcacctcaagaaccccggagtgatgcagaagatccagaagctcgtcagcgcagggatagttcagatgaagtagacggtggctggaatgtccgggttcagatctgggacctgtgctggaaatgctgtgaacttgatcattgtttcgcattttggaaactgaacccttttgtgcgaccatagtttggtcatggctgttaatgatccatatatgggttttcccatccgatatgttccaattcgtgcctttccccctggaatgcccgtgaaaaaggaagaatattcatcaaccttgcactcgagcagtttgtagagtcgtttaatgcgatggtatggtaccgtactaccgtggtaacatccagttgaacagcggcagaggtagtatttgcccccctcgtttgccaccggatagttactaggataatgattggtaccatccggataggcatcagggaacatatgaggtacactatgcaatcaagacgtgaaagtttttttttttaatattagtacataggaaaggtgagagtgagaggctgttttgaaacataatattatagatgaggtgatgtaaacataatagatggaaccatacatacatattagtagtgcaactatataaccaagacacaagtatataaatgagagtgaaatggttgtttaaaatat

SEQ ID NO: 24447 - DNA, 3119 bp, Zea Mays
gaggccgcgcgcgcacggcgcaccacaagtcctcctccggtctgcgtctgccccaagcacaacggaagcgcgcatttattattctgtatatataagctccccaccaccaccaccacctttctcctcactgcctagacggaaaagcatcgcgcgatcgccactgctccccccagagccagtcagccagccagccagcggcgcacgaaggaacgcacggtgcacttccgttccgtctcatcgtcatcagctatgcatcgcccgcgcagccatcgtctctgccgctcgcgcgtcgccgcagctgtttccgccgccatcatcatcggtctaggcgcggcgggcgtcggcgaagcggccaccggcacgttcatctacgccggctgctcgccgtccaagtaccagccgggcacccccttcgaggccaacctggagtcgctcctggcctccatggccggcgcggcgcccaaggccgggtacagcagcttcacggcgggtgccggcggcgttggcaacggcacgacggcgtacgggctgtaccagtgccgcggggacctggcgggggccgactgcgcggcgtgcgtgcgggacgcgctgggccagctgggccaggtgtgcgcggcggcgtacgcggcgtcgctgcagctggagggctgctacgtgcggtacgacggcaccgacttcctgggcacgcccgacgccgccatggtgtaccgcaagtgcagcaccagcagcagcagcgacggcgagttcctcagggaccgggacgccgtgctcgccggggacctgctgcagggcggcgcggccaataatggtagtagtaacgggtacaaggcgggcagctccggaagcgtgcagggcgtggcgcagtgcctcggcgacctcgcggcgcccgactgcgcggcgtgcctggcgcaggcggtcggccagctcaagggcacgtgcggcaccgccctggccgccgacgtctacctggcgcagtgctacgtcaggtactgggccgacggctactacttccgccccacacaagattattcgcaggacgacgtcgggaggactgtggccataatcgtcggaatcttagcagggctggcgatcttcgtggtgttcatctcgttcctcagaaaagcatgctagcttggccactggaaacggcgggcttccacattccctctcagacggtggcacgaggacggcataggggagaaggagggatcgggaacgagattggcctgcatgcaaaatgcttcacaaagcacatgtagtctggttttgttagcaatagatttgggctatcgatcagaggagcactaccttgatttgggtcatcattttcggtccactgattatggcctacttgcgatcacccatcgcaacagcattcacatctgatcttttaatcatttcggtacttggatgaagatcagagttgagttggtattactactttacataggcacgagcacaagtgcatgatatgtacaaccgtcgatgggtccacagtccccagatgatacgagctcgctcacagggacatggggcagcagacctcggggggctttgctatttgatctttaccatcaagcactgtgtccccgagccatcgggctccacctcgccgagttgtagctgctgcaagcgctgatgctcgactccctcattttcatctcagatataccactgttgcagatgtttgcaaacgctctcatgtacttcatgccgtactgagtaagtgaaccacactgggactcgaaaatccgcacctaagcaaaagccaccaagtgaaatgagttaggcagcgcactgacaggatgggaatgtgcgcacagcagtaaggagcttcattttcatgtgcatgccttgtatcaagagtcgaataagaaaaatcaccatactcaccatcctcttcaaacagtcccagtcatcgactaatggttgaccagaggttctaacagcctcaagcatcgaaggccctttctcaaatccgaagacgagcctcccaacgaaatcgatactgctgtcaagatgcttcctgtgctgaacagtttctttaatctctatgagagccctcagcttctcttcggtccccccatttaactgctcgtactgaaagaaagaactgaacattaggaaacaagaataaaaggaggctactgactaccacaagtgattggtagaactccagcttggtattaggatatggccatcagatggtctatatatggtcatgtaaaacactgttttgcactgtttgcaaagtaaagtttaaaatgagagatagaacgagtaagctactggagatagctttagaggtgtgagcttgacatcgagatgagtgtacgagctctaacccctctcaagcatggtgctaacgcaacagcctctcaccaagaccacatccacaattgtattagaaagctagttcttcctccaatcttctctaataagaagcccatctacaagacttagttaagccataccaaacaagacacgatttcaacttttaatggtgattgtgtgaatggaaaagccacagcaccttttagccattgatggaacaagcgaaaccactttcttgaactgtattgtcaattattatctaaatttctctaaaacataggtataaaaatgtgcaacagctagccctaggtttacatttgcgtgttccaactaaagaaataaagtagtcataaaaactaaagcatacccatggtatcattgccaacatacacactaaaaaaagagcctgatcttttgtgtgaagaatttccgaaagacaaccaagtaaacagaaataaacaactctaccagctaacccatagaaataggcataaggatggttataaaaaagaaataaaatatattgtacgataccatatatatcaagcaattgtagtaccatacttttcaacaagtatcatttacactggtttcatctgagaagtggtttatgcatgtttttacctggtgcaacaactcatcgtgtttgaatcaataaagtagagaaaaatagtggaaagcaaccaatagacctacttggcatgatataccatgaatattactaagaatggcatccatctcttttctataatatgcaagcctatatcattgcagttcatttagag

SEQ ID NO: 24448 - DNA, 815 bp, Zea Mays
tggcttctgcatcagacaccaccaagcaccaaaatgttattcatggtgatatcaagccagacaatctcttggttaccagtaccggcaacgtgaagatcggggatttcagtgttagccaggtttttgaggatgatgatgatatgctttggagatctcctggcactcctgttttcactgccccggagtgctgtcaaggttcagcctaccatggtagagcatctgatacatgggcagttggtgtaactttatattgtatggtctctgggcactatccatttctgggggatacattgcaggaaacttatgataagattgccaatgatcctgtggaattacctggcgacgtgaatccccaacttgccgatttgctcctaaggcttctctgcaaagatccaggagatcgcatcacactgcgtgctgcggctgagcatccttgggtcgctggggatgaggggccagtccctgaattcatctgtagatgtgggtttggccgcaggaagaggaatgatgtccgggaagaagttcaataacaaagcatcctcggatggtctaataggtctagcgtagataattgatgatcggcaaagcgaagccctgacgatgagttcgttgttccgtgttccctgtttctaatacgcgctcgactgaacatatttctttttgctacagaatatatactgcgtaaccctatgccagtaaggcaacgtttgtcacagtttcacgttgtcaaacgcagcttaacgggtgatgtttttttttatgatccgagaggaatggataagtgaattttttttttgaaaaaaggtgtatcttta

SEQ ID NO: 24449 - DNA, 1374 bp, Zea Mays
gtttctggcacctactcattctgaatggcggaccttacagacatcggttgctgctgttgctttagctttttaaggaagcccagtgtacctgtatgtgaacatcaggatgctgatggcatgttaactgaagatttactgaagcgtcaatcagctgaagatcatgatggaagtttctacactggagatgatcctggggatgatcttgatagaagcttctacaatggagatgatcatgatagaagcttctacgatagagatgattctgactatcttgacggaagtgatgatggaccatcaaggaagagttctgaagatattatacagttaagagctcaaaatggctttgcatgtagagaggtcccagttaaagagactaaaaaagtatttcgctcagaggatgaaaatggtaataagatggtcaaccaatatgtccacttgggaaagatcggttctggaagctacggaaaagtggttctgtacagaaacattaaagatgggaagctgtatgcagtaaaggttctgaataagccatacatgatgaaagtacatgttgtacatacaaaaactgccatgacagatgttcttcgagagaatgttattcatggtgatatcaagccagacaatctcttggttaccagtaccggcaacgtgaagatcggggatttcagtgttagccaggtttttgaggatgatgatgatatgctttggagatctcctggcactcctgttttcactgccccggagtgctgtcaaggttcagcctaccatggtagagcatctgatacatgggcagttggtgtaactttatattgtatggtctctgggcactatccatttctgggggatacattgcaggaaacttatgataagattgccaatgatcctgtggaattacctggcgacgtgaatccccaacttgccgatttgctcctaaggcttctctgcaaagatccaggagatcgcatcacactgcgtgctgcggctgagcatccttgggtcgctggggatgaggggccagtccctgaattcatctgtagatgtgggtttggccgcaggaagaggaatgatgtccgggaagaagttcaataacaaagcatcctcggatggtctaataggtctagcgtagataattgatgatcggcaaagcgaagccctgacgatgagttcgttgttccgtgttccctgtttctaatacgcgctcgactgaacatatttctttttgctacagaatatatactgcgtaaccctatgccagtaaggcaacgtttgtcacagtttcacgttgtcaaacgcagcttaacgggtgatgtttttttttatgatccgagaggaatggataagtgaattttttttttgaaaaaaggtgtatcttta

SEQ ID NO: 24450 - DNA, 1659 bp, Zea Mays
ctgagattgagtgacatttttggtttctgcatgtatgctattattgtagtttcatatcatcttcagtgacgatatggcagccaggaaagtagcagaaaaagttgcggctttttttattccggtgttttttttaaccttgtcccttgtttttatcatttaggtttctggcacctactcattctgaatggcggaccttacagacatcggttgctgctgttgctttagctttttaaggaagcccagtgtacctgtatgtgaacatcaggatgctgatggcatgttaactgaagatttactgaagcgtcaatcagctgaagatcatgatggaagtttctacactggagatgatcctggggatgatcttgatagaagcttctacaatggagatgatcatgatagaagcttctacgatagagatgattctgactatcttgacggaagtgatgatggaccatcaaggaagagttctgaagatattatacagatgaaaatggtaataagatggtcaaccaatatgtccacttgggaaagatcggttctggaagctacggaaaagtggttctgtacagaaacattaaagatgggaagctgtatgcagtaaaggttctgaataagccatacatgatgaaagtacatgttgtacatacaaaaactgccatgacagatgttcttcgagaggtatccataatgaaaatgttgaaccaccccaacattgtaaatctcgttgaagtgattgatgacccaaacatggataaattttacatggttcttgagtatgttgaaggaaaaatggtttgtgataatggtttagaagaagctactgcaagattttttttgcgagacataatatctggtcttttgtatcttcactcccataatgttattcatggtgatatcaagccagacaatctcttggttaccagtaccggcaacgtgaagatcggggatttcagtgttagccaggtttttgaggatgatgatgatatgctttggagatctcctggcactcctgttttcactgccccggagtgctgtcaaggttcagcctaccatggtagagcatctgatacatgggcagttggtgtaactttatattgtatggtctctgggcactatccatttctgggggatacattgcaggaaacttatgataagattgccaatgatcctgtggaattacctggcgacgtgaatccccaacttgccgatttgctcctaaggcttctctgcaaagatccaggagatcgcatcacactgcgtgctgcggctgagcatccttgggtcgctggggatgaggggccagtccctgaattcatctgtagatgtgggtttggccgcaggaagaggaatgatgtccgggaagaagttcaataacaaagcatcctcggatggtctaataggtctagcgtagataattgatgatcggcaaagcgaagccctgacgatgagttcgttgttccgtgttccctgtttctaatacgcgctcgactgaacatatttctttttgctacagaatatatactgcgtaaccctatgccagtaaggcaacgtttgtcacagtttcacgttgtcaaacgcagcttaacgggtgatgtttttttttatgatccgagaggaatggataagtgaattttttttttgaaaaaaggtgtatcttta

SEQ ID NO: 24451 - DNA, 870 bp, Zea Mays
atggaggaccgtgagtggatgtacatgggccgctcaggtcagggtcaggtcaccaatgaatggatcaacaagactgatgctttcttggaacgagcatttggaactggtcgactgtggtgagtggaggtgctcacacacgccgagtcaatggcatactcggtcttctgtgcaaggaacacttccctggcatggttgagtacgacggagtgatggtgccagcctactcgttcgaccactatgccattgcccccgatgctgaagatcgagtcgatagggtattcaacaacaaggcagagcgggtgaagcaagagttgtgggtaaatatttcttatcccatattgctcaatacattgcattcgttggacatttttgaaataatgaatgtatgcatcgtgtttgtatatataggatttctacagatgtcaggagggatatgagggcagggcagatgcgttggctaccagatgttgtaaaaaactcgtcgtagatatgcactacgaggcgcgcatccaggccatcataaaataccatggggccatccttagagagaaggtctccaaaaaggacgcaagaaccatgaagttgactcgggaccagtacttggagatgattccttattggtgtgccacgcatcccgagtgttgggaacgaatggtggacaaatggtgctcagacgagtgggaggaggtgcacaacacttgtcgggatcgacgtttgatgatgccaggtgtaccacaccatcaaggcagtcgcagcctcagcggatacgcacaagcatggtcggtgtcacatggtggacagacttgttccatcttcaaggcatttgctatgtcccacaaggccaaggcgacgtccgacgtcaactataac

SEQ ID NO: 24452 - DNA, 911 bp, Zea Mays
ctcctcaatcctctcgccgccagaaagtaacacttctgcactctagagcagaggagaaacgcatcctggccaagtacgcctctatccgaagccaaaccacacgcacacgccgcgccagcctcacgctctcacccatgttttgtgcgcgcacgcgtcctgcttcttctcgccaacgacaagccgcacgcagcgtctcgccagctagctgatcatgagcaacggcgacacgctcgacaagctggtggtgttcctggcgaagcgcgacggcatcgacaagctggtcaagacgttccagtacgtgtccaagctggcgcactggggcgccgagtcttcgctcccggagctcgcgcagcgcgccaagagctgggagacggcgtccgggctgagccgcaaggcgttccggtcgggccgcttcctggccgggttcaacgcgctgcgccgcggcccggtcccggtcccgggggagctcggcgcgctggccgtgctggccaacgccggcgagatggtctacttcttcttcgaccacttcacgtggctgtcccgcgcgggcgtgctcgagccctggctggcgcgccgggccagcttcgtgtcggccttcggcgaggccgtcggctacgtgtttttcatcgccatggacttcatcatgatcaggcggggcctgcggcaggagagggagctgctgagggaaggcgccaaggacgccgcggagaaggaggtgcggaggatccgggtggacagggtgatgcggctcatggcgacggcggccaacgccgccgacctgatcatcgccgtcgcggaaaccgatcccaacccgttctgcaaccacgccgtcacgctggggattagcggcctcgtgtcagcgtgggctggctggtgcagcagcaatcgacaaggtggtgttttttttaaga

SEQ ID NO: 24453 - DNA, 824 bp, Zea Mays
aagtacgcctctatccgaagccaaaccacacgcacacgccgcgccagcctcacgctctcacccatgttttgtgcgcgcacgcgtcctgcttcttctcgccaacgacaagccgcacgcagcgtctcgccagctagctgatcatgagcaacggcgacacgctcgacaagctggtggtgttcctggcgaagcgcgacggcatcgacaagctggtcaagacgttccagtacgtgtccaagctggcgcactggggcgccgagtcttcgctcccggagctcgcgcagcgcgccaagagctgggagacggcgtccgggctgagccgcaaggcgttccggtcgggccgcttcctggccgggttcaacgcgctgcgccgcggcccggtcccggtcccgggggagctcggcgcgctggccgtgctggccaacgccggcgagatggtctacttcttcttcgaccacttcacgtggctgtcccgcgcgggcgtgctcgagccctggctggcgcgccgggccagcttcgtgtcggccttcggcgaggccgtcggctacgtgtttttcatcgccatggacttcatcatgatcaggcggggcctgcggcaggagagggagctgctgagggaaggcgccaaggacgccgcggagaaggaggtgcggaggatccgggtggacagggtgatgcggctcatggcgacggcggccaacgccgccgacctgatcatcgccgtcgcggaaaccgatcccaacccgttctgcaaccacgccgtcacgctggggattagcggcctcgtgtcagcgtgggctggctgcacattgaacctcgtcctgcct

SEQ ID NO: 24454 - DNA, 2442 bp, Zea Mays
agattatgcaccgtggttggaattatgcacttgctggtggtagaaatctcttcagcaatagcactatagcagaacggtgcacgtgttgttccacagttaaagtggacaaagtttctgacaccagataaggcacccagttggaagctatcattcaactttatatctacttctagtaccttttccattcctgtcttcagttgacttctaacatgcatcccacaagccagtattttccagttttttatgatgaaataataataataaaaaaaacaaagacaagtgttatttctccaaattcagatagggattctgttgtttgaacaagtactgaactagtacttttttttttcctctgttgattgatgaacgtcttgttctcacacacttaagtgcctactgttttcaaaatacagcgacctgtcaaattcatctctccaaggattcttggcaccagagatcgggtccttgagatctttgcagactctcgtgttggatcgcaacacattcatgggctcaataccaaaaggcatcggcatgctacagaacctgatcgagctgaacctcagctccaaccagctcgcggggcctattcccagtgagatcggtgacatggcgaagatcacaaaaatagaccttcacgcgaatcggctggacggcactatccctcctgagcttggcaagctgggaagcctccttgagctacggctgagcaacaactgccttacaggcattgttcctgcaagtaatgattccgacgtggaatccgccagcacctctgatcaaactggattgtgtcagctatctcagctaaccaatattgatctctcgtataacttcttggttggagatgttcccgcatgcttacagcaaatccaaagtatttgaacagatcaagcttggtagggaattgcttccagaacaacacatcaaaccgcccacttcaacaatgtgaaactaatcaggacagaggcaaagacaatgatgctgatgagaatgtgcagaaaggcctgccagagccactttggcttctcattctggaagtcatcgcagcagtttcattgctttgcttcttaacactttgtaccatgactggcctccgaaggtgcagagccagatcctctgggtctgagaccagtgttccatggacaagagctgtaagctggaaggagaacaccgtaatctcaatcgataagccggcaggagctggcagaggcttgcgaggacttcagcaacataattggatcgtctcaggagacagttgtgtacaagggaactctgaaggatggccgggaaatcgctgttgtgtcgctgtctgttccggtgcattactggaatgactatgtcgaacttcactttcacaaggaggtgatagaaatgtccagaccgagtcacgaaaatgtcgcaaagatggtgggatactgcaaggagtctgatccattttcgagaatgctagtctttcagtacccaccaaatgggacactctacgagcatctgcacgatggagatgggtggcagctatcttggcctagacggatgaaattagcactcgccatctcgagggctctcagatacttgcacactgagctgcaacctccgtttgcagttgctgcactgacgtctagttcagtctacctaactgaagacttctccccaaagataatcgatttcgagaggtggagatatcttgcgaccaaaccaggatttggctcactaaatggcgggtcagtcaacagcgttacagattctcggcataagcgcttcatggacgtccaggccaacacttacgcgtttggcgtgatcctgctggagctggtcagtggcagagcctcggtttccaaagatacaggaggcttggtggattgggcaagaaagcacctggagcatcccgaggagttcggcaagctggtggacccgaggctgcagagcgtgaaccaggagagcctgggcatcgtctgcaacgtggtgaacctgtgcatcgacctggagccgtcgcggcggccctccatgagcatgatcgcggccatcctggaggaaggcatcgaagcgtcggcggccaccttgctcaggaattcgtctctggcctgggccgaagccgagctggccatctcctagaacctagataccctctttgcatgttttgctgcacttgctagactgtatgtttggacagtgacgatggtttaacccgttgttactccgtttggcattgttatttctctcccttttttggagagagaaatggctcacagatctgaattcaaaatgactcaagttttgatttcatcagcgcgaggagatgcatttttatcttttcaaatagagggagcattttctttttttaggtacagaaaatcagagggagggggctagacaaaagactgctacaatagatcgatgacacagagtataatacaatcataatatagagaggttcgaattggg

SEQ ID NO: 24455 - DNA, 2536 bp, Zea Mays
agaaaacaaatatagagcgaaatgtggtatgccggcctgttttagagcctgctcaactcaaatggagattatgcaccgtggttggaattatgcacttgctggtggtagaaatctcttcagcaatagcactatagcagaacggtgcacgtgttgttccacagttaaagtggacaaagtttctgacaccagataaggcacccagttggaagctatcattcaactttatatctacttctagtaccttttccattcctgtcttcagttgacttctaacatgcatcccacaagccagtattttccagttttttatgatgaaataataataataaaaaaaacaaagacaagtgttatttctccaaattcagatagggattctgttgtttgaacaagtactgaactagtacttttttttttcctctgttgattgatgaacgtcttgttctcacacacttaagtgcctactgttttcaaaatacagcgacctgtcaaattcatctctccaaggattcttggcaccagagatcgggtccttgagatctttgcagactctcgtgttggatcgcaacacattcatgggctcaataccaaaaggcatcggcatgctacagaacctgatcgagctgaacctcagctccaaccagctcgcggggcctattcccagtgagatcggtgacatggcgaagatcacaaaaatagaccttcacgcgaatcggctggacggcactatccctcctgagcttggcaagctgggaagcctccttgagctacggctgagcaacaactgccttacaggcattgttcctgcaagtaatgattccgacgtggaatccgccagcacctctgatcaaactggattgtgtcagctatctcagctaaccaatattgatctctcgtataacttcttggttggagatgttcccgcatgcttacagcaaatccaaagtatttgaacagatcaagcttggtagggaattgcttccagaacaacacatcaaaccgcccacttcaacaatgtgaaactaatcaggacagaggcaaagacaatgatgctgatgagaatgtgcagaaaggcctgccagagccactttggcttctcattctggaagtcatcgcagcagtttcattgctttgcttcttaacactttgtaccatgactggcctccgaaggtgcagagccagatcctctgggtctgagaccagtgttccatggacaagagctgtaagctggaaggagaacaccgtaatctcaatcgatgatgacctcctggtaaatgtgccaaagataagccggcaggagctggcagaggcttgcgaggacttcagcaacataattggatcgtctcaggagacagttgtgtacaagggaactctgaaggatggccgggaaatcgctgttgtgtcgctgtctgttccggtgcattactggaatgactatgtcgaacttcactttcacaaggaggtgatagaaatgtccagaccgagtcacgaaaatgtcgcaaagatggtgggatactgcaaggagtctgatccattttcgagaatgctagtctttcagtacccaccaaatgggacactctacgagcatctgcacgatggagatgggtggcagctatcttggcctagacggatgaaattagcactcgccatctcgagggctctcagatacttgcacactgagctgcaacctccgtttgcagttgctgcactgacgtctagttcagtctacctaactgaagacttctccccaaagataatcgatttcgagaggtggagatatcttgcgaccaaaccaggatttggctcactaaatggcgggtcagtcaacagcgttacagattctcggcataagcgcttcatggacgtccaggccaacacttacgcgtttggcgtgatcctgctggagctggtcagtggcagagcctcggtttccaaagatacaggaggcttggtggattgggcaagaaagcacctggagcatcccgaggagttcggcaagctggtggacccgaggctgcagagcgtgaaccaggagagcctgggcatcgtctgcaacgtggtgaacctgtgcatcgacctggagccgtcgcggcggccctccatgagcatgatcgcggccatcctggaggaaggcatcgaagcgtcggcggccaccttgctcaggaattcgtctctggcctgggccgaagccgagctggccatctcctagaacctagataccctctttgcatgttttgctgcacttgctagactgtatgtttggacagtgacgatggtttaacccgttgttactccgtttggcattgttatttctctcccttttttggagagagaaatggctcacagatctgaattcaaaatgactcaagttttgatttcatcagcgcgaggagatgcatttttatcttttcaaatagagggagcattttctttttttaggtacagaaaatcagagggagggggctagacaaaagactgctacaatagatcgatgacacagagtataatacaatcataatatagagaggttcgaattggg

SEQ ID NO: 24456 - DNA, 5047 bp, Zea Mays
atggcgacggcagcggcggactgccgtacgcgaaccgtgctcaaggcggcgctgtcgaggaccaccgccgccttcctcttcgtcgccgtcgtcgccgtcggggtggtcgtctcgggtcgctggatcaccgccacaaccgctggacgcctgaggcgccttcccaccaccgcggccattcccgccgccgccgtactccacccctccgaaacgcaacagctacaaccgccgcgcccgcactccactcctcccccttcccgaccaccgtctccctcctactccatctcctgccccagcctcaacctctccagtcccgccaaagcgcccaaaacctcacaaaccctcgcgcgcgcgctctcctctccctccatctgccccgcctcccccagcccgcccccgccctacgccgcttcatcgccgtcctccaacacctcgtgcccgtcctacttccgcttcatccacgaggacctccgcccatggcgcgccgcgggcgggatcacgcgcgccatgctcgaccgcgcccgcctcaccgccaccttccgcctcgtcgtgctcggcggcaacgcctacgtccagcggttccgcccggcgttccagacccgcgacctcttcaccatctggggcgtcctccagctgctccgtcgccaccccggccgcgtccccgatctcgacctcatgttcgacaccgtcgactggcccgtcgtccgctcccacctctaccgcgggaagaacgccgagatgttgccgccgctgttccgctactgcggggatgataaaacgctggatatcgtcttcccggattggtcattctggggatggcccgagatcaacataaaaccatgggatgccttgaaggaggacttgaaggccggtaataacagagtgagatggatggatagagaaccttatgcttactggaaagggaatccatcagtttctgggacacgtaaggaactggttaagtgtaacgtctctagtacgcatgattggaacgcaaggatttacgctcaggactggttcaaggagagcaaggcaggatataaggactcagatttgagtagtcagtgtgctcacaggtcacttatgccgattcagcattattggcctgttcggtatgacaataaatgtgcctccataaaatatgctgttgattggggcaactctcacaagcaattggtaacttgcatctatatatattttgtcatctacatttgtaggctttattccagtgctaaacattagatttggaaataatagaaataagctatgcttgttactaactgaaatccagttgagatgcagcgtatggtctatggtgtgaacccaaggtgcctaatctttcttaggatatctatttctcattaaggcaacataattaaatcatcatccgttgatgttactgaaagagttcggtgcaaacaacttctgcccctaatagcgtgcattgacaaatcaacctgcacctgggacgttttgtcgaaatgtaaaaaaacccaccatgatgcaaaacatggcagaacataaaatggaccaatcagatatatgctaatatttgagcatgggattaagaagagaaagatgcaagtttttcatccaaaactgatcaatgtaggctggataagcgtctactattcagtgaacttgtttcactggtctttcttcctaacagacatttcgagttttctatagagttaagagaacttttattaaatgtccttggatgcatgctaataaaaatgctttagttatgctataggattcaaaactcaggagtcaagaccattatgctaataaaaatggtttagatttgccaagcaaaactttatattaccatcatcaaaagtacttcactggtaatatagttttatgaattcaatatatcttagaaaaataaaaactcaaggtgagtgttaatgctataaacaactactaaattggacaggtggcagtcatttttttacttgcactgtttagggttttagcatgcctttatgttgcagtctcttaatactcccctcgtcccagtatataaggtgtaaccactttttattctagtcccataatataaggcgtgttctatctagagatacgtatattgatgtagtagtactagtgttgatagagagaattaaatatatttcttagtctttaaaccagaggtggttgcgtcttatatattgggacggagggagtattgttcctctaccttggtgagaaatatatgtttttctaaaaatgaattacttttctcatactccaaagctttcttaggcacagcgcataggaaagcaagcaagtaatttcattcaagacgagctcagtatggaccatgtttatgactacatgcttcatcttctaactgaatatgccaagctcctaaaattcaaacccactaagccacctgatgctgttgaggtatgttcagagtctttggcctgccaagctgaaggcctcgagaagaagtttcttatggaatccatggtgaagtttccccgtgatgcatgtgatctgcctcctcccttcaaccctcatgagctcaagttgctaaagcagaagaaagaaaattcaataaagcagatccatatgtgggagcaaaaagatttgggggcttaaataacaattttgaccccctgctttttttttcttccaatcgtaggcacacataattggtgtcttataatttggaattggggagtatgatctaactcagtgtcattgaggtgcgaccaaataccaattatttattgactggatcaacttagaagaatctagataaatcgagcagatacccatttcttaggtatttttgtataaagcaaaccatagctacttagctttaaacatttttctgtatttaattttgttttgattggctttactttgtaaagcaactgtaaatgtgacacagaaattatacagaatatataattctgatccgatattcacttcctcattgagattggatatcgtagatatctgtgctgtagctcaaaaagaagtattgcaatgtgagctcctgggtgttattgtaccgtttgaactgtggagagtttgatggagcaggtcaagggtatcctctatgaggttaaatcatggcctccagttaagtaattttacttgaaatgctctctttcactggtcactggcatggtaagcaactctgctgcttccacagcttaacacaaagaacagattcaccagtagttttaccctgcagaaaactcttgaatcgatggtactctgatagaccgatggaaaggaaggtggtgcctggtaaatattgatggtccatttatgattttcatcactgggggtttccgaagcctgtgtcagtttcttaagtgtcaatccaattcaactattgtctgcgctgaacagggaaatatctaagtttcagttctccgctacagtctgcagcaatgcattgttttctttgcgctgatgtcaggtaaagcttgttagttgttactgttagatttgtttgacttccatatgtggagtatatgaacttgccttgctcatgactttggttgttggagacttgtagggtgtttggtttgaggaataagttagtttatcatgttctcacttctatttttttgtttggtttgtagaatataatgagtttatccattatcacctaattccttatagttagttagttagttaatattaatacgaggaatgaggttatcccatcaaatttaaagaatagacttatgatgcaccacatcatgttggatgaagtgatatgttggatgaagtgatttctcaaaccaaactctgagttagagctgaaaatctcaccttacattggtagacattgtgccacacctacggtccattgtgggaaaagggatatgcagcaatacagcataagagtatctagtagagttatttcgaatgctttacatactattttctcaacagtcaaccaagctcgtagtcaacggagtaaaaagagactctgggagaagcaagaagcgtaatttctttgagccttctttattagacccccaagttttatgtcaagtatttttcacctttatccattacatctccagaaccgttctgtttgctgctttatcgattacattgcatgtacgaatctagctacactgacattgtaaagatcatgacgtcagttattctatcggttccaagttatatgtcactttctttgtccgaagtttaattttgttaagtttttagagaaaaaatacattaacatctacaagctcaaataaatgcacgtcagggaataattcagtatggatttaatgaatctaatttgacgttatattttatttcctataaatgtagctaatacgtagtttaaattagagaaatttgacttatgttaaaactgaagtggcatctaatttggaacggagcgagtaatttttttcctcatgaaacgcgcctcaagaaaataaacaaagatggtgaaatgtgaagaaaacttaaaaccattttgtaatgaaaactaaggcattttatttctcttttagattatataagctagattataataaataggtagagggtaaaatatcgctttatgttcttaaataaactaaaataagttaacattggatagcttatttgtaatcataaagtgatattttactcttcgactcttctaccatattctagcttatataatctagcagggaaacaaacaccataagagctagtgggctagtttggtaactccattttttcaaggaatttttatttttctagttctcgtttgtttctttttattttgaggaattgaaatcttactaatggtatatactatttttttagaatgtgacatttcactattcaaagttatcatataagcctatctcaaattcatggggcgagagatagaaattgattctatagatttacatgctatttttctgacgtataacttatagcacactcttctccttgcttcgctataacataaatataatatataactatctctctcatataatttaggataatgtacaaatatattacatatataaatatattaattttaattagttttgtc

SEQ ID NO: 24457 - DNA, 5318 bp, Zea Mays
atggcgacggcagcggcggactgccgtacgcgaaccgtgctcaaggcggcgctgtcgaggaccaccgccgccttcctcttcgtcgccgtcgtcgccgtcggggtggtcgtctcgggtcgctggatcaccgccacaaccgctggacgcctgaggcgccttcccaccaccgcggccattcccgccgccgccgtactccacccctccgaaacgcaacagctacaaccgccgcgcccgcactccactcctcccccttcccgaccaccgtctccctcctactccatctcctgccccagcctcaacctctccagtcccgccaaagcgcccaaaacctcacaaaccctcgcgcgcgcgctctcctctccctccatctgccccgcctcccccagcccgcccccgccctacgccgcttcatcgccgtcctccaacacctcgtgcccgtcctacttccgcttcatccacgaggacctccgcccatggcgcgccgcgggcgggatcacgcgcgccatgctcgaccgcgcccgcctcaccgccaccttccgcctcgtcgtgctcggcggcaacgcctacgtccagcggttccgcccggcgttccagacccgcgacctcttcaccatctggggcgtcctccagctgctccgtcgccaccccggccgcgtccccgatctcgacctcatgttcgacaccgtcgactggcccgtcgtccgctcccacctctaccgcgggaagaacgccgagatgttgccgccgctgttccgctactgcggggatgataaaacgctggatatcgtcttcccggattggtcattctggggatggcccgagatcaacataaaaccatgggatgccttgaaggaggacttgaaggccggtaataacagagtgagatggatggatagagaaccttatgcttactggaaagggaatccatcagtttctgggacacgtaaggaactggttaagtgtaacgtctctagtacgcatgattggaacgcaaggatttacgctcaggtaacttatttttgttcgttatttattccatccccgcaatagggatccttagagtccctctgttcccctaatgggttaaaatggttctcttcgaatttagtaaataccattacatgtttacttctgcaaatgttgcatttgtggatagatgttgaagatatttattgtcttactttgtttttttggttttctgggacttaggactggttcaaggagagcaaggcaggatataaggactcagatttgagtagtcagtgtgctcacaggtacaagatctatattgaaggatcagcgtggtctatcagtgagaaatatatactagcatgtgattcaatgactctgttggttacaccaagatactatgatttcttttcaaggtcacttatgccgattcagcattattggcctgttcggtatgacaataaatgtgcctccataaaatatgctgttgattggggcaactctcacaagcaattggctttattccagtgctaaacattagatttggaaataatagaaataagctatgcttgttactaactgaaatccagttgagatgcagcgtatggtctatggtgtgaacccaaggtgcctaatctttcttaggatatctatttctcattaaggcaacataattaaatcatcatccgttgatgttactgaaagagttcggtgcaaacaacttctgcccctaatagcgtgcattgacaaatcaacctgcacctgggacgttttgtcgaaatgtaaaaaaacccaccatgatgcaaaacatggcagaacataaaatggaccaatcagatatatgctaatatttgagcatgggattaagaagagaaagatgcaagtttttcatccaaaactgatcaatgtaggctggataagcgtctactattcagtgaacttgtttcactggtctttcttcctaacagacatttcgagttttctatagagttaagagaacttttattaaatgtccttggatgcatgctaataaaaatgctttagttatgctataggattcaaaactcaggagtcaagaccattatgctaataaaaatggtttagatttgccaagcaaaactttatattaccatcatcaaaagtacttcactggtaatatagttttatgaattcaatatatcttagaaaaataaaaactcaaggtgagtgttaatgctataaacaactactaaattggacaggtggcagtcatttttttacttgcactgtttagggttttagcatgcctttatgttgcagtctcttaatactcccctcgtcccagtatataaggtgtaaccactttttattctagtcccataatataaggcgtgttctatctagagatacgtatattgatgtagtagtactagtgttgatagagagaattaaatatatttcttagtctttaaaccagaggtggttgcgtcttatatattgggacggagggagtattgttcctctaccttggtgagaaatatatgtttttctaaaaatgaattacttttctcatactccaaagctttcttaggcacagcgcataggaaagcaagcaagtaatttcattcaagacgagctcagtatggaccatgtttatgactacatgcttcatcttctaactgaatatgccaagctcctaaaattcaaacccactaagccacctgatgctgttgaggtatgttcagagtctttggcctgccaagctgaaggcctcgagaagaagtttcttatggaatccatggtgaagtttccccgtgatgcatgtgatctgcctcctcccttcaaccctcatgagctcaagttgctaaagcagaagaaagaaaattcaataaagcagatccatatgtgggagcaaaaagatttgggggcttaaataacaattttgaccccctgctttttttttcttccaatcgtaggcacacataattggtgtcttataatttggaattggggagtatgatctaactcagtgtcattgaggtgcgaccaaataccaattatttattgactggatcaacttagaagaatctagataaatcgagcagatacccatttcttaggtatttttgtataaagcaaaccatagctacttagctttaaacatttttctgtatttaattttgttttgattggctttactttgtaaagcaactgtaaatgtgacacagaaattatacagaatatataattctgatccgatattcacttcctcattgagattggatatcgtagatatctgtgctgtagctcaaaaagaagtattgcaatgtgagctcctgggtgttattgtaccgtttgaactgtggagagtttgatggagcaggtcaagggtatcctctatgaggttaaatcatggcctccagttaagtaattttacttgaaatgctctctttcactggtcactggcatggtaagcaactctgctgcttccacagcttaacacaaagaacagattcaccagtagttttaccctgcagaaaactcttgaatcgatggtactctgatagaccgatggaaaggaaggtggtgcctggtaaatattgatggtccatttatgattttcatcactgggggtttccgaagcctgtgtcagtttcttaagtgtcaatccaattcaactattgtctgcgctgaacagggaaatatctaagtttcagttctccgctacagtctgcagcaatgcattgttttctttgcgctgatgtcaggtaaagcttgttagttgttactgttagatttgtttgacttccatatgtggagtatatgaacttgccttgctcatgactttggttgttggagacttgtagggtgtttggtttgaggaataagttagtttatcatgttctcacttctatttttttgtttggtttgtagaatataatgagtttatccattatcacctaattccttatagttagttagttagttaatattaatacgaggaatgaggttatcccatcaaatttaaagaatagacttatgatgcaccacatcatgttggatgaagtgatatgttggatgaagtgatttctcaaaccaaactctgagttagagctgaaaatctcaccttacattggtagacattgtgccacacctacggtccattgtgggaaaagggatatgcagcaatacagcataagagtatctagtagagttatttcgaatgctttacatactattttctcaacagtcaaccaagctcgtagtcaacggagtaaaaagagactctgggagaagcaagaagcgtaatttctttgagccttctttattagacccccaagttttatgtcaagtatttttcacctttatccattacatctccagaaccgttctgtttgctgctttatcgattacattgcatgtacgaatctagctacactgacattgtaaagatcatgacgtcagttattctatcggttccaagttatatgtcactttctttgtccgaagtttaattttgttaagtttttagagaaaaaatacattaacatctacaagctcaaataaatgcacgtcagggaataattcagtatggatttaatgaatctaatttgacgttatattttatttcctataaatgtagctaatacgtagtttaaattagagaaatttgacttatgttaaaactgaagtggcatctaatttggaacggagcgagtaatttttttcctcatgaaacgcgcctcaagaaaataaacaaagatggtgaaatgtgaagaaaacttaaaaccattttgtaatgaaaactaaggcattttatttctcttttagattatataagctagattataataaataggtagagggtaaaatatcgctttatgttcttaaataaactaaaataagttaacattggatagcttatttgtaatcataaagtgatattttactcttcgactcttctaccatattctagcttatataatctagcagggaaacaaacaccataagagctagtgggctagtttggtaactccattttttcaaggaatttttatttttctagttctcgtttgtttctttttattttgaggaattgaaatcttactaatggtatatactatttttttagaatgtgacatttcactattcaaagttatcatataagcctatctcaaattcatggggcgagagatagaaattgattctatagatttacatgctatttttctgacgtataacttatagcacactcttctccttgcttcgctataacataaatataatatataactatctctctcatataatttaggataatgtacaaatatattacatatataaatatattaattttaattagttttgtc

SEQ ID NO: 24458 - DNA, 5225 bp, Zea Mays
cttccagcccagcacgagagaaagcataggctgcgcggctctcctctgctttcgcgcaaccgagccggcaggaagcagtgaccgtcggggccccggcggccggctgccatggcgacggcagcggcggactgccgtacgcgaaccgtgctcaaggcggcgctgtcgaggaccaccgccgccttcctcttcgtcgccgtcgtcgccgtcggggtggtcgtctcgggtcgctggatcaccgccacaaccgctggacgcctgaggcgccttcccaccaccgcggccattcccgccgccgccgtactccacccctccgaaacgcaacagctacaaccgccgcgcccgcactccactcctcccccttcccgaccaccgtctccctcctactccatctcctgccccagcctcaacctctccagtcccgccaaagcgcccaaaacctcacaaaccctcgcgcgcgcgctctcctctccctccatctgccccgcctcccccagcccgcccccgccctacgccgcttcatcgccgtcctccaacacctcgtgcccgtcctacttccgcttcatccacgaggacctccgcccatggcgcgccgcgggcgggatcacgcgcgccatgctcgaccgcgcccgcctcaccgccaccttccgcctcgtcgtgctcggcggcaacgcctacgtccagcggttccgcccggcgttccagacccgcgacctcttcaccatctggggcgtcctccagctgctccgtcgccaccccggccgcgtccccgatctcgacctcatgttcgacaccgtcgactggcccgtcgtccgctcccacctctaccgcgggaagaacgccgagatgttgccgccgctgttccgctactgcggggatgataaaacgctggatatcgtcttcccggattggtcattctggggatggcccgagatcaacataaaaccatgggatgccttgaaggaggacttgaaggccggtaataacagagtgagatggatggatagagaaccttatgcttactggaaagggaatccatcagtttctgggacacgtaaggaactggttaagtgtaacgtctctagtacgcatgattggaacgcaaggatttacgctcaggactggttcaaggagagcaaggcaggatataaggactcagatttgagtagtcagtgtgctcacaggtacaagatctatattgaaggatcagcgtggtctatcagtgagaaatatatactagcatgtgattcaatgactctgttggttacaccaagatactatgatttcttttcaaggtcacttatgccgattcagcattattggcctgttcggtatgacaataaatgtgcctccataaaatatgctgttgattggggcaactctcacaagcaattggctttattccagtgctaaacattagatttggaaataatagaaataagctatgcttgttactaactgaaatccagttgagatgcagcgtatggtctatggtgtgaacccaaggtgcctaatctttcttaggatatctatttctcattaaggcaacataattaaatcatcatccgttgatgttactgaaagagttcggtgcaaacaacttctgcccctaatagcgtgcattgacaaatcaacctgcacctgggacgttttgtcgaaatgtaaaaaaacccaccatgatgcaaaacatggcagaacataaaatggaccaatcagatatatgctaatatttgagcatgggattaagaagagaaagatgcaagtttttcatccaaaactgatcaatgtaggctggataagcgtctactattcagtgaacttgtttcactggtctttcttcctaacagacatttcgagttttctatagagttaagagaacttttattaaatgtccttggatgcatgctaataaaaatgctttagttatgctataggattcaaaactcaggagtcaagaccattatgctaataaaaatggtttagatttgccaagcaaaactttatattaccatcatcaaaagtacttcactggtaatatagttttatgaattcaatatatcttagaaaaataaaaactcaaggtgagtgttaatgctataaacaactactaaattggacaggtggcagtcatttttttacttgcactgtttagggttttagcatgcctttatgttgcagtctcttaatactcccctcgtcccagtatataaggtgtaaccactttttattctagtcccataatataaggcgtgttctatctagagatacgtatattgatgtagtagtactagtgttgatagagagaattaaatatatttcttagtctttaaaccagaggtggttgcgtcttatatattgggacggagggagtattgttcctctaccttggtgagaaatatatgtttttctaaaaatgaattacttttctcatactccaaagctttcttaggcacagcgcataggaaagcaagcaagtaatttcattcaagacgagctcagtatggaccatgtttatgactacatgcttcatcttctaactgaatatgccaagctcctaaaattcaaacccactaagccacctgatgctgttgaggtatgttcagagtctttggcctgccaagctgaaggcctcgagaagaagtttcttatggaatccatggtgaagtttccccgtgatgcatgtgatctgcctcctcccttcaaccctcatgagctcaagttgctaaagcagaagaaagaaaattcaataaagcagatccatatgtgggagcaaaaagatttgggggcttaaataacaattttgaccccctgctttttttttcttccaatcgtaggcacacataattggtgtcttataatttggaattggggagtatgatctaactcagtgtcattgaggtgcgaccaaataccaattatttattgactggatcaacttagaagaatctagataaatcgagcagatacccatttcttaggtatttttgtataaagcaaaccatagctacttagctttaaacatttttctgtatttaattttgttttgattggctttactttgtaaagcaactgtaaatgtgacacagaaattatacagaatatataattctgatccgatattcacttcctcattgagattggatatcgtagatatctgtgctgtagctcaaaaagaagtattgcaatgtgagctcctgggtgttattgtaccgtttgaactgtggagagtttgatggagcaggtcaagggtatcctctatgaggttaaatcatggcctccagttaagtaattttacttgaaatgctctctttcactggtcactggcatggtaagcaactctgctgcttccacagcttaacacaaagaacagattcaccagtagttttaccctgcagaaaactcttgaatcgatggtactctgatagaccgatggaaaggaaggtggtgcctggtaaatattgatggtccatttatgattttcatcactgggggtttccgaagcctgtgtcagtttcttaagtgtcaatccaattcaactattgtctgcgctgaacagggaaatatctaagtttcagttctccgctacagtctgcagcaatgcattgttttctttgcgctgatgtcaggtaaagcttgttagttgttactgttagatttgtttgacttccatatgtggagtatatgaacttgccttgctcatgactttggttgttggagacttgtagggtgtttggtttgaggaataagttagtttatcatgttctcacttctatttttttgtttggtttgtagaatataatgagtttatccattatcacctaattccttatagttagttagttagttaatattaatacgaggaatgaggttatcccatcaaatttaaagaatagacttatgatgcaccacatcatgttggatgaagtgatatgttggatgaagtgatttctcaaaccaaactctgagttagagctgaaaatctcaccttacattggtagacattgtgccacacctacggtccattgtgggaaaagggatatgcagcaatacagcataagagtatctagtagagttatttcgaatgctttacatactattttctcaacagtcaaccaagctcgtagtcaacggagtaaaaagagactctgggagaagcaagaagcgtaatttctttgagccttctttattagacccccaagttttatgtcaagtatttttcacctttatccattacatctccagaaccgttctgtttgctgctttatcgattacattgcatgtacgaatctagctacactgacattgtaaagatcatgacgtcagttattctatcggttccaagttatatgtcactttctttgtccgaagtttaattttgttaagtttttagagaaaaaatacattaacatctacaagctcaaataaatgcacgtcagggaataattcagtatggatttaatgaatctaatttgacgttatattttatttcctataaatgtagctaatacgtagtttaaattagagaaatttgacttatgttaaaactgaagtggcatctaatttggaacggagcgagtaatttttttcctcatgaaacgcgcctcaagaaaataaacaaagatggtgaaatgtgaagaaaacttaaaaccattttgtaatgaaaactaaggcattttatttctcttttagattatataagctagattataataaataggtagagggtaaaatatcgctttatgttcttaaataaactaaaataagttaacattggatagcttatttgtaatcataaagtgatattttactcttcgactcttctaccatattctagcttatataatctagcagggaaacaaacaccataagagctagtgggctagtttggtaactccattttttcaaggaatttttatttttctagttctcgtttgtttctttttattttgaggaattgaaatcttactaatggtatatactatttttttagaatgtgacatttcactattcaaagttatcatataagcctatctcaaattcatggggcgagagatagaaattgattctatagatttacatgctatttttctgacgtataacttatagcacactcttctccttgcttcgctataacataaatataatatataactatctctctcatataatttaggataatgtacaaatatattacatatataaatatattaattttaattagttttgtc

SEQ ID NO: 24459 - DNA, 4064 bp, Zea Mays
gtctcttccagcccagcacgagagaaagcataggctgcgcggctctcctctgctttcgcgcaaccgagccggcaggaagcagtgaccgtcggggccccggcggccggctgccatggcgacggcagcggcggactgccgtacgcgaaccgtgctcaaggcggcgctgtcgaggaccaccgccgccttcctcttcgtcgccgtcgtcgccgtcggggtggtcgtctcgggtcgctggatcaccgccacaaccgctggacgcctgaggcgccttcccaccaccgcggccattcccgccgccgccgtactccacccctccgaaacgcaacagctacaaccgccgcgcccgcactccactcctcccccttcccgaccaccgtctccctcctactccatctcctgccccagcctcaacctctccagtcccgccaaagcgcccaaaacctcacaaaccctcgcgcgcgcgctctcctctccctccatctgccccgcctcccccagcccgcccccgccctacgccgcttcatcgccgtcctccaacacctcgtgcccgtcctacttccgcttcatccacgaggacctccgcccatggcgcgccgcgggcgggatcacgcgcgccatgctcgaccgcgcccgcctcaccgccaccttccgcctcgtcgtgctcggcggcaacgcctacgtccagcggttccgcccggcgttccagacccgcgacctcttcaccatctggggcgtcctccagctgctccgtcgccaccccggccgcgtccccgatctcgacctcatgttcgacaccgtcgactggcccgtcgtccgctcccacctctaccgcgggaagaacgccgagatgttgccgccgctgttccgctactgcggggatgataaaacgctggatatcgtcttcccggattggtcattctggggatggcccgagatcaacataaaaccatgggatgccttgaaggaggacttgaaggccggtaataacagagtgagatggatggatagagaaccttatgcttactggaaagggaatccatcagtttctgggacacgtaaggaactggttaagtgtaacgtctctagtacgcatgattggaacgcaaggatttacgctcaggactggttcaaggagagcaaggcaggatataaggactcagatttgagtagtcagtgtgctcacaggtcacttatgccgattcagcattattggcctgttcggtatgacaataaatgtgcctccataaaatatgctgttgattggggcaactctcacaagcaattggcacagcgcataggaaagcaagcaagtaatttcattcaagacgagctcagtatggaccatgtttatgactacatgcttcatcttctaactgaatatgccaagctcctaaaattcaaacccactaagccacctgatgctgttgaggtatgttcagagtctttggcctgccaagctgaaggcctcgagaagaagtttcttatggaatccatggtgaagtttccccgtgatgcatgtgatctgcctcctcccttcaaccctcatgagctcaagttgctaaagcagaagaaagaaaattcaataaagcagatccatatgtgggagcaaaaagatttgggggcttaaataacaattttgaccccctgctttttttttcttccaatcgtaggcacacataattggtgtcttataatttggaattggggagtatgatctaactcagtgtcattgaggtgcgaccaaataccaattatttattgactggatcaacttagaagaatctagataaatcgagcagatacccatttcttaggtatttttgtataaagcaaaccatagctacttagctttaaacatttttctgtatttaattttgttttgattggctttactttgtaaagcaactgtaaatgtgacacagaaattatacagaatatataattctgatccgatattcacttcctcattgagattggatatcgtagatatctgtgctgtagctcaaaaagaagtattgcaatgtgagctcctgggtgttattgtaccgtttgaactgtggagagtttgatggagcaggtcaagggtatcctctatgaggttaaatcatggcctccagttaagtaattttacttgaaatgctctctttcactggtcactggcatggtaagcaactctgctgcttccacagcttaacacaaagaacagattcaccagtagttttaccctgcagaaaactcttgaatcgatggtactctgatagaccgatggaaaggaaggtggtgcctggtaaatattgatggtccatttatgattttcatcactgggggtttccgaagcctgtgtcagtttcttaagtgtcaatccaattcaactattgtctgcgctgaacagggaaatatctaagtttcagttctccgctacagtctgcagcaatgcattgttttctttgcgctgatgtcaggtaaagcttgttagttgttactgttagatttgtttgacttccatatgtggagtatatgaacttgccttgctcatgactttggttgttggagacttgtagggtgtttggtttgaggaataagttagtttatcatgttctcacttctatttttttgtttggtttgtagaatataatgagtttatccattatcacctaattccttatagttagttagttagttaatattaatacgaggaatgaggttatcccatcaaatttaaagaatagacttatgatgcaccacatcatgttggatgaagtgatatgttggatgaagtgatttctcaaaccaaactctgagttagagctgaaaatctcaccttacattggtagacattgtgccacacctacggtccattgtgggaaaagggatatgcagcaatacagcataagagtatctagtagagttatttcgaatgctttacatactattttctcaacagtcaaccaagctcgtagtcaacggagtaaaaagagactctgggagaagcaagaagcgtaatttctttgagccttctttattagacccccaagttttatgtcaagtatttttcacctttatccattacatctccagaaccgttctgtttgctgctttatcgattacattgcatgtacgaatctagctacactgacattgtaaagatcatgacgtcagttattctatcggttccaagttatatgtcactttctttgtccgaagtttaattttgttaagtttttagagaaaaaatacattaacatctacaagctcaaataaatgcacgtcagggaataattcagtatggatttaatgaatctaatttgacgttatattttatttcctataaatgtagctaatacgtagtttaaattagagaaatttgacttatgttaaaactgaagtggcatctaatttggaacggagcgagtaatttttttcctcatgaaacgcgcctcaagaaaataaacaaagatggtgaaatgtgaagaaaacttaaaaccattttgtaatgaaaactaaggcattttatttctcttttagattatataagctagattataataaataggtagagggtaaaatatcgctttatgttcttaaataaactaaaataagttaacattggatagcttatttgtaatcataaagtgatattttactcttcgactcttctaccatattctagcttatataatctagcagggaaacaaacaccataagagctagtgggctagtttggtaactccattttttcaaggaatttttatttttctagttctcgtttgtttctttttattttgaggaattgaaatcttactaatggtatatactatttttttagaatgtgacatttcactattcaaagttatcatataagcctatctcaaattcatggggcgagagatagaaattgattctatagatttacatgctatttttctgacgtataacttatagcacactcttctccttgcttcgctataacataaatataatatataactatctctctcatataatttaggataatgtacaaatatattacatatataaatatattaattttaattagttttgtc

SEQ ID NO: 24460 - DNA, 3509 bp, Zea Mays
cactcttcgtctcttccagcccagcacgagagaaagcataggctgcgcggctctcctctgctttcgcgcaaccgagccggcaggaagcagtgaccgtcggggccccggcggccggctgccatggcgacggcagcggcggactgccgtacgcgaaccgtgctcaaggcggcgctgtcgaggaccaccgccgccttcctcttcgtcgccgtcgtcgccgtcggggtggtcgtctcgggtcgctggatcaccgccacaaccgctgcccgagatcaacataaaaccatgggatgccttgaaggaggacttgaaggccggtaataacagagtgagatggatggatagagaaccttatgcttactggaaagggaatccatcagtttctgggacacgtaaggaactggttaagtgtaacgtctctagtacgcatgattggaacgcaaggatttacgctcaggactggttcaaggagagcaaggcaggatataaggactcagatttgagtagtcagtgtgctcacaggtacaagatctatattgaaggatcagcgtggtctatcagtgagaaatatatactagcatgtgattcaatgactctgttggttacaccaagatactatgatttcttttcaaggtcacttatgccgattcagcattattggcctgttcggtatgacaataaatgtgcctccataaaatatgctgttgattggggcaactctcacaagcaattggcacagcgcataggaaagcaagcaagtaatttcattcaagacgagctcagtatggaccatgtttatgactacatgcttcatcttctaactgaatatgccaagctcctaaaattcaaacccactaagccacctgatgctgttgaggtatgttcagagtctttggcctgccaagctgaaggcctcgagaagaagtttcttatggaatccatggtgaagtttccccgtgatgcatgtgatctgcctcctcccttcaaccctcatgagctcaagttgctaaagcagaagaaagaaaattcaataaagcagatccatatgtgggagcaaaaagatttgggggcttaaataacaattttgaccccctgctttttttttcttccaatcgtaggcacacataattggtgtcttataatttggaattggggagtatgatctaactcagtgtcattgaggtgcgaccaaataccaattatttattgactggatcaacttagaagaatctagataaatcgagcagatacccatttcttaggtatttttgtataaagcaaaccatagctacttagctttaaacatttttctgtatttaattttgttttgattggctttactttgtaaagcaactgtaaatgtgacacagaaattatacagaatatataattctgatccgatattcacttcctcattgagattggatatcgtagatatctgtgctgtagctcaaaaagaagtattgcaatgtgagctcctgggtgttattgtaccgtttgaactgtggagagtttgatggagcaggtcaagggtatcctctatgaggttaaatcatggcctccagttaagtaattttacttgaaatgctctctttcactggtcactggcatggtaagcaactctgctgcttccacagcttaacacaaagaacagattcaccagtagttttaccctgcagaaaactcttgaatcgatggtactctgatagaccgatggaaaggaaggtggtgcctggtaaatattgatggtccatttatgattttcatcactgggggtttccgaagcctgtgtcagtttcttaagtgtcaatccaattcaactattgtctgcgctgaacagggaaatatctaagtttcagttctccgctacagtctgcagcaatgcattgttttctttgcgctgatgtcaggtaaagcttgttagttgttactgttagatttgtttgacttccatatgtggagtatatgaacttgccttgctcatgactttggttgttggagacttgtagggtgtttggtttgaggaataagttagtttatcatgttctcacttctatttttttgtttggtttgtagaatataatgagtttatccattatcacctaattccttatagttagttagttagttaatattaatacgaggaatgaggttatcccatcaaatttaaagaatagacttatgatgcaccacatcatgttggatgaagtgatatgttggatgaagtgatttctcaaaccaaactctgagttagagctgaaaatctcaccttacattggtagacattgtgccacacctacggtccattgtgggaaaagggatatgcagcaatacagcataagagtatctagtagagttatttcgaatgctttacatactattttctcaacagtcaaccaagctcgtagtcaacggagtaaaaagagactctgggagaagcaagaagcgtaatttctttgagccttctttattagacccccaagttttatgtcaagtatttttcacctttatccattacatctccagaaccgttctgtttgctgctttatcgattacattgcatgtacgaatctagctacactgacattgtaaagatcatgacgtcagttattctatcggttccaagttatatgtcactttctttgtccgaagtttaattttgttaagtttttagagaaaaaatacattaacatctacaagctcaaataaatgcacgtcagggaataattcagtatggatttaatgaatctaatttgacgttatattttatttcctataaatgtagctaatacgtagtttaaattagagaaatttgacttatgttaaaactgaagtggcatctaatttggaacggagcgagtaatttttttcctcatgaaacgcgcctcaagaaaataaacaaagatggtgaaatgtgaagaaaacttaaaaccattttgtaatgaaaactaaggcattttatttctcttttagattatataagctagattataataaataggtagagggtaaaatatcgctttatgttcttaaataaactaaaataagttaacattggatagcttatttgtaatcataaagtgatattttactcttcgactcttctaccatattctagcttatataatctagcagggaaacaaacaccataagagctagtgggctagtttggtaactccattttttcaaggaatttttatttttctagttctcgtttgtttctttttattttgaggaattgaaatcttactaatggtatatactatttttttagaatgtgacatttcactattcaaagttatcatataagcctatctcaaattcatggggcgagagatagaaattgattctatagatttacatgctatttttctgacgtataacttatagcacactcttctccttgcttcgctataacataaatataatatataactatctctctcatataatttaggataatgtacaaatatattacatatataaatatattaattttaattagttttgtc

SEQ ID NO: 24461 - DNA, 1220 bp, Zea Mays
agaacgtgtcggggtaaccctcatctccagttctccggatcccgcccagggcccctagccacgaacaaggacgccttcccggcctttagcagcagtcagcagcttctcgtttcatcagccagccaccaccaaccaaccacagcgaaacacctctttctcgctctctcataaacgacgaggaggccgtacggcactccgcaagcttctcagttcactctctggtctccagtctccaccgctccagcagcctgagctagtgagctgagccccgagctgctataccgtacaccaagtgcacaagcggatcggatcggatcggagcgagatggccgcggccgggctgggcgtgaaggcgacgccgttcacgtacgcggcgcacgcgctggccgcggtggcggcggcgctggtgctggtgtggtgcgtccacttccgcggcggcctcgcgctcgaggcacagaacaagaacctcatcttcaacgttcatcctgttcttatgctgatcggctacattatcctcggcagtgaagccattatgatctacaaggtgtttccgaacctgaaccacgacacggccaagctgacgcacctgatcctccacgccgtcgcgaccgtgctcggcgccttcggcatctactgcgcgttcaagtaccacaacgacagcggcatcgccaacctctacagcctgcactcctggctcgggatcgggaccatcgctcttgggtgttcgggttcgtgaccttcttcctccccggcgcggcgcccggcgtgaggcgcggcgcgctgccctggcacgcgctcttcggcctcttcgtctacgttctggcgctggcgaccgcggagctcgggttcctggagaagctgaccttcctggagagcggggggctcgacaagtacggcgccgaggcgttcctggtcaacttcacggcgctcgtcgtcgtgctgctcggcgccttcgtcgtcgtcgccgcagtcactccggcgcacgccgaggaaccgcggggctacgccccgattccggtcagctagagggggaggagttcgctgggcagtcagaagagggcagctgtgttttgtttttgaattgaaccatgacacatcaggcgtgtgcgtgcctcgcgtccgggtttacttcgaagcggacgcgacgggtttcggtctatgaatgaatacagcccgatgggccgcagctttccacaaacacctccaggagtaatttgctc

SEQ ID NO: 24462 - DNA, 3989 bp, Zea Mays
caaccgatgagcttcttaggagcgtggccggtggcccggtacttggcagccatctcctcggccttcaggacctcctcaccgcgttttgcctccaccatcgctcgcttctcttcggcttccttgtgtatcattgcaaccttgttcttcatcttctctgcatattcagccttcttcttttccagttgttcctgaacatgaataaaccatataagctgtagctaagaggatatcaccttttagggggggagggggggtggcatattagttccactggatctattcttttccaaattcctctataattgattaattgttatcggtggctcaagtctctattaaaatatgggacagacttaaactagtaagtgcacagacgataaaaaagagtattccttcaatgacatacctcaatcttcttcagttcagcttctatgtttgctttctttgtgttttcccatgaaagaatagcggatactttcttagcagccctgtcacagttatgcgtattaattcaagttaggaatttccacatctcctgcctatggtttatatcaacttctattggatattgagaatctaaatatgatatcttccaattgacatactatgttatcctgtttgcccttatggctttttcttgttttagtttgaactgagcagaattttatatccacactgccctggctgtacagaaaccagtattaaacttccaatttgctttgatgaaagaattatagatgactgaagaaagcattgcaaaaattgcatctactgcaacagacaaataatggttccactgaagacgatttcaggggaatggataaggtgagaaacatacttgttctcagcttttgtcttctcattctcttcccaagctttgatcaaagagttcctcttctctgtttccacccttgcaagagcgagatctgcagaccatgtttcaggttttaattggcaacttgtactcaatctcgatgacacaacaattattcaataattacccctgtcattggagcccccttgcttcgcaggggcaggcttctcgggagcaggttcatctgcaacttctggaaagacagaaaaaaatagagaatttatgcctgctttggcgcaaaaactaaattcagattcataaacagtttttgctgaacaattttatatggaagaaagaagctagcaagtggttgtatgctgatcaatgatccaatccaacccattagcatcacagagcaaaatgtaatttatgtcgctatactattatctttgcaggagcatgcacttgagtttgcaatgctcaacttatttgtgtccatatccaggtcctgcgtaactgctgcttacatagcttgttcagtgagaaagattgtagatttcctttctcttatttgactagtacactcttgcatgcgtaggattaatcttattctaaactacacgaactacaaagcaatagatagtattgatagtaaccatagaaacctctctagatctttcaggaaggaattaccaaatgatgacatagtgttccaacttctaagtattcaatggtcagtcttctgctcttcttctcaaagagtggcagagctcttgtctttttgttcagaaaacgaaagtggttggtcttctgaagatccaagaccaggtcaccagcatagttaatgcaaaataattaaaaaaaactagtgactacaaaactgaatattcttctatgtatttgtgctgtgtttaacaaatttttagaatatggtgtcttggttgattaattagctgtatgtgtgagacataatgttcaacttgtatacaagtatgttggcaccttgctaaatttttgtgcctcgagaaaaatatatagttccaggcaagacggctttggttgtgcataagcaggctttggaggattaatataggcatataactaaagatggatgatggatcaacatgataaaatagataaaccagataacagcaagttgcctggaactggaacgccagctcaaatttgccacccactctgttcggttgattatatgctcatgtttttggctatttaaagaatagaaataagttgaattttcaggagcttattttgtatatctgcataaccttagtgaaactgaatgcttcaaaagcgcatggtttcatcatttgcccgcctatgcaaggaactgatgtacatctttgaagacttagcagcaacagaaagcaattgtcatcaagctgtgatggggcatgtctattttttgtgaagtatcagacagttcttcctatttcttcaaatcatggaggaattatttgggtgttagaaaagacaaattctgtttttttcctgctttgttgttcgatttagattagtgagtacagatttcaaatgacagatgaatcataataaggtttatggtaaattctaactttcttaacagtatgcaaaattgttcttcatactcctttgtttctgtctgattactttcctcttagcatgaaacttcgaatctttctatagagtttaggatttattcttttttgaacgcgaaagctgcgcctgcacgtcattatactgagatagaaaaacggtcggcatacatgcagattctaagggcatgtttggttcagttttttctgaccagtttttctgaaaatctgactgtaggaagaatctggctatgggaagaatctgagtatcattacgattacgtgtggaggaagataaagttattcataggacttaggatctagaaagtgacggattcctactattacaacgactcaaccggttatgtgtttatgttgattttggatggtttttgcccccaacgaattttatagaggctggctgaaaagctgagcgtttggcagtccgcagcagattttggtggccagaagctgccagaagccgaaacaaacaggccctaaggccttttttttgttattttagagggaacagggattgaataaagggaagaacgataagagcaggcaacaagggacaaacagcttgttcgctgcggcttgctgcggctgcaatccggctgcggctgcggcttctacagtatttttctctctatggattgcagctgcagcaatccaaacagctgcaacagtgtcggcttgtagccagccgaacacgcccaaaaggcggagagaaagtggagaattcaggaaagttccagagccatctttttctctgaatcaaaatctgaaattttcgctgaaaataaatcgcaagcaaaggaaatactacatgcctagtcatcaaataactgctagcatacttttagaaccctcaaaccaaaaacctacgatggccacgtcgtcctaaaaccaattttcgaagtgaggcgactatcccaaaaatgttaaaacctttttaccccgtgcgccctttcggaacttgacaagcaattcgtccgtagtagttggcaagttagcaggcgtggctaccactctaaaaaaagggggaaaccagttaggaagctggtaaataatcctgaaaatcgatgactcgcagatttacttcagtacgtttttttttacgacagaactagagtactttagaacttggtcgaaggttccaatgtgatttgcacctcacaaccccctaacaagaaaattttgttgtctaagagaagtaatcggaccaaatacgttcgggtgtacaagtacaaccaacaccaaaggatcacgccggcaacaaatcagggaacccatgaaaaggagaagcaaaccgactgccaaggattacaagtcacaagtacctagtactgccagccacagtacagctaccagaaagtacagagcgacgaaccaaaacatagggtagagagaggaggaaagtttctcccaattcgcggcacatgaatctaaagcacacaccagtccgccagcgccatgtttccatcgcaagccttggactacatagaggggggcagaattaattaataaagcagagcagagagcaggctgtactcactctcgacgatggccagggcctt

SEQ ID NO: 24463 - DNA, 1613 bp, Zea Mays
aaattaaattaattacataatcaaattccagacgtcagatataacaagctaaacaatattgaacatacaaaaattttaatactgaaaaaagacaactagaaaataatatgtacatttacaaaattatactaaaaattaaaaatactcacttagcggctcggcggtagggtggacgcgcggcatgggcggggcggggccggcgagggacgagtcggggcaggtgccggggtgggggcagttggcagcggccatggccgcggcgagcagggcgacggcggtgggcaggacggcggcggtgctctgggcgcgatggacaagttggaaatggaacggcgcggtccggtcccacgtgttaaaatcacttatgtccgtcggaacggcttccatagcgctgaagcgaggcgtgccgcattgggttgttcgagagctcctagtgttgccctactacatgatggagggcgatctccccacgcccgcgaacgctagggttgttgccgtggtcaccggcggcaacaaggggatcgggctggaggtgtgccggcagctggcctgcagcggcgtcaccgtcgtcttgacagccagggacgacgcgaggggcgcggcggccgtggagaacctcagaggcctggggctctccgatgtcctcttccaccgactggacgttaccgacgctccgagcatcgctcgactcgctggtttcctcgagacccgtttcgggaagctagacatcctggtaaataatgccgcgattggcggggttgagtatgttcatgaccaagattgtggctcagtaacgagcgaggaaaaggcaaagaggcttggatggctgtgggagaattgccgggagacctacgacgatgcaaagacaggcctacgaacaaactactacggcacaaagcaagtaatcgagactttactgcctctactgcaagcctcctccgatgggaggatcgttaacgtctcctcccacttcggccagctaaggcttttccgaaacgaggagctgaagcgggagctgaacgacattgacaacctcaccccggagaggctggatggcctgctggacatgttcttaaatgacttggaggccggcgaggtggagtcgtcgaacggctggccgatgtatttctcggcgtacaaggtggccaaggcggccatgaacgcgtactcgaggatcctggcgaggcggcaccccgagctgcgcgtcaactgcgtgcaccccggctatgtcaggaccgacatgaccatacactcggggctgttgacaccggaggaaggtggcagcagggtggccatggtggcgctgctgccgggaggcgggccaaccggcgcgttctttgaagattttcaacagtcgtcgttcgtgtgatgttgaacatgcagctgcatctcatatgtattctatagatattatttatgtgaaagatgctacagtacgctccccctgcgtttacattcagcgcacctctgaactcttaaacttcaagtcttcaacgacaaatctagacatgatgctgcaaaacatttttaatgtctcctctttcaaaacacgagtttcgtgcgtcatgcacgaagcacaaagagttttttttctcttccatatcatatctcgt

SEQ ID NO: 24464 - DNA, 1447 bp, Zea Mays
ctagtgaactgagaccacacaaacaaggcacggagctgtcggcatgaatcacgttctagtgttctacagttcgtcatagttcccgtgatggtcgactgattgacactgccaacctcccaacttcccaaatatatcgtcgtcggtcaatgtcgacgagctcgcagtgcacgctcatggaaggcgctatctcccttcctcgcaacacaagcagaattgccgtggttaccggcgcgaacagaggtatcgggctagaggtgtgccggcagctggctggcaatggcgtcaccgtcgtcttgacagcagtggacgaggagctaggcgcgaaagccgtcggcaatctccaagggctagctctctccgatgttctttctcaccagctggatatcacggatgcttccagcatcgctcggttggccaacttcttgaaggcccgattcgggaagttggatatcctggtcaataatgctgcggttgctggggtcgtgtactctcaagatcatttggatgatctagaaccgagagaggaaaagaggcttgaatggctgtggaggaactgccgggagacctaccatgctgcaaaggaatgcctgcagacaaactactacggcacaaagcatgtgatcgaagccttgctgcctctgctgaaagcctccgatgatggaagaatcgtcaatatatcctccgactttgggttgttaagggtgccttcttaactcagtactcgccactcaacaattggatcagtgtggtcgtcagtcgtcctaattgaagttcttcaacacagcatttcagaaacgaggatctgaagcaagtgctgaacgacgtcggcaacctcaccgaggagcggctggacgaactgctggaccagttcctgagagacttcaaggtcggcacggcagaagcgcgcgggtggccagtggcgttcgcggcgtacaaggtgagcaaggcggccgtgaacgcgtactcgaggatgctggcggcgaagcagcccgcgctgcgcgttaactgcgcgcatcccggctacgtcaagactgacataaccttacactcggggctcctggcgccggaggagggcgcgagtaatgtggtgaaggtggcgctgctgccggacggcggggtgaccggcgccttctttgaggagggcaatgagctggcctccttcgtgtgatgtcaggatcggcctggttcgctagctgcggctgtttgccatcgcgtgagctcacggagtgtttggacccctcggtctgatgtttaagtgtgtggtagcaggatgcaagacgattctggtaataaactgattatgtttgtgaacggtgataacctgatgatgtatgtgttgtaaatttagagaacggtgataacctgatgatgtatgtgttgtaaatttagagaaataagtgacatgcttccttcagatttaaataaattaaatattctaattccgaat

SEQ ID NO: 24465 - DNA, 1378 bp, Zea Mays
tagacagtctagtgaactgagaccacacaaacaaggcacggagctgtcggcatgaatcacgttctagtgttctacagttcgtcatagttcccgtgatggtcgactgattgacactgccaacctcccaacttcccaaatatatcgtcgtcggtcaatgtcgacgagctcgcagtgcacgctcatggaaggcgctatctcccttcctcgcaacacaagcagaattgccgtggttaccggcgcgaacagaggtatcgggctagaggtgtgccggcagctggctggcaatggcgtcaccgtcgtcttgacagcagtggacgaggagctaggcgcgaaagccgtcggcaatctccaagggctagctctctccgatgttctttctcaccagctggatatcacggatgcttccagcatcgctcggttggccaacttcttgaaggcccgattcgggaagttggatatcctggtcaataatgctgcggttgctggggtcgtgtactctcaagatcatttggatgatctagaaccgagagaggaaaagttcaatctcatggatagggatcagaggcttgaatggctgtggaggaactgccgggagacctaccatgctgcaaaggaatgcctgcagacaaactactacggcacaaagcatgtgatcgaagccttgctgcctctgctgaaagcctccgatgatggaagaatcgtcaatatatcctccgactttggaaacgaggatctgaagcaagtgctgaacgacgtcggcaacctcaccgaggagcggctggacgaactgctggaccagttcctgagagacttcaaggtcggcacggcagaagcgcgcgggtggccagtggcgttcgcggcgtacaaggtgagcaaggcggccgtgaacgcgtactcgaggatgctggcggcgaagcagcccgcgctgcgcgttaactgcgcgcatcccggctacgtcaagactgacataaccttacactcggggctcctggcgccggaggagggcgcgagtaatgtggtgaaggtggcgctgctgccggacggcggggtgaccggcgccttctttgaggagggcaatgagctggcctccttcgtgtgatgtcaggatcggcctggttcgctagctgcggctgtttgccatcgcgtgagctcacggagtgtttggacccctcggtctgatgtttaagtgtgtggtagcaggatgcaagacgattctggtaataaactgattatgtttgtgaacggtgataacctgatgatgtatgtgttgtaaatttagagaacggtgataacctgatgatgtatgtgttgtaaatttagagaaataagtgacatgcttccttcagatttaaataaattaaatattctaattccgaat

SEQ ID NO: 24466 - DNA, 561 bp, Zea Mays
atgatgccatatttcccccacgagttggtcacagcgcccttcttccccaaattcttcttcccctccttcctcttcttcctcctctccctctccttctccttctccttcctctttctcctctccttctccttcttcctccgccttctctcctcatcctccctttccttcctcctcttgcgccgccgcctccgcctctcctcctccgaatccaactccgactcgctctcagactccacgctggaccccgagtacgacgactcggactccgactctgacgacgagcccgagctctcactgttgctgcggcgccggcgcctgtgccggcgctctttctcctttctacgccgtttccgtcgctcgctggagtcctctccggaggactcgctctcctcctcctctcgccgcttggacttgccgcggtggtcccggttccggctcccctttgagcggtcgttgcattcagcgtctagcgacttgctgccgctgcgcgccgcctcatcctcctcggcgcctcgaccatcacggggcgacccagaggccggcatggcgtcgcgaacctag

SEQ ID NO: 24467 - DNA, 591 bp, Zea Mays
ctatgatacaatagaagatcttaaaaatgtacgtttgtacacgccggattgagctaccagtgaaatcaaacttggtggcacacacaaataatatatgtcaaatacaaagtcttcatatacatatttaaagaaagggctgttatgtcctgaccagtaaaaatctatcacttcaaacacattgcattctttgtccattgcatagtacttcccaattcccatgatgaatagctatgctctttggctaaatttatgcacgccactagaaaaactacatatatagcctatatctacttaatactgggccaatatcttaaaactaataatagaaaaacctttcagcaagggaataaaacataatccatgagcattctagaattttaaatgatgattaaaagataaaagcagaactgaaaaaagatacaccaaaataatctaaccagtccagcttgcatagagcgttttaaagcttccacttcttcctcctttcggcgctcacgctccttcaacaattctagtctgcatgttttttttcaaataaaaaggttaaaaagaaactactctaggcacaaaaactccaaacccaattaaaat

SEQ ID NO: 24468 - DNA, 1086 bp, Zea Mays
gttaagattgggttttatggcgcaaacaagatgaattagtaaccaaataatacagtcaaatcagattggtttggtcgtgtcgcttcagctatggactgctacattcctccgtgacgccagctggctgaagctactgacggtgtcctacttcttcgggtcgtttctaaaccacaacctgttcctggccatccacgagctgagccacaaccttgccttcgcgaccccatccctgaaccgctggctgggcatcttcgcgaacctccccatcggtgtgcccatgtccatcacgttccagaagtaccacctggagcaccaccggttccagggcgtggacggcgtggacatggacatcccgagccaggcggaggcgcgcgccgtgaggagcgccgccggcaagtccgcgtgggtcgtgctccagctcttcttctacgctctgcggccgctgttcctgaagccgaagcctccgggcctgtgggagctgaccaacctggcggcccaggtcggcctcgacgccgggctcgtgtacctgtgcggctggaggtcgctggcctaccttgtcctctccacgttcgtcggcggcggcatgcaccccatggcgggccacttcatctcggagcactacgtgttcagccccgagcaggagacctactcgtactacgggcccctgaacctggtggcgtggcacgtggggtaccacaacgagcaccacgacttccccaggatcccgggcacccggctgcacagggtgaaggagatggcgccggagtactacgacggcctcgagtcgtacaggtcctggagccaggtcatttacatgtacatcatggaccggacggtcggcccgttcagccggatgaagaggaaggcgcagaagaaagactcgtagtcgccgtgtgctcaatttgttttttttttggtcgcgtgtgatgtgaactcatgtttggtgtaagcatttcgattcgtcggaacagcttgtttgtgatatcaatggctcgttttttcgtgctggatccaccgtgcccagcacgagctgtcaaaatggcgcgttgacacccccggagttcgtcccagctccaggctgctatt

SEQ ID NO: 24469 - DNA, 1048 bp, Zea Mays
gctgttttttacggtttctgtgcgagattggtttggtcgtgtcgcttcagctatggactgctacattcctccgtgacgccagctggctgaagctactgacggtgtcctacttcttcgggtcgtttctaaaccacaacctgttcctggccatccacgagctgagccacaaccttgccttcgcgaccccatccctgaaccgctggctgggcatcttcgcgaacctccccatcggtgtgcccatgtccatcacgttccagaagtaccacctggagcaccaccggttccagggcgtggacggcgtggacatggacatcccgagccaggcggaggcgcgcgccgtgaggagcgccgccggcaagtccgcgtgggtcgtgctccagctcttcttctacgctctgcggccgctgttcctgaagccgaagcctccgggcctgtgggagctgaccaacctggcggcccaggtcggcctcgacgccgggctcgtgtacctgtgcggctggaggtcgctggcctaccttgtcctctccacgttcgtcggcggcggcatgcaccccatggcgggccacttcatctcggagcactacgtgttcagccccgagcaggagacctactcgtactacgggcccctgaacctggtggcgtggcacgtggggtaccacaacgagcaccacgacttccccaggatcccgggcacccggctgcacagggtgaaggagatggcgccggagtactacgacggcctcgagtcgtacaggtcctggagccaggtcatttacatgtacatcatggaccggacggtcggcccgttcagccggatgaagaggaaggcgcagaagaaagactcgtagtcgccgtgtgctcaatttgttttttttttggtcgcgtgtgatgtgaactcatgtttggtgtaagcatttcgattcgtcggaacagcttgtttgtgatatcaatggctcgttttttcgtgctggatccaccgtgcccagcacgagctgtcaaaatggcgcgttgacacccccggagttcgtcccagctccaggctgctatt

SEQ ID NO: 24470 - DNA, 1323 bp, Zea Mays
acgttctctgcacgttcatgttcgtcgtcacctccggattccccgaaatagacaaattcgcccacaccacaccctccgccgctgcacgcctccacgcctcgcccacccataggccatagccgggcccagggtgtgggagggagcaatggtcgctgggatggaggcggaggaaggggtgatggcgacggacttcttctggtcgtacacggacgagccgcacgcgtcgcgccgccgggagatcctggccaagtacccgcagatcaaggagctcttcggcccggatccgtgggccttcctcaagattggtttggtcgtgtcgcttcagctatggactgctacattcctccgtgacgccagctggctgaagctactgacggtgtcctacttcttcgggtcgtttctaaaccacaacctgttcctggccatccacgagctgagccacaaccttgccttcgcgaccccatccctgaaccgctggctgggcatcttcgcgaacctccccatcggtgtgcccatgtccatcacgttccagaagtaccacctggagcaccaccggttccagggcgtggacggcgtggacatggacatcccgagccaggcggaggcgcgcgccgtgaggagcgccgccggcaagtccgcgtgggtcgtgctccagctcttcttctacgctctgcggccgctgttcctgaagccgaagcctccgggcctgtgggagctgaccaacctggcggcccaggtcggcctcgacgccgggctcgtgtacctgtgcggctggaggtcgctggcctaccttgtcctctccacgttcgtcggcggcggcatgcaccccatggcgggccacttcatctcggagcactacgtgttcagccccgagcaggagacctactcgtactacgggcccctgaacctggtggcgtggcacgtggggtaccacaacgagcaccacgacttccccaggatcccgggcacccggctgcacagggtgaaggagatggcgccggagtactacgacggcctcgagtcgtacaggtcctggagccaggtcatttacatgtacatcatggaccggacggtcggcccgttcagccggatgaagaggaaggcgcagaagaaagactcgtagtcgccgtgtgctcaatttgttttttttttggtcgcgtgtgatgtgaactcatgtttggtgtaagcatttcgattcgtcggaacagcttgtttgtgatatcaatggctcgttttttcgtgctggatccaccgtgcccagcacgagctgtcaaaatggcgcgttgacacccccggagttcgtcccagctccaggctgctatt

SEQ ID NO: 24471 - DNA, 1191 bp, Zea Mays
cagctccatgcagtcttcgttcggcggcgcgtgcgggtacgggacgctggtggacgtggtgccgatgaaggcgcgggtggggtcggtgagccccgtgctgttcaaggacggcgagggctgcggcgcctgctacaaggtcaggtgcctggaccgcggcgtgtgctcgcgccgtgccgtcacggtggtcgtcacggacgagtgccccggcgggctgtgcgcgttcggccgcacccacttcgacctcagcggcgccgcgttcagcaggatggccgtcgccggggccggcggccggctgcgcgaccggggccagctgtccgtcgtgtacaggaggacggcctgcaagtacggcgggaagaacatcgcgttccgtgtgaacgagggctcgactaacttctggctctcgctgctcgtcgagttcgaggacggcgagggcgacataggatccatgcagataaagcaggccgtcacacaatgaaaggcagcaccttatctggaagtggaacaggccgggaagtccagagccagagccacgcgtggccaggcagcaaggcgtgctggacttcacggccaactcggtggagtggctggacatgcggcacgtgtggggggcaacctggtgcctggtgcggggcccgctcgtgggccccttctccgtgaggctcaccacgctgtccgcgcggaagacgctcacggcccgcgacgtgatccccaggaactggacgcccaaggccacctacacctcgcgcctcaacttccagccgtctctctaggtctaggacgagggagggacccaccgcggcgactggggcccacgttttatcggccccggacactgccctgtgggcccgttgcaaaacgaggaatcagtcagtccagagtgtttttttttttgttttccctgtatgcagatgcaggcaaccttcgtatggtttggtttttatcttatcgtagtcgtagctagtgtgaggaggtggttcatggccatcatagtacgtaggcatcgaacatgtgtgatgctcatgaggatgagttgagtctgtgagcgggcacagagtgccagccaccaggtacacacagacaggcgctgtctccaaaggagagagcgttcgttcgctgcttgctcccgggtccagcggcccttggaggctcgaaacccgatcgtggcgtctgcttcgctcgtgtgtgtgtgtg

SEQ ID NO: 24472 - DNA, 1096 bp, Zea Mays
cttccatccaacagctccatgcagtcttcgttcggcggcgcgtgcgggtacgggacgctggtggacgtggtgccgatgaaggcgcgggtggggtcggtgagccccgtgctgttcaaggacggcgagggctgcggcgcctgctacaaggtcaggtgcctggaccgcggcgtgtgctcgcgccgtgccgtcacggtggtcgtcacggacgagtgccccggcgggctgtgcgcgttcggccgcacccacttcgacctcagcggcgccgcgttcagcaggatggccgtcgccggggccggcggccggctgcgcgaccggggccagctgtccgtcgtgtacaggaggacggcctgcaagtacggcgggaagaacatcgcgttccgtgtgaacgagggctcgactaacttctggctctcgctgctcgtcgagttcgaggacggcgagggcgacataggatccatgcagataaagcaggccaactcggtggagtggctggacatgcggcacgtgtggggggcaacctggtgcctggtgcggggcccgctcgtgggccccttctccgtgaggctcaccacgctgtccgcgcggaagacgctcacggcccgcgacgtgatccccaggaactggacgcccaaggccacctacacctcgcgcctcaacttccagccgtctctctaggtctaggacgagggagggacccaccgcggcgactggggcccacgttttatcggccccggacactgccctgtgggcccgttgcaaaacgaggaatcagtcagtccagagtgtttttttttttgttttccctgtatgcagatgcaggcaaccttcgtatggtttggtttttatcttatcgtagtcgtagctagtgtgaggaggtggttcatggccatcatagtacgtaggcatcgaacatgtgtgatgctcatgaggatgagttgagtctgtgagcgggcacagagtgccagccaccaggtacacacagacaggcgctgtctccaaaggagagagcgttcgttcgctgcttgctcccgggtccagcggcccttggaggctcgaaacccgatcgtggcgtctgcttcgctcgtgtgtgtgtgtg

SEQ ID NO: 24473 - DNA, 4128 bp, Zea Mays
caaaggaaattcctctttgcaccttctggaaatcatcgacgaataagacaaaacaaagggcaatggggggacggaattttttttaccaccagctcatgattcgggcatagcacaggtgacgacgccaaagcgcacgacagacgccctctttccgcgtcaccttaaaactctcaaaacacgccttccaaattgaccgccttctccttgcactaatccacttccccgaaacggcaggagcgagcggttaccctttcccaagtttgtcgcgctcgcgcccgaacgctcccggctgacggctgggtccagcggccgatgggtttttaacgtcaccttccctccccatggccaggggaggccggagtaggcgctggtaaacatcgccaacaacaacgacgcacgcagccgcagccgcagcggggggagaggaggtggtggcattggcaagcatcaccacccgcaataacaacgacgacggcgccagcagtccagcaccaaccaccacttttttcgagggaaggcacgaacaggcacaggcaggcgcgcggcacggggtaggaacccgtcgcgattggcccgtccgacgacgaaccggtcgcgggcctcgtgcccgtggtggatctgactccacctgcgcgcggtcgcggtcgcgggcgccttgcttccccctcccccgctcatcgccgcggcgtccacggggcaatttccatccgcggggcgccgccgtgtcgactccatcttcctcggcggtcaatgcgggcgcggagatgagagccggcggcggggaggaggaagaggaggaggaggtgttctacgagtcgcgagaccgcgtgctctcctcctcctgctcctccacctccgcctcggacgatgacgacaacgaccacccgcgacggcgacgggacggggccgcctctgcggcggcggcggcgctcgacgtgtggacgtcggagccggcgcccgtgcaggagcggcgccggaagctgctccagatgatggggctcgccggggaccccgccctagcgcgcctcgagatgggccgatcggtctcctacgacgggcccgtccgcccggcgccggcctcgcccatcccccgatccagatcagacggcgccgtgccggtctcgtcgaccaagcccccgctgggcgggcggtcgcgccaggcgtcgtcgggctcctccgaggccacgcccgaaggggaggacgctggcccgaggtgcctaatccggaacctcgacgacggcaccgagttcgtggtcaaggaggagttccagctccgcgaggtcggcacgggccgccacttcaccatggaggagtttgttgacctctgcgtaggctgctcgcctatcgtccaggagctcatgcgacgcgataacgtggggagctccggctcgaacaacggcgcgtccacccccatccagaggtccaactccgactccagcaacggggctacgcgccaccggcggcacagcagctggcttcggagccttcgaaacgttgccggctccatggcggtcacctcccgcgaccgccgcagcagcgacgagaaggacacgtcctcggagaaaggcggccgccggtccagctcagcgacggatgacagccaggacagcgccggagcctccgtgcaccatggccgggtgcgcgttaaggtgaggcagtctgggaagtcgtacaaggagctcagtggcctgttcatgaaccaggagattcaggctcacaatgggtccatctggagcatcaggtttagtccagatggccggtacctcgcgagtgctggggaagactgcgtgatccatgtctgggaagtgtccgagtttgagaggaaacgcgaggagaacggactgtgcaatcctcttgttgccatggcgtgcaacggttcaccggagacaacattagccttggccagcagtctggatgggagcaatcgtgagaagaagcgtcgggcaaggttcttggagggtcgtaggtctgtgagctcagaccggctaatggtgccagagcatgtgtttgcactgtcagaaaagccgattcggaccttcgtggggcattcagaagatgtgcttgatctctgctggtccaaatcccagtacttactttcatcttcaatggataaaacggtgaagttgtggcacatttcgagcgcttcctgtctaaaaacattttcacacagtgactatgtgacatgcatccagttcaaccctgttgatgatagatacttcattagtggttcactggatgaaaaagtccgcatatggagcattcaaaaccgtgaaattgttgattggaaagatttgcatgaaatggtcactgctgcttgctataccccagatggacagagtgcactaattggttcccataaaggcagctgccatatttatgatacatctgataataagcttctccaaaagaaacaaattgacctgcaaaataagaaaaagaagtccagtcagaagaaaataactggatttcagtttctcccagggagtacttcaagggtccttattacatctgcagattcaagaatcagggtttttgatggccttaatctagttcacaagtacaaaggtttccgaaacactaacagccagatttcagcatgtttagctgctaatgggaggtatgtgatctcagcaagtgaggattcccatgtgtacatatggagaaacgatggtagccttgaaaaaggcagaagcaaggcgaatgttactgtcaccagttcctatgaacatttccactgccaggatgtgacagttgctgttgcaccgccatctaatggctcagcagtggtatccagatcaaactccacgaagcacgatgagcgggattctgtattggagcatcctctgctgcatgctgtccctgaaaaactgcaagattcctccgatctgcagcctcaaagtggcaatatcctaagcaccagttcaaatcacagcggtgatagagcaacttggcctgaagaactgatgacgccaacaaagcagagccctcagtctagtgccagtcttctcagcggtgctgatcaagctccatgctggtcagcctggggaactgtaattgtcacagcaggccgtggaggtcagatcagagcatttcagaactttgggtttcctgctcgagtatagtactgtagctatgagaccgctgcctggtcttggcgtctgccctgcagcaagacgggtgatttttgtgtatagataggtgaaagtttgggtgatctgcacgcagtctgggactggattctgttgctgctcctaggtgcacctgcctgcgaacttcaactaacctacgacctggtactcaaggtacggcgaattcgtttgcccggaattgtatatgagaatggagcccgggaaggacgagcgggcgtcggccggttggagctagatctttgggatctttttgccagccatcttttcatctgttttctccattgagtccagtttagctttttcattttttttactttatgtttaccagctattatatatttttgtaagaaatcttagttctacagaaatagaaaagcaaaaaagagttgcatacagtggtgaattcgctggactggtatagcaggcttgagatgttagtggtacatgggtatagtagtaattgagggactaggagggtgtgaaatcttttgagttctgaagcttttggaccttgcttccggacaaggctggcagttcaaatgttcgatggcgagcgccgatcctgctagcggtggaggtgcggccacggtggcaaaagcaatctccagatgagctgagagatccttggcctgtcagagatatgagatattaggggggcatctgatcgagatgcctatcgaaggtgacgcgataaatcacgatcgcctcaccaggaacggtgattcgcgagattgtttgatgtgatgtggacgaaggtaatcagctcaacagtgtggtttttgctatttcgtttttagttagaaaattattatgcctagcaatgggagcatctgcaattgcattttttttatttctaattgagaaatgaaaaggggcactgccttgcagtgttgatgctgacgcctgacgcctcaaactgtatctttagcaccacacaaacaaatttgtcgtctatcatcaccgattcgactatcgaggg

SEQ ID NO: 24474 - DNA, 4086 bp, Zea Mays
caaaggaaattcctctttgcaccttctggaaatcatcgacgaataagacaaaacaaagggcaatggggggacggaattttttttaccaccagctcatgattcgggcatagcacaggtgacgacgccaaagcgcacgacagacgccctctttccgcgtcaccttaaaactctcaaaacacgccttccaaattgaccgccttctccttgcactaatccacttccccgaaacggcaggagcgagcggttaccctttcccaagtttgtcgcgctcgcgcccgaacgctcccggctgacggctgggtccagcggccgatgggtttttaacgtcaccttccctccccatggccaggggaggccggagtaggcgctggtaaacatcgccaacaacaacgacgcacgcagccgcagccgcagcggggggagaggaggtggtggcattggcaagcatcaccacccgcaataacaacgacgacggcgccagcagtccagcaccaaccaccacttttttcgagggaaggcacgaacaggcacaggcaggcgcgcggcacggggtaggaacccgtcgcgattggcccgtccgacgacgaaccggtcgcgggcctcgtgcccgtggtggatctgactccacctgcgcgcggtcgcggtcgcgggcgccttgcttccccctcccccgctcatcgccgcggcgtccacggggcaatttccatccgcggggcgccgccgtgtcgactccatcttcctcggcggtcaatgcgggcgcggagatgagagccggcggcggggaggaggaagaggaggaggaggtgttctacgagtcgcgagaccgcgtgctctcctcctcctgctcctccacctccgcctcggacgatgacgacaacgaccacccgcgacggcgacgggacggggccgcctctgcggcggcggcggcgctcgacgtgtggacgtcggagccggcgcccgtgcaggagcggcgccggaagctgctccagatgatggggctcgccggggaccccgccctagcgcgcctcgagatgggccgatcggtctcctacgacgggcccgtccgcccggcgccggcctcgcccatcccccgatccagatcagacggcgccgtgccggtctcgtcgaccaagcccccgctgggcgggcggtcgcgccaggcgtcgtcgggctcctccgaggccacgcccgaaggggaggacgctggcccgaggtgcctaatccggaacctcgacgacggcaccgagttcgtggtcaaggaggagttccagctccgcgaggtcggcacgggccgccacttcaccatggaggagtttgttgacctctgcgtaggctgctcgcctatcgtccaggagctcatgcgacgcgataacgtggggagctccggctcgaacaacggcgcgtccacccccatccagaggtccaactccgactccagcaacggggctacgcgccaccggcggcacagcagctggcttcggagccttcgaaacgttgccggctccatggcggtcacctcccgcgaccgccgcagcagcgacgagaaggacacgtcctcggagaaaggcggccgccggtccagctcagcgacggatgacagccaggacagcgccggagcctccgtgcaccatggccgggtgcgcgttaaggtttagtccagatggccggtacctcgcgagtgctggggaagactgcgtgatccatgtctgggaagtgtccgagtttgagaggaaacgcgaggagaacggactgtgcaatcctcttgttgccatggcgtgcaacggttcaccggagacaacattagccttggccagcagtctggatgggagcaatcgtgagaagaagcgtcgggcaaggttcttggagggtcgtaggtctgtgagctcagaccggctaatggtgccagagcatgtgtttgcactgtcagaaaagccgattcggaccttcgtggggcattcagaagatgtgcttgatctctgctggtccaaatcccagtacttactttcatcttcaatggataaaacggtgaagttgtggcacatttcgagcgcttcctgtctaaaaacattttcacacagtgactatgatacttcattagtggttcactggatgaaaaagtccgcatatggagcattcaaaaccgtgaaattgttgattggaaagatttgcatgaaatggtcactgctgcttgctataccccagatggacaggttttaatcatctatacataattctttgatttaatatcttcttcatgttacgatctgacacatctctttctttctttctcgaagagtgcactaattggttcccataaaggcagctgccatatttatgatacatctgataataagcttctccaaaagaaacaaattgacctgcaaaataagaaaaagaagtccagtcagaagaaaataactggatttcagtttctcccagggagtacttcaagggtccttattacatctgcagattcaagaatcagggtttttgatggccttaatctagttcacaagtacaaaggtttccgaaacactaacagccagatttcagcatgtttagctgctaatgggaggtatgtgatctcagcaagtgaggattcccatgtgtacatatggagaaacgatggtagccttgaaaaaggcagaagcaaggcgaatgttactgtcaccagttcctatgaacatttccactgccaggatgtgacagttgctgttgcaccgccatctaatggctcagcagtggtatccagatcaaactccacgaagcacgatgagcgggattctgtattggagcatcctctgctgcatgctgtccctgaaaaactgcaagattcctccgatctgcagcctcaaagtggcaatatcctaagcaccagttcaaatcacagcggtgatagagcaacttggcctgaagaactgatgacgccaacaaagcagagccctcagtctagtgccagtcttctcagcggtgctgatcaagctccatgctggtcagcctggggaactgtaattgtcacagcaggccgtggaggtcagatcagagcatttcagaactttgggtttcctgctcgagtatagtactgtagctatgagaccgctgcctggtcttggcgtctgccctgcagcaagacgggtgatttttgtgtatagataggtgaaagtttgggtgatctgcacgcagtctgggactggattctgttgctgctcctaggtgcacctgcctgcgaacttcaactaacctacgacctggtactcaaggtacggcgaattcgtttgcccggaattgtatatgagaatggagcccgggaaggacgagcgggcgtcggccggttggagctagatctttgggatctttttgccagccatcttttcatctgttttctccattgagtccagtttagctttttcattttttttactttatgtttaccagctattatatatttttgtaagaaatcttagttctacagaaatagaaaagcaaaaaagagttgcatacagtggtgaattcgctggactggtatagcaggcttgagatgttagtggtacatgggtatagtagtaattgagggactaggagggtgtgaaatcttttgagttctgaagcttttggaccttgcttccggacaaggctggcagttcaaatgttcgatggcgagcgccgatcctgctagcggtggaggtgcggccacggtggcaaaagcaatctccagatgagctgagagatccttggcctgtcagagatatgagatattaggggggcatctgatcgagatgcctatcgaaggtgacgcgataaatcacgatcgcctcaccaggaacggtgattcgcgagattgtttgatgtgatgtggacgaaggtaatcagctcaacagtgtggtttttgctatttcgtttttagttagaaaattattatgcctagcaatgggagcatctgcaattgcattttttttatttctaattgagaaatgaaaaggggcactgccttgcagtgttgatgctgacgcctgacgcctcaaactgtatctttagcaccacacaaacaaatttgtcgtctatcatcaccgattcgactatcgaggg

SEQ ID NO: 24475 - DNA, 4085 bp, Zea Mays
caaaggaaattcctctttgcaccttctggaaatcatcgacgaataagacaaaacaaagggcaatggggggacggaattttttttaccaccagctcatgattcgggcatagcacaggtgacgacgccaaagcgcacgacagacgccctctttccgcgtcaccttaaaactctcaaaacacgccttccaaattgaccgccttctccttgcactaatccacttccccgaaacggcaggagcgagcggttaccctttcccaagtttgtcgcgctcgcgcccgaacgctcccggctgacggctgggtccagcggccgatgggtttttaacgtcaccttccctccccatggccaggggaggccggagtaggcgctggtaaacatcgccaacaacaacgacgcacgcagccgcagccgcagcggggggagaggaggtggtggcattggcaagcatcaccacccgcaataacaacgacgacggcgccagcagtccagcaccaaccaccacttttttcgagggaaggcacgaacaggcacaggcaggcgcgcggcacggggtaggaacccgtcgcgattggcccgtccgacgacgaaccggtcgcgggcctcgtgcccgtggtggatctgactccacctgcgcgcggtcgcggtcgcgggcgccttgcttccccctcccccgctcatcgccgcggcgtccacggggcaatttccatccgcggggcgccgccgtgtcgactccatcttcctcggcggtcaatgcgggcgcggagatgagagccggcggcggggaggaggaagaggaggaggaggtgttctacgagtcgcgagaccgcgtgctctcctcctcctgctcctccacctccgcctcggacgatgacgacaacgaccacccgcgacggcgacgggacggggccgcctctgcggcggcggcggcgctcgacgtgtggacgtcggagccggcgcccgtgcaggagcggcgccggaagctgctccagatgatggggctcgccggggaccccgccctagcgcgcctcgagatgggccgatcggtctcctacgacgggcccgtccgcccggcgccggcctcgcccatcccccgatccagatcagacggcgccgtgccggtctcgtcgaccaagcccccgctgggcgggcggtcgcgccaggcgtcgtcgggctcctccgaggccacgcccgaaggggaggacgctggcccgaggtgcctaatccggaacctcgacgacggcaccgagttcgtggtcaaggaggagttccagctccgcgaggtcggcacgggccgccacttcaccatggaggagtttgttgacctctgcgtaggctgctcgcctatcgtccaggagctcatgcgacgcgataacgtggggagctccggctcgaacaacggcgcgtccacccccatccagaggtccaactccgactccagcaacggggctacgcgccaccggcggcacagcagctggcttcggagccttcgaaacgttgccggctccatggcggtcacctcccgcgaccgccgcagcagcgacgagaaggacacgtcctcggagaaaggcggccgccggtccagctcagcgacggatgacagccaggacagcgccggagcctccgtgcaccatggccgggtgcgcgttaaggtgaggcagtctgggaagtcgtacaaggagctcagtggcctgttcatgaaccaggagattcaggctcacaatgggtccatctggagcatcaggtttagtccagatggccggtacctcgcgagtgctggggaagactgcgtgatccatgtctgggaagtgtccgagtttgagaggaaacgcgaggagaacggactgtgcaatcctcttgttgccatggcgtgcaacggttcaccggagacaacattagccttggccagcagtctggatgggagcaatcgtgagaagaagcgtcgggcaaggttcttggagggtcgtaggtctgtgagctcagaccggctaatggtgccagagcatgtgtttgcactgtcagaaaagccgattcggaccttcgtggggcattcagaagatgtgcttgatctctgctggtccaaatcccagtacttactttcatcttcaatggataaaacggtgaagttgtggcacatttcgagcgcttcctgtctaaaaacattttcacacagtgactatgtgacatgcatccagttcaaccctgttgatgatagatacttcattagtggttcactggatgaaaaagtccgcatatggagcattcaaaaccgtgaaattgttgattggaaagatttgcatgaaatggtcactgctgcttgctataccccagatggacagagtgcactaattggttcccataaaggcagctgccatatttatgatacatctgataataagcttctccaaaagaaacaaattgacctgcaaaataagaaaaagaagtccagtcagaagaaaataactggatttcagattcaagaatcagggtttttgatggccttaatctagttcacaagtacaaaggtttccgaaacactaacagccagatttcagcatgtttagctgctaatgggaggtatgtgatctcagcaagtgaggattcccatgtgtacatatggagaaacgatggtagccttgaaaaaggcagaagcaaggcgaatgttactgtcaccagttcctatgaacatttccactgccaggatgtgacagttgctgttgcaccgccatctaatggctcagcagtggtatccagatcaaactccacgaagcacgatgagcgggattctgtattggagcatcctctgctgcatgctgtccctgaaaaactgcaagattcctccgatctgcagcctcaaagtggcaatatcctaagcaccagttcaaatcacagcggtgatagagcaacttggcctgaagaactgatgacgccaacaaagcagagccctcagtctagtgccagtcttctcagcggtgctgatcaagctccatgctggtcagcctggggaactgtaattgtcacagcaggccgtggaggtcagatcagagcatttcagaactttgggtttcctgctcgagtatagtactgtagctatgagaccgctgcctggtcttggcgtctgccctgcagcaagacgggtgatttttgtgtatagataggtgaaagtttgggtgatctgcacgcagtctgggactggattctgttgctgctcctaggtgcacctgcctgcgaacttcaactaacctacgacctggtactcaaggtacggcgaattcgtttgcccggaattgtatatgagaatggagcccgggaaggacgagcgggcgtcggccggttggagctagatctttgggatctttttgccagccatcttttcatctgttttctccattgagtccagtttagctttttcattttttttactttatgtttaccagctattatatatttttgtaagaaatcttagttctacagaaatagaaaagcaaaaaagagttgcatacagtggtgaattcgctggactggtatagcaggcttgagatgttagtggtacatgggtatagtagtaattgagggactaggagggtgtgaaatcttttgagttctgaagcttttggaccttgcttccggacaaggctggcagttcaaatgttcgatggcgagcgccgatcctgctagcggtggaggtgcggccacggtggcaaaagcaatctccagatgagctgagagatccttggcctgtcagagatatgagatattaggggggcatctgatcgagatgcctatcgaaggtgacgcgataaatcacgatcgcctcaccaggaacggtgattcgcgagattgtttgatgtgatgtggacgaaggtaatcagctcaacagtgtggtttttgctatttcgtttttagttagaaaattattatgcctagcaatgggagcatctgcaattgcattttttttatttctaattgagaaatgaaaaggggcactgccttgcagtgttgatgctgacgcctgacgcctcaaactgtatctttagcaccacacaaacaaatttgtcgtctatcatcaccgattcgactatcgaggg

SEQ ID NO: 24476 - DNA, 3796 bp, Zea Mays
caaaggaaattcctctttgcaccttctggaaatcatcgacgaataagacaaaacaaagggcaatggggggacggaattttttttaccaccagctcatgattcgggcatagcacaggtgacgacgccaaagcgcacgacagacgccctctttccgcgtcaccttaaaactctcaaaacacgccttccaaattgaccgccttctccttgcactaatccacttccccgaaacggcaggagcgagcggttaccctttcccaagtttgtcgcgctcgcgcccgaacgctcccggctgacggctgggtccagcggccgatgggtttttaacgtcaccttccctccccatggccaggggaggccggagtaggcgctggtaaacatcgccaacaacaacgacgcacgcagccgcagccgcagcggggggagaggaggtggtggcattggcaagcatcaccacccgcaataacaacgacgacggcgccagcagtccagcaccaaccaccacttttttcgagggaaggcacgaacaggcacaggcaggcgcgcggcacggggtaggaacccgtcgcgattggcccgtccgacgacgaaccggtcgcgggcctcgtgcccgtggtggatctgactccacctgcgcgcggtcgcggtcgcgggcgccttgcttccccctcccccgctcatcgccgcggcgtccacggggcaatttccatccgcggggcgccgccgtgtcgactccatcttcctcggcggtcaatgcgggcgcggagatgagagccggcggcggggaggaggaagaggaggaggaggtgttctacgagtcgcgagaccgcgtgctctcctcctcctgctcctccacctccgcctcggacgatgacgacaacgaccacccgcgacggcgacgggacggggccgcctctgcggcggcggcggcgctcgacgtgtggacgtcggagccggcgcccgtgcaggagcggcgccggaagctgctccagatgatggggctcgccggggaccccgccctagcgcgcctcgagatgggccgatcggtctcctacgacgggcccgtccgcccggcgccggcctcgcccatcccccgatccagatcagacggcgccgtgccggtctcgtcgaccaagcccccgctgggcgggcggtcgcgccaggcgtcgtcgggctcctccgaggccacgcccgaaggggaggacgctggcccgaggtgcctaatccggaacctcgacgacggcaccgagttcgtggtcaaggaggagttccagctccgcgaggtcggcacgggccgccacttcaccatggaggagtttgttgacctctgcgtaggctgctcgcctatcgtccaggagctcatgcgacgcgataacgtggggagctccggctcgaacaacggcgcgtccacccccatccagaggtccaactccgactccagcaacggggctacgcgccaccggcggcacagcagctggcttcggagccttcgaaacgttgccggctccatggcggtcacctcccgcgaccgccgcagcagcgacgagaaggacacgtcctcggagaaaggcggccgccggtccagctcagcgacggatgacagccaggacagcgccggagcctccgtgcaccatggccgggtgcgcgttaaggtgaggcagtctgggaagtcgtacaaggagctcagtggcctgttcatgaaccaggagattcaggctcacaatgggtccatctggagcatcaggtttagtccagatggccggtacctcgcgagtgctggggaagactgcgtgatccatgtctgggaagtgtccgagtttgagaggaaacgcgaggagaacggactgtgcaatcctcttgttgccatggcgtgcaacggttcaccggagacaacattagccttggccagcagtctggatgggagcaatcgtgagaagaagcgtcgggcaaggttcttggagggtcgtaggtctgtgagctcagaccggctaatggtgccagagcatgtgtttgcactgtcagaaaagccgattcggaccttcgtggggcattcagaagatgtgcttgatctctgctggtccaaatcccagtacttactttcatcttcaatggataaaacggtgaagttgtggcacatttcgagcgcttcctgtctaaaaacattttcacacagtgactatgtgacatgcatccagttcaaccctgttgatgatagatacttcattagtggttcactggatgaaaaagtccgcatatggagcattcaaaaccgtgaaattgttgattggaaagatttgcatgaaatggtcactgctgcttgctataccccagatggacaggttttaatcatctatacataattctttgatttaatatcttcttcatgttacgatctgacacatctctttctttctttctcgaagagtgcactaattggttcccataaaggcagctgccatatttatgatacatctgataataagcttctccaaaagaaacaaattgacctgcaaaataagaaaaagaagtccagtcagaagaaaataactggatttcagggagtacttcaagggtccttattacatctgcagattcaagaatcagggtttttgatggccttaatctagttcacaagtacaaaggtttccgaaacactaacagccagatttcagcatgtttagctgctaatgggaggtatgtgatctcagcaagtgaggattcccatgtgtacatatggagaaacgatggtagccttgaaaaaggcagaagcaaggcgaatgttactgtcaccagttcctatgaacatttccactgccaggatgtgacagttgctgttgcaccgccatctaatggctcagcagtggtatccagatcaaactccacgaagcacgatgagcgggattctgtattggagcatcctctgctgcatgctgtccctgaaaaactgcaagattcctccgatctgcagcctcaaagtggcaatatcctaagcaccagttcaaatcacagcggtgatagagcaacttggcctgaagaactgatgacgccaacaaagcagagccctcagtctagtgccagtcttctcagcggtgctgatcaagctccatgctggtcagcctggggaactgtaattgtcacagcaggccgtggaggtcagatcagagcatttcagaactttgggtttcctgctcgagtatagtactgtagctatgagaccgctgcctggtcttggcgtctgccctgcagcaagacgggtgatttttgtgtatagataggtgaaagtttgggtgatctgcacgcagtctgggactggattctgttgctgctcctaggtgcacctgcctgcgaacttcaactaacctacgacctggtactcaaggtacggcgaattcgtttgcccggaattgtatatgagaatggagcccgggaaggacgagcgggcgtcggccggttggagctagatctttgggatctttttgccagccatcttttcatctgttttctccattgagtccagtttagctttttcattttttttactttatgtttaccagctattatatatttttgtaagaaatcttagttctacagaaatagaaaagcaaaaaagagttgcatacagtggtgaattcgctggactggtatagcaggcttgagatgttagtggtacatgggtatagtagtaattgagggactaggagggtgtgaaatcttttgagttctgaagcttttggaccttgcttccggacaaggctggcaggtgcatttctgtgtcccaactgtcggttgcccaacagat

SEQ ID NO: 24477 - DNA, 733 bp, Zea Mays
ggctgcgaggcagggaactgaggaaacgtctcgaatggtcgaacagtagtttgctcgctattatccatggcgacttctacggctgctgccactgcactgctccgccccaggccggcagttccagccaagttggcgcagaggaggtgcctccatgcggttgctgggtggacgacgatgaggaggaggggagctgcaggggtcgtgcgagctttcttcaaccctctcggggatgagcgcatcctccgagaagccatcaaggtggtatacgaaggttgggcagatttctcttgatcaacggtgccccacatgcaaactcactgataaaatgtttgctgaattagtcatttggtttccctttttccattggaaggtctgcgtattgtcgcacaggacggctatcggaatatccttcgcctgtaaggatggttggcaccccagaaccagaaactgcgtaattgttgatttgaccccaaggcacagacgttaactcgagtgatatatcaatgcaaccgctaactacttgatgacgactggaaaatatttccgctagacttatgcctctcattgttgatgaccggaaatctggaagatttttctgctagagatcttttatgcttctcactggaaaggggctgccctttaatgctgacgatgaagaaatggcatgaattcatgttaagaacatttccagcaattgcattggagaagttgcatatggtttatcaattgataa

SEQ ID NO: 24478 - DNA, 514 bp, Zea Mays
ggctgcgaggcagggaactgaggaaacgtctcgaatggtcgaacagtagtttgctcgctattatccatggcgacttctacggctgctgccactgcactgctccgccccaggccggcagttccagccaagttggcgcagaggaggtgcctccatgcggttgctgggtggacgacgatgaggaggaggggagctgcaggggtcgtgcgagctttcttcaaccctctcggggatgagcgcatcctccgagaagccatcaaggagccagtagcattcatgggtggtgtgtttgctggcctcttgaggcttgacctgaatgaggatcctctcaaggaatggataagtcggacagtggaggcttctggaatagctgaggaaaacagctctgaagaatcaagtgaggcagatcaaaatgatgcacctcagcaaattgagattgagtgaggaatgtttggtactataagttactacgtacagtacatacacagttcctccaagagaccaagatacatctttg

SEQ ID NO: 24479 - DNA, 321 bp, Zea Mays
ggctgcgaggcagggaactgaggaaacgtctcgaatggtcgaacagtagtttgctcgctattatccatggcgacttctacggctgctgccactgcactgctccgccccaggccggcagttccagccaagaggaggtgcctccatgcggttgctgggtggacgacgatgaggaggaggggagctgcaggggtcgtgcgagctttcttcaaccctctcggggatgagcgcatcctccgagaagccatcaaggaatgtttggtactataagttactacgtacagtacatacacagttcctccaagagaccaagatacatctttg

SEQ ID NO: 24480 - DNA, 3640 bp, Zea Mays
gttaaactgcttgcttggttcagtgctggcattccctttgcacttgttgctctaaagaaaggcactcaactccttaaatatggtcgcaaaggaaagcctaaattcattcccttcagactatcgaatgatgaatcgactcttgtttgggtttcaaataacaaagataaaagtttgaaactagcttctgtgtctaggattctctcaggccaaagaacgctggtttttcaacgttttctgctccccgagaaggaccatttatccttctccctcatatataatgatggcaagcggtctctcgatctgatctgcaagaataaagtcgaggcggaggcttggtttactggtcttagtgccttgatatgtcgaggacagcatggatcccaggtccaacatatagatggaatccggatcgctggacttccttttgatggtgcaagagaaagtagcctaagtggtagctctactttcacttcggattcctttgagaataagctgagctcggtaaactcttccaaggatcgttcttcgggagaatatacatattcagaaaggactgatgtgtcggatatgcaagtgaaaagtgtttcttcttcagacattcgaatcagtgtttccagtgcccttagcacatccagccatggctctggaggtgaagattccgaatcgtttggagatatttatgtatggggggaagtcatctgtgataccatctcaagatcagggtctgatagaagtgcttactctcctggcacaactacagatgttcttgtaccaaagcccctagagtcaaatgtaatgctcgatgtgagttatgtggcttgtggcgtgaaacacgctgcccttgttacaagacaggcagaggtatttacgtggggagaagaatgcagcggtcgtctcggtcatggcattggaacaaatgttttccagccacgtcttgttgagtcactatcgacctgcaatgtcgaactaattgcctgtggtgaattccacacttgcgctgtcactgcaactggtgatctctacacctggggagatggcacacataatgctggattgcttggtcatggtagtaacgtgagccactggatcccaaaaagagtgtcaggtccactggatggtcttccggtatcagctgtatcttgcggcacatggcatacagccttgataactagctctgggcagttatacacatttggtgatggcacatttggagtcttaggtcatggaaacagagcatcatgctcatatccaaaggaagtggagtctttgaagggtctgaggacaatttctgtttcgtgtggtgtgtggcatactgctgctgttgttgaggttatcatttcacagtcaaatgcttcatctggaaagttgttcacttggggtgatggagacaaatatcgcctgggtcatggtgataggtcttcaaaactgaaaccaacatgcgtcccctcgttgatagattacaacttccataaggctgcatgtggccatactcttacgattgggttgactacctcagggcacatttttactgttggaagccctgtgtatggacagcttggcaatccaaataatgatggaaggtatcctcgcctggtcgaagagcagcttgggggtggcggtgttgtggaggttgcttgtgggtcttatcatgtcgcggttttgacaaatgctggtgaagtttacacatggggtaagggtacaaatggaagattaggccatggtgatattgcggatcgtaaagtgcctacactcgttgaggcattgaaggataggtctgtaaaacgtgttgcttgtggatcaagctttacagcagccatctgtcagcacaaatgggtgtctgggatggagcagtctcagtgctcggcatgcaggcagccatttggtttcactcgaaaaaggcacaactgttacaattgtggtttagtacactgccattcgtgcagttcaaagaaggctctgagagcagcattgtctccaaacccgggtaagccataccgtgtctgtgattcatgttacgtgaagctaagtaaagttttggattctggtgttagttatagcagaaatactatcccccgcttacctggtgatacaaaggccgagagaatagacacaaaggcaaccagagttgcacagtctaatagttcagatatgattaggaatttggatgtgaaggcagccaagcagacgaagaagtctgagtattcgtcgcaagttccagcgacgttgcagctgaaagacatccctttcatcagcgcacctgacctgcagaacctgtctacagtggctaatcagtacccttatgaccccagatctactttaccatccttgagaatgccatatctgaactactccagctccatgtcctcggaaagctccgagagtcttaaggatgcaaatgaactcctgaagcaagaggttcaaaaactacaagcggaggttaatagtttgagacaggaacgtgaacagcaagatgctgagctgcagaaagcagatgctaaagcccgtgaagcgatgaaccttgccaccgaggaagcatccaaactgaagacagcgaaggatgtcataaattcactaacagcccagctaaaagaaatgtctgaaaggcttcctcctggagcatgtgacgtgaagaacaatggacgcgttatgggcgatttagcgcccgaaatggggagagagaagcagatgcgatatggtgatcggttcagtggattgcctgctcaagtttaccaaacaagcaactacagtgaaacagccatggttcctccacaagggagcagcaggagcgagcacgtcgacggtgtccgagagttcttctcccctgtgcagcagatggccaatggaggagggtctacgactattgggtatcgttacaggtcagatgaccacgaccgaagggagacagacaggttccagataaatctgcagagcttgaatacgagaagctctaattctcccagtaaccaagtcgacgcggagtggatagaacagtatgagccaggagtgtacctgactctagtttctcttcgtgatggaaccaaagagctgaaacgcgtacggttcagccgaaggagatttggtgaacaccaagcagaatcatggtggaaagacaactgtgagaaagtgtacgacaagtacaatgtctgcggaacagatcgtctctcttcggtaacgacagcctagcgtaggccctgcatgcatgacatccaaaaaggagggcaaagccagtgcgcctgtagcatcgttgtgccctctttctttctctccatcatttgaagagcgggaggcatccagcttggttttggaacgtgcgctgcttaatcgacttgtttatctttttctgtcacctgcttggattcccctctctctcgttgtcgttgtatagaggagatgatggaaccaaagcagttgttgctcctttgactgagatatactatatacacgtagctgggcgtaaatcgtaatgcaagccccgttatcgtcgccttgtgatgtatctcttctgtcagtcgtcatgcatactctgtctgtaacacctggtacactctcgtattgatggtacatatttctgacagtcctttttaaaaccatagctcatccttagatcaacactagtcttttgtgcgtgttttgctttcac

SEQ ID NO: 24481 - DNA, 4017 bp, Zea Mays
gtcaaacaagactccttttttttttaaactttgttgttaaagcttgtttcggagtgagttccgtcttctccttcttcttgttcccttccacggttccacccccgcacgaccgcaccactccaccaccaccctctcctcctcccttcgcctcggtgtggggcccgactcccgagccagcattccgtcaacgccgctccgtcccgctcgactcgaccactcaaaccttctggtggggcgctccttcggagcgaggggaaggagctcatgaaagccaagcgaggaggtccatgacgaccggaggccgccgatggaatggcagatcccgtcgacatcgacaaggcacttgttgctctaaagaaaggcactcaactccttaaatatggtcgcaaaggaaagcctaaattcattcccttcagactatcgaatgatgaatcgactcttgtttgggtttcaaataacaaagataaaagtttgaaactagcttctgtgtctaggattctctcaggccaaagaacgctggtttttcaacgttttctgctccccgagaaggaccatttatccttctccctcatatataatgatggcaagcggtctctcgatctgatctgcaagaataaagtcgaggcggaggcttggtttactggtcttagtgccttgatatgtcgaggacagcatggatcccaggtccaacatatagatggaatccggatcgctggacttccttttgatctatatacggcattcaataattagaaccagaatgatctcgacaaatgcctgatcagtaaccaaagtggagccatggtggtgcaagagaaagtagcctaagtggtagctctactttcacttcggattcctttgagaataagctgagctcggtaaactcttccaaggatcgttcttcgggagaatatacatattcagaaaggactgatgtgtcggatatgcaagtgaaaagtgtttcttcttcagacattcgaatcagtgtttccagtgcccttagcacatccagccatggctctggaggtgaagattccgaatcgtttggagatatttatgtatggggggaagtcatctgtgataccatctcaagatcagggtctgatagaagtgcttactctcctggcacaactacagatgttcttgtaccaaagcccctagagtcaaatgtaatgctcgatgtgagttatgtggcttgtggcgtgaaacacgctgcccttgttacaagacaggcagaggtatttacgtggggagaagaatgcagcggtcgtctcggtcatggcattggaacaaatgttttccagccacgtcttgttgagtcactatcgacctgcaatgtcgaactaattgcctgtggtgaattccacacttgcgctgtcactgcaactggtgatctctacacctggggagatggcacacataatgctggattgcttggtcatggtagtaacgtgagccactggatcccaaaaagagtgtcaggtccactggatggtcttccggtatcagctgtatcttgcggcacatggcatacagccttgataactagctctgggcagttatacacatttggtgatggcacatttggagtcttaggtcatggaaacagagcatcatgctcatatccaaaggaagtggagtctttgaagggtctgaggacaatttctgtttcgtgtggtgtgtggcatactgctgctgttgttgaggttatcatttcacagtcaaatgcttcatctggaaagttgttcacttggggtgatggagacaaatatcgcctgggtcatggtgataggtcttcaaaactgaaaccaacatgcgtcccctcgttgatagattacaacttccataaggctgcatgtggccatactcttacgattgggttgactacctcagggcacatttttactgttggaagccctgtgtatggacagcttggcaatccaaataatgatggaaggtatcctcgcctggtcgaagagcagcttgggggtggcggtgttgtggaggttgcttgtgggtcttatcatgtcgcggttttgacaaatgctggtgaagtttacacatggggtaagggtacaaatggaagattaggccatggtgatattgcggatcgtaaagtgcctacactcgttgaggcattgaaggataggtctgtaaaacgtgttgcttgtggatcaagctttacagcagccatctgtcagcacaaatgggtgtctgggatggagcagtctcagtgctcggcatgcaggcagccatttggtttcactcgaaaaaggcacaactgttacaattgtggtttagtacactgccattcgtgcagttcaaagaaggctctgagagcagcattgtctccaaacccgggtaagccataccgtgtctgtgattcatgttacgtgaagctaagtaaagttttggattctggtgttagttatagcagaaatactatcccccgcttacctggtgatacaaaggccgagagaatagacacaaaggcaaccagagttgcacagtctaatagttcagatatgattaggaatttggatgtgaaggcagccaagcagacgaagaagtctgagtattcgtcgcaagttccagcgacgttgcagctgaaagacatccctttcatcagcgcacctgacctgcagaacctgtctacagtggctaatcagtacccttatgaccccagatctactttaccatccttgagaatgccatatctgaactactccagctccatgtcctcggaaagctccgagagtcttaaggatgcaaatgaactcctgaagcaagaggttcaaaaactacaagcggaggttaatagtttgagacaggaacgtgaacagcaagatgctgagctgcagaaagcagatgctaaagcccgtgaagcgatgaaccttgccaccgaggaagcatccaaactgaagacagcgaaggatgtcataaattcactaacagcccagctaaaagaaatgtctgaaaggcttcctcctggagcatgtgacgtgaagaacaatggacgcgttatgggcgatttagcgcccgaaatggggagagagaagcagatgcgatatggtgatcggttcagtggattgcctgctcaagtttaccaaacaagcaactacagtgaaacagccatggttcctccacaagggagcagcaggagcgagcacgtcgacggtgtccgagagttcttctcccctgtgcagcagatggccaatggaggagggtctacgactattgggtatcgttacaggtcagatgaccacgaccgaagggagacagacaggttccagataaatctgcagagcttgaatacgagaagctctaattctcccagtaaccaagtcgacgcggagtggatagaacagtatgagccaggagtgtacctgactctagtttctcttcgtgatggaaccaaagagctgaaacgcgtacggttcagccgaaggagatttggtgaacaccaagcagaatcatggtggaaagacaactgtgagaaagtgtacgacaagtacaatgtctgcggaacagatcgtctctcttcggtaacgacagcctagcgtaggccctgcatgcatgacatccaaaaaggagggcaaagccagtgcgcctgtagcatcgttgtgccctctttctttctctccatcatttgaagagcgggaggcatccagcttggttttggaacgtgcgctgcttaatcgacttgtttatctttttctgtcacctgcttggattcccctctctctcgttgtcgttgtatagaggagatgatggaaccaaagcagttgttgctcctttgactgagatatactatatacacgtagctgggcgtaaatcgtaatgcaagccccgttatcgtcgccttgtgatgtatctcttctgtcagtcgtcatgcatactctgtctgtaacacctggtacactctcgtattgatggtacatatttctgacagtcctttttaaaaccatagctcatccttagatcaacactagtcttttgtgcgtgttttgctttcac

SEQ ID NO: 24482 - DNA, 2710 bp, Zea Mays
aataattagaaccagaatgatctcgacaaatgcctgatcagtaaccaaagtggagccatggtggtgcaagagaaagtagcctaagtggtagctctactttcacttcggattcctttgagaataagctgagctcggtaaactcttccaaggatcgttcttcgggagaatatacatattcagaaaggactgatgtgtcggatatgcaagtgaaaagtgtttcttcttcagacattcgaatcagtgtttccagtgcccttagcacatccagccatggctctggaggtgaagattccgaatcgtttggagatatttatgtatggggggaagtcatctgtgataccatctcaagatcagggtctgatagaagtgcttactctcctggcacaactacagatgttcttgtaccaaagcccctagagtcaaatgtaatgctcgatgtgagttatgtggcttgtggcgtgaaacacgctgcccttgttacaagacaggcagaggtatttacgtggggagaagaatgcagcggtcgtctcggtcatggcattggaacaaatgttttccagccacgtcttgttgagtcactatcgacctgcaatgtcgaactaattgcctgtggtgaattccacacttgcgctgtcactgcaactggtgatctctacacctggggagatggcacacataatgctggattgcttggtcatggtagtaacgtgagccactggatcccaaaaagagtgtcaggtccactggatggtcttccggtatcagctgtatcttgcggcacatggcatacagccttgataactagctctgggcagttatacacatttggtgatggcacatttggagtcttaggtcatggaaacagagcatcatgctcatatccaaaggaagtggagtctttgaagggtctgaggacaatttctgtttcgtgtggtgtgtggcatactgctgctgttgttgaggttatcatttcacagtcaaatgcttcatctggaaagttgttcacttggggtgatggagacaaatatcgcctgggtcatggtgataggtcttcaaaactgaaaccaacatgcgtcccctcgttgatagattacaacttccataaggctgcatgtggccatactcttacgattgggttgactacctcagggcacatttttactgttggaagccctgtgtatggacagcttggcaatccaaataatgatggaaggtatcctcgcctggtcgaagagcagcttgggggtggcggtgttgtggaggttgcttgtgggtcttatcatgtcgcggttttgacaaatgctggtgaagtttacacatggggtaagggtacaaatggaagattaggccatggtgatattgcggatcgtaaagtgcctacactcgttgaggcattgaaggataggtctgtaaaacgtgttgcttgtggatcaagctttacagcagccatctgtcagcacaaatgggtgtctgggatggagcagtctcagtgctcggcatgcaggcagccatttggtttcactcgaaaaaggcacaactgttacaattgtggtttagtacactgccattcgtgcagttcaaagaaggctctgagagcagcattgtctccaaacccgggtaagccataccgtgtctgtgattcatgttacgtgaagctaagtaaagttttggattctggtgttagttatagcagaaatactatcccccgcttacctggtgatacaaaggccgagagaatagacacaaaggcaaccagagttgcacagtctaatagttcagatatgattaggaatttggatgtgaaggcagccaagcagacgaagaagtctgagtattcgtcgcaagttccagcgacgttgcagctgaaagacatccctttcatcagcgcacctgacctgcagaacctgtctacagtggctaatcagtacccttatgaccccagatctactttaccatccttgagaatgccatatctgaactactccagctccatgtcctcggaaagctccgagagtcttaaggatgcaaatgaactcctgaagcaagaggttcaaaaactacaagcggaggttaatagtttgagacaggaacgtgaacagcaagatgctgagctgcagaaagcagatgctaaagcccgtgaagcgatgaaccttgccaccgaggaagcatccaaactgaagacagcgaaggatgtcataaattcactaacagcccagctaaaagaaatgtctgaaaggcttcctcctggagcatgtgacgtgaagaacaatggacgcgttatgggcgatttagcgcccgaaatggggagagagaagcagatgcgatatggtgatcggttcagtggattgcctgctcaagtttaccaaacaagcaactacagtgaaacagccatggttcctccacaagggagcagcaggagcgagcacgtcgacggtgtccgagagttcttctcccctgtgcagcagatggccaatggaggagggtctacgactattgggtatcgttacaggtcagatgaccacgaccgaagggagacagacaggttccagataaatctgcagagcttgaatacgagaagctctaattctcccagtaaccaagtcgacgcggagtggatagaacagtatgagccaggagtgtacctgactctagtttctcttcgtgatggaaccaaagagctgaaacgcgtacggttcagtgtcgtttgcag

SEQ ID NO: 24483 - DNA, 3324 bp, Zea Mays
gtgagttccgtcttctccttcttcttgttcccttccacggttccacccccgcacgaccgcaccactccaccaccaccctctcctcctcccttcgcctcggtgtggggcccgactcccgagccagcattccgtcaacgccgctccgtcccgctcgactcgaccactcaaaccttctggtggggcgctccttcggagcgaggggaaggagctcatgaaagccaagcgaggaggtccatgacgaccggaggccgccgatggaatggcagatcccgtcgacatcgacaaggcacttgttgctctaaagaaaggcactcaactccttaaatatggtcgcaaaggaaagcctaaattcattcccttcagactatcgaatgatgaatcgactcttgtttgggtttcaaataacaaagataaaagtttgaaactagcttctgtgtctaggattctctcaggccaaagaacgctggtttttcaacgttttctgctccccgagaaggaccatttatccttctccctcatatataatgatggcaagcggtctctcgatctgatctgcaagaataaagtcgaggcggaggcttggtttactggtcttagtgccttgatatgtcgaggacagcatggatcccaggtccaacatatagatggaatccggatcgctggacttccttttgatggtgcaagagaaagtagcctaagtggtagctctactttcacttcggattcctttgagaataagctgagctcggtaaactcttccaaggatcgttcttcgggagaatatacatattcagaaaggactgatgtgtcggatatgcaagtgaaaagtgtttcttcttcagacattcgaatcagtgtttccagtgcccttagcacatccagccatggctctggaggtgaagattccgaatcgtttggagatatttatgtatggggggaagtcatctgtgataccatctcaagatcagggtctgatagaagtgcttactctcctggcacaactacagatgttcttgtaccaaagcccctagagtcaaatgtaatgctcgatgtgagttatgtggcttgtggcgtgaaacacgctgcccttgttacaagacaggcagaggtatttacgtggggagaagaatgcagcggtcgtctcggtcatggcattggaacaaatgttttccagccacgtcttgttgagtcactatcgacctgcaatgtcgaactaattgcctgtggtgaattccacacttgcgctgtcactgcaactggtgatctctacacctggggagatggcacacataatgctggattgcttggtcatggtagtaacgtgagccactggatcccaaaaagagtgtcaggtccactggatggtcttccggtatcagctgtatcttgcggcacatggcatacagccttgataactagctctgggcagttatacacatttggtgatggcacatttggagtcttaggtcatggaaacagagcatcatgctcatatccaaaggaagtggagtctttgaagggtctgaggacaatttctgtttcgtgtggtgtgtggcatactgctgctgttgttgaggttatcatttcacagtcaaatgcttcatctggaaagttgttcacttggggtgatggagacaaatatcgcctgggtcatggtgataggtcttcaaaactgaaaccaacatgcgtcccctcgttgatagattacaacttccataaggctgcatgtggccatactcttacgattgggttgactacctcagggcacatttttactgttggaagccctgtgtatggacagcttggcaatccaaataatgatggaaggtatcctcgcctggtcgaagagcagcttgggggtggcggtgttgtggaggttgcttgtgggtcttatcatgtcgcggttttgacaaatgctggtgaagtttacacatggggtaagggtacaaatggaagattaggccatggtgatattgcggatcgtaaagtgcctacactcgttgaggcattgaaggataggtctgtaaaacgtgttgcttgtggatcaagctttacagcagccatctgtcagcacaaatgggtgtctgggatggagcagtctcagtgctcggcatgcaggcagccatttggtttcactcgaaaaaggcacaactgttacaattgtggtttagtacactgccattcgtgcagttcaaagaaggctctgagagcagcattgtctccaaacccgggtaagccataccgtgtctgtgattcatgttacgtgaagctaagtaaagttttggattctggtgttagttatagcagaaatactatcccccgcttacctggtgatacaaaggccgagagaatagacacaaaggcaaccagagttgcacagtctaatagttcagatatgattaggaatttggatgtgaaggcagccaagcagacgaagaagtctgagtattcgtcgcaagttccagcgacgttgcagctgaaagacatccctttcatcagcgcacctgacctgcagaacctgtctacagtggctaatcagtacccttatgaccccagatctactttaccatccttgagaatgccatatctgaactactccagctccatgtcctcggaaagctccgagagtcttaaggatgcaaatgaactcctgaagcaagaggttcaaaaactacaagcggaggttaatagtttgagacaggaacgtgaacagcaagatgctgagctgcagaaagcagatgctaaagcccgtgaagcgatgaaccttgccaccgaggaagcatccaaactgaagacagcgaaggatgtcataaattcactaacagcccagctaaaagaaatgtctgaaaggcttcctcctggagcatgtgacgtgaagaacaatggacgcgttatgggcgatttagcgcccgaaatggggagagagaagcagatgcgatatggtgatcggttcagtggattgcctgctcaagtttaccaaacaagcaactacagtgaaacagccatggttcctccacaagggagcagcaggagcgagcacgtcgacggtgtccgagagttcttctcccctgtgcagcagatggccaatggaggagggtctacgactattgggtatcgttacaggtcagatgaccacgaccgaagggagacagacaggttccagataaatctgcagagcttgaatacgagaagctctaattctcccagtaaccaagtcgacgcggagtggatagaacagtatgagccaggagtgtacctgactctagtttctcttcgtgatggaaccaaagagctgaaacgcgtacggttcagtgtcgtttgcag

SEQ ID NO: 24484 - DNA, 1178 bp, Zea Mays
agacaattaaatgctgtagatcatacttgtcagaaacctgatatgttgctttgatagtgtcagaatttttgccatttggtaaacattttctgcttggtcatatgcaaggtagacacatcatcattataccttgatatgtcaatgctgctcatcggtcgtttgcttcaaaatgcagttaacattgttacctgttgcctttaattttaactgaactgatcacaatttcagttgtgggttactgggttatcagggattttgatacctattctaaggctagtattggtgttagcctaacacttgcattgcatcttacggtgacacatggtttcatgtctccttccctgctagttcttcttgataggatgcttattttgttttatgttgagtgtggttacatgttatttgatctactaggcttttgattagctctagctgatcgatatatgagtcttaaggtggttattttggtaataattaggtgagttggggagccttaggatatcagtaaacatgctgtactgtatcatatcctcaatgtgctactttgatggagcacaacaagtattgacgtaactgagatgggatgaaccatttagttgcctttaacttcatgagaatagaggaataatgggaggggagcaggccagcaaggccaagactctgcagctgctgctgttcctgttggttctgtcgcggtggccagcgcagagcttactctggtcattcacggcacggccgatctgtaaggggacagcagcagtagtcgatttgagggcacagagcaacaaggaaagggaagagaagtgacaagaatgaaaagtttcgggtggcggcgcatctggagagcgggagggagtatgtgggctggggcaaacacctcattccctgtccctccccttccattctgctgttttgcagtttgttagatcggtatggcgtcgacttgccttgtaagtgcctaggtgagattggaagggggtggtttgcacctgccttatcgccttaggccttgtttggttgcatatggattgagggggattaaatcctcttctattcaattttgactagaaaggtatttatctgctccaaacctcttcaatcccctcctaacagaacaagtccttaaggatcatggttttagcctaccacttgcattgcatggtactgtcacacagttt

SEQ ID NO: 24485 - DNA, 4656 bp, Zea Mays
ccgccgccactgcggagtggaatggatgggaagtctcgctttgcagtttctctctgccgaaggacggagccgccttccgagctcgtgtgctcgcgcggtgttatgggcttagttgggccctcgacccagccgcacggcctgctagacacagtcgccgttggatcgtacagctcgtagcggacaacgcggattgcgcgactgcggcctgagcgacgtgaatccaagcgtgcaagcaagcggcggtaatggcggcggctctgcaagccacgccgctcaaaaccctatccatctcccgccggcgcgtcggcggcgcgggggcgcggccgcgtccgatggcggcgagcttccgatgctccgcggcggcgaggagctacaatatcacgctcctccccggagacggcatcggccctgaggtggtcgccgtcgccaaggacgtgctgtccctcgccggcgccctcgaaggcgtcgagctccggttccaggagaagcttgtgggtggctcggccctggacgccaccggcgtgccgctccccgacgagacactcgacgcggccaagggttccgacgccgtcctcctcggcgccattggaggctataagtgggataacaatgagaagcacctcaagcctgagaccgggctgctgcagctccgtgccggacttggggtctttgccaatctgcgaccagctgcagtattgccgcagttggtagatgcatccactctgaagaaagaggtagctgaaggtgttgacatcatggttgtcagagagcttactggaggcatctacttcggcaaacccaggggttttggaacaaatgacaatggagatgacattgggttcaacacagaagtttattcagcttctgagattgatcgtatcgcacgagtcgcatttgaggttgctcgcaagagaagagggagactatgctcggttgacaaagcaaatgtcttggaggcatctatgctttggaggaaaagggtgactgcactagcttcggaattccctgatattgagctctcacacatgtatgttgataatgctgcgatgcagcttgttaggaatcctaagcagtttgacacaattgtcacaaacaatatttttggtgacatattatctgatgaagcatcaatgattacgggaagtattggaatgctcccatctgccagtgttggtgaatcgggacctggtctttttgaacctattcatggctctgcccctgatattgctggacaggacaaggccaatccattggctacaattcttagtgcagcgatgctattgagatatggcctaggagaagaaaatgctgcgaacagaattgaagctgcagttactgaaacactgaaccatgggttccgaactggggacatatattctcctggaacagtaagatagattttcttgcagaaccattatcaatgaattatggggctgtttggtttgaggaatcacctcatccttagttgagatggtccatcatgattcatgagttcatcacatgaattttggtggaatggatccaaccttcatgctttttttagctttatatcgtacatgtttaatgccaattacttgatcctcacctagagaaggtagtattggacaaatcattcaggtagtgtaatagcattggacaaatcttttaagcatattaactctctcgtgcggtcatgcctccgtggaagaaagtgatagctaacttccgaaggcatgtattgtatttgaattttggttgatctcattctgagaggcttatgttcccaattggcagacattggttggatgcaagcggatgggggaagaagtcctgaagacagtgaactcactgaaggaagtggctgctgtaaactgatgcatgttggtacttaatttataaccctacaggatgagatggttgaaagggacttgcattttattagaagttgagcctggtgaaagagagcactgcgtctggttttgaatcgcaactgtagcggctgaaccgacggtcttttttcatttctggtgtttgttggccttcctgtaactcaattttgtacaaggaaggataagcatatgtatgataaaatgggatagtttatgccagttgaataaaatatgttctataacttctattcatgcttttatgccttcaatttcgtacgagatggaccgagctggcaaatcaagacagtcaaaaggtcacctttcgtgagtcaataatcttatcggagctgatttatctgttgtgctgttcgatacacatgaccaaaaattcttgatgactagtctacactgtgaagtgacaacaacaacaacaactgggcagagatggctagtctactgctagcaaagcgaactggcagggtcgccatggcatgacgccatcaccagtagtccttgcacgagcaggagccatgctcaaacctgtggaacctgttggcgtctctgactactagcgccctcctcacgacggccgacagccccttgaagaactcgtggcagtccccgcacacccgcaggttcttgtacaccctgatcggctccccgtgcccgccgccgtctacgccgttgcgcagcagccacaggccgacggcgagcctctcgctgtgcgccctcaggctctccgctcgggactcctcgtcgacgtcgtgcagagcgaagcgcgcgtcgtcggcgttgtacccaagctgctcccgcatcctcgtctccatgtccctcaggacgcggcggatgtcgccggcctgcgggtgcgtctcctcttcaccgccgccgccgtagaagaagtgcacctccttgccgacctccacccaactgcacccgccctgcttcttgagccccctgcgcctcatggcgtccctcaccttgtggcactcgcgccactcccccgcctccgcgaggacgttggacagcgtgacgtagttcaccgggttgtcgccgtccatggccaggaggacgtcgcctgcctccctgccgacggcgacgtccttgtgcaccctgcacgcgctcaggagggtctgccatacgccgacggtcggctccatcggcatcgtccggatgaggtccctcgcctccctgagctccccggcgcggccgaggaggtcgaccatgcacgcgtagtgctccgctttcggcctcaccgtccggtcccgccggatgcaggagaaataccggcggcactcgtcgactaggccggcgtggctgcacgccgacagcagcgccaggtaggtcacctcgtcgggctccacgcctcccgctcgcatttcctcgaacaaggcgacggcttcacggccaagcccgtgcttcccgaggccattgaccatcgtcgtccacgagacgacgttcggcgcccgcatctcccggaacatccgctccgcctcgtcgggcagcccgcacttgaggtacatgtcgacgatggagttgcccgcggacacgtccgtcccggtcgggtccttgatgccgtagcagtgcacctgcctgccctgctcgactagcgcgaagtccgcgagcacgccgacgacgctggacagaacgtgggaatcgggtcgggcgccggagcgccagaaccgccggaacagctccagcgcctccgtcacctgcccctcctgcgcgtgcccgacgaccaccgccgtccactggatgacgttcttccgctccagcctctcgaacacttgcatcgccaccggcaagcgccggcatttgacgtacatgtcgaccagcgcgccggcgaggatagcgttggaggccgtcgagaacccgcttgccgtcatggccgcgtgaacctgcgcgccctcgcgtgtcgcgccaagaccgctgcaggctttgagcaggctggcaaaggtgaactcgtcaggctgatgctgaccctcatgccgccgcatctcccggaacacgagcagcgcgtccctgccgtggccggcgtgcgcgtacccggagaccatggcgttccaggtggcgatgccactcccgagcccggcgccgtcaaacacacgccgcgcgtcgccgatcctcccgcccttggagtagacgagcaccagcgagctggcgacgacgtcgtgctcctggtaccctgcccggacgcagagcccgtggatcccgacgcccgcagccgtgtcaccgacgacgcagcaggccttgaggctcgcggagagcgtgtactcgttcggcgccgcctcggaggcggtccgcatctcgccgagcagcctgaggcagcccgtggcgtcgccgtgccgcaggaagcccaccatgagcgccgtccaggagaccacgttcctgtcgcgcattccgccgaacacctcgcacgccaggtccagctccccgcacttgacgtacatgtcgatcaggttgttgcccagcatggtgtccgatccgaaccccatcttcgttatggcgccgtgcagctggacgccgccgcggagcgacgagcttctcgcgcttgccctgaggaggccggcgatcatcttctgccgctccattggattcgtgggaaacgacgctgctcatgcagataccagccctgctcggttcccgttaggatcgccgcgattgaggtggcgaatctcaagcgatgacgcgattgagggtatcagcagtgttgatacactggagaacgggaaagacgcgcttctgttgatgcactgaagcagctgaagggagacgaaaacgaacacttgcc

SEQ ID NO: 24486 - DNA, 4349 bp, Zea Mays
gaaacattgacaacagaacatataccttaatcagtccagttttcttgtcaagctcatatttaactttgcttccctttgtgatctcaacaacctgcataaagatgtaaataatgcagtcactgtatgaagcgaactagtagatttgttaaacattatgataaaaaatgcacttttttgctcgacaagcaaatcgttgtcaacaggctcatgtaccattatgttgtaggtgcatcaaatgttcatcaatgcaaatatctgtaaccaaacaattaaataggctatttgcgtaattgaaattaaaggaacattctgctcaattgaaaagctataaatcgattttagctcgtcaaacaagaaagaacaaacaaattgcttgggtaaacacgagcctagcgatttatggtgattttactagaatcacatttctagctgcaatctgtaaaaaaattaatagaaagctaccatttctatgtcaactcaacacataaatgcctagaacaaaaacaaccctgacaaactgtcagctacaatactatacactattagggctgagggagtaagatagctttatatttgggaagtcaatagatctacccatcctgttctctaatcaactattgtggatcagtcaatcatggagtcatcatgcgcatcatggtactcgtttgctaattgctaggtatatttcctttctatccatcataatacttctactacatactagagagcggatgtgtcagggcctaaggaggccgacggaggggctgcggcagcagcagccatgagccctccaagggggattagataaggatagttagagataagattagaagattagttgagattatctaggagattagttgagattatctaggaaggtgatcagatagtagttgttgaggctccatcgatgggagatttgtggaccaacataagggctgatctcacaaagatgcaagccacgctccagaaggttgagcaagggctgctgcaaatcaaggcagcagtgcaacatgagtaacaccagctggcgttgtccgcacggctccggacatcggcggctgtgggcatacaagctgctgctcgtggcttccttgcacgacagaaagtgcgggagatgcgctggcagatgctcgaggcagccttggtgacggttgacctcggcacacgtcggcgcgacctcaccctatcggacggccatcagcagtggcaccaggccgctatctcgaagtgcgagcatgatacgtgtcccgcgggcgacgaacttcaactctacgacagcggcggtagggaaggcactcacctcgtcatcaacaagggcgcactatttagcgccaccacattccgctactggccgccacgagggcgcctccgctggttattgttgcgacctattccaagtgcccatccatgtgctcccctttcgtgcagatggcgtccatgggatccaggtggctgcacacgtgcgtgtccgccttatcttatggggtaaaaaaatcagattcagaataataagataagccgagatgtaaaaggcttgtcttctatgtgtttggttttgggtcaagtagactcggtctttgagcacccgttatgcggcagctcgagggcgagctgcttgttcaggaggggtgtagtgtcagggcctaaggaggcccacggaggggctgcggtagcagcagccatgggccctcaagggggattagataaggacagttagagataagattagaagattagttgagattatctaggagattagttgagattatctaggaaggttatcagttagtagtttgttgagagtttttaggagataaggatctctagctagataggggcagccaaccggcctatttatgtaatcaatggatgagaaataaagcaggcaagaattagaagggagaaaccctcctcttgcttggccgtgggcaaaggcccccggccgacgttcctgcccatcgatacccctctccaatccctcaccgatctagtgaccataacatctgtatcggctagcttgggtttcgatctgatcccatggcttctgctgccaatttcgcggcgtcatcctggcaatcggcgtccccatctccatggacaacgccgcatgtcaccttcgccacgccgtcctggcaaccgacgtccccatctccatgggttgcgccgcatgccaccttcgtcacgccatcctggcaaccggcgtccctatctccatgggcagcatcacctgccaattttgtcaccacatcctggacgccagcgtgcccatccccagggacaatgccaaatttcatcacatcatcttcgttgacggcgtctccgtccccatgggcgacgccactaggggcagccacgactcagcaatcaccagctccatcgatgggagatttgtggaccaacataagggctgatctcacaaagatgcaagccacgctccagaaggttgagcaagggctactgcaaatcaaggcagcagtgcaacatgagcaacaccagctggcgttgtccgcacggctccagacgtcggcggctgtgggcatacaagctgttgctcgtggcttccttgcacgacgtagagtgcgggagatgcgtcggcatatgctcgaggctgccttggtgacggttgacctcggcacacgggtgcgcgacctcgccctgtcagacggccatcaacagcggcaccaggccgctatctccaaatgcgagcatggtacgtgtcccacgggcgacgaacttcaaccctacggcagcggcggtagggaaggcactcccctcgtcatcgacaagggcgcactatttagtgccaccacattccgctatcggccgtcacgagggcgcctccgttggttattgttgcgacctattccaggtgcccatccatgtgctcccctttcgtccagatggcatccatgggatccaggtggctgcacacgtgcaagtccaatgtgcggagggtgtccgccttatcttatagggtcaaaaaaattcggattcggaataataagataagccgagatgtaaaaggcttgtcttctaggtgtctggttttgggtcaagtagactcggtctttgagcatccgtcatgctgcagctcgaggacgagctgcttgtccaggaggggtgtagtgtcagggcctaaggaggccgacggaggggctgcggcagcagcagccatgggccctccaagggggattagataaggatagttagagataagattagaagattagttgagattatctaggagattagttgagattatctaggaaggtgatcagatagtagttgttgagggtttttaggagagttttaaggagataaggatctctagttagatagggacgactagctagcctatttatgtaatcaatggatgagaaataaagtaggcaagaattagaagggagaaaccctcctcttgcttggccgtgggcaaaggcccccggccgacgttcctgcccatcgatacccctctccaatccctcaccgatctagtgaccataacaggatgatttgttgaacttatgcaaatcaggaaaaaatggttcctacaatggtgggttttcctgttttaagttcaaaataaagaccctgccaaccttttatgccaactgaataatcgttcagaactagtggcagaactgtgggttgaacaacctttcacatgacagagataattatacaaattattcgataataacagaaaaaccatgactcaaatctgccttgtatttgacaaagttaattgcactaatcattcaacactacagagagatcatgatataggactaactggtcaacatttgaggcaaaatcattagtcatacttgcccttcacatgacagcactgattatactaactatttaacactaatgtcaaatcgtgtgtagaacctgccttctatgtgtctggtttaattacactaaatgttcaacattaataatgcgattatgagtttaaactaccttttacttaaacagaattaattatattcatgagtggaacctgcctttttacacaacaaaaatagttaacgcttcaacaataacggcacaatcatgaatcaccttctagctgagtgaaaaaatcatttggtaaccgttttggtaaagtcagtttaaataaatgagaaatgctgaatcatccaaagtgttgttcccaacaacttcagtctgattgagataccataccaatataaatggagtgagacttaagtggtcagaaagcactacagaatcaccattacagctgcatgaaacccctcaccttcccgtagatggttccagacaacctaagtccccacagcaccgaacatataacacatcaaacggttctaaggtaatgc

SEQ ID NO: 24487 - DNA, 4138 bp, Zea Mays
caccacccgcggtcgagaggctactcgtacgccggaagcaacgcgaaaaaacaaatcattgtctcgcctcacctcgcctcgccccagccgccgccccagcgatccgaaacccctcttcggccccttccccactccactccactccactctcactctcactcccactcctcacgcgccgccgcctccaaatgccggcgcttcacccccaccgccggtccttccccattcccctgctacttctcctatcgctcttcgcctcctcccctctattcttctccccgagccccgcagcaaccgccgtcggagattgccctctggattttagctgggcaaatttcacactagctgcggcagcctgctctgacccaacgcagcgggcggcgtgctgccgctacatcaatgccttcgttgccatctccattgcccgctatgccaatgccaccggcaggctgggtgtccctcctgcctttgctgagatctgtctcagctccgtgtccgagacattcaagctgcgggggatccccaccgacgccgacgtcttctgcggtctgggccccaagataagggtttcgtatcagtgcgctgggcgggataccgtgttggaaatgatgcagtccccgaacttcaatgacgttatcgggagctgcaggggccctctgtcgctggatatcacctgcaagacttgcttgaattatggcatcgtgtacctccatcgcctcatcggttcagacgataatgtcggcctcagcgtgtgccgcaatgcggtttttgtaacccttgccactcaagggggtattctttcatatgaagatatcgtcacgtgcttctttggtgtccagggaatcaccacatttccaggaccggcatctgtcacatcgacaccagcatcctctccgaatgtcactgttgattctccagctccaaggatcaagagtcttccacagaagcaacaccagcactaccggattacagttattccagggataggaatcggtgttatattgtttgctgtgctgctgcaaatcgtcttagcggtactgattcgaagaaagagcagggaattgaagaacgccgaatttcccgctcggaatccagataacacatttcactacaatcaatcctggagatgccccgaaggccaatcaccaatgttccaaaggtttagctacaaagaaacaatgaaagcaacagataatttcagcacagtcattggaaaggggggatttggaactgtctttaaagctcaatttaatgatggctctatagctgcggtgaaaaggatggacaaggtttcaaagcaagctgaagaagagttctgtagggaaatggaactcttggctaggttgcaccatcgccatctcgtgaccctcaagggcttctgcatcgaaaagaaagaaaggtttcttgtgtatgaatacatggcgaacggaagtctaaaagatcacctgcactcatctggaaggaagccattaagctggcagacaaggctgcagattgcaacggacgtggccaatgctctggagtatctgcacttcttttgtaaccctccactttgccatagggacatcaaatcgagcaacattcttttagatgagcatttcgttgcaaaggttgctgattttggccttgcacatgcatcaaggaccggagcgataagctttgaagccgtgaacacggatatacgaggaaccccagggtacatggaccccgaatatgtggttactcaagagctgacggagaagagtgatatatacagctacggggtgcttcttctggagcttgtgaccggacgtagagcaatccaggacaggactaacttggtggagtgggcacagtcgcacctctcgtcgggagcggtctctcctgaacttgtagacccgaggatcaggggcgctgttgacgtggaccatctgcatgtggtggtgggcatcgtgcagtggtgcacccatagagaagggcggcagaggccctccgtgaggcaggttcttcggatgctctcggagaggctggacccggggaacggcagcttcggcgagggcatggaagacgcggagggcggcttctatccccggagcagcaggtgcggcggcgcacatcaccggaacgagctggtcccatacggcggcggtgacatgaggtctctgcattcctcgtcgagcacgaccaggtcctcttactgcagccgcagcatgctgctggagagcgggcagactcaatcgcccccagaaacccagtgatgaatgaatgaatctagttagttcataggcaacttgttggtggttgctgttatttattattatttgctgtttgtttgttttgtaagggggaaaaaaggaattgtcaagtggtcattggaaggaaccagtggcggcagtgaatgagcaaagcagcagcacatgttccatgtggttgttggtcatcatgtccctctttgggttttgagttttgactgggatctgtgaaattgcttcaggttttttttttttgactagcaaccatgttcagtgcagttgaccaacaaccatgctctgtagataattcaatcaaccgtcgcaaaaaaaaaaacatggtgaaggtggagatagaaaaggtggcgggtggcgaatggctttgctttgctttgctggaccgacacagacacaaacacaggaggggaggactggactggacagccagccgcgcatgaactggcgaggctagtctgtctcgcaaccgacggatctggggcacatgcttgtcctgcgcaggcagtggtatcgtaggttaaggccaccccaagcaggagtctgcttccgttccattgcatcccagtcccagccaaagcaggatgccgcacgccaagacggactcggaggtgacgagcctggcgccgtcgtcgcctccgcggtcgcctccacggacccgcggcgccgtctactacgtgcagagcccgtcccgcgactcgcacgacggcgagacgatcaaggcggccacgtctgtgcactccacccccgcgctgagccccatggcgtcgccgcgccactcgcactcccactcccactcgtccatgggcagggactcctcctccagccgattctcgggccacggccacaacaagcgcaaggccgacaagggcggcagcaacaagggcgcgccgggcggcaaggggtggcaggagatcggcgtcatcgaggaggaagggctcatggacgaggaggaccacacgcggatcgtgccccgcaagtgctactgcttcctcgccttcctgctcggcttcgtcgcgctcttctccttcttcgcgctcgtgctctggggcgccagcaggtcccagaagccgcgcatcgtcatgggcaccatccgcttcgacaacttcatcatccaggccggcaccgacgcgtcgctcgtgcccaccgacatggccaccaccaactccaccgtcagattcacctaccgcaacaggggcaccttcttcgggatccacgtcaccgccgacccgttccagctctcctacagccagctcacgctcgcgtcaggagacctccacaacttctaccagcctcgcagcagcagccgcaccgtcagcgtcgccgtggtcggcaacaaggtgccgctgtacggcggcggacccacgctgacggcggcgccggcggccgggggcaaggggcagcagcaggccagcgccaaggtggcatcggtgcccatggtgctgaggaccacgctgcactcgcgggcctacgtgctgggcgcgctggtcaagcccaagttcacgctcgccgtcgagtgcagggtgctcatgaacccaaacaagcagaacaagcccatctcgctcgggaacgcctgccactactcatgatatatttagcctctcatactagctgctcaacatcaccatgcccatgcatccatctcctacctacctctcaattgtactgtaatggagtatttattgatttatttatgctttgcttcgtcttctcttctctgtattgattttctttgttcattccttctacctttcgtatgcatattttggggttattttcgtctattttaatagtgatgacggtgaggctaggtatgtctttcaagagtcgtcagaaggcggaaactttacatgtaaactcaaaacatttaatctaaattatggaatagtccaatg

SEQ ID NO: 24488 - DNA, 4851 bp, Zea Mays
cgcaccgccagtccgccatcggccaccgcaacagtgcagaaacagagctaaccctgatcctcccctcgcagcctgcctgccaccatcagcggcgctacacctcgccgctgccgccgctggggataaacaaacggaacgaacgcaggttcacctcggatctgcggctcgccggactccgaacgaacgtcacgtcactgaacggacgccacagatttggcctgctccgccccacgggacgcctagccggatttgacagctccacgcgcgcgcgcgcgcgcacccaacccgcgtcttctccggcctgccagtgccgcggccggggctccatccccatccatgcattcgccgaggtcgcgcattcgcgtccgcgacccacacccaaacccgcaccggccctcgggtggcggacgaggaggaggaggaggatgcctccgccgccggtcaccgcctgctccgccctccccgcgttaccggcgacgcccgcagaggcacaccccgccgccgcggcgcggcagcgatcctcaccccgacatctccgccatcgcccgccaccgcatcctgctcgaggccggccgcttcgccgcgcattacctggtcgcccagggcgtcctccccgaccacgtgctcagggacagggaagacccgcccgccagccgcgggaggaatctagacggcggcggcgatcctagatcgagctggaacgatggggactgggcccgcgcctgggaggatgacgacaggcaggcacggaagtcgacgagatgggacaggagaagccagagctttgacgacaggggtaaaaagtaccacgacgccggccgtgatgtagaccggggtgcccgccggactcgagattacgatgagcccaggagacctccgatgtcgagatcctactcgcataacgaccgccgcccttccggctccgctgatggcggcagagtggatccaaggagcaggagcaggagtagaagcagggccaggatccgcagagatttggatcacaccaaggtgacagactctggcattattcctgctgatgctgctgatgatggagactgtgatgtgcactacggtcatgttgatgaaatgccaaggcagcagcggagggtgcctagttcagtggtggttgcagacagtgccgatcaggcaatggctaccgaagacggggaggcggagttcgatatccatggactgaatcgcactcgagacgtttctgaagacgaggacggtgagtttgcagctgctcgcttgaatggtgaagatgatgttcatccgttgaaatctgttaaggaaccggccttgcatagggggtcccagctcagcaatgccgtagaggacagggaagctgccaatgcacccaccatggtcatggatgcttgtacgagggaaacatcaggtgaggacaatgcctactctgaagcaacaaatgaaatggtggctccacatccacatagtgaaggtaaaccagagctgccagcttcgtgcagaccttttgacctcaacgtcgtcgaaactccagatgcctgtgaaatggctggtgatcctcaagcagaccatgtttctgatttagttggctggatacaccagcaaactaactgccatgcttcagaatttcaaggtcaagatgagcgtcacatgctgaagaatgggcacgacttgattaggtatgatctgaacagcgaggctgttgaagacgcacaggatattcacctgctggaggatgagaaattacctgtaggtcttggcattgatgcgcatgatacgactagaatccaatgttggcgcggttcgcatttacgtctgaatcaaaatgctggtgagctggaacatgaaaacgactgtgtgattggtgagcagctgctgctaagtgatggcatggatggacatcttgtccgcgattaccaaatggcgtcagaacccaagatgggtgtctatgatttgcacagctacaatctggaaagcgagaaaatgctcctagatgatggtgcagagaaacacgcacatgataattgccatctacacgacgggcaagtgcttttcaatcagtctgcgaatctacaggctcacaatagggccaatgagcgaacaattcctgtgatcaatctcgaagatgatgattatgaagagcagtctgatatcagggagtttctcgaatccaattatcaatgcctgggacatgcccttctctgagcttgggaagtgggcaagtggccatgttgtttgccaagacggctgcgagattctgcgtcagtcagtgcaatatgtcgtcatcctggagcattggaaacaagatttgcaatgttttaaaggtggatgcatcatgctccatccatacataataattgattgaagaaaggaagtcgttcaggtgctgtactaggagaggatacctgactcaccgacctggcctcagcactcagcagtcagcagcagcttgtaggcgtcttcaaaacttcagcttcaccttcttgtagttgtgttcctttcctttccagtttccatgctggtgcgtacgtgtgcgtgcaagcaatattcagtgtgatgcatggccacaatattcaacttcaccttcttgtagttgtgatttgctgtcgaggtgatgcatggccacaatattcagtgtgtctatgtatgtatctcaggcccggagcagtgagctgcgtctgcgcatgaacgcaaagtaaagctgtgactgtgactgtgactgtcaggaacaggaagtactactacactactggtggcctgtgtgcgctgtcccctgtggagggaaaccaacaaggccaaacacacacgcacgttgggccgagaaaaaagaaatagaaatacgggcccatctcatctatgttctagttaatggaaaatccggcctgtgtcactgatggtagatcaggcccaatgaacacgatcacagccacaccaacgcaccacgctcggctgcgagcttgcgaccccaccgacacacacagcagggaagcgaggggaaggagaggcaaggcggcgcggccagcggcccaggatatctgcgcgtgcgatcccgaggaggcgtcggcgaggtgggatgatatcgcagttcttcgttctgtcgcagcgcggcgaccacatcgtcttccgcgactatcgcggcgaggtgcccaagggaagcgcggagatcttcttccggaaggtcaagttctggaacgacgacgaggcagaggaggcgcccccggtcttcaatgtcgatggggttaactatattcatgtcaaagtcgctggactattttttgtggtaaccacaatggttaatgtctccccatcccttctcttggagcttcttcaaaggattgcacgtgttacaaaagattatctcggcgttcttaatgaagattcattgcggaagaactttattttggtgtatgaattgcttgatgaagtcattgactttggatacccacagacaacctctactgaagttctcaagtcgtacatattcaatgaacccattatggttgatgctggaaggctgccaccgcttggtcctgctgctatgttcatgcaaggcacgaagcgtatgcctggtacagctgttacaaaatctgttgttgctactgagcctggggggaagaagagggaggaaatttttgttgatatcattgagagaattagtgtaacattcagctcgagtggctatatacttacatctgagattgatggaacaattcaaatgaaaagttacctcactggcaatccggaaatccgtcttgctctcaatgaggatttgagcatcggaagaactggatcttcttcatacgattacagaagttcttctggaggaggaacagtcattcttgatgattgcaatttccatgagtcagtacatctggacagttttgatattgacagaactttgactttacaatattgcatagataccgcccgatggagaatttcctgtaatgaactaccgtatgacccaagaatttaagccaccattccgtgtaaccgcactaattgaagaagctggaccagcgagggctgaagttctactgaaaataagagctgacttctccgcgagtgccactgctaacacaatcgtagtacaaatgccagtgcctgcatacacaatgagagcgagttttgagttggaagctggagcagttggacagacaaccgattttaaggaaggatccaggagacttgagtggaatctaaagaagattgttggtggttctgagcacaccctccgtgcaaagctgacattttctcaggagtcacatgggaatatcacaaaggaagctggcccagtgaacatgaatttcactataccgatgtacaatgcatcaaagttgcaggtcaggtatcttcagatcgcaaagaaatcgaaggcatacaacccttatagatgggtgcgatacgttacacaagccaactcctacgtagctcgtctatgaggaatcagcatctgtactcttgtttccagtccattttttttgggtgtaatatttgagcgttatcatggacatagtggcgtgtattgtgtaactgtatattgaggttcgcataccgctcagctcctgtagtaacaattgtttttcgtcgtgcaatgtgcagatgaataattcatgttctaatgctgcaaaactgattgaggcgagtacctattgtcttgcataattcctgcgaggttttagaaactgtgaactgacctcgcctgtgggacattgggtcctattgtttcgcataatttctgcaaggttctagaaactatgaactgagctttggccagtaaagctctttgtattaaagtaataatgtattttcagttgagttcaggtactcatgtattcccgttttttttccccaaaaggatatttg

SEQ ID NO: 24489 - DNA, 4831 bp, Zea Mays
cgcaccgccagtccgccatcggccaccgcaacagtgcagaaacagagctaaccctgatcctcccctcgcagcctgcctgccaccatcagcggcgctacacctcgccgctgccgccgctggggataaacaaacggaacgaacgcaggttcacctcggatctgcggctcgccggactccgaacgaacgtcacgtcactgaacggacgccacagatttggcctgctccgccccacgggacgcctagccggatttgacagctccacgcgcgcgcgcgcgcgcacccaacccgcgtcttctccggcctgccagtgccgcggccggggctccatccccatccatgcattcgccgaggtcgcgcattcgcgtccgcgacccacacccaaacccgcaccggccctcgggtggcggacgaggaggaggaggaggatgcctccgccgccggtcaccgcctgctccgccctccccgcgttaccggcgacgcccgcagaggcacaccccgccgccgcggcgcggcagcgatcctcaccccgacatctccgccatcgcccgccaccgcatcctgctcgaggccggccgcttcgccgcgcattacctggtcgcccagggcgtcctccccgaccacgtgctcagggacagggaagacccgcccgccagccgcgggaggaatctagacggcggcggcgatcctagatcgagctggaacgatggggactgggcccgcgcctgggaggatgacgacaggcaggcacggaagtcgacgagatgggacaggagaagccagagctttgacgacaggggtaaaaagtaccacgacgccggccgtgatgtagaccggggtgcccgccggactcgagattacgatgagcccaggagacctccgatgtcgagatcctactcgcataacgaccgccgcccttccggctccgctgatggcggcagagtggatccaaggagcaggagcaggagtagaagcagggccaggatccgcagagatttggatcacaccaaggtgacagactctggcattattcctgctgatgctgctgatgatggagactgtgatgtgcactacggtcatgttgatgaaatgccaaggcagcagcggagggtgcctagttcagtggtggttgcagacagtgccgatcaggcaatggctaccgaagacggggaggcggagttcgatatccatggactgaatcgcactcgagacgtttctgaagacgaggacggtgagtttgcagctgctcgcttgaatggtgaagatgatgttcatccgttgaaatctgttaaggaaccggccttgcatagggggtcccagctcagcaatgccgtagaggacagggaagctgccaatgcacccaccatggtcatggatgcttgtacgagggaaacatcaggtgaggacaatgcctactctgaagcaacaaatgaaatggtggctccacatccacatagtgaaggtaaaccagagctgccagcttcgtgcagaccttttgacctcaacgtcgtcgaaactccagatgcctgtgaaatggctggtgatcctcaagcagaccatgtttctgatttagttggctggatacaccagcaaactaactgccatgcttcagaatttcaaggtcaagatgagcgtcacatgctgaagaatgggcacgacttgattaggtatgatctgaacagcgaggctgttgaagacgcacaggatattcacctgctggaggatgagaaattacctgtaggtcttggcattgatgcgcatgatacgactagaatccaatgttggcgcggttcgcatttacgtctgaatcaaaatgctggtgagctggaacatgaaaacgactgtgtgattggtgagcagctgctgctaagtgatggcatggatggacatcttgtccgcgattaccaaatggcgtcagaacccaagatgggtgtctatgatttgcacagctacaatctggaaagcgagaaaatgctcctagatgatggtgcagagaaacacgcacatgataattgccatctacacgacgggcaagtgcttttcaatcagtctgcgaatctacaggctcacaatagggccaatgagcgaacaattcctgtgatcaatctcgaagatgatgattatgaagagcagtctgatatcagggagtttctcgaatccaattatcaatgcctgggacatgcccttctctgagcttgggaagtgggcaagtggccatgttgtttgccaagacggctgcgagattctgcgtcagtcagtgcaatatgtcgtcatcctggagcattggaaacaagatttgcaatgttttaaaggtggatgcatcatgctccatccatacataataattgattgaagaaaggaagtcgttcaggtgctgtactaggagaggatacctgactcaccgacctggcctcagcactcagcagtcagcagcagcttgtaggcgtcttcaaaacttcagcttcaccttcttgtagttgtgttcctttcctttccagtttccatgctggtgcgtacgtgtgcgtgcaagcaatattcagtgtgatgcatggccacaatattcaacttcaccttcttgtagttgtgatttgctgtcgaggtgatgcatggccacaatattcagtgtgtctatgtatgtatctcaggcccggagcagtgagctgcgtctgcgcatgaacgcaaagtaaagctgtgactgtgactgtgactgtcaggaacaggaagtactactacactactggtggcctgtgtgcgctgtcccctgtggagggaaaccaacaaggccaaacacacacgcacgttgggccgagaaaaaagaaatagaaatacgggcccatctcatctatgttctagttaatggaaaatccggcctgtgtcactgatggtagatcaggcccaatgaacacgatcacagccacaccaacgcaccacgctcggctgcgagcttgcgaccccaccgacacacacagcagggaagcgaggggaaggagaggcaaggcggcgcggccagcggcccaggatatctgcgcgtgcgatcccgaggaggcgtcggcgaggtgggatgatatcgcagttcttcgttctgtcgcagcgcggcgaccacatcgtcttccgcgactatcgcggcgaggtgcccaagggaagcgcggagatcttcttccggaaggtcaagttctggaacgacgacgaggcagaggaggcgcccccggtcttcaatgtcgatggggttaactatattcatgtcaaagtcgctggactattttttgtggtaaccacaatggttaatgtctccccatcccttctcttggagcttcttcaaaggattgcacgtgttacaaaagattatctcggcgttcttaatgaagattcattgcggaagaactttattttggtgtatgaattgcttgatgaagtcattgactttggatacccacagacaacctctactgaagttctcaagtcgtacatattcaatgaacccattatggttgatgctggaaggctgccaccgcttggtcctgctgctatgttcatgcaaggcacgaagcgtatgcctggtacagctgttacaaaatctgttgttgctactgagcctggggggaagaagagggaggaaatttttgttgatatcattgagagaattagtgtaacattcagctcgagtggctatatacttacatctgagattgatggaacaattcaaatgaaaagttacctcactggcaatccggaaatccgtcttgctctcaatgaggatttgagcatcggaagaactggatcttcttcatacgaagttcttctggaggaggaacagtcattcttgatgattgcaatttccatgagtcagtacatctggacagttttgatattgacagaactttgactttaataccgcccgatggagaatttcctgtaatgaactaccgtatgacccaagaatttaagccaccattccgtgtaaccgcactaattgaagaagctggaccagcgagggctgaagttctactgaaaataagagctgacttctccgcgagtgccactgctaacacaatcgtagtacaaatgccagtgcctgcatacacaatgagagcgagttttgagttggaagctggagcagttggacagacaaccgattttaaggaaggatccaggagacttgagtggaatctaaagaagattgttggtggttctgagcacaccctccgtgcaaagctgacattttctcaggagtcacatgggaatatcacaaaggaagctggcccagtgaacatgaatttcactataccgatgtacaatgcatcaaagttgcaggtcaggtatcttcagatcgcaaagaaatcgaaggcatacaacccttatagatgggtgcgatacgttacacaagccaactcctacgtagctcgtctatgaggaatcagcatctgtactcttgtttccagtccattttttttgggtgtaatatttgagcgttatcatggacatagtggcgtgtattgtgtaactgtatattgaggttcgcataccgctcagctcctgtagtaacaattgtttttcgtcgtgcaatgtgcagatgaataattcatgttctaatgctgcaaaactgattgaggcgagtacctattgtcttgcataattcctgcgaggttttagaaactgtgaactgacctcgcctgtgggacattgggtcctattgtttcgcataatttctgcaaggttctagaaactatgaactgagctttggccagtaaagctctttgtattaaagtaataatgtattttcagttgagttcaggtactcatgtattcccgttttttttccccaaaaggatatttg

SEQ ID NO: 24490 - DNA, 4924 bp, Zea Mays
agatccaaacagacccgaattcatgtttctctttatttatgatgatataggtgtgtgcctgccctagtgctctgtgaccctgtccccgcaccgccagtccgccatcggccaccgcaacagtgcagaaacagagctaaccctgatcctcccctcgcagcctgcctgccaccatcagcggcgctacacctcgccgctgccgccgctggggataaacaaacggaacgaacgcaggttcacctcggatctgcggctcgccggactccgaacgaacgtcacgtcactgaacggacgccacagatttggcctgctccgccccacgggacgcctagccggatttgacagctccacgcgcgcgcgcgcgcgcacccaacccgcgtcttctccggcctgccagtgccgcggccggggctccatccccatccatgcattcgccgaggtcgcgcattcgcgtccgcgacccacacccaaacccgcaccggccctcgggtggcggacgaggaggaggaggaggatgcctccgccgccggtcaccgcctgctccgccctccccgcgttaccggcgacgcccgcagaggcacaccccgccgccgcggcgcggcagcgatcctcaccccgacatctccgccatcgcccgccaccgcatcctgctcgaggccggccgcttcgccgcgcattacctggtcgcccagggcgtcctccccgaccacgtgctcagggacagggaagacccgcccgccagccgcgggaggaatctagacggcggcggcgatcctagatcgagctggaacgatggggactgggcccgcgcctgggaggatgacgacaggcaggcacggaagtcgacgagatgggacaggagaagccagagctttgacgacaggggtaaaaagtaccacgacgccggccgtgatgtagaccggggtgcccgccggactcgagattacgatgagcccaggagacctccgatgtcgagatcctactcgcataacgaccgccgcccttccggctccgctgatggcggcagagtggatccaaggagcaggagcaggagtagaagcagggccaggatccgcagagatttggatcacaccaaggtgacagactctggcattattcctgctgatgctgctgatgatggagactgtgatgtgcactacggtcatgttgatgaaatgccaaggcagcagcggagggtgcctagttcagtggtggttgcagacagtgccgatcaggcaatggctaccgaagacggggaggcggagttcgatatccatggactgaatcgcactcgagacgtttctgaagacgaggacggtgagtttgcagctgctcgcttgaatggtgaagatgatgttcatccgttgaaatctgttaaggaaccggccttgcatagggggtcccagctcagcaatgccgtagaggacagggaagctgccaatgcacccaccatggtcatggatgcttgtacgagggaaacatcaggtgaggacaatgcctactctgaagcaacaaatgaaatggtggctccacatccacatagtgaaggtaaaccagagctgccagcttcgtgcagaccttttgacctcaacgtcgtcgaaactccagatgcctgtgaaatggctggtgatcctcaagcagaccatgtttctgatttagttggctggatacaccagcaaactaactgccatgcttcagaatttcaaggtcaagatgagcgtcacatgctgaagaatgggcacgacttgattaggtatgatctgaacagcgaggctgttgaagacgcacaggatattcacctgctggaggatgagaaattacctgtaggtcttggcattgatgcgcatgatacgactagaatccaatgttggcgcggttcgcatttacgtctgaatcaaaatgctggtgagctggaacatgaaaacgactgtgtgattggtgagcagctgctgctaagtgatggcatggatggacatcttgtccgcgattaccaaatggcgtcagaacccaagatgggtgtctatgatttgcacagctacaatctggaaagcgagaaaatgctcctagatgatggtgcagagaaacacgcacatgataattgccatctacacgacgggcaagtgcttttcaatcagtctgcgaatctacaggctcacaatagggccaatgagcgaacaattcctgtgatcaatctcgaagatgatgattatgaagagcagtctgatatcagggagtttctcgaatccaattatcaatgcctgggacatgcccttctctgagcttgggaagtgggcaagtggccatgttgtttgccaagacggctgcgagattctgcgtcagtcagtgcaatatgtcgtcatcctggagcattggaaacaagatttgcaatgttttaaaggtggatgcatcatgctccatccatacataataattgattgaagaaaggaagtcgttcaggtgctgtactaggagaggatacctgactcaccgacctggcctcagcactcagcagtcagcagcagcttgtaggcgtcttcaaaacttcagcttcaccttcttgtagttgtgttcctttcctttccagtttccatgctggtgcgtacgtgtgcgtgcaagcaatattcagtgtgatgcatggccacaatattcaacttcaccttcttgtagttgtgatttgctgtcgaggtgatgcatggccacaatattcagtgtgtctatgtatgtatctcaggcccggagcagtgagctgcgtctgcgcatgaacgcaaagtaaagctgtgactgtgactgtgactgtcaggaacaggaagtactactacactactggtggcctgtgtgcgctgtcccctgtggagggaaaccaacaaggccaaacacacacgcacgttgggccgagaaaaaagaaatagaaatacgggcccatctcatctatgttctagttaatggaaaatccggcctgtgtcactgatggtagatcaggcccaatgaacacgatcacagccacaccaacgcaccacgctcggctgcgagcttgcgaccccaccgacacacacagcagggaagcgaggggaaggagaggcaaggcggcgcggccagcggcccaggatatctgcgcgtgcgatcccgaggaggcgtcggcgaggtgggatgatatcgcagttcttcgttctgtcgcagcgcggcgaccacatcgtcttccgcgactatcgcggcgaggtgcccaagggaagcgcggagatcttcttccggaaggtcaagttctggaacgacgacgaggcagaggaggcgcccccggtcttcaatgtcgatggggttaactatattcatgtcaaagtcgctggactattttttgtggtaaccacaatggttaatgtctccccatcccttctcttggagcttcttcaaaggattgcacgtgttacaaaagattatctcggcgttcttaatgaagattcattgcggaagaactttattttggtgtatgaattgcttgatgaagtcattgactttggatacccacagacaacctctactgaagttctcaagtcgtacatattcaatgaacccattatggttgatgctggaaggctgccaccgcttggtcctgctgctatgttcatgcaaggcacgaagcgtatgcctggtacagctgttacaaaatctgttgttgctactgagcctggggggaagaagagggaggaaatttttgttgatatcattgagagaattagtgtaacattcagctcgagtggctatatacttacatctgagattgatggaacaattcaaatgaaaagttacctcactggcaatccggaaatccgtcttgctctcaatgaggatttgagcatcggaagaactggatcttcttcatacgattacagaagttcttctggaggaggaacagtcattcttgatgattgcaatttccatgagtcagtacatctggacagttttgatattgacagaactttgactttaataccgcccgatggagaatttcctgtaatgaactaccgtatgacccaagaatttaagccaccattccgtgtaaccgcactaattgaagaagctggaccagcgagggctgaagttctactgaaaataagagctgacttctccgcgagtgccactgctaacacaatcgtagtacaaatgccagtgcctgcatacacaatgagagcgagttttgagttggaagctggagcagttggacagacaaccgattttaaggaaggatccaggagacttgagtggaatctaaagaagattgttggtggttctgagcacaccctccgtgcaaagctgacattttctcaggagtcacatgggaatatcacaaaggaagctggcccagtgaacatgaatttcactataccgatgtacaatgcatcaaagttgcaggtcaggtatcttcagatcgcaaagaaatcgaaggcatacaacccttatagatgggtgcgatacgttacacaagccaactcctacgtagctcgtctatgaggaatcagcatctgtactcttgtttccagtccattttttttgggtgtaatatttgagcgttatcatggacatagtggcgtgtattgtgtaactgtatattgaggttcgcataccgctcagctcctgtagtaacaattgtttttcgtcgtgcaatgtgcagatgaataattcatgttctaatgctgcaaaactgattgaggcgagtacctattgtcttgcataattcctgcgaggttttagaaactgtgaactgacctcgcctgtgggacattgggtcctattgtttcgcataatttctgcaaggttctagaaactatgaactgagctttggccagtaaagctctttgtattaaagtaataatgtattttcagttgagttcaggtactcatgtattcccgttttttttccccaaaaggatatttg

SEQ ID NO: 24491 - DNA, 1664 bp, Zea Mays
cttccttccttctcaccgacgaatcctccatcccgcgcagcatctcctccctccctccctccgctccgtccgcgtcgccaaaccctagtagtacgttgtacaggacaatggggccacagccaccgcttcaccttcccgccgccaacggcgacagcatcgtcgaccgcgacgtttggctcgcctgcgccgtcccgctctcccgcctccccgccgtcggtgccgaggtctactacttcccgcacggccacgccgagcagtgccccgcgcatctcccggcgccgctcccggcgccgcacctcttcccttgcaccgtcgccggcgtcagccttggcgcggacgacgagaccaacgaggtgttcgccaaaatctccctcagcccaggcccccaccgcgggcccgccgccgcttgtcgtaccgaccccaccagcgactgcccgccgcaggagctcagttacttcaccaaggagctcacgcagagcgacgccaacaacggcggcggattctccgtcccgcgctactgcgccgaccacatcttccccacgctcgacttcgacgccaacccgcccgtgcagaagcttttcatgcgcgacaccaggggcaacccgtggcagttccgccacatctaccgcggcacgccacgccgccacctgcttaccaccggctggagcaggttcgtcaacgccaagctgctcgtcgcgggggacatcgtcgtcttcatgcgccgccacaacggcgacctcatcgtcggcctgcgccgcacgcccagatcgactgggatgattcctctccattatcaccaaatctgagcagatttgtgaatgcttggcaagtcgagcttgttacacaccctcctcttccaaatggagcgaggatctgcaacccaattgcgtctctttgccatggagatgtctcttatccactgatcggatcggaaatccaggggccaccaattcctgctagcatgcagggagccaggcacaccggcccttgtgctgcgccctctgaatcttctgcagtgctcacgaatcgggtactgttccccctgctcaacccggacctccagatgccaccgtttacaagccccagtgattcctctgagattctggatcctgaatctgcttctcctcccaacaaatcagtaaggttgcctccagcagagcttccagtccaagtgaagagcatacagctctttggcgccacaatcatggtccatgttgtgcgaagtgttgcctgtggtggttgttgtgaagaactgaatggagctcctagtggtgatgctacggctgatggcagtgtcggaaaagatgtctaaaccatgcacctgtacttgaagatgccttttaagtctgggagtgtgggtttctactaccaaagtacaagtgttggtgcatgcagagtttatctgtagctacatttagtaggctgtggggggagtattaccgttgcaagttgcaacccatggctgtagtttagttaacagaacacttcatattgttggttggttgattcaattctgggagtttggtcgtatcactttcttctgctctgctgttgcaattgcattgcgcgcaactatatgtgggtttaatttggtaatgatatgggtcaatgacccttcccccgctaattaattgtttgttgggtgtggatcagctcatgtggaa

SEQ ID NO: 24492 - DNA, 1300 bp, Zea Mays
caagtcttactattttaggagctcccaaactcgagttatagattttagaagaaagtgcaagaatctgaaatttcagcacacaagttcttgacccggagctcacctacaccttactgccgtagaggagggggagacgccatgggagagcttgccaaggtgagagaggagcttgggagggctcggtcgccagctccattggaggggggttgctgctgcatggggtgctagagagagggagatagagagagagggagggagtagggagagtggcgtggggagagggagggagaggaaatggctggttggggagggggcatgggggatttaaaggagaagaaaaggggctggtttgattgcttagaagtgaagcaaggggttgcttacaagagaagcaaggggttgcttacaagagaagcaaaggttgcttagatgacaagcaaaatatgttgcttataggagaagaaagggggttccttctaggctaagtaaattgttcaaagggagaaaaatctcccgtgggatttgccggtgtggagaatagggagaatcgacgtctggcaaacgagagtccgaggaatgagaagaaaaaaaaatagttagtccaagaatttaatttttcagtgtcgctcggaaaatttgtccacgtgcgattaggaaatcaaaatgactggagactgactagctttcggatctatgattaatagagacaaatcgcgacatttaaaaatcatcaccgatgttgatttttgaaatcggatcggatggagagggattaagccaagtcgaataagaatttatttaaggacaacgcattggagatttcactttgaaattttctcgcgcactattttagaaacaatgtttctctcaaacttttgatcggctttggatttttagtcggagaaggcgaatcgtgatattttaaagtcgttgtcgatacggggttttgagtttggttcgaacataatacatttggccgagtcggataaaattgattagaggacgacaaattgagtattccgtgtgagagtgcggactcagattaaaatagtcagacatagatcaatgttcgaggaattaaactcgggctcagatcaaataacagccgttgagagtttgattaaatgagcttcggatgagatttataaatcaagaatgatttttgagtttgcattagttccgaaaaataaaagttttaacaggctccaaaattggctgtttctcgcgatcgaataactccgaactcagtgaattgtgaatggatagtctggataatcagagacatacgcgagtgagaaat

SEQ ID NO: 24493 - DNA, 1169 bp, Zea Mays
gtttattcaaatcaaacattacagtttttgaaatctgttctgacagaggacagaacacagcaaccagtttggaaaattgataactcttaaactatcagtcctatggttacgaaattttaacacaagcaagatcagaaaagcctctacaactttattataatcgacaaggactgattctaacaataacttaagcaaacaatgcagcttctgaaatctgtacagaatttggacagattcagttactgaatttgtaaaaagcacaacttctaaacgatcagacttatggctgtaaaattttaacacaagtaagataataaagttatctacaactttcttatatggcttttctacagaaaacataatttagttcatcaaacaaacagcacgacgaaaacagtacgtgcagcctaaaacaacaaccaatagaattcagctcctattcacttcaaaaattgccgcgttctagagacttcaaccattttaacactttaccattttttttagagttgaaacaatcaaattaggaacaacaagcagacttactaacttttcatccaagttatttcgtgcgctagaattaccacataattaacaaacacattcaccaaaataaaacacttcggcacacatgtccgacatcacacaaaactatgatgaagtactagtaatatttatctttaggacaccatgacataaccattaaatctctaattagttttaaggtgtaactcaagcattccatgaaacatgcatgattttgttttctcctaatttttttactaactcttgtaattataaaaggggtgttattttagcaccatatgaaactatctaatttggggctagaatttttatgaggcataggtaataacaatttatgactaatgtataaatttcacatgtccaggttttatattttatttaatacaaaaataacaaattgtcaatgcaataaagtatgtgagagcaagttaaatctaaaactaattattttctgtagatgcattaccatattgagttttcttaggctactataataccatgcaaggacagtagaacaccattttctattttttcatctatatattatttttaaatcatttaaaactacttaaggtgcattaaacaagttaaatcactaacttaatcatacatgcacaacaattcat

SEQ ID NO: 24494 - DNA, 598 bp, Zea Mays
ctcacacgaaggtgaggcacagagaaatacaataaaaacataataccacaaatttaataagtatcattagtgattacattatcggagtttcagaaataataaccataaattttaatgcagcggaaataactaacggagaaaaccgagtaacatggcgaagcctggccacactactcctcctggtcctctcctgcggaagcagtaacccactcgaccgtctatcccggtggcagggatggaggccaagtcacaccatcaaccaaacatcctaaagagtacctgcaaaaattgtgccacaagcaaggctgagtatactaatactcagctagacttacccggtgtgaggagtctactcctctacctctagacatgcagctatttggctgaggggtttggtttgccaatagcactagctgagtctaaaatcaagttttagcttttcaagttttagtatgatccttttaactagatgtgtacctagctattcatacatggtatcaaacatttttaccaatcaacatcttttgccagtcacctcatttccactttttactcaatgtagcagcatggatcaagcagtctcattagctgcgagaag

SEQ ID NO: 24495 - DNA, 3801 bp, Zea Mays
aagagaagctaggcgccaagctatagactagaggggcggcaacaaagaaacagcgagagtaaactcgatctgcccacccaaggagggctcagctgtcgaagttgaaggggatgtcgccatgagagctacgtcgggcaccagccatggaaaaaaaaggcttccctgcgctagagagggggagaggagggagaagcgccatggagaggggaggttctcggccatggcagcagcagggaggggcacggggtataaatagaagggagtgagcttcaaccattggtggcgtgggcggcattgctgcagagctcagagcaggacagtctgctggcaggtgatggcaggatgactttggacgtccagttttggcatcttcctcttggaatcggatcttggccactgcacgaaatatcttcctttatgtataatctacaactcgtttatagagattgaggttattcgggcagtggttagaaagttatagacccacgaaaactggtttgtcagtgtgtcagaaaacagtggaaactcgcaaaaactgaatgtcaaagcatgtcaaacggaatcggatgaatgccaccttttaatatgttgtgcccctattagttattaacaacttttatatttgggaaaacttgagttgttcaacaaaaatttgggaacgcgagacgtcgacccgaacgatgctgatttcagacttagaagaattcgaattctgaaatctgatttttattctgtcttgatggcactgtttgagatacttagagattgaatcaaggtttggtttaaataaaatatttgttgtataacacatgttctacaaattttattaaaggtcaaacctcatatcttgaatataaataaaagtttcactttggtcaaggtagcatcattataatgcttcaaactatatttttaaggcaatcagggtattttctcggcatttccttggcattttctctacatgaacccttaataacttttgttgtagagttgatttagagtgttttgggaaagttgccataacttgtttgaatttctaaatttgcttttacttaatcgagcagtctcaggtaagcgtaggatttataatttcacacgaatatttggttcaaactttaagaaatctttagaatacgcttgatagatagagatggatgatgacataaatataacaagctgaattgcataataaataattagaggttgacactatagagatttcgctgaagaatgcggattcgaattaagtatttggacgtagaccgactatcgagaaagtggattcggacatagatcggataatatcacaactgttaagagtccaaataaatgagtctggacaagagttatgagacaatattgactttcgaatttgcatttgctccgagaaataaaagttttaacaggctccaaatttggttgttcttgagatcgaataattccaaatttggtgaaacattcatgagtaacttgatgaatgaagatagatgtgataaagagatagaaattttcactgagcatccgagattaggataaatctcccgacataacgcgaaatagacacctggggtgtcacaggcagatgaaccaaaagtcgagacatccctcgatcgaccacttgccccacgcaaagtcccggggctgtcctcgcaccccgcgctaaaggttccaacatatcaactaaagatcaaactggacctattaagaacaaaagcccacgaaggagtcaactactccttcggggcctcgagggctacacccgatgggtgcgctcgcgcgcacccatcggaaatcaaaacgtcctactcctgaaataaaatgtggcacgcccgtgggtaagcaacacagcctccaaagcaaataccaaaactacttccttgaaaggcttgggggctactatcaggggtgataattaggaatacccgaattattcctctaaagaacgcactgagagaagtaaggttgaaacactcgaggggaaacaattgaggtacctcttaaaccgaggcttctccctgagagtctcccacctcgagcggaactctgcctcgcccgaggtcaccatcgctccatctgtctcgcccgagctgatccccgtcaaataaaacaaaagtgccagaagacagaaagggaacactcacatttaatgcgcatacctaccccacgccgcggcagcagaagcacagtggctaacaagacatcaatcacatccaggcgcaacaacatgattacgtctccgctatagtacgcgcatgccgcctaacatcccccgatatgacatataatacgacaggcagagcagaccgaccatcaggcgatttctccgcctcgcccgacgctgagttcggcctcggatgaaatcttcgcgttgcccgagcttggccccggccagctgctccgctgcgaatcccgcgggcgagcactccgccgacaatggcacatgtcaagggatggcttgtccaacacctcgagaagacttccgcctcgcccgagcaggtctctgacctcgataaacgtagcagggaatcacgacgtcatcccacgcaaggacgctgacgcaccccgtaagcaggcctttagcccataccccgagtatggacaacccctcccctaggggctcgggcgtacggacaacccctcgacctctgcctcggctctcagcaggaaaccagcgggcataagtcaataatgtagtgcacggtcacattggcttgcagggcaccaagacatctctcctttgaatacaatgacaccaagcttcactacggacatccccttcgtgtataaatagggcagtagagttcttccagggggacagagaagcaggacacatagacgaacacttagttctccacctagtcttcgatattggcacttgcatcaaacagttctagggacttggggacttcccctcttccaccgttcttgtaatccctactgcaggaaccttggtgcgagtaatataagcatcaccccctctactggaagtagggctttgcattgcctgaaccaggataaatcgcttgtgtcaactcgcacaccatctagactttatccacgcgacattatttactagttgtttaggacccttagtccaaacaccgacatatcctgactaactaagactaagactactaacttaatcatttgaaacaaattccaatgctagcgatctatggttccaagtttatctgggtcctgcagtcagggttgttgtaggcatggtgtgcacgtgaggcgagcgatatgggtgccgagtcccgacgggggcgggagagccaacttcctgatgatggcgctccacgtggtcagcccgcagctcggcaatctcagcacaagccctactcagctcgttcagggcgtggtccagcatcgggttgagcacgacagctaggttgattgtgctgctcaacctaggattgccctcaccaataggtgagacaaccacacctctagtactaccagttggacagaggggaggtaatacctcaggttgagaccgtcggccaccccactgaacatcgagtgtgtcggggaccataattaggggtaccctcaagacgcctaattctcagctggtaacccccatcagcataaagctgcaaaggcctgatgggtgcgattaagtcagggatcagtccgtacgagcgactcgatcgtgcctcgcccgagcctagcctcgaacaagggcagccggccccggaggatttccgtctcgcccgaggcccccctccaacggcggacacatctccggctcgcccgaggccctgccttcgctaagaagcaaccctgacaaaatcg

SEQ ID NO: 24496 - DNA, 5207 bp, Zea Mays
cctcggtcgtggcggtgtcgggctcaactggcgccccaggagtaggcacagccacctcagcgccctcctgaggtgtctcttgggcatacggggggcggggcggggcgaggcccccgcatatgtcctagcactgcgcttcactgccttagtggcagtaaagatcgacgtgttggcttgacatttggagctaaggacaaaacgatagccagagaaaggtcttacacgcaagacgttctcttatttcgacaactcgcccggagacgggcatggcggaaggcctcagcctccagctccccagcccttgctgcctctctacagacgtaggcaacagggtggtggccctctcttctacaagctccagtgcagggatcgggggcgaaacgattgtcgggaccacttccggaatgactgcatgaggggggtgatgagcccctcctccgtgttccccgcagcggtaggctgcggaggggttccggcctgcgcacccgtaggcgcccccacgacttcttcagggagaggggcaacttccccctccatggcccctgcctcttccatggaggcaaggacgagggcaggctcggctgaggcccgcgccctagacagggacactgtcggccactacacggatgggaccgtgccaccagaggggcgcaccgaggccagcggacccaggcccagccttggggcagaagcccatgcggacctccatccactcatcatcgttgtcgtcctcctcctccttagtgctgggagaggcctcgagaggaagcccctccctctcctgcactctgcggtgcttttccagcaaatcgcgggtcaacatcttcttgcagacgtgcttcttctcctcgtccttcttcttcttctttgcctcggccgccagccgacgcacctccttggtagccgcttcctctggtgccgaggatcgggcggtccggaagccacgcaacccctatagagcagatgagaaggtaatacgagaagaggaaaaaaacccgaaaaacatagacaaaaataggggactcaccagggacacgtaaccctgctcggggcgcatcgacaccacgacggagtaatctgccttccctatcgttcccttcacccaccggagaagttcgtcagtggggaggatggctgaggcaatatggaagctttccacggaggcctcaggcatcatctcgtctaggcggagccgacggccggccagcggcagaacccgccaccgatggaaggccgcgacaactccagccgcggtgagaccatggtcccaaagcttccgtagggcctccagcagcgacttcaggtgggtctggatctcccgaggcaggccccacctccatcgctctttcgctccaaggacgacatggtgcgtgaacgctggtagctgcccatcatcgttgcggaggtagaaccaccgactctaccatcccttattcgacgaggtgagggtggcagggatgtacaattgtgcctggcccgagcatagttgaagcttgcagccgccagcccgaatggcgtggcgcaccctcctcacctcgctgggtagagagaagggaaccacacggaagaggcggagccacaggtcccaatggggctcaatcctagatacccctcacagacggtggtgaagatggccgcctaagcgatggagttggggttgaagttttacagctccaccccatagtagtgcagtagagcccgcatgaagcggctcgccacaattccaaacccccgttcatggaacgaggtgaagctcactatgtagcccgcgggcgggtccggcatctgctcatcgctcggcgcaaaccactcaggctacaagccaaaggagcgggggcggagcagacggacctcaactagcgcctccaaatcctcgttggtgacggaggatatgagccacgagtcgtgaggaggaagaacacagatcttctcagccatcggaacagaggaagaaggcgggggaagacgaaaggctcttttacaggaggtgaaaatgacatatgaaagtaggaaggctaaagcggcaaaggtaacagtccgaaacctccgtctcagtcgactttatatgggaatgggcgaagccaccgaggcgcgagttgtaacggctggatagcgatcgttttgaatcccgcgcgcacgcgcgcttcaaacggtcggctgaccgacaggacatctcgtcgcattaaatggtcgtgtccctcctaaaaaacacgctaaactgctgtttcgtatcccacattaaaaggtacgccctctaccctctgtcgcttcgtcctttatcctctcatcagttaacggaggaaggcgtcatctgcctcaggcaactcacctcggaaaggaagcaacaaaccagaagaaggtgtcttctgcctcaggaaactcaccttggaaggaaaagggcaagaaagaatattgtttagagggtcgaaggttcgacccttggcagggttcgaaaaaactgccttagtacgccaaggctctggccctagtttgggttgcgacccgaggtaccttaagacatatacgagaccctcgggagcgattcgtaatggtatcgcatcatagggaggcatcgagccctcagaccccatcaaacgggtttaggaccaggcaaatcacccgcaggtatcttttggggtgtgtctttagaccactagccgactctaatcgaaaggagcttggaccccgctgggattacctgataacagctcaatggaaatgtcctgctcgtcacccatcgagggtagcatgacgcatccccccttcctcctcgcggagaggcgacaaaggggcagtgtggcggaaccgcccgaattattccagcgtgagtgcccaaatctcgtcttaggggcaacgacgcacttaaattggaataacccgtcagtccctcggatctagtccgataaagccacttatccaggatcgaataccactagctcactcgaaggtgaggcacagagaaatacaataaagcataataccacaaatttaagaagtattaatagtgattacattatcggagtttcaaaagcagtaacaatagtttttagtgcagcggaaataactaacggagaaaaccgagtatcatggcgaagcctggccacgctactcctcctggtcctctcctgcggaaacagtaacccactcaaccgtctatcccggtggcagggatgaaggctaagtcacaccatcaaccaaatcaaggaggtacctgcaaaaattatgccacaagcaaggctgagtatactaatactcagctagacttacccggtgtgaggagtctactcctctacctctagacatgcagctgtttggctgaggggtttggtttgccaaaagcactagctgagtctaacatcaagttttagcttttcaagttctagaataataacttagactagatgagaacctatctattcatacatgatatcaaacattatatcaatcaacatcttttgccagtatctcatttccacttattactcaatgcagtacaatggatcaagcagtctcattagctgcgagaagcagacgattcgaatcgagttttatccttgcaaggtaaacctaaacacacgacatgtcagggcactccgtccccacacatgtcaaccgtccccatcgattccccgttcgcgtccaggcctcaccgccttggcatacaatgctccactgaccctggctgccaccgtgcagtggccgcacttgtacccaccatatctagaatgggagacccagtctcaggtcgcatgagggataaagtccgcgcccggcttcactcaggtactaggtttatcggttaccatttttcccgacatgtgcttagtacgttcaaaagcttgacacaggtatccgcacgttaatccttattccaatttcgtctcattgaccatgcatccccatggatccgtgtcaacagaccatcatcattctgttatcaaaatggatacaaccaattcctgacctcgcgcgagtgctagaaaaatcactcgacttctaccgagatcctgatttagcatagcaactactcgacctagcatactagtatccatctcaaaaggaatcctgagttcatgcaactagggtttcaagcaactcctacacttaagtgcacggtacaagcctacaaacattaagtgtagtaaaatagcatatataaacggttatgcatataaccggggcttgcctttaatttaacacttaggtagtgtttgttgggggaggtgctcgcttggcgagcatccactggttaagtccatcctttcttgggtcgtccaccgactgcatcttgtggttggcaccacatcacttgcacgatcatcctgtctcggtcctaaatgagatgcaagatgcatatgtatgaatatgatgaaatatatcacaagataatcccaaaatggatggtagcgaactaaacattaaattgtaagacactgcgacaattgtacgcaagcactagttatctatacgtcatcgggcatacgtagtcaatcatcactggaaaaccacaaacacttcctataattatctattgcaaacacgacatcataagtacaagcattcgccacgttcacttttatcattcattggttacttattattaaactagttaagtacgcataaattttacgatgacttacacatagacagacttagttaaaaaggaatagttgcttaatcgggttttacaatcattcacaaccttctactgcaagcatacaccccagagaacacacatgaggagatagtttattcacaattacaaattgtactactttaatgacattggttacttagtagtattaatagaaaggcaaagacaagacattatcattttgtttcttcgaacatataactgcattgctaagtgttgattaagctaagctacgtattagaccttaaccaatttagttcactaacttagtgagatgtgtactatttacttatatataacctgattatattagttactatcattgttactcatattcacttaaaaccaaaacaagcaagcaatcactcaagtcaaacacaatagagtagagcaatcaatcacttctaacacatttaggacagcagcacagtagtttttgttttaatcataactcttcaaatattagttcaaaattatcaaactaggattttctggaaagcttaaaaagtgttctacaactttgatatttttacctcagcatgattagactctt

SEQ ID NO: 24497 - DNA, 9967 bp, Zea Mays
aaatgtgctacttccttctttgggaaaaaccatcaaagtattgcctttctctggaaaagaagagtgacttcaactcccccatataaagcatgtattatataggtccctttctatttacgggcgggatgggcttgcggaatacctagtgtattcacccagatttatttatgttttttagcagctgaagacttcttttctgctatgctcgactagagggggctgtgtctgcacccagttctgcctgtggcttgggctagtttatcttctactgcgctttgtatttcaggctctctagagcttgtactctggtattgtaacaacttttattcaaactctatactatttgaagtaaggaatgtggttactagcctcctgggactagtaattgtatcacatttgagtcccagaggattggggcgtttcaatcatctagactctggtcatgcggcattatttactagttggttaggacccttagtccaaacaccgatagttggcacgccaggtaggggcttgtcacgtaaaacacttccagttcccaccaagactctagatggtaggctttcatcatccactcaggcttaggatagtgaccaggttcgagagcctggagttcatatcactcggcattgagtatgacatgatactccggtcgtctgtccctctcgaacgccccagctcctgtcttcgcccttctcatcgcaggaggtagagatggggcaaccgtgatcgtgccactcatggcactccatgccctagcggagcccctgggatggcagatgacatagactccctctcgagggacctagccaacaccagcattgcacctagaacaccactagtgacaacttttttggcaccacctcctcttgtgtgggaaacaccagttccccacgccttttagcgagcagcaccagcagcaccggtcgtcccacccgcgggtcgggaggatccagtcgctccttggagagacgtggtgagggtcaggagaattgtccgtgttcaaccccatccccttccagccaagtttcgacactagctccgtcaccagaatgtatgttgggcttccttttcccttgaggtgcttggactccgaggaggaagatggtccaagctttggcttagacttctttgggctatgagaccctaagtccatgctacgacactcagagatccccaaggaaggagatcacctcggcatgccatgggaaggtgactggcctccaccacgcgttcaggaagcggtggaactaggcgggtcccagactcctcctgggagccacgtggctcacctcgagcaactctgagagctacacaacaagctcagaaggaacaacaacggctgcagcatctacgacaagctctggagagggaggccgctggcaaagccctcgacggaggcacgcaagcaaaggcacatggcgtccaatgtcgcatcgaggaagatgtcgccgccgccacgcccccgcctcgtcctaaacccagttcacagggaaaaagttctcagcttctgtagcaaccatcacatccgtgtggattggtcggtggtggctcatccaaggtccaacgggcaagtggaacgtgccaacggcacgatgaaagtgcattcatcccttttgtgagttttgttgatttggataacaacacatttaaaggtctaacaagtttgctaagtgttgaataggaaagccagtatgatgaacatacttgaatagtgtataatgatcaatgaacaaagattcaacacaaggttaaataaccagtgagacaatgcaaatggatataatataatctctttattggtttgaatatatggacaagacgtgtgaaatcactacatacatatgatcagaatagaggattgagtgattaagaggattggtcaagccaaagtgaataagatacgaggaatcgtgaattggcttgaccatattactatcagtccatatatgcttctatgagaatcaaactagagcttcatttatcttaacagttatatctagaatacatacaagcaaggttcacaatattgaagaaatgattctcttagtggatgctcaatatgatgtgactcaagaatggtttgatagggtgaagatagtaaggaaagggcttcgaggaactaagcgaaggtgaaggccaagggacggcttgtggaccgaggaactgatcaagataggttgcttgaagagcaatttgaaagaaaataatataacaaaaggagaaaaggctcctattattaactctagattttatctgtgtgattaaatattgacttgaaaccatgtaagatggttgtgaagtatatgtgggtgcctacataaagagaaagaccacaataaggattgtgtgggtactcaaggctcttactactaatctcaaaggacccaattcaaattgggtaccaagatatgaagcttaaacttgttttgcaggatcactccttcaatggatcaagttgggtgctcgataatgaatgtataaatcatagttggagatagtagcaagggtggtaacaactgaagctcaagtgcatattattttcaaatcttatctcttttgtgacttgtgtagccactgaggaaaaaaaagcacttgaggatatacatcaattgttgattattaaataaaagtccaattggaagatgaatgaatattatcatatggtcaacaatccaaaactatgtgacgtattctctatctagttaatttggatttgattcttctatattagacactcaccataacatggattaagtcatccctttagacttcattgaacaaccatgcatattatccatggcattcaaaatatattgtgcatgagggctctgacccctctggtcagactggtagacaggctaccaggggtggttcaaccgccccccagagaggttcaaccggttttggtcaacttgaccagactgcacaacagtctgccagtcagaccaggggcggttcaaccgccccctagggtggttcgactggtccttccaagaaaattcagcccaacgactagttttgaagccccacctatatatactcagtcctacctctctcccccaaaaaagagcatgatttgaactccatttctaacttgagaaacacctcccactctctcacacacatctcttgcctctcccatttcaaatctttggagagaaatctttgagtgagtttgagagatgcagtttttgtgcttcgtctctaaatccctcttgctcttcttccttcgagctttggtactacatcgagttctttgtggattcattactcttggagctcctagctcctagatgactaggtgtcgcttgtgagtatccaaatcttgtggaagaccacaagaaagtttgtattatccgctcgtttgagcaaaagttagtgtgtgggcttgacctttgtggtcggtgaagggaggattagggttgaaagagacccgactctttgtgtgcgcctcagcgaggaagtagggcaccttttgtggtgtgaccgaacctcaggataaatattgtgtctcttgtgttcttgttaattgtgtttgttcgtgttcttcgttctctcaccattctgtgaaataattgttcatatctttttggtgtgtggatcttgagaagtgcccttctcagatctactaatttgaaccctgtgggtcatctaggacatctcatttccaaatataactgggtgaattttgagatcaattcagttttatatctcatcatttagttgagctcgtgcaaaccagttgaaccggttttgacaccggttgaactgattttacccagtttgtttctagtttttgttgaaaaagttttaacttgcctattcacccccctctaggcaactttcacatgatcctgcagagcctaaagccgaggatcttcaatgatctaaacaagtttggcagcggtggctcgccgagctcccctcagtgatctagagttttaggacaactccgagccacgagattcacactgttcttcctggtctatggggccgaggctgtcttacccaccgacctagagtatagtccctcgatgaagggaacgggtgacgcctaagagggggtgaattaggacttctaaaactttcactaaacaaggccacaattaaatccctagagcaaaacctatgcaaataatcaattcataatgtgcaaactaggttttgtctaagtgttgctatctctaccacaaaagttaagtttcaacatatacaatctaactagaaagacaaggttgaaacttaatgcttaatgtaaatgctgaagctaaagagaaggtagagatgcaaactctcgtggatgacgccggtatttttaccgaggtatccggaaccgcgcaaggtcccgactaatcttcgttggtgcctctacacaaagggaagcccacgcgagggccaagcacctcggtcgagtaactccgtagagagccacgggccttctccatgtgcaagtggtgctccgcttccggctcctcttggacgctccccgtcgtctccactattgagcttctggctgaaaacatcgtgagcctcgttccctctggtatacggtggtggctatgacacaaacgtggttgtctcagtctcacaagactttcgccccactcggtacaattacaacggatcgtgcaagagctgaggggttgtgtggtttatctaaactcactcaactaattaggattcacctagagcaagcgctagagcggtcaaactaacctaagcacttcgcaaagcacctacgctaatcaccgagcgattctattaagcacttgggtgtatgagctcttggaaatgtgaactatgtgccttggtatgcctcttgggctcccacacctcgaaatgggcggttgggtgaagtatatatgggctcaactcaaatatagtcgttggaaagcagttctgcagctttctgcggcacaccagataggtgcaccgaacatgccacgtgtactagccgttaaaggtagtcgttggagcttccgaagatggcgcactggacagcccatgctcgcttgtcgtattttggccataacttttagctccgaactccgatttcgatgatcttgtactttttggaaagcttatgaaattctctacatcccatagttaaagacataccagtttgagcaaatttggcccaccggacatctcatatgctgctgcagtttttttcagcaattccgactttgtattgtgggcataacatttagctccgaactccaattttgatgatcttggactttttggaaagcttataaaattatctacatctaagagttgaaccatgtcagtttgagtagatttaattttgtgaaacacttccaattcagtcagcccttcctctcaactttgtcaacttcacttttgttttgtagctttgtatctcacttctacttcttgatgtgttggactcttagcatgtataaattgtcttcaatatgactttgtaatgtcttctatggttcttataatgtcttctttaaggtgttgcatcctcagactctcagtccaatccacttcacatcttgtgaactacaacacacaaacacttgggaaatacattagtccacatgttatgttgatcatcaaacaccaaaacctattgagctaaatggctcggggtatattttccttacaatctccccctttttggcgattgatgacaacacaaccaaagcaagcaaatataacaaacatttgaatgaaaatatgcaacctacttgctaggatggatgattgtccccatagagtgagattatggacttaagcctcccctaactccataattcacttacttcctgttttataccaaagaaccaaaaccacttgaagaattaaagttttaaattggtggtgtttggtgtttgataacattttattgctttggtccctacaatttctccccctttggcatcaaccaccaaaaaggaagacattaaaaagcatgtaggaagcaaataagacttgccctcataaaggatttgacaattaataccaattgaagcacaatattgttactccccctaaatgagtgttctcctttagaaagaattttctccccctttagaaacgaagaaatactccccctgacagtgatcttctacttaggaaaaagcatgtgagaaatggaggtgcaagacatgatttgaatagactaacttaccttatgcataggtaacaaaacatgagtcaacaatatatgcatttatagcaacatgggaagtatgagatatgaaatatagtctaatcaaatattggagaagacatgtaaatgatactaaatgtagtctcaaatataccaattgaaagtcaatggcagaccaattgaagaccaatggcaggcttgtgagacataagaattcttgtagatttgcagtggaagcttgttgtctatctccggggactccattttcctttcaatgagactactacaaataatagacttgaaagcggtattagtatcaaggacttagattatagagtaacatcctcccgaaagtgtgcatacaagttttgaatacttgtaggagatatgcactttgatatgatatcaagaggggcaaattatctataatccaagctttggcgcatataagttaaatgataccaattgaagcataattgaagcattataccacttatagtatttcaaaatatcaattgatgtatcatttactttgtaatgttaaataagctatgtaccgtgcttttcattttaaaccatgtaggtttgcttaagagtatgaattgaaagtgagcaatcctaccatatgatttgcttagtatgcatgcatttctaatcaaaagtaaataccaattgtaatactaggtatgaaaggtacaactagatataagagaatagatacgcatatctaaaaacaggaaatactataaatcaagttaccttagtcatgggtggggaatttgggtccaaactatacactaacccacttggcaatacttgattcactatgatgcatcccatgatatacatcccaaatttgccaagtctccaaattcctcgacatccttcggactcctcacttccctttcaggatccaaaccttcttggtgcttttcatggttgaaattatttcctttggcacccagatgcgtttggccttttttactttgttggctcgcttattggccttgatttctatcacctttctattctttttcttcttgatcaaatatggtgtagcagcctttttgtccaccttgttgatgtaggtgttggggattttgcttgttggcttttgcttgagcttttgcttttgttcacccccggtctgcgccttgcattagaaagacttgtggccttccttgtggcatagcctacaaatcacgatttttccctccacatgcttgttcactcccacagtggtgttatcctgtgaaggtcggatttgtttggctttgccttttatgttgtacaaagccttcccaaggagagccacctcttgctttaattgctaattctccattgcaacctcatttgaacatgtttctacagcaatattctcaaagaacttggttgcagggattagaatcatcaattaaatcaaaacaagaagtagaagcatctttcttaataatttcaagaatttcaactaaagatgctcctagggtgctaccaatgttttctatcttagtagttagctcattattgtgtatgctaagaatttccattttccctagcaaatttcaatagcttcttgagagctagataacttagccttaagttttcattctttttaataaggccatcattggtagctgtggatgaagcactagactctaattgctcaattttagttgatagctcacaattcaaattttcaaatgtttcaaaattttctagcaaacctttataatcattttgagagctaatcaacttatttttcaaagttttaagttgagccttttacttagtgcaaacatcctggaaaaatttaacgacttacacaagctcatctatggagggatttctctcaccttcattatcactactgctatcatcactagaggatggaatactcattttacctcttgccataaggcatttgtgtgatgaccgtgatgaacgtgatgaagaccggtggctgtgcgtccttggggcttcttcttcgctagaagagtcatcccaagtcttcacacttgtgagcaccttgcctttgctcttcctctcaactttgccaacttcacttttgttttgtgaaacacttccaattcagtcagcccttcctctcaactttgtcaacttcacttttgttttgtagctttgtatctcacttctacttcttgatgtgttggactcttagcacgtataaagtgtcttaaatatgacttttttaatgtcttctatgggtcttataatgtcttctttaaggtgttgcatcctcagagcctcagtccaatccacttcgcatcctgtgaactacaacacacaagcacttggaaatacattagtccacaggttatgttgatcatcaaacaccaaaacctattgagctaaatggcccagggtccattttccttacacccgaggctacaggcatatagcaaacgcaacaaccaagtcagccatgaagattcgcttgaccagctggaggaagctcgggacgtagcactcgttcattcggtaaaataccaacagtcccttcagcgctaccatgagaggcatgtccgaccccaaggattccaagaaggcgacctggtgcttcagttacagcaatacaaccgagggcgccacaagctcactcctccttgggaaggatccttcagcatcgccaaggtgctgaagccagaaacatacaagctctgtaacgaggaaggagaagtctatgataatgcgtggaatatagaacaactacgtcgtttttatccctaggcatacaaacgtatttgtactatgttctctatgtttaataaagaatagctctcaagagaggctcggccttactttcaaaaccgagcctccctcgggggctagcaaggggaacccctcctctgtgttgtcttttttctcacaattttgaaaaacgaacacgattcatagcctcaccctagtcgtaacgcgaaaacccttaggaacggaggacgtcccgactaaggaaaaatagccaagccacaggaacacctacgcctcagggatacagtttcctcactcactattccctccctaaagggtaacttacgtccgacggggacaccgtagtaggactaaagcaacatgcaccaaacagcgaaaaacccacacaacaaacaacgaaaacttgatatccagagtcaactaagttcttagcatatatttcagaaattccccgtagggcgatgactaggttcatgcggtcgaaggaggtctggcagggggcacgatagtgattggtgagggggaggaggatcctcctcgacctcgaagtggcgggccaacaatgtccccgacccctcgacagtgtcgtttagcctccgcatctcggcgacgacaagctcgggctcgtcggggagaacatagccctcgcacaccagctcgatatagatctcatagtgggaggcgaccacggcgagggcccgcttcaccccgaggtggacgcgcgtcgcggagctcaccttgtacgtagccactcagggcttgcatggggggtcgcggggtccaatctgagggacgtccaccacatcaagatcccgaaagaggtccgccaccgtgtcggacaactctctcagctccttccccttctgctccacggtccaggatagggtccgatatgtctaggctatagcctccagatccttctcgagggctaaaaagttgatgaggacatcaaaccggggctaaggtaagaaatcgaacaaaaaacaaaacaaggccttgacaagatacctcctatccgggcgttcaaggccaggcccttggaccgttcatcctccagggacttggagagggagtcgacgtggagggaag

SEQ ID NO: 24498 - DNA, 1792 bp, Zea Mays
cttcaagagatggaagatgcatctacagatcgaccataagaggagttaggaagatacatctttatatacatgcatattgtttatatgaaaccattatataggcaaaacaaccactatattggcaagtcgacgactagtcgactgacttatcgactagtcaccaagtcgataccttgtcgactcgacttgaaaaccttgagcacaactcacaaacttttcccaccacctttacttacgtcatctaactcctcaacactccattacgttccacgttccctagcaagtacgagctgcgctgccccaccccccccccccccccacacccaactcctcctctagagaacacatgaaaataattccggtcataatatgatgtaagcatatgaatattgaactgtacacggcaatgcttcatgttcttcagcaggccagcagcacaaaacctacatgatccaaccctcctcgtcgccactgctaaaggatcccatcatataagcctcatcgtcgtcccaaccgtcaccaaaaagatccatcatgaactcccgtcgtctctcatcaatgaaccggtcatcttcaatgccatccgaactgggtatatcatcgtcaccaccatcttcatcaccgtcatcgctgctgctgctactgatatcttcagaatctgtacccccttccagcaccggcgcaagaacaccgtcatcggagtcgtcgtcgtcgtcatcggagtcatcatcagtttcacctgcgtcctctggatcggaatcatcatcagttattcgcttcctgccaacttcgaacaagcgagcagaagagaaaagctcctggtgatcgtccatagcaaccaccccaataagagaatcattggactcagtggcaagatcaagtacacagcggtccatttggacggttgcaatatccgagtaagtcaccgcatcaatcgtgctgaatgcagggaaaagaggatgcctgaccctacgagcattgatgcatgatgtcacgtcatcaagattacgcctcagggtggcatagataacatcaccagttccgttaaactttattactgtctggtccagggaagggacactcctcaaaagcttgaacttcctcagatcccacacctccgaattcaggatcacctgtgcaatatttaatgacatgcaaagccagtggatacaaacacaatagaaacaaattcctctttcttaaaataatggcatgcacgacaaataattctggtagcaaagccagtggataaattattctttcaggacattgttcatcatgatcaatatccatgtactatgataaatctccacctcacttataaaattaggtggcaaatgcactattattttaaatagccaacagattttttaaggctcttgttttgctactccatgcactcctcgttctactaaaaaaatgttattgtgcattgtttactgagatactttatttggacatgaaagataagattattttgaatcccagaaaatcttttactgaataaaaagtgggacaaggttgagatataatgacattagatggatatgctactaaactagatgacaagtcctaaaaaatgatgtacaagatacatcgaacaatcctactaacgcagtcatgagagaaaagtgataagttaagttattagaatgccataaacacacaataacatgctatgagatgcatagtaagacattacggttcaaaacataaacaagtaaacaagattaattagcatggttcaagggaaaagaacacctcatttcctgctggatggaatccaccacca

SEQ ID NO: 24499 - DNA, 314 bp, Zea Mays
agaaagatggacagtaaaaaggttaacatgcgagatgcgacgcaacggcttaacatccggacccataaaataatattcagcgacaaggcgagaagctttgcgctggcactgcatgcagctgctagtcttgtacgtaatttaatttgtttacggttcttgtagtgcctactctaaccaacagtaatgcgtatagatggattctatgcctgaaactgaaaagcaagcagattgacgagatctgtgaaccttggcgatcctgatggagtaggcggcggcaggcgggaagctgctggagcgcatctgccaggccgggc

SEQ ID NO: 24500 - DNA, 197 bp, Zea Mays
agactgaaactttcctgcaacatatatactttttgacgacggtactagggaccgaatctctttgccctagctatattcttcattaatctatcttctcgcgctcgtcactactattgtattgcattgcatacgtcctaaaagaacggtcttgtctggttttgacctcttgtgatcttgcttgctattttacaatgaac

SEQ ID NO: 24501 - DNA, 1469 bp, Zea Mays
agctgagcgcgcagcaggtcgtctaaaaaagcagcagctgctcttctcttctgctagcagctttatttgcctgcctccctaccggcgagggaggtacgtgcgccgatcgagaagcagcagcagcaattaataactaaacatggatcaggcggcggaggagtcttgtgttcccccaggcttcaggttccaccctacggaggaagaactggtgggctactaccttgccaggaaggtggcctcccagaggatcgacctcgacatcatccaggaggtggatctctacaggatagagccatgggatctgcaagagcggtgcaagccgcagcacgccggcggtgggcacgacgagcagacacaggagtggtacttcttcagctacaaggaccgcaagtaccccagcgggacgaggacgaaccgcgccacggcggccggcttctggaaggccaccggcagggacaaaccggtgctgtcgtcgtccaccaggaccaccaggtgtagcagggtcatcggcatgaggaagacgctggtgttctacaagggcagggcacccaacggcaggaagagcgactggatcatgcacgagtaccgactccaatccaacgagcacgcaccggcgcaggaggaaggctgggtggtgtgccgcgctttccagaagcctatccccaaccagcggcccttcttccccaccagctacgccggctactacgaccacaacctctcaacgacggcacggctgcacgtagacggcgaccgccatttcctggcgggctcatcagcagcagcagcagcactgctacagcagccaccagggcttgcaggcagcagcttcccgcagctgtactccgacgacgacttggagtccaagaagcagctgttgagtatcccgccgctggagagccccactgccatggcctgctgttccgacgccggcggctacgcgcagagaagcagctacgatgaacatgagatgatgatgatgatgatccagcagggaggaggaggaggagagcaagctgcagccgccatcgactggaactttctggacagcctgctgtccgcgacgtcgcaactccatgggccctcgggatccttgttgcagtgacctccggccatcgtcgatcgatccatctttctttgatccagcggagaacattattcattcatcggcattatacaatatatttattagttgcatacacacacagagtatacgtatatgctaataattcagatgtgttcatacacacttccattgtcatgtgtagttcgttgcgacttacattacagactgccttagatgattcaggtatactgtatacaacatgatgcacagtatagtaggagtaagtgcaccagtctcagcagctggtagctagctagctatgtaaaattcctccttaattacagctatgtaacatatatatacagttattattacttactgatatgatctatctatctatctgctg

SEQ ID NO: 24502 - DNA, 5176 bp, Zea Mays
gtcagattcatcgtcagttcaggcttcagctcgtcaggcgagagagagagagagagatgcccagctgcttgctgtcgtgtgatttggagctcgattaatattaccatgattctgctgcacacaagctgcattatagggacgacgatgccaagcaggatgaggttcgcatgatggccaccgctgaatcggacgacgacgccatctgggtaccgcctgatgaggcagcagcagcagcagacagcatgatgcaagatgatgatgatgatgatgatgattaccatgccggaaccggagaggaggatgacgaatccgaggacgacgatgatgctaccagcagtatctgcaggtggcgccatgactctgatcatcagtccgccgcccacagggaggagcggcagaaagccatgctgagagccatgaacgggcagctcagaatgctcgccgctcgctttctagagtcggctggcattgataccagcagctggcttgatatcgtcatctccctgtcctgggaagctgcccttgccatcaagcctgatgttggcactgctgtaggcaaccaaatggacccttcctcatacatcaaggttaagtgcctagcatctgggacaccccgccaatgtgaggtcgtcaagggcctagtcttcaggaagaacgtcgctcataagcacatgcccaccaagtgtcacaatcccaggctgctgcttcttagtggactcctcggccattcccatgttggcttctcatcgttcagttccatagagcaggagaaagaccatctggacaagtctgtctgcgaaatgatggagatctgccgcccagatgtcgtcttggtcgagagaacggtttcacgcgacatacaggagcttcttctcaaggaaggtgtcactctagtgcttgacatgaagctcaaccggctgcagagggttgctcgctgctccggcgcccccatagtctcgttttcagaggttctcagcaagccaaagctgaagcagtgcgactacttccacattgaaaaggtgacggaggagcacagcctgattacctgcagcgctggagttggaagcaggccatctaaaacattaatgttcctggaaggctttcacaagccactgggatgcacgatattgctaaggggagcaaatactcaagaactgaagaaaatcaagcaggtcatgaactacacagtgtttgcagcgtaccgcctcgttcttgagacatccttcttcgaagatcagagactaatcttgaacaataaggattcttccaaagaagaagtttctgtcgctaggaaggccggaccatcgtcactaggatcagtacaggaaactactgattccaatgctctaaatccactcgacaagggcttccctaatcaagcactactcccttctgaaggactagtagtatcagcagtcccagaatcacccagaagattcattgatatactccgttatcataatatttatttgccggtcacttcttctcaagaggcaactgatcatcagatacaagacagtatccatatcagcccaaacgttggagtaccaattggttctgttgagagtgtggatcatttaagcgatccccaggaacaagcatcctctgaaaccaatcagcaaatggcattggacggcccttcggttagtgaaaaacatgagcagtcattggaaaatattaaaacatctgatacagatgaggtggacgatgtgttggagtctcagagcatacttattttgctgtctagccagtgtatcacaaagcaggttatctgcgagcagagccgtctatcccgtataagatactacgggaattttgatgtttccttaggacgctatttgcaagacattttgcagaagcagaatctcagctgttcctcatgtggagagcctccagaggctcacatgtattcctacactcaccgcaatgggaatctgactgttcttgtgaggcacttgctgcctaaatatcgtttacctggtgaatcagaaggaaagatttggatgtggactagatgcttaaggtgtgaacgtgaaagtgggatctccagatcatcacgaagggtgataatgtcagctgaagcacactacctttcatttgggaagttccttgaactcagtttttcaaaccactcaaccgctagaaggctgtcaatatgcgggcattcactcaataccgattgtctgcgcttttttgggttgggctccaaagttgcaatgttccagtattcctcagtcgaaatttacaatgcctgcaaaccacagcctactcttgagtttcacaatcccgatatgcacgagtggtacgggcaagaggtacgaaatgttcttgccacaggagttacacttttctcggaagtcacaagcgcactacagaagctcaaggatcagtttcctgttaaagacctttcccaacttgaagagatgttgattaaagagaaggctgagttcatggattctctagcaaagactgttgatcgaaatagggaatcaagctctgtggatgatatccttaatgtaaattggctctatcaggatcttctactggaactttatgtgtgggactgccggctgcaccaacttgtagattgtacacttgctgaaaacgcaatagtggcaaatggccaaactgcagcagccgctgaagcagacggaatcggtgagcgcatgagcagcatagcaccttttgagaatagatgtatcaaggaaccagagaagttcattgaagcagggactgcatcagccttgcttgatgatgcatggaatgataagcattgcaatgatcagcacaacacaaactgtgagtgtgacgggggggaagaaaaatggatttggaacccagtgaatgagtccagattggctttcaggcaggaagtggaagttggatgtttggaaaggtttgaggtcgttaaccactactgtccaagtcatttatcccccttgcacaaacacagagaatctggcgaggagatggggggatctccacagttcacagtaggtccaggtggcagtatcttgtgtgtatcagaggatgagatatccagtataatatcacgagctcttgctgtatccgaggaacgtcggcacttactgatggatgctgtcgctgagactgaaccagcagataccaccaggagtaaaacaatggacaagtcttacagctctttatctgaaagttcatctgcttctctgtggtcttcggattctgaggcaagcatttcgtctgacgacctctccagctatgatacctcgcttcttctatcgtcctctctccatccagaaatagctgtcaacgggataacagctctcaaagggaggtactcggtcatctgtgtacactctaaccagttctacaacctccgaaggaaatgctgcccatcggagcttgcatacgttgcctcattgagccgttgcaagaggtgggatgctcagggcgggaagagcaaggcattctttgcaagaacaatggatggcaggctcatcataaagcaaataaagaagacagagtttgagtccttcataaaatttgcgcctgattacttcaggcatgtcaaccattctctggacacggggagccagacttgccttgccaaaatcttagggatctatcaggtgaagcagacaagacatggcaaggagatcaagatggatctgatggtgatggagaacatcttgtttggacacaatgtgtcgcggacatatgatctgaaaggcgccatcttttcacgttatgtctccgacccaaatgaccatgctggcactgtctacttggaccagaactttgtggatgacatgcgtgtttctccaatctatattggtggaagagcaaagcatctcttggagcgggcaatctggaacgacacgtcttttctcacgtccatcaatgtcatggactactctttgctggttggagtggacaggcagaagcgtgagctggtattcggcatcatcgactacctgaggcagtatacatgggacaagcagctggagacgatggtgaaagcgtctctggtggtgcccaagaatgaatcgccaacggtgatttccccaagggattacaagaagaggttcaggaagttcatgagcaagcacttcctcacagttcccgacgagtggagcacggagagtcggccgccggtggcctgggagtcctgtgcccacgccggcgagttgccgggagtgaagccccagcatccaagcccaatcctcctggcgtgcgcttaattcaatttcacattctgatgctggcgaatagtgtcacaaatggaaggaggaaacgatgcttgtacgaagttccagtttactaccctcaccacacacgcacgcacgagtacatatataattctctcttcaacaagtgaagagaaggcctagcaccattgctaaaccttttcttgcttctcgtccacaacaaggggaatcatctccgtctgattccttgcttgcgctgttcctagactccctggggctgcagcctgccgctgcgagatcagatgcctcacgtagccatagaaagtgcaaccaaccagggtgattccacacccgattgcattcattgcagagattggattccggaagatcgaccacgacactaacactgccaccgcgactttaaggttgcctgcaacgttgaacgtcactgctgttgttgaatggatgacgtagaagatggagaagttaaggcagaacgcaagcacccccgaacctaggatgatagtcagcgcaggaacgatggaatcatgtgtgtagaaccagttcattacacctcctccttcaagcaccatcgctggtagagccagtatcatggtggcaaagggtgccatgtagtacaccgtgttaatgctgtcaaacttgtatccatggagtagggactctgccaagatggtctttgtagacgtagccaggcagccaaccatggcagcacagaaaccgaaaatgttgaagctaagctctgtcaccgaagtcaggagtattccgccaactatagggaccagcgaagcccatatgcgccactcgaaatgcttgctccagactagccactgcagaataactgaaccaagcaggagatgatgatgatgatgatgatacgacagcaagcaagcaagatacacaaagtgagggtatatcaagatatacctgtggttgcaggagtgaaagatttgattgtctgcatgaag

SEQ ID NO: 24503 - DNA, 5169 bp, Zea Mays
cttcttcctcctcgtcagattcatcgtcagttcaggcttcagctcgtcaggcgagagagagagagagagatgcccagctgcttgctgtcgtgtgatttggagctcgattaatattaccatgattctgctgcacacaagggacgacgatgccaagcaggatgaggttcgcatgatggccaccgctgaatcggacgacgacgccatctgggtaccgcctgatgaggcagcagcagcagcagacagcatgatgcaagatgatgatgatgatgatgatgattaccatgccggaaccggagaggaggatgacgaatccgaggacgacgatgatgctaccagcagtatctgcaggtggcgccatgactctgatcatcagtccgccgcccacagggaggagcggcagaaagccatgctgagagccatgaacgggcagctcagaatgctcgccgctcgctttctagagtcggctggcattgataccagcagctggcttgatatcgtcatctccctgtcctgggaagctgcccttgccatcaagcctgatgttggcactgctgtaggcaaccaaatggacccttcctcatacatcaaggttaagtgcctagcatctgggacaccccgccaatgtgaggtcgtcaagggcctagtcttcaggaagaacgtcgctcataagcacatgcccaccaagtgtcacaatcccaggctgctgcttcttagtggactcctcggccattcccatgttggcttctcatcgttcagttccatagagcaggagaaagaccatctggacaagtctgtctgcgaaatgatggagatctgccgcccagatgtcgtcttggtcgagagaacggtttcacgcgacatacaggagcttcttctcaaggaaggtgtcactctagtgcttgacatgaagctcaaccggctgcagagggttgctcgctgctccggcgcccccatagtctcgttttcagaggttctcagcaagccaaagctgaagcagtgcgactacttccacattgaaaaggtgacggaggagcacagcctgattacctgcagcgctggagttggaagcaggccatctaaaacattaatgttcctggaaggctttcacaagccactgggatgcacgatattgctaaggggagcaaatactcaagaactgaagaaaatcaagcaggtcatgaactacacagtgtttgcagcgtaccgcctcgttcttgagacatccttcttcgaagatcagagactaatcttgaacaataaggattcttccaaagaagaagtttctgtcgctaggaaggccggaccatcgtcactaggatcagtacaggaaactactgattccaatgctctaaatccactcgacaagggcttccctaatcaagcactactcccttctgaaggactagtagtatcagcagtcccagaatcacccagaagattcattgatatactccgttatcataatatttatttgccggtcacttcttctcaagaggcaactgatcatcagatacaagacagtatccatatcagcccaaacgttggagtaccaattggttctgttgagagtgtggatcatttaagcgatccccaggaacaagcatcctctgaaaccaatcagcaaatggcattggacggcccttcggttagtgaaaaacatgagcagtcattggaaaatattaaaacatctgatacagatgaggtggacgatgtgttggagtctcagagcatacttattttgctgtctagccagtgtatcacaaagcaggttatctgcgagcagagccgtctatcccgtataagatactacgggaattttgatgtttccttaggacgctatttgcaagacattttgcagaagcagaatctcagctgttcctcatgtggagagcctccagaggctcacatgtattcctacactcaccgcaatgggaatctgactgttcttgtgaggcacttgctgcctaaatatcgtttacctggtgaatcagaaggaaagatttggatgtggactagatgcttaaggtgtgaacgtgaaagtgggatctccagatcatcacgaagggtgataatgtcagctgaagcacactacctttcatttgggaagttccttgaactcagtttttcaaaccactcaaccgctagaaggctgtcaatatgcgggcattcactcaataccgattgtctgcgcttttttgggttgggctccaaagttgcaatgttccagtattcctcagtcgaaatttacaatgcctgcaaaccacagcctactcttgagtttcacaatcccgatatgcacgagtggtacgggcaagaggttcttgccacaggagttacacttttctcggaagtcacaagcgcactacagaagctcaaggatcagtttcctgttaaagacctttcccaacttgaagagatgttgattaaagagaaggctgagttcatggattctctagcaaagactgttgatcgaaatagggaatcaagctctgtggatgatatccttaatgtaaattggctctatcaggatcttctactggaactttatgtgtgggactgccggctgcaccaacttgtagattgtacacttgctgaaaacgcaatagtggcaaatggccaaactgcagcagccgctgaagcagacggaatcggtgagcgcatgagcagcatagcaccttttgagaatagatgtatcaaggaaccagagaagttcattgaagcagggactgcatcagccttgcttgatgatgcatggaatgataagcattgcaatgatcagcacaacacaaactgtgagtgtgacgggggggaagaaaaatggatttggaacccagtgaatgagtccagattggctttcaggcaggaagtggaagttggatgtttggaaaggtttgaggtcgttaaccactactgtccaagtcatttatcccccttgcacaaacacagagaatctggcgaggagatggggggatctccacagttcacagtaggtccaggtggcagtatcttgtgtgtatcagaggatgagatatccagtataatatcacgagctcttgctgtatccgaggaacgtcggcacttactgatggatgctgtcgctgagactgaaccagcagataccaccaggagtaaaacaatggacaagtcttacagctctttatctgaaagttcatctgcttctctgtggtcttcggattctgaggcaagcatttcgtctgacgacctctccagctatgatacctcgcttcttctatcgtcctctctccatccagaaatagctgtcaacgggataacagctctcaaagggaggtactcggtcatctgtgtacactctaaccagttctacaacctccgaaggaaatgctgcccatcggagcttgcatacgttgcctcattgagccgttgcaagaggtgggatgctcagggcgggaagagcaaggcattctttgcaagaacaatggatggcaggctcatcataaagcaaataaagaagacagagtttgagtccttcataaaatttgcgcctgattacttcaggcatgtcaaccattctctggacacggggagccagacttgccttgccaaaatcttagggatctatcaggtgaagcagacaagacatggcaaggagatcaagatggatctgatggtgatggagaacatcttgtttggacacaatgtgtcgcggacatatgatctgaaaggcgccatcttttcacgttatgtctccgacccaaatgaccatgctggcactgtctacttggaccagaactttgtggatgacatgcgtgtttctccaatctatattggtggaagagcaaagcatctcttggagcgggcaatctggaacgacacgtcttttctcacgtccatcaatgtcatggactactctttgctggttggagtggacaggcagaagcgtgagctggtattcggcatcatcgactacctgaggcagtatacatgggacaagcagctggagacgatggtgaaagcgtctctggtggtgcccaagaatgaatcgccaacggtgatttccccaagggattacaagaagaggttcaggaagttcatgagcaagcacttcctcacagttcccgacgagtggagcacggagagtcggccgccggtggcctgggagtcctgtgcccacgccggcgagttgccgggagtgaagccccagcatccaagcccaatcctcctggcgtgcgcttaattcaatttcacattctgatgctggcgaatagtgtcacaaatggaaggaggaaacgatgcttgtacgaagttccagtttactaccctcaccacacacgcacgcacgagtacatatataattctctcttcaacaagtgaagagaaggcctagcaccattgctaaaccttttcttgcttctcgtccacaacaaggggaatcatctccgtctgattccttgcttgcgctgttcctagactccctggggctgcagcctgccgctgcgagatcagatgcctcacgtagccatagaaagtgcaaccaaccagggtgattccacacccgattgcattcattgcagagattggattccggaagatcgaccacgacactaacactgccaccgcgactttaaggttgcctgcaacgttgaacgtcactgctgttgttgaatggatgacgtagaagatggagaagttaaggcagaacgcaagcacccccgaacctaggatgatagtcagcgcaggaacgatggaatcatgtgtgtagaaccagttcattacacctcctccttcaagcaccatcgctggtagagccagtatcatggtggcaaagggtgccatgtagtacaccgtgttaatgctgtcaaacttgtatccatggagtagggactctgccaagatggtctttgtagacgtagccaggcagccaaccatggcagcacagaaaccgaaaatgttgaagctaagctctgtcaccgaagtcaggagtattccgccaactatagggaccagcgaagcccatatgcgccactcgaaatgcttgctccagactagccactgcagaataactgaaccaagcaggagatgatgatgatgatgatgatacgacagcaagcaagcaagatacacaaagtgagggtatatcaagatatacctgtggttgcaggagtgaaagatttgattgtctgcatgaag

SEQ ID NO: 24504 - DNA, 5189 bp, Zea Mays
caagcctttcttcttcctcctcgtcagattcatcgtcagttcaggcttcagctcgtcaggcgagagagagagagagagatgcccagctgcttgctgtcgtgtgatttggagctcgattaatattaccatgattctgctgcacacaagctgcattatagggacgacgatgccaagcaggatgaggttcgcatgatggccaccgctgaatcggacgacgacgccatctgggtaccgcctgatgaggcagcagcagcagcagacagcatgatgcaagatgatgatgatgatgatgatgattaccatgccggaaccggagaggaggatgacgaatccgaggacgacgatgatgctaccagcagtatctgcaggtggcgccatgactctgatcatcagtccgccgcccacagggaggagcggcagaaagccatgctgagagccatgaacgggcagctcagaatgctcgccgctcgctttctagagtcggctggcattgataccagcagctggcttgatatcgtcatctccctgtcctgggaagctgcccttgccatcaagcctgatgttggcactgctgtaggcaaccaaatggacccttcctcatacatcaaggttaagtgcctagcatctgggacaccccgccaatgtgaggtcgtcaagggcctagtcttcaggaagaacgtcgctcataagcacatgcccaccaagtgtcacaatcccaggctgctgcttcttagtggactcctcggccattcccatgttggcttctcatcgttcagttccatagagcaggagaaagaccatctggacaagtctgtctgcgaaatgatggagatctgccgcccagatgtcgtcttggtcgagagaacggtttcacgcgacatacaggagcttcttctcaaggaaggtgtcactctagtgcttgacatgaagctcaaccggctgcagagggttgctcgctgctccggcgcccccatagtctcgttttcagaggttctcagcaagccaaagctgaagcagtgcgactacttccacattgaaaaggtgacggaggagcacagcctgattacctgcagcgctggagttggaagcaggccatctaaaacattaatgttcctggaaggctttcacaagccactgggatgcacgatattgctaaggggagcaaatactcaagaactgaagaaaatcaagcaggtcatgaactacacagtgtttgcagcgtaccgcctcgttcttgagacatccttcttcgaagatcagagactaatcttgaacaataaggattcttccaaagaagaagtttctgtcgctaggaaggccggaccatcgtcactaggatcagtacaggaaactactgattccaatgctctaaatccactcgacaagggcttccctaatcaagcactactcccttctgaaggactagtagtatcagcagtcccagaatcacccagaagattcattgatatactccgttatcataatatttatttgccggtcacttcttctcaagaggcaactgatcatcagatacaagacagtatccatatcagcccaaacgttggagtaccaattggttctgttgagagtgtggatcatttaagcgatccccaggaacaagcatcctctgaaaccaatcagcaaatggcattggacggcccttcggttagtgaaaaacatgagcagtcattggaaaatattaaaacatctgatacagatgaggtggacgatgtgttggagtctcagagcatacttattttgctgtctagccagtgtatcacaaagcaggttatctgcgagcagagccgtctatcccgtataagatactacgggaattttgatgtttccttaggacgctatttgcaagacattttgcagaagcagaatctcagctgttcctcatgtggagagcctccagaggctcacatgtattcctacactcaccgcaatgggaatctgactgttcttgtgaggcacttgctgcctaaatatcgtttacctggtgaatcagaaggaaagatttggatgtggactagatgcttaaggtgtgaacgtgaaagtgggatctccagatcatcacgaagggtgataatgtcagctgaagcacactacctttcatttgggaagttccttgaactcagtttttcaaaccactcaaccgctagaaggctgtcaatatgcgggcattcactcaataccgattgtctgcgcttttttgggttgggctccaaagttgcaatgttccagtattcctcagtcgaaatttacaatgcctgcaaaccacagcctactcttgagtttcacaatcccgatatgcacgagtggtacgggcaagaggttcttgccacaggagttacacttttctcggaagtcacaagcgcactacagaagctcaaggatcagtttcctgttaaagacctttcccaacttgaagagatgttgattaaagagaaggctgagttcatggattctctagcaaagactgttgatcgaaatagggaatcaagctctgtggatgatatccttaatgtaaattggctctatcaggatcttctactggaactttatgtgtgggactgccggctgcaccaacttgtagattgtacacttgctgaaaacgcaatagtggcaaatggccaaactgcagcagccgctgaagcagacggaatcggtgagcgcatgagcagcatagcaccttttgagaatagatgtatcaaggaaccagagaagttcattgaagcagggactgcatcagccttgcttgatgatgcatggaatgataagcattgcaatgatcagcacaacacaaactgtgagtgtgacgggggggaagaaaaatggatttggaacccagtgaatgagtccagattggctttcaggcaggaagtggaagttggatgtttggaaaggtttgaggtcgttaaccactactgtccaagtcatttatcccccttgcacaaacacagagaatctggcgaggagatggggggatctccacagttcacagtaggtccaggtggcagtatcttgtgtgtatcagaggatgagatatccagtataatatcacgagctcttgctgtatccgaggaacgtcggcacttactgatggatgctgtcgctgagactgaaccagcagataccaccaggagtaaaacaatggacaagtcttacagctctttatctgaaagttcatctgcttctctgtggtcttcggattctgaggcaagcatttcgtctgacgacctctccagctatgatacctcgcttcttctatcgtcctctctccatccagaaatagctgtcaacgggataacagctctcaaagggaggtactcggtcatctgtgtacactctaaccagttctacaacctccgaaggaaatgctgcccatcggagcttgcatacgttgcctcattgagccgttgcaagaggtgggatgctcagggcgggaagagcaaggcattctttgcaagaacaatggatggcaggctcatcataaagcaaataaagaagacagagtttgagtccttcataaaatttgcgcctgattacttcaggcatgtcaaccattctctggacacggggagccagacttgccttgccaaaatcttagggatctatcaggtgaagcagacaagacatggcaaggagatcaagatggatctgatggtgatggagaacatcttgtttggacacaatgtgtcgcggacatatgatctgaaaggcgccatcttttcacgttatgtctccgacccaaatgaccatgctggcactgtctacttggaccagaactttgtggatgacatgcgtgtttctccaatctatattggtggaagagcaaagcatctcttggagcgggcaatctggaacgacacgtcttttctcacgtccatcaatgtcatggactactctttgctggttggagtggacaggcagaagcgtgagctggtattcggcatcatcgactacctgaggcagtatacatgggacaagcagctggagacgatggtgaaagcgtctctggtggtgcccaagaatgaatcgccaacggtgatttccccaagggattacaagaagaggttcaggaagttcatgagcaagcacttcctcacagttcccgacgagtggagcacggagagtcggccgccggtggcctgggagtcctgtgcccacgccggcgagttgccgggagtgaagccccagcatccaagcccaatcctcctggcgtgcgcttaattcaatttcacattctgatgctggcgaatagtgtcacaaatggaaggaggaaacgatgcttgtacgaagttccagtttactaccctcaccacacacgcacgcacgagtacatatataattctctcttcaacaagtgaagagaaggcctagcaccattgctaaaccttttcttgcttctcgtccacaacaaggggaatcatctccgtctgattccttgcttgcgctgttcctagactccctggggctgcagcctgccgctgcgagatcagatgcctcacgtagccatagaaagtgcaaccaaccagggtgattccacacccgattgcattcattgcagagattggattccggaagatcgaccacgacactaacactgccaccgcgactttaaggttgcctgcaacgttgaacgtcactgctgttgttgaatggatgacgtagaagatggagaagttaaggcagaacgcaagcacccccgaacctaggatgatagtcagcgcaggaacgatggaatcatgtgtgtagaaccagttcattacacctcctccttcaagcaccatcgctggtagagccagtatcatggtggcaaagggtgccatgtagtacaccgtgttaatgctgtcaaacttgtatccatggagtagggactctgccaagatggtctttgtagacgtagccaggcagccaaccatggcagcacagaaaccgaaaatgttgaagctaagctctgtcaccgaagtcaggagtattccgccaactatagggaccagcgaagcccatatgcgccactcgaaatgcttgctccagactagccactgcagaataactgaaccaagcaggagatgatgatgatgatgatgatacgacagcaagcaagcaagatacacaaagtgagggtatatcaagatatacctgtggttgcaggagtgaaagatttgattgtctgcatgaag

SEQ ID NO: 24505 - DNA, 5190 bp, Zea Mays
ctccaagcctttcttcttcctcctcgtcagattcatcgtcagttcaggcttcagctcgtcaggcgagagagagagagagagatgcccagctgcttgctgtcgtgtgatttggagctcgattaatattaccatgattctgctgcacacaagggacgacgatgccaagcaggatgaggttcgcatgatggccaccgctgaatcggacgacgacgccatctgggtaccgcctgatgaggcagcagcagcagcagacagcatgatgcaagatgatgatgatgatgatgatgattaccatgccggaaccggagaggaggatgacgaatccgaggacgacgatgatgctaccagcagtatctgcaggtggcgccatgactctgatcatcagtccgccgcccacagggaggagcggcagaaagccatgctgagagccatgaacgggcagctcagaatgctcgccgctcgctttctagagtcggctggcattgataccagcagctggcttgatatcgtcatctccctgtcctgggaagctgcccttgccatcaagcctgatgttggcactgctgtaggcaaccaaatggacccttcctcatacatcaaggttaagtgcctagcatctgggacaccccgccaatgtgaggtcgtcaagggcctagtcttcaggaagaacgtcgctcataagcacatgcccaccaagtgtcacaatcccaggctgctgcttcttagtggactcctcggccattcccatgttggcttctcatcgttcagttccatagagcaggagaaagaccatctggacaagtctgtctgcgaaatgatggagatctgccgcccagatgtcgtcttggtcgagagaacggtttcacgcgacatacaggagcttcttctcaaggaaggtgtcactctagtgcttgacatgaagctcaaccggctgcagagggttgctcgctgctccggcgcccccatagtctcgttttcagaggttctcagcaagccaaagctgaagcagtgcgactacttccacattgaaaaggtgacggaggagcacagcctgattacctgcagcgctggagttggaagcaggccatctaaaacattaatgttcctggaaggctttcacaagccactgggatgcacgatattgctaaggggagcaaatactcaagaactgaagaaaatcaagcaggtcatgaactacacagtgtttgcagcgtaccgcctcgttcttgagacatccttcttcgaagatcagagactaatcttgaacaataaggattcttccaaagaagaagtttctgtcgctaggaaggccggaccatcgtcactaggatcagtacaggaaactactgattccaatgctctaaatccactcgacaagggcttccctaatcaagcactactcccttctgaaggactagtagtatcagcagtcccagaatcacccagaagattcattgatatactccgttatcataatatttatttgccggtcacttcttctcaagaggcaactgatcatcagatacaagacagtatccatatcagcccaaacgttggagtaccaattggttctgttgagagtgtggatcatttaagcgatccccaggaacaagcatcctctgaaaccaatcagcaaatggcattggacggcccttcggttagtgaaaaacatgagcagtcattggaaaatattaaaacatctgatacagatgaggtggacgatgtgttggagtctcagagcatacttattttgctgtctagccagtgtatcacaaagcaggttatctgcgagcagagccgtctatcccgtataagatactacgggaattttgatgtttccttaggacgctatttgcaagacattttgcagaagcagaatctcagctgttcctcatgtggagagcctccagaggctcacatgtattcctacactcaccgcaatgggaatctgactgttcttgtgaggcacttgctgcctaaatatcgtttacctggtgaatcagaaggaaagatttggatgtggactagatgcttaaggtgtgaacgtgaaagtgggatctccagatcatcacgaagggtgataatgtcagctgaagcacactacctttcatttgggaagttccttgaactcagtttttcaaaccactcaaccgctagaaggctgtcaatatgcgggcattcactcaataccgattgtctgcgcttttttgggttgggctccaaagttgcaatgttccagtattcctcagtcgaaatttacaatgcctgcaaaccacagcctactcttgagtttcacaatcccgatatgcacgagtggtacgggcaagaggtacgaaatgttcttgccacaggagttacacttttctcggaagtcacaagcgcactacagaagctcaaggatcagtttcctgttaaagacctttcccaacttgaagagatgttgattaaagagaaggctgagttcatggattctctagcaaagactgttgatcgaaatagggaatcaagctctgtggatgatatccttaatgtaaattggctctatcaggatcttctactggaactttatgtgtgggactgccggctgcaccaacttgtagattgtacacttgctgaaaacgcaatagtggcaaatggccaaactgcagcagccgctgaagcagacggaatcggtgagcgcatgagcagcatagcaccttttgagaatagatgtatcaaggaaccagagaagttcattgaagcagggactgcatcagccttgcttgatgatgcatggaatgataagcattgcaatgatcagcacaacacaaactgtgagtgtgacgggggggaagaaaaatggatttggaacccagtgaatgagtccagattggctttcaggcaggaagtggaagttggatgtttggaaaggtttgaggtcgttaaccactactgtccaagtcatttatcccccttgcacaaacacagagaatctggcgaggagatggggggatctccacagttcacagtaggtccaggtggcagtatcttgtgtgtatcagaggatgagatatccagtataatatcacgagctcttgctgtatccgaggaacgtcggcacttactgatggatgctgtcgctgagactgaaccagcagataccaccaggagtaaaacaatggacaagtcttacagctctttatctgaaagttcatctgcttctctgtggtcttcggattctgaggcaagcatttcgtctgacgacctctccagctatgatacctcgcttcttctatcgtcctctctccatccagaaatagctgtcaacgggataacagctctcaaagggaggtactcggtcatctgtgtacactctaaccagttctacaacctccgaaggaaatgctgcccatcggagcttgcatacgttgcctcattgagccgttgcaagaggtgggatgctcagggcgggaagagcaaggcattctttgcaagaacaatggatggcaggctcatcataaagcaaataaagaagacagagtttgagtccttcataaaatttgcgcctgattacttcaggcatgtcaaccattctctggacacggggagccagacttgccttgccaaaatcttagggatctatcaggtgaagcagacaagacatggcaaggagatcaagatggatctgatggtgatggagaacatcttgtttggacacaatgtgtcgcggacatatgatctgaaaggcgccatcttttcacgttatgtctccgacccaaatgaccatgctggcactgtctacttggaccagaactttgtggatgacatgcgtgtttctccaatctatattggtggaagagcaaagcatctcttggagcgggcaatctggaacgacacgtcttttctcacgtccatcaatgtcatggactactctttgctggttggagtggacaggcagaagcgtgagctggtattcggcatcatcgactacctgaggcagtatacatgggacaagcagctggagacgatggtgaaagcgtctctggtggtgcccaagaatgaatcgccaacggtgatttccccaagggattacaagaagaggttcaggaagttcatgagcaagcacttcctcacagttcccgacgagtggagcacggagagtcggccgccggtggcctgggagtcctgtgcccacgccggcgagttgccgggagtgaagccccagcatccaagcccaatcctcctggcgtgcgcttaattcaatttcacattctgatgctggcgaatagtgtcacaaatggaaggaggaaacgatgcttgtacgaagttccagtttactaccctcaccacacacgcacgcacgagtacatatataattctctcttcaacaagtgaagagaaggcctagcaccattgctaaaccttttcttgcttctcgtccacaacaaggggaatcatctccgtctgattccttgcttgcgctgttcctagactccctggggctgcagcctgccgctgcgagatcagatgcctcacgtagccatagaaagtgcaaccaaccagggtgattccacacccgattgcattcattgcagagattggattccggaagatcgaccacgacactaacactgccaccgcgactttaaggttgcctgcaacgttgaacgtcactgctgttgttgaatggatgacgtagaagatggagaagttaaggcagaacgcaagcacccccgaacctaggatgatagtcagcgcaggaacgatggaatcatgtgtgtagaaccagttcattacacctcctccttcaagcaccatcgctggtagagccagtatcatggtggcaaagggtgccatgtagtacaccgtgttaatgctgtcaaacttgtatccatggagtagggactctgccaagatggtctttgtagacgtagccaggcagccaaccatggcagcacagaaaccgaaaatgttgaagctaagctctgtcaccgaagtcaggagtattccgccaactatagggaccagcgaagcccatatgcgccactcgaaatgcttgctccagactagccactgcagaataactgaaccaagcaggagatgatgatgatgatgatgatacgacagcaagcaagcaagatacacaaagtgagggtatatcaagatatacctgtggttgcaggagtgaaagatttgattgtctgcatgaag

SEQ ID NO: 24506 - DNA, 2548 bp, Zea Mays
gagatgaaccacgaactgaacattgaatgatagcgaaggtatgtatccatctgttcattaactgtaatccacttgtatccatgaaaacatacatctacaggtgacgcatgatggatgccaccgttaacgtggcatcaagaattcactgctgacgttgtattgtaccaaaaatcgtatgtggtcacggcttccatgatgacggcggcggcggcgtggccgggaacattggcggcacggcggagaacatggtgttcttgtcgacggtggtgacgccggctcccctaccgctgttggtgagagccaccagggccgcgacgaggccggcgttgcccaccagcgtcggctcgttctgcccgaaggtgttgcgcgagtccttgaagccgtcgttcttgtcaggcccgccgaccatggcgcccgccagcaggttggggtccgccttcttgctgtcgcgccacttgtagccgccggtgcacgagtacttgacgccgttgtgcggcgtggacgcgccacggtggtgcacgtgccgcgggtacttgctgccgaacccaaccacgtagctcatcttcttggggttgtcaccgagaatgtagttgacctgagacctggcgaactcccggaggtcgttggtggtcatgaagtttgggccgcagtaccagccggggacgttgacggcctccatgtagtcggcgtagagcgcggcgatgaaggagttggcgacgacgtactgcagcggctgccccctgccgtggttgaagagcgccatcccgcccttggtgaagttgaaggcggcgaagcgcgggaagtacatgcacatgttgaggctggtggcgttgtggtagccggctagcgactcctcgtacgggtagccggggttgaggaacatgcgcaggcgcgacagcagcagctgggcgcccgggagcttgttgtcccagctgaacacggagaagtcgaggatgctgaagaaggccttggcgttcttgggcagccgcgggtcggtggcgaaggtgatgtagctgctgttgccagtggcgtagtacatccaccccgcgctccacatgtactcgtcccagtagctggtggagttgtagtagtactcgatgtccggctgccggagcgagtagggggtgcgccgccccgactgccgcgcgaacttgtacacggtggccgcgccctggctgagcttcttggagtaggcggcgttgtcacggaacacgatggaggcagccgcaagtgcagcggcgacctcgccacccagatcaggggcggagctcacggacagtgaagggcgagggtacgccatgtcctccggccggttccagcagtaatggtcgtccggccggctgccgttgatcttagcagcacccacctgggcgtataacttgtcgatggtggaagcagaggagttgaaggtgagtagcagatagtcggtgccccacttgatgagctccctgacatggtcatactcccccatggccttgtacttggcgctgtactcgatcaccgaccagctcagcagcgtcatggagaaggccatcgggaagtggaacttgatgttgtcgccagcgtcgtagtagccgccgacgaggccacccttgacgtccttggcgtcggagccgtctgacaggccagagttcccgcgccacttgatgccattgttcttgggaaggtggccggctgcaagaattctcttcgattttatcagagaagggatcggagagacggacctttgcaatttgagcgatcacgtacagagaatacagatctacaggtgtgtgctccgtgcaagagattacagtacaggaatgaattcagcaagatctacaggcacgcagttagcagcttgattgagatccatccctaccgaaagcaattagaaaaacaaatacgtacatttctgggcgttgaagaagaggagcgccttgtgcagcgcctctgtgtactgatctggcggcggcgggcctggcttcttgtgcgggatggacttggcgatgatgatggggaggccgatgaggacgaaagcggcgacgacgcaccacaaggcccaccagaggagcttgcgcttgacgacgacacaaccgaggtccacgtacttgtccttcttcttggcctccggcgggcctagcagccagctctgctgcgtctcgtccagctcgtggtgctgccgcgccgacagcgcgccgcggtccaggtccatgttgcggctgtggtcatcctccgccgccccatcggcgatctcgaacgagccgccccagtggttggccgaatacatggcgggcgccgggcggtgggtgaaggtgaggtgaccgggccaccggggtagggagttttcaagaggaggcggccaggcgggggtgggtggttgacccgccgacggtgctggccttcccgtggaggggcagctggcactgtcggtgccgaattaaaaagcgtctcttttccgtgcaaatgcaatgcaacgtagcatgcttgccgatctgtcggttttgcgagttttgtagtttaattgtcacccacgtggccagctgcctccactaataatcaaacaaag

SEQ ID NO: 24507 - DNA, 1232 bp, Zea Mays
caggtcaggcacgcgagtacgcgacgcacccgggtgggcccctttccgctcccctccctctcccctccgctcctcttctcccccagatctctctcttcttctcttgcgaagtcgccaaggccagtccccaatccccatccagccagaccgccggcgatgacggaccaccgcgacgtgatgttgcccttgtccctccaatacatagccacccgtgccctcctcctgctcgtcatcgcgtccgccgtttcctgctcttccttgccgccggaggacggcatccgggtcgtctctgcagagaaaagagcttgagtatcaatctaggccatctatcagtggagcttcgtcctttaagaatcttcttgcaaggctgccacctcgggttcattcagtttactatcgtgatgagattggtaacatctcctcatcccatctgcgcactgattcacacaagtccgatctagaaattgagcccagatatccgttatttggtgggtggcactgcacgttcaccattggctatggtcttccattgcaagattttgtctttgagtcagttgatggccggcgctacatcaaccttacttttggttgccctctattggatactgtggttgacgatcttacagttaaagttgtgcttcctgaaggatcaaaaaatccagagcatgtagttccttttgtgacagagaaacatcttgagactagttattcataccttgacgttgttggaaggacgacggttgtactgaagaagaaaaatgttgtaggggagcacaacgttcctttccaggtgtactatgaattcaatccgatcttcatgctggcggaaccattgatgctgatatctgcagtgttgctgtttttcgttgccttcattgcgtatcttcacatggatctttccatcagaaaatcatcataggcctgttggcaattctgtccaccacagtattttttgaggcacatgttctgctaactgtgattgatgaagtaacaatccttgttctagcgcactagttgaactgtttatcagtgcaccatcctcaatggagaaggacgatgtttttttttttgtgtgtgtgtgggtggaatatgattgcttcatgtagggctcacaacgatcagaaacgatatcatctataggaaaacgattgcctagaaatttagctggtttcataattaatcaacgtggtgactacaatacgatattgatatatgtttgaaattcaaatttt

SEQ ID NO: 24508 - DNA, 1333 bp, Zea Mays
caggtcaggcacgcgagtacgcgacgcacccgggtgggcccctttccgctcccctccctctcccctccgctcctcttctcccccagatctctctcttcttctcttgcgaagtcgccaaggccagtccccaatccccatccagccagaccgccggcgatgacggaccaccgcgacgtgatgttgcccttgtccctccaatacatagccacccgtgccctcctcctgctcgtcatcgcgtccgccgtttcctgctcttccttgccgccggaggacggcatccgggtcgtctctgcagagaaaagacttgtacgcaaggtggagatttctcactggggaaacatccaaatcaccgagcagtataaactgaaacacggtggtgctcgtcacaaaggagtcttttccaggcttgagtatcaatctaggccatctatcagtggagcttcgtcctttaagaatcttcttgcaaggctgccacctcgggttcattcagtttactatcgtgatgagattggtaacatctcctcatcccatctgcgcactgattcacacaagtccgatctagaaattgagcccagatatccgttatttggtgggtggcactgcacgttcaccattggctatggtcttccattgcaagattttgtctttgagtcagttgatggccggcgctacatcaaccttacttttggttgccctctattggatactgtggttgacgatcttacagttaaagttgtgcttcctgaaggatcaaaaaatccagagcatgtagttccttttgtgacagagaaacatcttgagactagttattcataccttgacgttgttggaaggacgacggttgtactgaagaagaaaaatgttgtaggggagcacaacgttcctttccaggtgtactatgaattcaatccgatcttcatgctggcggaaccattgatgctgatatctgcagtgttgctgtttttcgttgccttcattgcgtatcttcacatggatctttccatcagaaaatcatcataggcctgttggcaattctgtccaccacagtattttttgaggcacatgttctgctaactgtgattgatgaagtaacaatccttgttctagcgcactagttgaactgtttatcagtgcaccatcctcaatggagaaggacgatgtttttttttttgtgtgtgtgtgggtggaatatgattgcttcatgtagggctcacaacgatcagaaacgatatcatctataggaaaacgattgcctagaaatttagctggtttcataattaatcaacgtggtgactacaatacgatattgatatatgtttgaaattcaaatttt

SEQ ID NO: 24509 - DNA, 1913 bp, Zea Mays
caacaggtcaggcacgcgagtacgcgacgcacccgggtgggcccctttccgctcccctccctctcccctccgctcctcttctcccccagatctctctcttcttctcttgcgaagtcgccaaggccagtccccaatccccatccagccagaccgccggcgatgacggaccaccgcgacgtgatgttgcccttgtccctccaatacatagccacccgtgccctcctcctgctcgtcatcgcgtccgccgtttcctgctcttccttgccgccggaggacggcatccgggtcgtctctgcagagaaaagaatcgacctcacgggtcccatcgtcaaagtcttcctaacattgaaggttgagaatgctcccacggcctctgaagcatcacgagttctcctcgccttcacgcccacagagtttcaacatctctctattgtcaaggccacaagagcggaggggaagcgcaagaagaaggcattcgtacccctctcggtccaagcctctgagctcgccaccaccgctcccgacgcccctcgcctctactctgttctgctcagcactcctctgaaaccgggcgatgcaaccactctagaagtgctatacatgctcactcactctttagagcccttccccgctgagattagccagtcagagtcccagttggtttactaccgtgacagtgcggtgcttctctcgccctaccatgtcctggagcaggttacctacatcaaaatgccaagcaataggatcgaatccttcacaagggtcgatcctaccacacgagctggttctgaagtgaaatatggcacatacagtaaccagatgccaaactcctatttgccagttcttgtgcattatgagaataaccgcccatttgctgttgttgaggagcttgtacgcaaggtggagatttctcactggggaaacatccaaatcaccgagcagtataaactgaaacacggtggtgctcgtcacaaaggagtcttttccaggcttgagtatcaatctaggccatctatcagtggagcttcgtcctttaagaatcttcttgcaaggctgccacctcgggttcattcagtttactatcgtgatgagattggtaacatctcctcatcccatctgcgcactgattcacacaagtccgatctagaaattgagcccagatatccgttatttggtgggtggcactgcacgttcaccattggctatggtcttccattgcaagattttgtctttgagtcagttgatggccggcgctacatcaaccttacttttggttgccctctattggatactgtggttgacgatcttacagttaaagttgtgcttcctgaaggatcaaaaaatccagagcatgtagttccttttgtgacagagaaacatcttgagttattcataccttgacgttgttggaaggacgacggttgtactgaagaagaaaaatgttgtaggggagcacaacgttcctttccaggtgtactatgaattcaatccgatcttcatgctggcggaaccattgatgctgatatctgcagtgttgctgtttttcgttgccttcattgcgtatcttcacatggatctttccatcagaaaatcatcataggcctgttggcaattctgtccaccacagtattttttgaggcacatgttctgctaactgtgattgatgaagtaacaatccttgttctagcgcactagttgaactgtttatcagtgcaccatcctcaatggagaaggacgatgtttttttttttgtgtgtgtgtgggtggaatatgattgcttcatgtagggctcacaacgatcagaaacgatatcatctataggaaaacgattgcctagaaatttagctggtttcataattaatcaacgtggtgactacaatacgatattgatatatgtttgaaattcaaatttt

SEQ ID NO: 24510 - DNA, 2276 bp, Zea Mays
caccgtggatcgcgcaaacggccagacgtgatctctcgcccacgtgtcccttgcccctgtccagctgtcccctccggagcctgcaaagaactccccacccagctatcaactatcatttccggcgctgaaaaggagagtgacactcaacactgcagaaatcagattcggagcttcgggggaaaaaggcaggcacagtatcgtcgaacatgctgccaggtcgccacccggcgcgccgggccgacaccaccgggacggggccgctcctgccggacgccactcgcgcggtggtgtcggagttcgtcgccacagccatgttcgtgttcgccgccgaaggctccgtctacggcctctggaagctgtacaaggacacggcaacgccgggcggcctgctcgcggtggccatcgcgcacacgctggcgctggtggccgcggtggcggtagcgagcaacgcgtcgggtgggcacgtcaaccctgcggtcacgttcggcctgctcgtgggccgtcgcatctctttcggccgtgccgcggtatactggctcgcgcagatgctcggcgccgtggtcgcgtcgttgctgctaacgctcgtctccggcggcacggtaattcgacttaatttcgccacgtgtccatgtcaaatactacagtactattttacgtttgattattataaataaaggttccagttaggcatacaaaggtactcgggggtctgtttggcaaaatatgtctgaccataccaatggtattaggccggggcacaactcaaactttgtatgcctaactactaactcaaattttgagaaatcacctttaccagcttaaacctcatgcatgactgggacatgtaaatgggtgagagatctagaaaaaaaactactttttttgcaacctcatctctctatttcacccgtgaagttatttatttctttacgatactatactcatcacctatgaagctgtttatttctttgtggtggtgatagcattacattttttttaaaaaaagagggtttgggaaaaaaaatagttcacaaaagagctcgtgatcgtgaagctgtttgtgaaaacagtgcctcgatcgagtgccaaacgccgagacaccagaagatcgagcacgtcagcattgaaacgagaagtcagaattgactgcgtgcggccgcgctatctgtgcaaacacgcgtacggcgtactcatcatgcccgccacgtctcagtctcactctttgccttgcatgcatgcctttgtcctgcagcgtcccgtgggcttcgggctcgtccgcggcgtccacgagcggcacgcgctcctgctagaggccgtcatgacgttcgggctcatgtacgccgtgtacgccaccgcggtggatcaccggagccggggcggcgcggtcgcgatcgcgcccctcgccatcggcttcgtcctgggcgcgaacatcctcgccggcggcccgttcgacggcgccgcgatgaacccggcgcgggcgttcgggcccgcgctcgtcggctggagctggcgccaccactgggtctactgggtcgggccactgatcggcgccgggctggctggcggcttgtacgagtttgtcatggttgagcaggagcccgaggcgccggcgccagctgcagttcctcggatgccagtggcctctgaggactactgatgtaggtgtacatgtattgtatccctaccgtttgtattttcactgtgtatcgtatgggtgtaccgtgtatctaggagactaggaccgagcttggcatctgctttagaggcacgtcatagactttttggatattcccaagaacccttactactagatcaaaataaacacagacatgaatcgatttctgcgcatccacaactgaggcacacacacctgagcaccgccatggccacctcaggagtgtgaagatccgtggtttcagctctgcgaaaagcttaacatgttatattcttaagaatgcagtgtcactggaatttcttacactggacacctcttaggttatgttttgatattctagtatttacaccaggactggggtgtatattacacatgtgtattggagtgaatactagaatatgtttattggggtgaatactagagtatctaaacaagcacttataagaatcagtttagtcaaagtttgtacaaggtgtttccccagagctttggaaaggagtcgaagcctacgatgttttcaagatacagaaattcaaccttcgagtcgtgtatttgtggtcggtgcatgatttcatggcgtatgatattttttcggttggag

SEQ ID NO: 24511 - DNA, 1548 bp, Zea Mays
caccgtggatcgcgcaaacggccagacgtgatctctcgcccacgtgtcccttgcccctgtccagctgtcccctccggagcctgcaaagaactccccacccagctatcaactatcatttccggcgctgaaaaggagagtgacactcaacactgcagaaatcagattcggagcttcgggggaaaaaggcaggcacagtatcgtcgaacatgctgccaggtcgccacccggcgcgccgggccgacaccaccgggacggggccgctcctgccggacgccactcgcgcggtggtgtcggagttcgtcgccacagccatgttcgtgttcgccgccgaaggctccgtctacggcctctggaagctgtacaaggacacggcaacgccgggcggcctgctcgcggtggccatcgcgcacacgctggcgctggtggccgcggtggcggtagcgagcaacgcgtcgggtgggcacgtcaaccctgcggtcacgttcggcctgctcgtgggccgtcgcatctctttcggccgtgccgcggtatactggctcgcgcagatgctcggcgccgtggtcgcgtcgttgctgctaacgctcgtctccggcggcacgcgtcccgtgggcttcgggctcgtccgcggcgtccacgagcggcacgcgctcctgctagaggccgtcatgacgttcgggctcatgtacgccgtgtacgccaccgcggtggatcaccggagccggggcggcgcggtcgcgatcgcgcccctcgccatcggcttcgtcctgggcgcgaacatcctcgccggcggcccgttcgacggcgccgcgatgaacccggcgcgggcgttcgggcccgcgctcgtcggctggagctggcgccaccactgggtctactgggtcgggccactgatcggcgccgggctggctggcggcttgtacgagtttgtcatggttgagcaggagcccgaggcgccggcgccagctgcagttcctcggatgccagtggcctctgaggactactgatgtaggtgtacatgtattgtatccctaccgtttgtattttcactgtgtatcgtatgggtgtaccgtgtatctaggagactaggaccgagcttggcatctgctttagaggcacgtcatagactttttggatattcccaagaacccttactactagatcaaaataaacacagacatgaatcgatttctgcgcatccacaactgaggcacacacacctgagcaccgccatggccacctcaggagtgtgaagatccgtggtttcagctctgcgaaaagcttaacatgttatattcttaagaatgcagtgtcactggaatttcttacactggacacctcttagaatatgtttattggggtgaatactagagtatctaaacaagcacttataagaatcagtttagtcaaagtttgtacaaggtgtttccccagagctttggaaaggagtcgaagcctacgatgttttcaagatacagaaattcaaccttcgagtcgtgtatttgtggtcggtgcatgatttcatggcgtatgatattttttcggttggag

SEQ ID NO: 24512 - DNA, 1355 bp, Zea Mays
atcagctgttccttactgggccgctcggcccgtattccctgctcgttcagtcgtcctcttcctccaaacctttccgctgccggtgaacttcctccacctgaagcccctaccacgataagccctaatcccagcgccacctcgatggcgaccacctctttctttcatccgctcgccgccccgatggaccgcggtagcgtttgttttcgtcgctgcccgttcagcctaaccatccccgcccgtacagcgccccggcgaccggcgccgcttctcgtcgtccgcgctaagcgcgccggcagccagccccctgctgccgccgcctcgcgtcagcccgcgaatcccagcgcggtcccgaagcgggacgtggaagaagaggaggaggaggtcgaggaggagatgccctggatccaggacaaggcgctggacctcgtggagttcactggcaccgtcacacaggccatcccagggccccgtgttggctctagccctgttccatggcttctcgcggttcccctcgcctacgtcggggtctcctttgtgctcgcggtcgtccgcaccgtgcgcaagttcacctcgccgcacactaagaagaagcgaagggtgagtaagaatatattcttgttgaagtcactagatgatctgtttcagaagggcagggaggcaataaattatcctgctcttcaggacctaatgcaaaaggaaggcatcaatgctggaagatgcagaagttgctgaaattttaaatgagatttcaagacgaattgtccgggaaaaagggccagtagttatggacttatctggttttacagagcaaggttttaagcggaagcttgctgtacaagcactgtttggaaaaatcctatacttatcagaacttccggagttctgttcacgggacagctcacttgtagtcaaagaaatctttggagttacagatgaggatgcagacagcctgcggattcacaccctatcagcaacaggtgatatcgaatctatacagaagatggtggacgatctagacctagaacaaggtcccccatcatcgtcttgagttatggtggtggaataatgctaaacatcttcgttgatagtgttgcaattttagattgatgtgagtttctcgaatcttttcgtttagttttttcagctgctgaagtaggacttgggcctgtgaacacaggatactttcggctggagcctggaggttttgtaaattgcctctcgattaggataacgtatgtcagacctgcccatgatttgagtaaacgagaatactattattatagaaaagcgcacggcagcagtgagtttatagaacgcgggacacgtatcaccatacgcttttgcttaaacaaaaa

SEQ ID NO: 24513 - DNA, 4611 bp, Zea Mays
caccgcgaacgtctacaggataagaccagtcgcctctcgctccgttccgctcgcttgtgttgtccttgtccgttgtgcgtgctttgtgctgcgcgcgcgtgcagcaccgcggagacggccgggagcagggggggcgggagggatagtggcggcctctgctgctgctggtcgaggcttcgattccgggcgggggctggtggtctcgagaatcccggagggaagggagcgagcgcaaagatagatacctaagcgggccgcttccgctgcacagccacaggcatggggtgcggggcgtcgagccacaaggacgccggggcgcgccggagacggcctgggagcgtcggcgacgtggtcgttttcctcccgggcctccgggtgccgagggccgtcgacttcgcccaggcgctcggcggctgcctggccagggctatagtcgagcggctgtcggctctgaggtcgcgggtcgtcgagatggcaatgcaagaatcggcggcggcgctcaagcccaggcggaaggcggctgcacggcacggtgtgtgtaggccactggagaagggggcggtgtgggtctagtacagccaatcttctacaggccctcgaagactacttgccagttctgctgggactagcacaacaaggtagcgtcttgagacacaaagtgcagttcacctggagtaaccaagaggataatgctgaggagacagccatttcagatgtctggtacgaggtgctgtccgtgctgcacttgatggccatggtctgcttgctgcaggccaacaccctgcttctcccaaggtcatacggcgatggctacgccccaagagtttctgaagagagtagacgggccactgttgatgtcttcttgaaggcagctggatacctagactgcgcaattcgtcatgtacttccgaagatgccactggaactaaggagacaacttccagtcgacctggctgaaggaaatctcaaagctctaagcctgcaagcctttgggtcagggggttgacatgcagctcggcttggctattgatagtccaaaggccactttagcagtcaaaaggcgcttagcctgtgagatggtcaaatattggcaacaagttcaagagagcattccagagcttccagtctctgatggatggggaaaaaagcaccggctatttgtaaagtggaagtatgttgaagccaaggtatataagctatgccactattatcattctctttaataagctgtaaattcttgtctaaataaaacaggctaaattttctccagatgatgtaattctctaatgtttaatcttttaagcatttctactgcatggcatctattttacatgtttatctcaggctgcagcatactatttccacggtttgattcttgacgagggaaataccgagaaatcccatggaatggcaatagctgcactacaagcttcagaagaatttctgaaagaaagcaaaatggtttcggaagccttccatgcaactcctccaacatcgaggagtccgaatgcattcggaacagcaaaatatctgtttgacaagatcccaagagatgcttccagcaaggtccgaatcaaacaggacctgtatactcaagaaaaggtcattggagcaccacccccattaccagattttgcattggcgctaacacctgaagattatgatcttcctccactagatccactttggaacaaagaagatacacaccattaagtgtctatacagcagattggttgcttctggcaaaaaattggctctggagagaaaggaggaccaagatctaccatgtcaaaggtcgaacatggtaacaaatgaagtgtacaaaatattttcaaacaaaattacatgtcaacaaaattaagcaaggcttgaagataatctgaagagctctgtacaggcaattttcttctgacaagggaaatgatatgtcaaagggttcattgatcattgtcgatcctgattcctgatgcttttattttttcaacaacagattttcagcattcgaaatggaactggaatcagcctctgatcgaagtggaaacctttttttagtcgtaaacatttacattggcaccttaaaatatactctggaacaatcagtctcagctgaacagtttataatacatgaactagctaaagtacagacatgcccaaaccttaggcaccacagtacattctgaatgacttttggcagtatcaaatgtacgtgaagccagtaagccaccgccgccacccctgcgaagcctgcagcaacactagaggcaaaaggggatatagggcctgcttcttctagattactcaaaactggcaaaagattaggataaactaaaaaaatgttacttcacaaagttaccgtgctgtccctatcattacttcaaatcaatttcgctagcatcattccatacctaggttcagggctcatattaactgccttccaggtgaacatcgctgtgcgtaggaattgccaaatagaaaaaaaaaacatagcaccaaatacagtctcgagctatctgatctgagccctctccaaagagcaccccatccttcaagcaatatcactctagaaggtagatgcacatcagacggcaatgggggtttcccagagccagtaagcatccatgggtgctgtttcagagcacccaacatgtcgggatgcttggagaaagatcagataaaaggcccgccgtgttgttccacaccgttatatcaagaacatacccagcaacagttgaaaaccactggaaatgatccttaacaacatttgcagggcccatagcttttgaaggaatcacaaaactaactagctttcgaagtttgaaaagttcaaatggtgtgcagaaaacagtctctacagcaccagcaactatgccagccaacatagcctcagaataatagacatagttgtcctcccttccatctgccaagacatctgttaacagttcataggtcacaaaatgtgctcccaacccaggaagtttacccattatggaccatccaatgccactgtaaaaacctaaaaggccagaagcggcctgagccggtccaccaactgccggagcccagctgcagatgcaaggaaacaccgcgcagataccaaaattagaccttgagaaagcaacagtacagcaacacaaggaggtgaggtgggtgagtgcgctcgcctggaagctggaggagtgcttaaccgtgtcgagggggtgcacggcgacggcggaggcgctgatcgctgccgcaccgaaagccgcgtggcccgcgtgacgctgtcctccatcggtttgccgcctcccacggtcccaccatctcggcggcctgcaaggcaggaactggaacacacgctccccgagaaatagcgaaaagcggcgagcgacgtttaggggaagacaagaagagagaagccgcgggagaatttggggcccattgagaaacctgcccacctcgggtattggtgttcggcccacagagttccgtggccaagcgaagatcggatggctggcacctggcactggcaggcaggctgggagccggggacgcgccggaccgccggtgctagtcgaactcgggtcgaagtttccttccgaggttggtcgctgcctcgactccagcgttgagccaactccgccgccctgtcgttttcgcctctccctagcatttaccggaagaaacgagcgtgaccgccgccttctcccgctcccgctcccgctctgcatctctccatgggccagatcgagagccaggtcactcctccagcggaggagccttctccacccaccgtggagccgtcgccgtcgtctcctgccccgcctccgtcttcccttgaggcgattgctgcagaagccatgtcatttgatgaggatgacactgaggagtcaatcgatgtgaaggtacagaaagctctggactgtccatgtgttgctgatttgaaaaatggtccttgtggaggtcaattcgtcgatgcattttcctgctttctcaggagcagagaagaagagaagggatcagattgcgtgaaacccttcatcacattgcaggactgcatcaaagcaaatccagaggcattctctaaggagattctggaggaagaggaaaatgatgaggaggcagataagtccaacctgaaagttagagctccatcatggtccagagaatccaaacctaaggtttgagattgcttggtattaactgatagtgatattcatccagtgtgcagactcaccttattcaactataagggcttgttcgctttcctctcaatccatgtgatctcaatccatgtggattgggtgggattggatgagtttaaatcctgaacaagtcaaaatccttcatattttttctaatctcatccaatccacatgggacaggaataaccgaacaagccctaagtttgccagtagtagactgatttcagagagcgaggtatcataaattgattaacagaaatacccatattttgtgtataagaaatgcttcatggtatccacaattttagaatgtacatgtcatttcaagtatcaatcgagaactgatgaacttgtaattcgattcctagatacagggcatatttgatcaccactgtattattatactatgaaatatacatatgattatcat

SEQ ID NO: 24514 - DNA, 4591 bp, Zea Mays
ctagcgccaggcactcgcgcccagcgttttctttacggcacaacttgcggccgatttccaaacacacacacacgcaaacgtcttttctgggcgaaaagtatgccggttggccgtacattacgccaagttgcgctacggttccgatgctgattactggtcctggtcccccaccaccgcgaacgtctacaggataagaccagtcgcctctcgctccgttccgctcgcttgtgttgtccttgtccgttgtgcgtgctttgtgctgcgcgcgcgtgcagcaccgcggagacggccgggagcagggggggcgggagggatagtggcggcctctgctgctgctggtcgaggcttcgattccgggcgggggctggtggtctcgagaatcccggagggaagggagcgagcgcaaagatagatacctaagcgggccgcttccgctgcacagccacaggcatggggtgcggggcgtcgagccacaaggacgccggggcgcgccggagacggcctgggagcgtcggcgacgtggtcgttttcctcccgggcctccgggtgccgagggccgtcgacttcgcccaggcgctcggcggctgcctggccagggctatagtcgagcggctgtcggctctgaggtcgcgggtcgtcgagatggcaatgcaagaatcggcggcggcgctcaagcccaggcggaaggcggctgcacggcacgggtctagtacagccaatcttctacaggccctcgaagactacttgccagttctgctgggactagcacaacaaggtagcgtcttgagacacaaagtgcagttcacctggagtaaccaagaggataatgctgaggagacagccatttcagatgtctggtacgaggtgctgtccgtgctgcacttgatggccatggtctgcttgctgcaggccaacaccctgcttctcccaaggtcatacggcgatggctacgccccaagagtttctgaagagagtagacgggccactgttgatgtcttcttgaaggcagctggatacctagactgcgcaattcgtcatgtacttccgaagatgccactggaactaaggagacaacttccagtcgacctggctgaaggaaatctcaaagctctaagcctgcaagcctttgggtcagggggttgacatgcagctcggcttggctattgatagtccaaaggccactttagcagtcaaaaggcgcttagcctgtgagatggtcaaatattggcaacaagttcaagagagcattccagagcttccagtctctgatggatggggaaaaaagcaccggctatttgtaaagtggaagtatgttgaagccaaggctgcagcatactatttccacggtttgattcttgacgagggaaataccgagaaatcccatggaatggcaatagctgcactacaagcttcagaagaatttctgaaagaaagcaaaatggtttcggaagccttccatgcaactcctccaacatcgaggagtccgaatgcattcggaacagcaaaatatctgtttgacaagatcccaagagatgcttccagcaaggtccgaatcaaacaggacctgtatactcaagaaaaggtcattggagcaccacccccattaccagattttgcattggcgctaacacctgaagattatgatcttcctccactagatccactttggaacaaagaagatacacaccattaagtgtctatacagcagattggttgcttctggcaaaaaattggctctggagagaaaggaggaccaagatctaccatgtcaaaggtcgaacatggtaacaaatgaagtgtacaaaatattttcaaacaaaattacatgtcaacaaaattaagcaaggcttgaagataatctgaagagctctgtacaggcaattttcttctgacaagggaaatgatatgtcaaagggttcattgatcattgtcgatcctgattcctgatgcttttattttttcaacaacagattttcagcattcgaaatggaactggaatcagcctctgatcgaagtggaaacctttttttagtcgtaaacatttacattggcaccttaaaatatactctggaacaatcagtctcagctgaacagtttataatacatgaactagctaaagtacagacatgcccaaaccttaggcaccacagtacattctgaatgacttttggcagtatcaaatgtacgtgaagccagtaagccaccgccgccacccctgcgaagcctgcagcaacactagaggcaaaaggggatatagggcctgcttcttctagattactcaaaactggcaaaagattaggataaactaaaaaaatgttacttcacaaagttaccgtgctgtccctatcattacttcaaatcaatttcgctagcatcattccatacctaggttcagggctcatattaactgccttccaggtgaacatcgctgtgcgtaggaattgccaaatagaaaaaaaaaacatagcaccaaatacagtctcgagctatctgatctgagccctctccaaagagcaccccatccttcaagcaatatcactctagaaggtagatgcacatcagacggcaatgggggtttcccagagccagtaagcatccatgggtgctgtttcagagcacccaacatgtcgggatgcttggagaaagatcagataaaaggcccgccgtgttgttccacaccgttatatcaagaacatacccagcaacagttgaaaaccactggaaatgatccttaacaacatttgcagggcccatagcttttgaaggaatcacaaaactaactagctttcgaagtttgaaaagttcaaatggtgtgcagaaaacagtctctacagcaccagcaactatgccagccaacatagcctcagaataatagacatagttgtcctcccttccatctgccaagacatctgttaacagttcataggtcacaaaatgtgctcccaacccaggaagtttacccattatggaccatccaatgccactgtaaaaacctaaaaggccagaagcggcctgagccggtccaccaactgccggagcccagctgcagatgcaaggaaacaccgcgcagataccaaaattagaccttgagaaagcaacagtacagcaacacaaggaggtgaggtgggtgagtgcgctcgcctggaagctggaggagtgcttaaccgtgtcgagggggtgcacggcgacggcggaggcgctgatcgctgccgcaccgaaagccgcgtggcccgcgtgacgctgtcctccatcggtttgccgcctcccacggtcccaccatctcggcggcctgcaaggcaggaactggaacacacgctccccgagaaatagcgaaaagcggcgagcgacgtttaggggaagacaagaagagagaagccgcgggagaatttggggcccattgagaaacctgcccacctcgggtattggtgttcggcccacagagttccgtggccaagcgaagatcggatggctggcacctggcactggcaggcaggctgggagccggggacgcgccggaccgccggtgctagtcgaactcgggtcgaagtttccttccgaggttggtcgctgcctcgactccagcgttgagccaactccgccgccctgtcgttttcgcctctccctagcatttaccggaagaaacgagcgtgaccgccgccttctcccgctcccgctcccgctctgcatctctccatgggccagatcgagagccaggtcactcctccagcggaggagccttctccacccaccgtggagccgtcgccgtcgtctcctgccccgcctccgtcttcccttgaggcgattgctgcagaagccatgtcatttgatgaggatgacactgaggagtcaatcgatgtgaaggtacagaaagctctggactgtccatgtgttgctgatttgaaaaatggtccttgtggaggtcaattcgtcgatgcattttcctgctttctcaggagcagagaagaagagaagggatcagattgcgtgaaacccttcatcacattgcaggactgcatcaaagcaaatccagaggcattctctaaggagattctggaggaagaggaaaatgatgaggaggcagataagtccaacctgaaagttagagctccatcatggtccagagaatccaaacctaaggtttgagattgcttggtattaactgatagtgatattcatccagtgtgcagactcaccttattcaactataagggcttgttcgctttcctctcaatccatgtgatctcaatccatgtggattgggtgggattggatgagtttaaatcctgaacaagtcaaaatccttcatattttttctaatctcatccaatccacatgggacaggaataaccgaacaagccctaagtttgccagtagtagactgatttcagagagcgaggtatcataaattgattaacagaaatacccatattttgtgtataagaaatgcttcatggtatccacaattttagaatgtacatgtcatttcaagtatcaatcgagaactgatgaacttgtaattcgattcctagatacagggcatatttgatcaccactgtattattatactatgaaatatacatatgattatcat

SEQ ID NO: 24515 - DNA, 4668 bp, Zea Mays
aaccctgtaggcctctcccttcttctgctctccctcccttctcaaggcttcctcctgcagtccagctcaccaggaccaggaggaacaaagaagttgcatcgaacacagctgagttcctccctcttccctgaaatgcgcccggcagctagaaaggagcagctagcgggcgggctgcccatacgtcgttgagatagatacctaagcgggccgcttccgctgcacagccacaggcatggggtgcggggcgtcgagccacaaggacgccggggcgcgccggagacggcctgggagcgtcggcgacgtggtcgttttcctcccgggcctccgggtgccgagggccgtcgacttcgcccaggcgctcggcggctgcctggccagggctatagtcgagcggctgtcggctctgaggtcgcgggtcgtcgagatggcaatgcaagaatcggcggcggcgctcaagcccaggcggaaggcggctgcacggcacgggtctagtacagccaatcttctacaggccctcgaagactacttgccagttctgctgggactagcacaacaaggtagcgtcttgagacacaaagtgcagttcacctggagtaaccaagaggataatgctgaggagacagccatttcagatgtctggtacgaggtgctgtccgtgctgcacttgatggccatggtctgcttgctgcaggccaacaccctgcttctcccaaggtcatacggcgatggctacgccccaagagtttctgaagagagtagacgggccactgttgatgtcttcttgaaggcagctggatacctagactgcgcaattcgtcatgtacttccgaagatgccactggaactaaggagacaacttccagtcgacctggctgaaggaaatctcaaagctctaagcctgcaagcctttgggtcagggggttgacatgcagctcggcttggctattgatagtccaaaggccactttagcagtcaaaaggcgcttagcctgtgagatggtcaaatattggcaacaagttcaagagagcattccagagcttccagtctctgatggatggggaaaaaagcaccggctatttgtaaagtggaagtatgttgaagccaagcatactatttccacggtttgattcttgacgagggaaataccgagaaatcccatggaatggcaatagctgcactacaagcttcagaagaatttctgaaagaaagcaaaatggtttcggaagccttccatgcaactcctccaacatcgaggagtccgaatgcattcggaacagcaaaatatctgtttgacaagatcccaagagatgcttccagcaaggtccgaatcaaacaggacctgtatactcaagaaaaggtcattggagcaccacccccattaccagattttgcattggcgctaacacctgaagattatgatcttcctccactagatccactttggaacaaagaagatacacaccattaagtgtctatacagcagattggttgcttctggcaaaaaattggctctggagagaaaggaggaccaagatctaccatgtcaaaggtcgaacatggtaacaaatgaagtgtacaaaatattttcaaacaaaattacatgtcaacaaaattaagcaaggcttgaagataatctgaagagctctgtacaggcaattttcttctgacaagggaaatgatatgtcaaagggttcattgatcattgtcgatcctgattcctgatgcttttattttttcaacaacagattttcagcattcgaaatggaactggaatcagcctctgatcgaagtggaaacctttttttagtcgtaaacatttacattggcaccttaaaatatactctggaacaatcagtctcagctgaacagtttataatacatgaactagctaaagtacagacatgcccaaaccttaggcaccacagtacattctgaatgacttttggcagtatcaaatgtacgtgaagccagtaagccaccgccgccacccctgcgaagcctgcagcaacactagaggcaaaaggggatatagggcctgcttcttctagattactcaaaactggcaaaagattaggataaactaaaaaaatgttacttcacaaagttaccgtgctgtccctatcattacttcaaatcaatttcgctagcatcattccatacctaggttcagggctcatattaactgccttccaggtgaacatcgctgtgcgtaggaattgccaaatagaaaaaaaaaacatagcaccaaatacagtctcgagctatctgatctgagccctctccaaagagcaccccatccttcaagcaatatcactctagaaggtagatgcacatcagacggcaatgggggtttcccagagccagtaagcatccatgggtgctgtttcagagcacccaacatgtcgggatgcttggagaaagatcagataaaaggcccgccgtgttgttccacaccgttatatcaagaacatacccagcaacagttgaaaaccactggaaatgatccttaacaacatttgcagggcccatagcttttgaaggaatcacaaaactaactagctttcgaagtttgaaaagttcaaatggtgtgcagaaaacagtctctacagcaccagcaactatgccagccaacatagcctcagaataatagacatagttgtcctcccttccatctgccaagacatctgttaacagttcataggtcacaaaatgtgctcccaacccaggaagtttacccattatggaccatccaatgccactgtaaaaacctaaaagtcatacaatgatttagaatatgataatttcatatgtgaagtaacacataactaaatccgaagccattaggcatgattgcatgaactagaaagttttatacaaaaatcaggatttatatgcttttctactgctgccttctcccgcttcggcctctccctaccgcttccgatccaatgaagcttcactagagcctttcctaatttaaaatatacacaatataacgtagcgctgcgacagtttagttcagtccctcctaatttttttccggcctacgtccctgagcaaccgaccaaacctacagggccagaagcggcctgagccggtccaccaactgccggagcccagctgcagatgcaaggaaacaccgcgcagataccaaaattagaccttgagaaagcaacagtacagcaacacaaggaggtgaggtgggtgagtgcgctcgcctggaagctggaggagtgcttaaccgtgtcgagggggtgcacggcgacggcggaggcgctgatcgctgccgcaccgaaagccgcgtggcccgcgtgacgctgtcctccatcggtttgccgcctcccacggtcccaccatctcggcggcctgcaaggcaggaactggaacacacgctccccgagaaatagcgaaaagcggcgagcgacgtttaggggaagacaagaagagagaagccgcgggagaatttggggcccattgagaaacctgcccacctcgggtattggtgttcggcccacagagttccgtggccaagcgaagatcggatggctggcacctggcactggcaggcaggctgggagccggggacgcgccggaccgccggtgctagtcgaactcgggtcgaagtttccttccgaggttggtcgctgcctcgactccagcgttgagccaactccgccgccctgtcgttttcgcctctccctagcatttaccggaagaaacgagcgtgaccgccgccttctcccgctcccgctcccgctctgcatctctccatgggccagatcgagagccaggtcactcctccagcggaggagccttctccacccaccgtggagccgtcgccgtcgtctcctgccccgcctccgtcttcccttgaggcgattgctgcagaagccatgtcatttgatgaggatgacactgaggagtcaatcgatgtgaaggtacagaaagctctggactgtccatgtgttgctgatttgaaaaatggtccttgtggaggtcaattcgtcgatgcattttcctgctttctcaggagcagagaagaagagaagggatcagattgcgtgaaacccttcatcacattgcaggactgcatcaaagcaaatccagaggcattctctaaggagattctggaggaagaggaaaatgatgaggaggcagataagtccaacctgaaagttagagctccatcatggtccagagaatccaaacctaaggtttgagattgcttggtattaactgatagtgatattcatccagtgtgcagactcaccttattcaactataagggcttgttcgctttcctctcaatccatgtgatctcaatccatgtggattgggtgggattggatgagtttaaatcctgaacaagtcaaaatccttcatattttttctaatctcatccaatccacatgggacaggaataaccgaacaagccctaagtttgccagtagtagactgatttcagagagcgaggtatcataaattgattaacagaaatacccatattttgtgtataagaaatgcttcatggtatccacaattttagaatgtacatgtcatttcaagtatcaatcgagaactgatgaacttgtaattcgattcctagatacagggcatatttgatcaccactgtattattatactatgaaatatacatatgattatcat

SEQ ID NO: 24516 - DNA, 4369 bp, Zea Mays
aaccctgtaggcctctcccttcttctgctctccctcccttctcaaggcttcctcctgcagtccagctcaccaggaccaggaggaacaaagaagttgcatcgaacacagctgagttcctccctcttccctgaaatgcgcccggcagctagaaaggagcagctagcgggcgggctgcccatacgtcgttgagatacctaagcgggccgcttccgctgcacagccacaggcatggggtgcggggcgtcgagccacaaggacgccggggcgcgccggagacggcctgggagcgtcggcgacgtggtcgttttcctcccgggcctccgggtgccgagggccgtcgacttcgcccaggcgctcggcggctgcctggccagggctatagtcgagcggctgtcggctctgaggtcgcgggtcgtcgagatggcaatgcaagaatcggcggcggcgctcaagcccaggcggaaggcggctgcacggcacgggtctagtacagccaatcttctacaggccctcgaagactacttgccagttctgctgggactagcacaacaaggtagcgtcttgagacacaaagtgcagttcacctggagtaaccaagaggataatgctgaggagacagccatttcagatgtctggtacgaggtgctgtccgtgctgcacttgatggccatggtctgcttgctgcaggccaacaccctgcttctcccaaggtcatacggcgatggctacgccccaagagtttctgaagagagtagacgggccactgttgatgtcttcttgaaggcagctggatacctagactgcgcaattcgtcatgtacttccgaagatgccactggaactaaggagacaacttccagtcgacctggctgaaggaaatctcaaagctctaagcctgcaagcctttgggtcagggggttgacatgcagctcggcttggctattgatagtccaaaggccactttagcagtcaaaaggcgcttagcctgtgagatggtcaaatattggcaacaagttcaagagagcattccagagcttccagtctctgatggatggggaaaaaagcaccggctatttgtaaagtggaagtatgttgaagccaaggctgcagcatactatttccacggtttgattcttgacgagggaaataccgagaaatcccatggaatggcaatagctgcactacaagcttcagaagaatttctgaaagaaagcaaaatggtttcggaagccttccatgcaactcctccaacatcgaggagtccgaatgcattcggaacagcaaaatatctgtttgacaagatcccaagagatgcttccagcaaggtccgaatcaaacaggacctgtatactcaagaaaaggtcattggagcaccacccccattaccagattttgcattggcgctaacacctgaagattatgatcttcctccactagatccactttggaacaaagaagatacacaccattaagtgtctatacagcagattggttgcttctggcaaaaaattggctctggagagaaaggaggaccaagatctaccatgtcaaaggtcgaacatggtaacaaatgaagtgtacaaaatattttcaaacaaaattacatgtcaacaaaattaagcaaggcttgaagataatctgaagagctctgtacaggcaattttcttctgacaagggaaatgatatgtcaaagggttcattgatcattgtcgatcctgattcctgatgcttttattttttcaacaacagattttcagcattcgaaatggaactggaatcagcctctgatcgaagtggaaacctttttttagtcgtaaacatttacattggcaccttaaaatatactctggaacaatcagtctcagctgaacagtttataatacatgaactagctaaagtacagacatgcccaaaccttaggcaccacagtacattctgaatgacttttggcagtatcaaatgtacgtgaagccagtaagccaccgccgccacccctgcgaagcctgcagcaacactagaggcaaaaggggatatagggcctgcttcttctagattactcaaaactggcaaaagattaggataaactaaaaaaatgttacttcacaaagttaccgtgctgtccctatcattacttcaaatcaatttcgctagcatcattccatacctaggttcagggctcatattaactgccttccaggtgaacatcgctgtgcgtaggaattgccaaatagaaaaaaaaaacatagcaccaaatacagtctcgagctatctgatctgagccctctccaaagagcaccccatccttcaagcaatatcactctagaaggtagatgcacatcagacggcaatgggggtttcccagagccagtaagcatccatgggtgctgtttcagagcacccaacatgtcgggatgcttggagaaagatcagataaaaggcccgccgtgttgttccacaccgttatatcaagaacatacccagcaacagttgaaaaccactggaaatgatccttaacaacatttgcagggcccatagcttttgaaggaatcacaaaactaactagctttcgaagtttgaaaagttcaaatggtgtgcagaaaacagtctctacagcaccagcaactatgccagccaacatagcctcagaataatagacatagttgtcctcccttccatctgccaagacatctgttaacagttcataggtcacaaaatgtgctcccaacccaggaagtttacccattatggaccatccaatgccactgtaaaaacctaaaaggccagaagcggcctgagccggtccaccaactgccggagcccagctgcagatgcaaggaaacaccgcgcagataccaaaattagaccttgagaaagcaacagtacagcaacacaaggaggtgaggtgggtgagtgcgctcgcctggaagctggaggagtgcttaaccgtgtcgagggggtgcacggcgacggcggaggcgctgatcgctgccgcaccgaaagccgcgtggcccgcgtgacgctgtcctccatcggtttgccgcctcccacggtcccaccatctcggcggcctgcaaggcaggaactggaacacacgctccccgagaaatagcgaaaagcggcgagcgacgtttaggggaagacaagaagagagaagccgcgggagaatttggggcccattgagaaacctgcccacctcgggtattggtgttcggcccacagagttccgtggccaagcgaagatcggatggctggcacctggcactggcaggcaggctgggagccggggacgcgccggaccgccggtgctagtcgaactcgggtcgaagtttccttccgaggttggtcgctgcctcgactccagcgttgagccaactccgccgccctgtcgttttcgcctctccctagcatttaccggaagaaacgagcgtgaccgccgccttctcccgctcccgctcccgctctgcatctctccatgggccagatcgagagccaggtcactcctccagcggaggagccttctccacccaccgtggagccgtcgccgtcgtctcctgccccgcctccgtcttcccttgaggcgattgctgcagaagccatgtcatttgatgaggatgacactgaggagtcaatcgatgtgaaggtacagaaagctctggactgtccatgtgttgctgatttgaaaaatggtccttgtggaggtcaattcgtcgatgcattttcctgctttctcaggagcagagaagaagagaagggatcagattgcgtgaaacccttcatcacattgcaggactgcatcaaagcaaatccagaggcattctctaaggagattctggaggaagaggaaaatgatgaggaggcagataagtccaacctgaaagttagagctccatcatggtccagagaatccaaacctaaggtttgagattgcttggtattaactgatagtgatattcatccagtgtgcagactcaccttattcaactataagggcttgttcgctttcctctcaatccatgtgatctcaatccatgtggattgggtgggattggatgagtttaaatcctgaacaagtcaaaatccttcatattttttctaatctcatccaatccacatgggacaggaataaccgaacaagccctaagtttgccagtagtagactgatttcagagagcgaggtatcataaattgattaacagaaatacccatattttgtgtataagaaatgcttcatggtatccacaattttagaatgtacatgtcatttcaagtatcaatcgagaactgatgaacttgtaattcgattcctagatacagggcatatttgatcaccactgtattattatactatgaaatatacatatgattatcat

SEQ ID NO: 24517 - DNA, 4366 bp, Zea Mays
aaccctgtaggcctctcccttcttctgctctccctcccttctcaaggcttcctcctgcagtccagctcaccaggaccaggaggaacaaagaagttgcatcgaacacagctgagttcctccctcttccctgaaatgcgcccggcagctagaaaggagcagctagcgggcgggctgcccatacgtcgttgagatagatacctaagcgggccgcttccgctgcacagccacaggcatggggtgcggggcgtcgagccacaaggacgccggggcgcgccggagacggcctgggagcgtcggcgacgtggtcgttttcctcccgggcctccgggtgccgagggccgtcgacttcgcccaggcgctcggcggctgcctggccagggctatagtcgagcggctgtcggctctgaggtcgcgggtcgtcgagatggcaatgcaagaatcggcggcggcgctcaagcccaggcggaaggcggctgcacggcacgggtctagtacagccaatcttctacaggccctcgaagactacttgccagttctgctgggactagcacaacaaggtagcgtcttgagacacaaagtgcagttcacctggagtaaccaagaggataatgctgaggagacagccatttcagatgtctggtacgaggtgctgtccgtgctgcacttgatggccatggtctgcttgctgcaggccaacaccctgcttctcccaaggtcatacggcgatggctacgccccaagagtttctgaagagagtagacgggccactgttgatgtcttcttgaaggcagctggatacctagactgcgcaattcgtcatgtacttccgaagatgccactggaactaaggagacaacttccagtcgacctggctgaaggaaatctcaaagctctaagcctgcaagcctttgggtcagggggttgacatgcagctcggcttggctattgatagtccaaaggccactttagcagtcaaaaggcgcttagcctgtgagatggtcaaatattggcaacaagttcaagagagcattccagagcttccagtctctgatggatggggaaaaaagcaccggctatttgtaaagtggaagtatgttgaagccaagcatactatttccacggtttgattcttgacgagggaaataccgagaaatcccatggaatggcaatagctgcactacaagcttcagaagaatttctgaaagaaagcaaaatggtttcggaagccttccatgcaactcctccaacatcgaggagtccgaatgcattcggaacagcaaaatatctgtttgacaagatcccaagagatgcttccagcaaggtccgaatcaaacaggacctgtatactcaagaaaaggtcattggagcaccacccccattaccagattttgcattggcgctaacacctgaagattatgatcttcctccactagatccactttggaacaaagaagatacacaccattaagtgtctatacagcagattggttgcttctggcaaaaaattggctctggagagaaaggaggaccaagatctaccatgtcaaaggtcgaacatggtaacaaatgaagtgtacaaaatattttcaaacaaaattacatgtcaacaaaattaagcaaggcttgaagataatctgaagagctctgtacaggcaattttcttctgacaagggaaatgatatgtcaaagggttcattgatcattgtcgatcctgattcctgatgcttttattttttcaacaacagattttcagcattcgaaatggaactggaatcagcctctgatcgaagtggaaacctttttttagtcgtaaacatttacattggcaccttaaaatatactctggaacaatcagtctcagctgaacagtttataatacatgaactagctaaagtacagacatgcccaaaccttaggcaccacagtacattctgaatgacttttggcagtatcaaatgtacgtgaagccagtaagccaccgccgccacccctgcgaagcctgcagcaacactagaggcaaaaggggatatagggcctgcttcttctagattactcaaaactggcaaaagattaggataaactaaaaaaatgttacttcacaaagttaccgtgctgtccctatcattacttcaaatcaatttcgctagcatcattccatacctaggttcagggctcatattaactgccttccaggtgaacatcgctgtgcgtaggaattgccaaatagaaaaaaaaaacatagcaccaaatacagtctcgagctatctgatctgagccctctccaaagagcaccccatccttcaagcaatatcactctagaaggtagatgcacatcagacggcaatgggggtttcccagagccagtaagcatccatgggtgctgtttcagagcacccaacatgtcgggatgcttggagaaagatcagataaaaggcccgccgtgttgttccacaccgttatatcaagaacatacccagcaacagttgaaaaccactggaaatgatccttaacaacatttgcagggcccatagcttttgaaggaatcacaaaactaactagctttcgaagtttgaaaagttcaaatggtgtgcagaaaacagtctctacagcaccagcaactatgccagccaacatagcctcagaataatagacatagttgtcctcccttccatctgccaagacatctgttaacagttcataggtcacaaaatgtgctcccaacccaggaagtttacccattatggaccatccaatgccactgtaaaaacctaaaaggccagaagcggcctgagccggtccaccaactgccggagcccagctgcagatgcaaggaaacaccgcgcagataccaaaattagaccttgagaaagcaacagtacagcaacacaaggaggtgaggtgggtgagtgcgctcgcctggaagctggaggagtgcttaaccgtgtcgagggggtgcacggcgacggcggaggcgctgatcgctgccgcaccgaaagccgcgtggcccgcgtgacgctgtcctccatcggtttgccgcctcccacggtcccaccatctcggcggcctgcaaggcaggaactggaacacacgctccccgagaaatagcgaaaagcggcgagcgacgtttaggggaagacaagaagagagaagccgcgggagaatttggggcccattgagaaacctgcccacctcgggtattggtgttcggcccacagagttccgtggccaagcgaagatcggatggctggcacctggcactggcaggcaggctgggagccggggacgcgccggaccgccggtgctagtcgaactcgggtcgaagtttccttccgaggttggtcgctgcctcgactccagcgttgagccaactccgccgccctgtcgttttcgcctctccctagcatttaccggaagaaacgagcgtgaccgccgccttctcccgctcccgctcccgctctgcatctctccatgggccagatcgagagccaggtcactcctccagcggaggagccttctccacccaccgtggagccgtcgccgtcgtctcctgccccgcctccgtcttcccttgaggcgattgctgcagaagccatgtcatttgatgaggatgacactgaggagtcaatcgatgtgaaggtacagaaagctctggactgtccatgtgttgctgatttgaaaaatggtccttgtggaggtcaattcgtcgatgcattttcctgctttctcaggagcagagaagaagagaagggatcagattgcgtgaaacccttcatcacattgcaggactgcatcaaagcaaatccagaggcattctctaaggagattctggaggaagaggaaaatgatgaggaggcagataagtccaacctgaaagttagagctccatcatggtccagagaatccaaacctaaggtttgagattgcttggtattaactgatagtgatattcatccagtgtgcagactcaccttattcaactataagggcttgttcgctttcctctcaatccatgtgatctcaatccatgtggattgggtgggattggatgagtttaaatcctgaacaagtcaaaatccttcatattttttctaatctcatccaatccacatgggacaggaataaccgaacaagccctaagtttgccagtagtagactgatttcagagagcgaggtatcataaattgattaacagaaatacccatattttgtgtataagaaatgcttcatggtatccacaattttagaatgtacatgtcatttcaagtatcaatcgagaactgatgaacttgtaattcgattcctagatacagggcatatttgatcaccactgtattattatactatgaaatatacatatgattatcat

SEQ ID NO: 24518 - DNA, 4585 bp, Zea Mays
aaccctgtaggcctctcccttcttctgctctccctcccttctcaaggcttcctcctgcagtccagctcaccaggaccaggaggaacaaagaagttgcatcgaacacagctgagttcctccctcttccctgaaatgcgcccggcagctagaaaggagcagctagcgggcgggctgcccatacgtcgttgagatagatacctaagcgggccgcttccgctgcacagccacaggcatggggtgcggggcgtcgagccacaaggacgccggggcgcgccggagacggcctgggagcgtcggcgacgtggtcgttttcctcccgggcctccgggtgccgagggccgtcgacttcgcccaggcgctcggcggctgcctggccagggctatagtcgagcggctgtcggctctgaggtcgcgggtcgtcgagatggcaatgcaagaatcggcggcggcgctcaagcccaggcggaaggcggctgcacggcacggtgtgtgtaggccactggagaagggggcggtgtggtacagcgcctggatggattgggtctagtacagccaatcttctacaggccctcgaagactacttgccagttctgctgggactagcacaacaaggtagcgtcttgagacacaaagtgcagttcacctggagtaaccaagaggataatgctgaggagacagccatttcagatgtctggtacgaggtgctgtccgtgctgcacttgatggccatggtctgcttgctgcaggccaacaccctgcttctcccaaggtcatacggcgatggctacgccccaagagtttctgaagagagtagacgggccactgttgatgtcttcttgaaggcagctggatacctagactgcgcaattcgtcatgtacttccgaagatgccactggaactaaggagacaacttccagtcgacctggctgaaggaaatctcaaagctctaagcctgcaagcctttgggtcagggggttgacatgcagctcggcttggctattgatagtccaaaggccactttagcagtcaaaaggcgcttagcctgtgagatggtcaaatattggcaacaagttcaagagagcattccagagcttccagtctctgatggatggggaaaaaagcaccggctatttgtaaagtggaagtatgttgaagccaaggtatataagctatgccactattatcattctctttaataagctgtaaattcttgtctaaataaaacaggctaaattttctccagatgatgtaattctctaatgtttaatcttttaagcatttctactgcatggcatctattttacatgtttatctcaggctgcagcatactatttccacggtttgattcttgacgagggaaataccgagaaatcccatggaatggcaatagctgcactacaagcttcagaagaatttctgaaagaaagcaaaatggtttcggaagccttccatgcaactcctccaacatcgaggagtccgaatgcattcggaacagcaaaatatctgtttgacaagatcccaagagatgcttccagcaaggtccgaatcaaacaggacctgtatactcaagaaaaggtcattggagcaccacccccattaccagattttgcattggcgctaacacctgaagattatgatcttcctccactagatccactttggaacaaagaagatacacaccattaagtgtctatacagcagattggttgcttctggcaaaaaattggctctggagagaaaggaggaccaagatctaccatgtcaaaggtcgaacatggtaacaaatgaagtgtacaaaatattttcaaacaaaattacatgtcaacaaaattaagcaaggcttgaagataatctgaagagctctgtacaggcaattttcttctgacaagggaaatgatatgtcaaagggttcattgatcattgtcgatcctgattcctgatgcttttattttttcaacaacagattttcagcattcgaaatggaactggaatcagcctctgatcgaagtggaaacctttttttagtcgtaaacatttacattggcaccttaaaatatactctggaacaatcagtctcagctgaacagtttataatacatgaactagctaaagtacagacatgcccaaaccttaggcaccacagtacattctgaatgacttttggcagtatcaaatgtacgtgaagccagtaagccaccgccgccacccctgcgaagcctgcagcaacactagaggcaaaaggggatatagggcctgcttcttctagattactcaaaactggcaaaagattaggataaactaaaaaaatgttacttcacaaagttaccgtgctgtccctatcattacttcaaatcaatttcgctagcatcattccatacctaggttcagggctcatattaactgccttccaggtgaacatcgctgtgcgtaggaattgccaaatagaaaaaaaaaacatagcaccaaatacagtctcgagctatctgatctgagccctctccaaagagcaccccatccttcaagcaatatcactctagaaggtagatgcacatcagacggcaatgggggtttcccagagccagtaagcatccatgggtgctgtttcagagcacccaacatgtcgggatgcttggagaaagatcagataaaaggcccgccgtgttgttccacaccgttatatcaagaacatacccagcaacagttgaaaaccactggaaatgatccttaacaacatttgcagggcccatagcttttgaaggaatcacaaaactaactagctttcgaagtttgaaaagttcaaatggtgtgcagaaaacagtctctacagcaccagcaactatgccagccaacatagcctcagaataatagacatagttgtcctcccttccatctgccaagacatctgttaacagttcataggtcacaaaatgtgctcccaacccaggaagtttacccattatggaccatccaatgccactgtaaaaacctaaaaggccagaagcggcctgagccggtccaccaactgccggagcccagctgcagatgcaaggaaacaccgcgcagataccaaaattagaccttgagaaagcaacagtacagcaacacaaggaggtgaggtgggtgagtgcgctcgcctggaagctggaggagtgcttaaccgtgtcgagggggtgcacggcgacggcggaggcgctgatcgctgccgcaccgaaagccgcgtggcccgcgtgacgctgtcctccatcggtttgccgcctcccacggtcccaccatctcggcggcctgcaaggcaggaactggaacacacgctccccgagaaatagcgaaaagcggcgagcgacgtttaggggaagacaagaagagagaagccgcgggagaatttggggcccattgagaaacctgcccacctcgggtattggtgttcggcccacagagttccgtggccaagcgaagatcggatggctggcacctggcactggcaggcaggctgggagccggggacgcgccggaccgccggtgctagtcgaactcgggtcgaagtttccttccgaggttggtcgctgcctcgactccagcgttgagccaactccgccgccctgtcgttttcgcctctccctagcatttaccggaagaaacgagcgtgaccgccgccttctcccgctcccgctcccgctctgcatctctccatgggccagatcgagagccaggtcactcctccagcggaggagccttctccacccaccgtggagccgtcgccgtcgtctcctgccccgcctccgtcttcccttgaggcgattgctgcagaagccatgtcatttgatgaggatgacactgaggagtcaatcgatgtgaaggtacagaaagctctggactgtccatgtgttgctgatttgaaaaatggtccttgtggaggtcaattcgtcgatgcattttcctgctttctcaggagcagagaagaagagaagggatcagattgcgtgaaacccttcatcacattgcaggactgcatcaaagcaaatccagaggcattctctaaggagattctggaggaagaggaaaatgatgaggaggcagataagtccaacctgaaagttagagctccatcatggtccagagaatccaaacctaaggtttgagattgcttggtattaactgatagtgatattcatccagtgtgcagactcaccttattcaactataagggcttgttcgctttcctctcaatccatgtgatctcaatccatgtggattgggtgggattggatgagtttaaatcctgaacaagtcaaaatccttcatattttttctaatctcatccaatccacatgggacaggaataaccgaacaagccctaagtttgccagtagtagactgatttcagagagcgaggtatcataaattgattaacagaaatacccatattttgtgtataagaaatgcttcatggtatccacaattttagaatgtacatgtcatttcaagtatcaatcgagaactgatgaacttgtaattcgattcctagatacagggcatatttgatcaccactgtattattatactatgaaatatacatatgattatcat

SEQ ID NO: 24519 - DNA, 4416 bp, Zea Mays
aaccctgtaggcctctcccttcttctgctctccctcccttctcaaggcttcctcctgcagtccagctcaccaggaccaggaggaacaaagaagttgcatcgaacacagctgagttcctccctcttccctgaaatgcgcccggcagctagaaaggagcagctagcgggcgggctgcccatacgtcgttgagatagatacctaagcgggccgcttccgctgcacagccacaggcatggggtgcggggcgtcgagccacaaggacgccggggcgcgccggagacggcctgggagcgtcggcgacgtggtcgttttcctcccgggcctccgggtgccgagggccgtcgacttcgcccaggcgctcggcggctgcctggccagggctatagtcgagcggctgtcggctctgaggtcgcgggtcgtcgagatggcaatgcaagaatcggcggcggcgctcaagcccaggcggaaggcggctgcacggcacggtgtgtgtaggccactggagaagggggcggtgtggtacagcgcctggatggattgccaatcttctacaggccctcgaagactacttgccagttctgctgggactagcacaacaaggtagcgtcttgagacacaaagtgcagttcacctggagtaaccaagaggataatgctgaggagacagccatttcagatgtctggtacgaggtgctgtccgtgctgcacttgatggccatggtctgcttgctgcaggccaacaccctgcttctcccaaggtcatacggcgatggctacgccccaagagtttctgaagagagtagacgggccactgttgatgtcttcttgaaggcagctggatacctagactgcgcaattcgtcatgtacttccgaagatgccactggaactaaggagacaacttccagtcgacctggctgaaggaaatctcaaagctctaagcctgcaagcctttgggtcagggggttgacatgcagctcggcttggctattgatagtccaaaggccactttagcagtcaaaaggcgcttagcctgtgagatggtcaaatattggcaacaagttcaagagagcattccagagcttccagtctctgatggatggggaaaaaagcaccggctatttgtaaagtggaagtatgttgaagccaaggctgcagcatactatttccacggtttgattcttgacgagggaaataccgagaaatcccatggaatggcaatagctgcactacaagcttcagaagaatttctgaaagaaagcaaaatggtttcggaagccttccatgcaactcctccaacatcgaggagtccgaatgcattcggaacagcaaaatatctgtttgacaagatcccaagagatgcttccagcaaggtccgaatcaaacaggacctgtatactcaagaaaaggtcattggagcaccacccccattaccagattttgcattggcgctaacacctgaagattatgatcttcctccactagatccactttggaacaaagaagatacacaccattaagtgtctatacagcagattggttgcttctggcaaaaaattggctctggagagaaaggaggaccaagatctaccatgtcaaaggtcgaacatggtaacaaatgaagtgtacaaaatattttcaaacaaaattacatgtcaacaaaattaagcaaggcttgaagataatctgaagagctctgtacaggcaattttcttctgacaagggaaatgatatgtcaaagggttcattgatcattgtcgatcctgattcctgatgcttttattttttcaacaacagattttcagcattcgaaatggaactggaatcagcctctgatcgaagtggaaacctttttttagtcgtaaacatttacattggcaccttaaaatatactctggaacaatcagtctcagctgaacagtttataatacatgaactagctaaagtacagacatgcccaaaccttaggcaccacagtacattctgaatgacttttggcagtatcaaatgtacgtgaagccagtaagccaccgccgccacccctgcgaagcctgcagcaacactagaggcaaaaggggatatagggcctgcttcttctagattactcaaaactggcaaaagattaggataaactaaaaaaatgttacttcacaaagttaccgtgctgtccctatcattacttcaaatcaatttcgctagcatcattccatacctaggttcagggctcatattaactgccttccaggtgaacatcgctgtgcgtaggaattgccaaatagaaaaaaaaaacatagcaccaaatacagtctcgagctatctgatctgagccctctccaaagagcaccccatccttcaagcaatatcactctagaaggtagatgcacatcagacggcaatgggggtttcccagagccagtaagcatccatgggtgctgtttcagagcacccaacatgtcgggatgcttggagaaagatcagataaaaggcccgccgtgttgttccacaccgttatatcaagaacatacccagcaacagttgaaaaccactggaaatgatccttaacaacatttgcagggcccatagcttttgaaggaatcacaaaactaactagctttcgaagtttgaaaagttcaaatggtgtgcagaaaacagtctctacagcaccagcaactatgccagccaacatagcctcagaataatagacatagttgtcctcccttccatctgccaagacatctgttaacagttcataggtcacaaaatgtgctcccaacccaggaagtttacccattatggaccatccaatgccactgtaaaaacctaaaaggccagaagcggcctgagccggtccaccaactgccggagcccagctgcagatgcaaggaaacaccgcgcagataccaaaattagaccttgagaaagcaacagtacagcaacacaaggaggtgaggtgggtgagtgcgctcgcctggaagctggaggagtgcttaaccgtgtcgagggggtgcacggcgacggcggaggcgctgatcgctgccgcaccgaaagccgcgtggcccgcgtgacgctgtcctccatcggtttgccgcctcccacggtcccaccatctcggcggcctgcaaggcaggaactggaacacacgctccccgagaaatagcgaaaagcggcgagcgacgtttaggggaagacaagaagagagaagccgcgggagaatttggggcccattgagaaacctgcccacctcgggtattggtgttcggcccacagagttccgtggccaagcgaagatcggatggctggcacctggcactggcaggcaggctgggagccggggacgcgccggaccgccggtgctagtcgaactcgggtcgaagtttccttccgaggttggtcgctgcctcgactccagcgttgagccaactccgccgccctgtcgttttcgcctctccctagcatttaccggaagaaacgagcgtgaccgccgccttctcccgctcccgctcccgctctgcatctctccatgggccagatcgagagccaggtcactcctccagcggaggagccttctccacccaccgtggagccgtcgccgtcgtctcctgccccgcctccgtcttcccttgaggcgattgctgcagaagccatgtcatttgatgaggatgacactgaggagtcaatcgatgtgaaggtacagaaagctctggactgtccatgtgttgctgatttgaaaaatggtccttgtggaggtcaattcgtcgatgcattttcctgctttctcaggagcagagaagaagagaagggatcagattgcgtgaaacccttcatcacattgcaggactgcatcaaagcaaatccagaggcattctctaaggagattctggaggaagaggaaaatgatgaggaggcagataagtccaacctgaaagttagagctccatcatggtccagagaatccaaacctaaggtttgagattgcttggtattaactgatagtgatattcatccagtgtgcagactcaccttattcaactataagggcttgttcgctttcctctcaatccatgtgatctcaatccatgtggattgggtgggattggatgagtttaaatcctgaacaagtcaaaatccttcatattttttctaatctcatccaatccacatgggacaggaataaccgaacaagccctaagtttgccagtagtagactgatttcagagagcgaggtatcataaattgattaacagaaatacccatattttgtgtataagaaatgcttcatggtatccacaattttagaatgtacatgtcatttcaagtatcaatcgagaactgatgaacttgtaattcgattcctagatacagggcatatttgatcaccactgtattattatactatgaaatatacatatgattatcat

SEQ ID NO: 24520 - DNA, 4783 bp, Zea Mays
cagctgtgcgcctgcctcataattgatagacacaggtcatctcatcaaccctgtaggcctctcccttcttctgctctccctcccttctcaaggcttcctcctgcagtccagctcaccaggaccaggaggaacaaagaagttgcatcgaacacagctgagttcctccctcttccctgaaatgcgcccggcagctagaaaggagcagctagcgggcgggctgcccatacgtcgttgagatagatacctaagcgggccgcttccgctgcacagccacaggcatggggtgcggggcgtcgagccacaaggacgccggggcgcgccggagacggcctgggagcgtcggcgacgtggtcgttttcctcccgggcctccgggtgccgagggccgtcgacttcgcccaggcgctcggcggctgcctggccagggctatagtcgagcggctgtcggctctgaggtcgcgggtcgtcgagatggcaatgcaagaatcggcggcggcgctcaagcccaggcggaaggcggctgcacggcacggtgtgtgtaggccactggagaagggggcggtgtggtacagcgcctggatggattgggtctagtacagccaatcttctacaggccctcgaagactacttgccagttctgctgggactagcacaacaaggtagcgtcttgagacacaaagtgcagttcacctggagtaaccaagaggataatgctgagcttttcaatctcaggagacagccatttcagatgtctggtacgaggtgctgtccgtgctgcacttgatggccatggtctgcttgctgcaggccaacaccctgcttctcccaaggtcatacggcgatggctacgccccaagagtttctgaagagagtagacgggccactgttgatgtcttcttgaaggcagctggatacctagactgcgcaattcgtcatgtacttccgaagatgccactggaactaaggagacaacttccagtcgacctggctgaaggaaatctcaaagctctaagcctgcaagcctttgggtcagggggttgacatgcagctcggcttggctattgatagtccaaaggccactttagcagtcaaaaggcgcttagcctgtgagatggtcaaatattggcaacaagttcaagagagcattccagagcttccagtctctgatggatggggaaaaaagcaccggctatttgtaaagtggaagtatgttgaagccaagcatactatttccacggtttgattcttgacgagggaaataccgagaaatcccatggaatggcaatagctgcactacaagcttcagaagaatttctgaaagaaagcaaaatggtttcggaagccttccatgcaactcctccaacatcgaggagtccgaatgcattcggaacagcaaaatatctgtttgacaagatcccaagagatgcttccagcaaggtccgaatcaaacaggacctgtatactcaagaaaaggtcattggagcaccacccccattaccagattttgcattggcgctaacacctgaagattatgatcttcctccactagatccactttggaacaaagaagatacacaccattaagtgtctatacagcagattggttgcttctggcaaaaaattggctctggagagaaaggaggaccaagatctaccatgtcaaaggtcgaacatggtaacaaatgaagtgtacaaaatattttcaaacaaaattacatgtcaacaaaattaagcaaggcttgaagataatctgaagagctctgtacaggcaattttcttctgacaagggaaatgatatgtcaaagggttcattgatcattgtcgatcctgattcctgatgcttttattttttcaacaacagattttcagcattcgaaatggaactggaatcagcctctgatcgaagtggaaacctttttttagtcgtaaacatttacattggcaccttaaaatatactctggaacaatcagtctcagctgaacagtttataatacatgaactagctaaagtacagacatgcccaaaccttaggcaccacagtacattctgaatgacttttggcagtatcaaatgtacgtgaagccagtaagccaccgccgccacccctgcgaagcctgcagcaacactagaggcaaaaggggatatagggcctgcttcttctagattactcaaaactggcaaaagattaggataaactaaaaaaatgttacttcacaaagttaccgtgctgtccctatcattacttcaaatcaatttcgctagcatcattccatacctaggttcagggctcatattaactgccttccaggtgaacatcgctgtgcgtaggaattgccaaatagaaaaaaaaaacatagcaccaaatacagtctcgagctatctgatctgagccctctccaaagagcaccccatccttcaagcaatatcactctagaaggtagatgcacatcagacggcaatgggggtttcccagagccagtaagcatccatgggtgctgtttcagagcacccaacatgtcgggatgcttggagaaagatcagataaaaggcccgccgtgttgttccacaccgttatatcaagaacatacccagcaacagttgaaaaccactggaaatgatccttaacaacatttgcagggcccatagcttttgaaggaatcacaaaactaactagctttcgaagtttgaaaagttcaaatggtgtgcagaaaacagtctctacagcaccagcaactatgccagccaacatagcctcagaataatagacatagttgtcctcccttccatctgccaagacatctgttaacagttcataggtcacaaaatgtgctcccaacccaggaagtttacccattatggaccatccaatgccactgtaaaaacctaaaagtcatacaatgatttagaatatgataatttcatatgtgaagtaacacataactaaatccgaagccattaggcatgattgcatgaactagaaagttttatacaaaaatcaggatttatatgcttttctactgctgccttctcccgcttcggcctctccctaccgcttccgatccaatgaagcttcactagagcctttcctaatttaaaatatacacaatataacgtagcgctgcgacagtttagttcagtccctcctaatttttttccggcctacgtccctgagcaaccgaccaaacctacagggccagaagcggcctgagccggtccaccaactgccggagcccagctgcagatgcaaggaaacaccgcgcagataccaaaattagaccttgagaaagcaacagtacagcaacacaaggaggtgaggtgggtgagtgcgctcgcctggaagctggaggagtgcttaaccgtgtcgagggggtgcacggcgacggcggaggcgctgatcgctgccgcaccgaaagccgcgtggcccgcgtgacgctgtcctccatcggtttgccgcctcccacggtcccaccatctcggcggcctgcaaggcaggaactggaacacacgctccccgagaaatagcgaaaagcggcgagcgacgtttaggggaagacaagaagagagaagccgcgggagaatttggggcccattgagaaacctgcccacctcgggtattggtgttcggcccacagagttccgtggccaagcgaagatcggatggctggcacctggcactggcaggcaggctgggagccggggacgcgccggaccgccggtgctagtcgaactcgggtcgaagtttccttccgaggttggtcgctgcctcgactccagcgttgagccaactccgccgccctgtcgttttcgcctctccctagcatttaccggaagaaacgagcgtgaccgccgccttctcccgctcccgctcccgctctgcatctctccatgggccagatcgagagccaggtcactcctccagcggaggagccttctccacccaccgtggagccgtcgccgtcgtctcctgccccgcctccgtcttcccttgaggcgattgctgcagaagccatgtcatttgatgaggatgacactgaggagtcaatcgatgtgaaggtacagaaagctctggactgtccatgtgttgctgatttgaaaaatggtccttgtggaggtcaattcgtcgatgcattttcctgctttctcaggagcagagaagaagagaagggatcagattgcgtgaaacccttcatcacattgcaggactgcatcaaagcaaatccagaggcattctctaaggagattctggaggaagaggaaaatgatgaggaggcagataagtccaacctgaaagttagagctccatcatggtccagagaatccaaacctaaggtttgagattgcttggtattaactgatagtgatattcatccagtgtgcagactcaccttattcaactataagggcttgttcgctttcctctcaatccatgtgatctcaatccatgtggattgggtgggattggatgagtttaaatcctgaacaagtcaaaatccttcatattttttctaatctcatccaatccacatgggacaggaataaccgaacaagccctaagtttgccagtagtagactgatttcagagagcgaggtatcataaattgattaacagaaatacccatattttgtgtataagaaatgcttcatggtatccacaattttagaatgtacatgtcatttcaagtatcaatcgagaactgatgaacttgtaattcgattcctagatacagggcatatttgatcaccactgtattattatactatgaaatatacatatgattatcat

SEQ ID NO: 24521 - DNA, 4723 bp, Zea Mays
aaatgtccgcctgccttacactccggtcaagtctttcttgcgttgcgttgcgtcgactctccagttctttgagggcatctggtttatcctattctatcatatcctatcatatcatatactccgaatttcccgaccgatcggcacagccatacaggtgtctggacaagcggttgagccttggtagttcacgtgataggcggccggtcgtgcaagcggggagatcacaggtttgtgccgcagcccgcaggcatgaccgcatgactcaccacgagatcttttcctcgcgagtttccgtgccgctgaccagctgtgcgcctgcctcataattgatagacacaggtcatctcatcaaccctgtaggcctctcccttcttctgctctccctcccttctcaaggcttcctcctgcagtccagctcaccaggaccaggaggaacaaagaagttgcatcgaacacagctgagttcctccctcttccctgaaatgcgcccggcagctagaaaggagcagctagcgggcgggctgcccatacgtcgttgagatagatacctaagcgggccgcttccgctgcacagccacaggcatggggtgcggggcgtcgagccacaaggacgccggggcgcgccggagacggcctgggagcgtcggcgacgtggtcgttttcctcccgggcctccgggtgccgagggccgtcgacttcgcccaggcgctcggcggctgcctggccagggctatagtcgagcggctgtcggctctgaggtcgcgggtcgtcgagatggcaatgcaagaatcggcggcggcgctcaagcccaggcggaaggcggctgcacggcacgggtctagtacagccaatcttctacaggccctcgaagactacttgccagttctgctgggactagcacaacaaggtagcgtcttgagacacaaagtgcagttcacctggagtaaccaagaggataatgctgaggagacagccatttcagatgtctggtacgaggtgctgtccgtgctgcacttgatggccatggtctgcttgctgcaggccaacaccctgcttctcccaaggtcatacggcgatggctacgccccaagagtttctgaagagagtagacgggccactgttgatgtcttcttgaaggcagctggatacctagactgcgcaattcgtcatgtacttccgaagatgccactggaactaaggagacaacttccagtcgacctggctgaaggaaatctcaaagctctaagcctgcaagcctttgggtcagggggttgacatgcagctcggcttggctattgatagtccaaaggccactttagcagtcaaaaggcgcttagcctgtgagatggtcaaatattggcaacaagttcaagagagcattccagagcttccagtctctgatggatggggaaaaaagcaccggctatttgtaaagtggaagtatgttgaagccaaggctgcagcatactatttccacggtttgattcttgacgagggaaataccgagaaatcccatggaatggcaatagctgcactacaagcttcagaagaatttctgaaagaaagcaaaatggtttcggaagccttccatgcaactcctccaacatcgaggagtccgaatgcattcggaacagcaaaatatctgtttgacaagatcccaagagatgcttccagcaaggtccgaatcaaacaggacctgtatactcaagaaaaggtcattggagcaccacccccattaccagattttgcattggcgctaacacctgaagattatgatcttcctccactagatccactttggaacaaagaagatacacaccattaagtgtctatacagcagattggttgcttctggcaaaaaattggctctggagagaaaggaggaccaagatctaccatgtcaaaggtcgaacatggtaacaaatgaagtgtacaaaatattttcaaacaaaattacatgtcaacaaaattaagcaaggcttgaagataatctgaagagctctgtacaggcaattttcttctgacaagggaaatgatatgtcaaagggttcattgatcattgtcgatcctgattcctgatgcttttattttttcaacaacagattttcagcattcgaaatggaactggaatcagcctctgatcgaagtggaaacctttttttagtcgtaaacatttacattggcaccttaaaatatactctggaacaatcagtctcagctgaacagtttataatacatgaactagctaaagtacagacatgcccaaaccttaggcaccacagtacattctgaatgacttttggcagtatcaaatgtacgtgaagccagtaagccaccgccgccacccctgcgaagcctgcagcaacactagaggcaaaaggggatatagggcctgcttcttctagattactcaaaactggcaaaagattaggataaactaaaaaaatgttacttcacaaagttaccgtgctgtccctatcattacttcaaatcaatttcgctagcatcattccatacctaggttcagggctcatattaactgccttccaggtgaacatcgctgtgcgtaggaattgccaaatagaaaaaaaaaacatagcaccaaatacagtctcgagctatctgatctgagccctctccaaagagcaccccatccttcaagcaatatcactctagaaggtagatgcacatcagacggcaatgggggtttcccagagccagtaagcatccatgggtgctgtttcagagcacccaacatgtcgggatgcttggagaaagatcagataaaaggcccgccgtgttgttccacaccgttatatcaagaacatacccagcaacagttgaaaaccactggaaatgatccttaacaacatttgcagggcccatagcttttgaaggaatcacaaaactaactagctttcgaagtttgaaaagttcaaatggtgtgcagaaaacagtctctacagcaccagcaactatgccagccaacatagcctcagaataatagacatagttgtcctcccttccatctgccaagacatctgttaacagttcataggtcacaaaatgtgctcccaacccaggaagtttacccattatggaccatccaatgccactgtaaaaacctaaaaggccagaagcggcctgagccggtccaccaactgccggagcccagctgcagatgcaaggaaacaccgcgcagataccaaaattagaccttgagaaagcaacagtacagcaacacaaggaggtgaggtgggtgagtgcgctcgcctggaagctggaggagtgcttaaccgtgtcgagggggtgcacggcgacggcggaggcgctgatcgctgccgcaccgaaagccgcgtggcccgcgtgacgctgtcctccatcggtttgccgcctcccacggtcccaccatctcggcggcctgcaaggcaggaactggaacacacgctccccgagaaatagcgaaaagcggcgagcgacgtttaggggaagacaagaagagagaagccgcgggagaatttggggcccattgagaaacctgcccacctcgggtattggtgttcggcccacagagttccgtggccaagcgaagatcggatggctggcacctggcactggcaggcaggctgggagccggggacgcgccggaccgccggtgctagtcgaactcgggtcgaagtttccttccgaggttggtcgctgcctcgactccagcgttgagccaactccgccgccctgtcgttttcgcctctccctagcatttaccggaagaaacgagcgtgaccgccgccttctcccgctcccgctcccgctctgcatctctccatgggccagatcgagagccaggtcactcctccagcggaggagccttctccacccaccgtggagccgtcgccgtcgtctcctgccccgcctccgtcttcccttgaggcgattgctgcagaagccatgtcatttgatgaggatgacactgaggagtcaatcgatgtgaaggtacagaaagctctggactgtccatgtgttgctgatttgaaaaatggtccttgtggaggtcaattcgtcgatgcattttcctgctttctcaggagcagagaagaagagaagggatcagattgcgtgaaacccttcatcacattgcaggactgcatcaaagcaaatccagaggcattctctaaggagattctggaggaagaggaaaatgatgaggaggcagataagtccaacctgaaagttagagctccatcatggtccagagaatccaaacctaaggtttgagattgcttggtattaactgatagtgatattcatccagtgtgcagactcaccttattcaactataagggcttgttcgctttcctctcaatccatgtgatctcaatccatgtggattgggtgggattggatgagtttaaatcctgaacaagtcaaaatccttcatattttttctaatctcatccaatccacatgggacaggaataaccgaacaagccctaagtttgccagtagtagactgatttcagagagcgaggtatcataaattgattaacagaaatacccatattttgtgtataagaaatgcttcatggtatccacaattttagaatgtacatgtcatttcaagtatcaatcgagaactgatgaacttgtaattcgattcctagatacagggcatatttgatcaccactgtattattatactatgaaatatacatatgattatcat

SEQ ID NO: 24522 - DNA, 5025 bp, Zea Mays
aaatgtccgcctgccttacactccggtcaagtctttcttgcgttgcgttgcgtcgactctccagttctttgagggcatctggtttatcctattctatcatatcctatcatatcatatactccgaatttcccgaccgatcggcacagccatacaggtgtctggacaagcggttgagccttggtagttcacgtgataggcggccggtcgtgcaagcggggagatcacaggtttgtgccgcagcccgcaggcatgaccgcatgactcaccacgagatcttttcctcgcgagtttccgtgccgctgaccagctgtgcgcctgcctcataattgatagacacaggtcatctcatcaaccctgtaggcctctcccttcttctgctctccctcccttctcaaggcttcctcctgcagtccagctcaccaggaccaggaggaacaaagaagttgcatcgaacacagctgagttcctccctcttccctgaaatgcgcccggcagctagaaaggagcagctagcgggcgggctgcccatacgtcgttgagatagatacctaagcgggccgcttccgctgcacagccacaggcatggggtgcggggcgtcgagccacaaggacgccggggcgcgccggagacggcctgggagcgtcggcgacgtggtcgttttcctcccgggcctccgggtgccgagggccgtcgacttcgcccaggcgctcggcggctgcctggccagggctatagtcgagcggctgtcggctctgaggtcgcgggtcgtcgagatggcaatgcaagaatcggcggcggcgctcaagcccaggcggaaggcggctgcacggcacgggtctagtacagccaatcttctacaggccctcgaagactacttgccagttctgctgggactagcacaacaaggtagcgtcttgagacacaaagtgcagttcacctggagtaaccaagaggataatgctgaggagacagccatttcagatgtctggtacgaggtgctgtccgtgctgcacttgatggccatggtctgcttgctgcaggccaacaccctgcttctcccaaggtcatacggcgatggctacgccccaagagtttctgaagagagtagacgggccactgttgatgtcttcttgaaggcagctggatacctagactgcgcaattcgtcatgtacttccgaagatgccactggaactaaggagacaacttccagtcgacctggctgaaggaaatctcaaagctctaagcctgcaagcctttgggtcagggggttgacatgcagctcggcttggctattgatagtccaaaggccactttagcagtcaaaaggcgcttagcctgtgagatggtcaaatattggcaacaagttcaagagagcattccagagcttccagtctctgatggatggggaaaaaagcaccggctatttgtaaagtggaagtatgttgaagccaaggctgcagcatactatttccacggtttgattcttgacgagggaaataccgagaaatcccatggaatggcaatagctgcactacaagcttcagaagaatttctgaaagaaagcaaaatggtttcggaagccttccatgcaactcctccaacatcgaggagtccgaatgcattcggaacagcaaaatatctgtttgacaagatcccaagagatgcttccagcaaggtccgaatcaaacaggacctgtatactcaagaaaaggtcattggagcaccacccccattaccagattttgcattggcgctaacacctgaagattatgatcttcctccactagatccactttggaacaaagaagatacacaccattaagtgtctatacagcagattggttgcttctggcaaaaaattggctctggagagaaaggaggaccaagatctaccatgtcaaaggtcgaacatggtaacaaatgaagtgtacaaaatattttcaaacaaaattacatgtcaacaaaattaagcaaggcttgaagataatctgaagagctctgtacaggcaattttcttctgacaagggaaatgatatgtcaaagggttcattgatcattgtcgatcctgattcctgatgcttttattttttcaacaacagattttcagcattcgaaatggaactggaatcagcctctgatcgaagtggaaacctttttttagtcgtaaacatttacattggcaccttaaaatatactctggaacaatcagtctcagctgaacagtttataatacatgaactagctaaagtacagacatgcccaaaccttaggcaccacagtacattctgaatgacttttggcagtatcaaatgtacgtgaagccagtaagccaccgccgccacccctgcgaagcctgcagcaacactagaggcaaaaggggatatagggcctgcttcttctagattactcaaaactggcaaaagattaggataaactaaaaaaatgttacttcacaaagttaccgtgctgtccctatcattacttcaaatcaatttcgctagcatcattccatacctaggttcagggctcatattaactgccttccaggtgaacatcgctgtgcgtaggaattgccaaatagaaaaaaaaaacatagcaccaaatacagtctcgagctatctgatctgagccctctccaaagagcaccccatccttcaagcaatatcactctagaaggtagatgcacatcagacggcaatgggggtttcccagagccagtaagcatccatgggtgctgtttcagagcacccaacatgtcgggatgcttggagaaagatcagataaaaggcccgccgtgttgttccacaccgttatatcaagaacatacccagcaacagttgaaaaccactggaaatgatccttaacaacatttgcagggcccatagcttttgaaggaatcacaaaactaactagctttcgaagtttgaaaagttcaaatggtgtgcagaaaacagtctctacagcaccagcaactatgccagccaacatagcctcagaataatagacatagttgtcctcccttccatctgccaagacatctgttaacagttcataggtcacaaaatgtgctcccaacccaggaagtttacccattatggaccatccaatgccactgtaaaaacctaaaagtcatacaatgatttagaatatgataatttcatatgtgaagtaacacataactaaatccgaagccattaggcatgattgcatgaactagaaagttttatacaaaaatcaggatttatatgcttttctactgctgccttctcccgcttcggcctctccctaccgcttccgatccaatgaagcttcactagagcctttcctaatttaaaatatacacaatataacgtagcgctgcgacagtttagttcagtccctcctaatttttttccggcctacgtccctgagcaaccgaccaaacctacagggccagaagcggcctgagccggtccaccaactgccggagcccagctgcagatgcaaggaaacaccgcgcagataccaaaattagaccttgagaaagcaacagtacagcaacacaaggaggtgaggtgggtgagtgcgctcgcctggaagctggaggagtgcttaaccgtgtcgagggggtgcacggcgacggcggaggcgctgatcgctgccgcaccgaaagccgcgtggcccgcgtgacgctgtcctccatcggtttgccgcctcccacggtcccaccatctcggcggcctgcaaggcaggaactggaacacacgctccccgagaaatagcgaaaagcggcgagcgacgtttaggggaagacaagaagagagaagccgcgggagaatttggggcccattgagaaacctgcccacctcgggtattggtgttcggcccacagagttccgtggccaagcgaagatcggatggctggcacctggcactggcaggcaggctgggagccggggacgcgccggaccgccggtgctagtcgaactcgggtcgaagtttccttccgaggttggtcgctgcctcgactccagcgttgagccaactccgccgccctgtcgttttcgcctctccctagcatttaccggaagaaacgagcgtgaccgccgccttctcccgctcccgctcccgctctgcatctctccatgggccagatcgagagccaggtcactcctccagcggaggagccttctccacccaccgtggagccgtcgccgtcgtctcctgccccgcctccgtcttcccttgaggcgattgctgcagaagccatgtcatttgatgaggatgacactgaggagtcaatcgatgtgaaggtacagaaagctctggactgtccatgtgttgctgatttgaaaaatggtccttgtggaggtcaattcgtcgatgcattttcctgctttctcaggagcagagaagaagagaagggatcagattgcgtgaaacccttcatcacattgcaggactgcatcaaagcaaatccagaggcattctctaaggagattctggaggaagaggaaaatgatgaggaggcagataagtccaacctgaaagttagagctccatcatggtccagagaatccaaacctaaggtttgagattgcttggtattaactgatagtgatattcatccagtgtgcagactcaccttattcaactataagggcttgttcgctttcctctcaatccatgtgatctcaatccatgtggattgggtgggattggatgagtttaaatcctgaacaagtcaaaatccttcatattttttctaatctcatccaatccacatgggacaggaataaccgaacaagccctaagtttgccagtagtagactgatttcagagagcgaggtatcataaattgattaacagaaatacccatattttgtgtataagaaatgcttcatggtatccacaattttagaatgtacatgtcatttcaagtatcaatcgagaactgatgaacttgtaattcgattcctagatacagggcatatttgatcaccactgtattattatactatgaaatatacatatgattatcat

SEQ ID NO: 24523 - DNA, 4687 bp, Zea Mays
aaatgtccgcctgccttacactccggtcaagtctttcttgcgttgcgttgcgtcgactctccagttctttgagggcatctggtttatcctattctatcatatcctatcatatcatatactccgaatttcccgaccgatcggcacagccatacaggtgtctggacaagcggttgagccttggtagttcacgtgataggcggccggtcgtgcaagcggggagatcacaggtttgtgccgcagcccgcaggcatgaccgcatgactcaccacgagatcttttcctcgcgagtttccgtgccgctgaccagctgtgcgcctgcctcataattgatagacacaggtcatctcatcaaccctgtaggcctctcccttcttctgctctccctcccttctcaaggcttcctcctgcagtccagctcaccaggaccaggaggaacaaagaagttgcatcgaacacagctgagttcctccctcttccctgaaatgcgcccggcagctagaaaggagcagctagcgggcgggctgcccatacgtcgttgagatagatacctaagcgggccgcttccgctgcacagccacaggcatggggtgcggggcgtcgagccacaaggacgccggggcgcgccggagacggcctgggagcgtcggcgacgtggtcgttttcctcccgggcctccgggtgccgagggccgtcgacttcgcccaggcgctcggcggctgcctggccagggctatagtcgagcggctgtcggctctgaggtcgcgggtcgtcgagatggcaatgcaagaatcggcggcggcgctcaagcccaggcggaaggcggctgcacggcacgggtctagtacagccaatcttctacaggccctcgaagactacttgccagttctgctgggactagcacaacaaggtagcgtcttgagacacaaagtgcagttcacctggagtaaccaagaggataatgctgaggagacagccatttcagatgtctggtacgaggtgctgtccgtgctgcacttgatggccatggtctgcttgctgcaggccaacaccctgcttctcccaaggtcatacggcgatggctacgccccaagagtttctgaagagagtagacgggccactgttgatgtcttcttgaaggcagctggatacctagactgcgcaattcgtcatgtacttccgaagatgccactggaactaaggagacaacttccagtcgacctggctgaaggaaatctcaaagctctaagcctgcaagcctttgggtcagggggttgacatgcagctcggcttggctattgatagtccaaaggccactttagcagtcaaaaggcgcttagcctgtgagatggtcaaatattggcaacaagttcaagagagcattccagagcttccagtctctgatggatggggaaaaaagcaccggctatttgtaaagtggaagtatgttgaagccaaggctgcagcatactatttccacggtttgattcttgacgagggaaataccgagaaatcccatggaatggcaatagctgcactacaagcttcagaagaatttctgaaagaaagcaaaatggtttcggaagccttccatgcaactcctccaacatcgaggagtccgaatgcattcggaacagcaaaatatctgtttgacaagatcccaagagatgcttccagcaaggtccgaatcaaacaggacctgtatactcaagaaaaggtcattggagcaccacccccattaccagattttgcattggcgctaacacctgaagattatgatcttcctccactagatccactttggaacaaagaagatacacaccattaagtgtctatacagcagattggttgcttctggcaaaaaattggctctggagagaaaggaggaccaagatctaccatgtcaaaggtcgaacatggtaacaaatgaagtgtacaaaatattttcaaacaaaattacatgtcaacaaaattaagcaaggcttgaagataatctgaagagctctgtacaggcaattttcttctgacaagggaaatgatatgtcaaagggttcattgatcattgtcgatcctgattcctgatgcttttattttttcaacaacagattttcagcattcgaaatggaactggaatcagcctctgatcgaagtggaaacctttttttagtcgtaaacatttacattggcaccttaaaatatactctggaacaatcagtctcagctgaacagtttataatacatgaactagctaaagtacagacatgcccaaaccttaggcaccacagtacattctgaatgacttttggcagtatcaaatgtacgtgaagccagtaagccaccgccgccacccctgcgaagcctgcagcaacactagaggcaaaaggggatatagggcctgcttcttctagattactcaaaactggcaaaagattaggataaactaaaaaaatgttacttcacaaagttaccgtgctgtccctatcattacttcaaatcaatttcgctagcatcattccatacctaggttcagggctcatattaactgccttccaggtgaacatcgctgtgcgtaggaattgccaaatagaaaaaaaaaacatagcaccaaatacagtctcgagctatctgatctgagccctctccaaagagcaccccatccttcaagcaatatcactctagaaggtagatgcacatcagacggcaatgggggtttcccagagccagtaagcatccatgggtgctgtttcagagcacccaacatgtcgggatgcttggagaaagatcagataaaaggcccgccgtgttgttccacaccgttatatcaagaacatacccagcaacagttgaaaaccactggaaatgatccttaacaacatttgcagggcccatagcttttgaaggaatcacaaaactaactagctttcgaagtttgaaaagttcaaatggtgtgcagaaaacagtctctacagcaccagcaactatgccagccaacatagcctcagaataatagacatagttgtcctcccttccatctgccaagacatctgttaacagttcataggtcacaaaatgtgctcccaacccaggaagtttacccattatggaccatccaatgccactgtaaaaacctaaaaggccagaagcggcctgagccggtccaccaactgccggagcccagctgcagatgcaaggaaacaccgcgcagataccaaaattagaccttgagaaagcaacagtacagcaacacaaggaggtgaggtgggtgagtgcgctcgcctggaagctggaggagtgcttaaccgtgtcgagggggtgcacggcgacggcggaggcgctgatcgctgccgcaccgaaagccgcgtggcccgcgtgacgctgtcctccatcggtttgccgcctcccacggtcccaccatctcggcggcctgcaaggcaggaactggaacacacgctccccgagaaatagcgaaaagcggcgagcgacgtttaggggaagacaagaagagagaagccgcgggagaatttggggcccattgagaaacctgcccacctcgggtattggtgttcggcccacagagttccgtggccaagcgaagatcggatggctggcacctggcactggcaggcaggctgggagccggggacgcgccggaccgccggtgctagtcgaactcgggtcgaagtttccttccgaggttggtcgctgcctcgactccagcgttgagccaactccgccgccctgtcgttttcgcctctccctagcatttaccggaagaaacgagcgtgaccgccgccttctcccgctcccgctcccgctctgcatctctccatgggccagatcgagagccaggtcactcctccagcggaggagccttctccacccaccgtggagccgtcgccgtcgtctcctgccccgcctccgtcttcccttgaggcgattgctgcagaagccatgtcatttgatgaggatgacactgaggagtcaatcgatgtgaaggtacagaaagctctggactgtccatgtgttgctgatttgaaaaatggtccttgtggaggtcaattcgtcgatgcattttcctgctttctcaggagcagagaagaagagaaggactgcatcaaagcaaatccagaggcattctctaaggagattctggaggaagaggaaaatgatgaggaggcagataagtccaacctgaaagttagagctccatcatggtccagagaatccaaacctaaggtttgagattgcttggtattaactgatagtgatattcatccagtgtgcagactcaccttattcaactataagggcttgttcgctttcctctcaatccatgtgatctcaatccatgtggattgggtgggattggatgagtttaaatcctgaacaagtcaaaatccttcatattttttctaatctcatccaatccacatgggacaggaataaccgaacaagccctaagtttgccagtagtagactgatttcagagagcgaggtatcataaattgattaacagaaatacccatattttgtgtataagaaatgcttcatggtatccacaattttagaatgtacatgtcatttcaagtatcaatcgagaactgatgaacttgtaattcgattcctagatacagggcatatttgatcaccactgtattattatactatgaaatatacatatgattatcat

SEQ ID NO: 24524 - DNA, 1617 bp, Zea Mays
atttggcccaaggttcaccgctttgcctcgttcccgttctcctcctcgcaactctctcgtccatacgtcgtagccgccgcctgtctctcaccgccgacatcccgacagctctcagcccagatcgagcttcccccttcccaaatcgggttctgcttgggctcccgccaccgccgccctacaccaggtgccaaggccttcgccgacctcttcgccggcgaagagcgcccagcagagatgaatgtagcggtgccaccacaatctccacatcttcgtctatatgactttgccaagagtgccatcatcaaaatttttgcctttccttatgctacggtctgtgacctgtattgcgacggtggaatggatacagacaagtggtgtgatgcccaggttggccactacataggcatcgatgcctctgcatcgggtgtcaactatgcccgtgagctatgggagaacaggaggaaacctttcactgctgaattcatcgagttggatccttctgatgatggttttgaagctcaagtgcaggaaaagggcatccaagcagatatggtttgctgtatgcagcacttgcagttatgctttgagaatgaagaacaggcaaagaagcttctgaacaatgtatcatcacttctcaaacctggaggctacttctttggcataactccagattcatctacaatatggacaaaatatcaaaagaatgttgaggcttcacataataagggtttgaagactgttccaaatagcattcgctcagagaactataccattacctttgaagtcgaggaagagaagtttcccttttttggaaagaagtatcaactcaaattcgcgagtgacgcggtgtttgagaatcagtgcctggtccactttcccacccttatgagattatcaagggaagctggacttgaatatgtggagatccagaatttaaccgagttttatgatgataacagaacacaattcgctccaatgcttggtggttacggtgcaagttttttggatgctcgagggaagcttgttgctcgttcctacgacattttaggtggtgtagaattctttttctttttagaagggcaggcctggtgcaacgatgagagctgtctcactgagtcactaggcttgtattcagcatttgtgttccagaagcctgatccagaggcaataccaccgattgtaactcccgacttgcctgatcctgataaaggtcacgaagaggagtggctccagccacagcaggcgtcagtggaagatgggagacgctcgcatgcggatgtgcttcccatagaccctgagaaaggcatcctgggtcctggacctgcagacatgaggctttagttgctggacattcaaatgcagctgagcctgggtagtgatttttttttccaccgtgggcattctcccatagtcccatgtggccatgtctcctttatgagtccacgaaaatagcgaacaacactacaaggctcatgaatcctgcacggacgcatgggctttcttgtaaaacaaatgctcgatacgtatgaccttgtacggtctttgatgtgtatatttgactgctcatactcagtaccattttttaattgcctaaattgtctagctgcaagacaacga

SEQ ID NO: 24525 - DNA, 1746 bp, Zea Mays
atttggcccaaggttcaccgctttgcctcgttcccgttctcctcctcgcaactctctcgtccatacgtcgtagccgccgcctgtctctcaccgccgacatcccgacagctctcagcccagatcgagcttcccccttcccaaatcgggttctgcttgggctcccgccaccgccgccctacaccaggtgccaaggccttcgccgacctcttcgccggcgaagagcgcccagcaggtattcccaatctcaccccccttctcttccctgttagctgtgcgaaaccgagttcgcaaactacctcaagctatctggctattcgattcctagtaactttttgcaaaagccattggtgtgcatgtacacccgtccctctactaatccgcccgtgttctgtctcgacctcgccgctggttatctgcttacatgtaattgcagagatgaatgtagcggtgccaccacaatctccacatcttcgtctatatgactttgccaagagtgccatcatcaaaatttttgcctttccttatgctacggtctgtgacctgtattgcgacggtggaatggatacagacaagtggtgtgatgcccaggttggccactacataggcatcgatgcctctgcatcgggtgtcaactatgcccgtgagctatgggagaacaggaggaaacctttcactgctgaattcatcgagttggatccttctgatgatggttttgaagctcaagtgcaggaaaagggcatccaagcagatatggtttgctgtatgcagcacttgcagttatgctttgagaatgaagaacaggcaaagaagcttctgaacaatgtatcatcacttctcaaacctggaggctacttctttggcataactccagattcatctacaatatggacaaaatatcaaaagaatgttgaggcttcacataataagggtttgaagactgttccaaatagcattcgctcagagaactataccattacctttgaagtcgaggaagagaagtttcccttttttggaaagaagtatcaactcaaattcgcgagtgacgcggtgtttgagaatcagtgcctggtccactttcccacccttatgagattatcaagggaagctggacttgaatatgtggagatccagaatttaaccgagttttatgatgataacagaacacaattcgctccaatgcttggtggttacggtgcaagttttttggatgctcgagggaagcttgttgctcgttcctacgacattttaggcttgtattcagcatttgtgttccagaagcctgatccagaggcaataccaccgattgtaactcccgacttgcctgatcctgataaaggtcacgaagagcaggagtggctccagccacagcaggcgtcagtggaagatgggagacgctcgcatgcggatgtgcttcccatagaccctgagaaaggcatcctgggtcctggacctgcagacatgaggctttagttgctggacattcaaatgcagctgagcctgggtagtgatttttttttccaccgtgggcattctcccatagtcccatgtggccatgtctcctttatgagtccacgaaaatagcgaacaacactacaaggctcatgaatcctgcacggacgcatgggctttcttgtaaaacaaatgctcgatacgtatgaccttgtacggtctttgatgtgtatatttgactgctcatactcagtaccattttttaattgcctaaattgtctagctgcaagacaacga

SEQ ID NO: 24526 - DNA, 1896 bp, Zea Mays
atttggcccaaggttcaccgctttgcctcgttcccgttctcctcctcgcaactctctcgtccatacgtcgtagccgccgcctgtctctcaccgccgacatcccgacagctctcagcccagatcgagcttcccccttcccaaatcgggttctgcttgggctcccgccaccgccgccctacaccaggtgccaaggccttcgccgacctcttcgccggcgaagagcgcccagcaggtattcccaatctcaccccccttctcttccctgttagctgtgcgaaaccgagttcgcaaactacctcaagctatctggctattcgattcctagtaactttttgcaaaagccattggtgtgcatgtacacccgtccctctactaatccgcccgtgttctgtctcgacctcgccgctggttatctgcttacatgtaattgcagagatgaatgtagcggtgccaccacaatctccacatcttcgtctatatgactttgccaagagtgccatcatcaaaatttttgcctttccttatgctacggtctgctatatgctcctctcttttatgatcttcagttcattccaaattagcgagaaactccggaggaatcctgaaagtaattttacatttattggttgccaaatgcctaaggtctgtgacctgtattgcgacggtggaatggatacagacaagtggtgtgatgcccaggttggccactacataggcatcgatgcctctgcatcgggtgtcaactatgcccgtgagctatgggagaacaggaggaaacctttcactgctgaattcatcgagttggatccttctgatgatggttttgaagctcaagtgcaggaaaagggcatccaagcagatatggtttgctgtatgcagcacttgcaggcgagttggttgttctctagaactgtagaatatgatatgcttttatgctttgagaatgaagaacaggcaaagaagcttctgaacaatgtatcatcacttctcaaacctggaggctacttctttggcataactccagattcatctacaatatggacaaaatatcaaaagaatgttgaggcttcacataataagggtttgaagactgttccaaatagcattcgctcagagaactataccattacctttgaagtcgaggaagagaagtttcccttttttggaaagaagtatcaactcaaattcgcgagtgacgcggtgtttgagaatcagtgcctggtccactttcccacccttatgagattatcaagggaagctggacttgaatatgtggagatccagaatttaaccgagttttatgatgataacagaacacaattcgctccaatgcttggtggttacggtgcaagttttttggatgctcgagggaagcttgttgctcgttcctacgacattttaggcttgtattcagcatttgtgttccagaagcctgatccagaggcaataccaccgattgtaactcccgacttgcctgatcctgataaaggtcacgaagaggagtggctccagccacagcaggcgtcagtggaagatgggagacgctcgcatgcggatgtgcttcccatagaccctgagaaaggcatcctgggtcctggacctgcagacatgaggctttagttgctggacattcaaatgcagctgagcctgggtagtgatttttttttccaccgtgggcattctcccatagtcccatgtggccatgtctcctttatgagtccacgaaaatagcgaacaacactacaaggctcatgaatcctgcacggacgcatgggctttcttgtaaaacaaatgctcgatacgtatgaccttgtacggtctttgatgtgtatatttgactgctcatactcagtaccattttttaattgcctaaattgtctagctgcaagacaacga

SEQ ID NO: 24527 - DNA, 1629 bp, Zea Mays
atttggcccaaggttcaccgctttgcctcgttcccgttctcctcctcgcaactctctcgtccatacgtcgtagccgccgcctgtctctcaccgccgacatcccgacagctctcagcccagatcgagcttcccccttcccaaatcgggttctgcttgggctcccgccaccgccgccctacaccaggtgccaaggccttcgccgacctcttcgccggcgaagagcgcccagcagagatgaatgtagcggtgccaccacaatctccacatcttcgtctatatgactttgccaagagtgccatcatcaaaatttttgcctttccttatgctacggtctgctatatgctcctctcttttatgatcttcagttcattccaaattagcgagaaactccggaggaatcctgaaagtaattttacatttattggttgccaaatgcctaaggtctgtgacctgtattgcgacggtggaatggatacagacaagtggtgtgatgcccaggttggccactacataggcatcgatgcctctgcatcgggtgtcaactatgcccgtgagctatgggagaacaggaggaaacctttcactgctgaattcatcgagttggatccttctgatgatggttttgaagctcaagtgcaggaaaagggcatccaagcagatatggtttgctgtatgcagcacttgcaggcaaagaagcttctgaacaatgtatcatcacttctcaaacctggaggctacttctttggcataactccagattcatctacaatatggacaaaatatcaaaagaatgttgaggcttcacataataagggtttgaagactgttccaaatagcattcgctcagagaactataccattacctttgaagtcgaggaagagaagtttcccttttttggaaagaagtatcaactcaaattcgcgagtgacgcggtgtttgagaatcagtgcctggtccactttcccacccttatgagattatcaagggaagctggacttgaatatgtggagatccagaatttaaccgagttttatgatgataacagaacacaattcgctccaatgcttggtggttacggtgcaagttttttggatgctcgagggaagcttgttgctcgttcctacgacattttaggcttgtattcagcatttgtgttccagaagcctgatccagaggcaataccaccgattgtaactcccgacttgcctgatcctgataaaggtcacgaagaggagtggctccagccacagcaggcgtcagtggaagatgggagacgctcgcatgcggatgtgcttcccatagaccctgagaaaggcatcctgggtcctggacctgcagacatgaggctttagttgctggacattcaaatgcagctgagcctgggtagtgatttttttttccaccgtgggcattctcccatagtcccatgtggccatgtctcctttatgagtccacgaaaatagcgaacaacactacaaggctcatgaatcctgcacggacgcatgggctttcttgtaaaacaaatgctcgatacgtatgaccttgtacggtctttgatgtgtatatttgactgctcatactcagtaccattttttaattgcctaaattgtctagctgcaagacaacga

SEQ ID NO: 24528 - DNA, 1546 bp, Zea Mays
atttggcccaaggttcaccgctttgcctcgttcccgttctcctcctcgcaactctctcgtccatacgtcgtagccgccgcctgtctctcaccgccgacatcccgacagctctcagcccagatcgagcttcccccttcccaaatcgggttctgcttgggctcccgccaccgccgccctacaccaggtgccaaggccttcgccgacctcttcgccggcgaagagcgcccagcagagatgaatgtagcggtgccaccacaatctccacatcttcgtctatatgactttgccaagagtgccatcatcaaaatttttgcctttccttatgctacggtctgtgacctgtattgcgacggtggaatggatacagacaagtggtgtgatgcccaggttggccactacataggcatcgatgcctctgcatcgggtgtcaactatgcccgtgagctatgggagaacaggaggaaacctttcactgctgaattcatcgagttggatccttctgatgatggttttgaagctcaagtgcaggaaaagggcatccaagcagatatggtttgctgtatgcagcacttgcagatagttatgctttgagaatgaagaacaggcaaagaagcttctgaacaatgtatcatcacttctcaaacctggaggctacttctttggcataactccagattcatctacaatatggacaaaatatcaaaagaatgttgaggcttcacataataagggtttgaagactgttccaaatagcattcgctcagagaactataccattacctttgaagtcgaggaagagaagtttcccttttttggaaagaagtatcaactcaaattcgcgagtgacgcggtgtttgagaatcagtgcctggtccactttcccacccttatgagattatcaagggaagctggacttgaatatgtggagatccagaatttaaccgagttttatgatgataacagaacacaattcgctccaatgcttggtggttacggtgcaagttttttggatgctcgagggaagcttgttgctcgttcctacgacattttaggcttgtattcagcatttgtgttccagaagcctgatccagaggcaataccaccgattgtaactcccgacttgcctgatcctgataaaggtcacgaagaggagtggctccagccacagcaggcgtcagtggaagatgggagacgctcgcatgcggatgtgcttcccatagaccctgagaaaggcatcctgggtcctggacctgcagacatgaggctttagttgctggacattcaaatgcagctgagcctgggtagtgatttttttttccaccgtgggcattctcccatagtcccatgtggccatgtctcctttatgagtccacgaaaatagcgaacaacactacaaggctcatgaatcctgcacggacgcatgggctttcttgtaaaacaaatgctcgatacgtatgaccttgtacggtctttgatgtgtatatttgactgctcatactcagtaccattttttaattgcctaaattgtctagctgcaagacaacga

SEQ ID NO: 24529 - DNA, 1543 bp, Zea Mays
agcaagtataaattttcatgtatatttggcccaaggttcaccgctttgcctcgttcccgttctcctcctcgcaactctctcgtccatacgtcgtagccgccgcctgtctctcaccgccgacatcccgacagctctcagcccagatcgagcttcccccttcccaaatcgggttctgcttgggctcccgccaccgccgccctacaccaggtgccaaggccttcgccgacctcttcgccggcgaagagcgcccagcagttcattccaaattagcgagaaactccggaggaatcctgaaagtaattttacatttattggttgccaaatgcctaaggtctgtgacctgtattgcgacggtggaatggatacagacaagtggtgtgatgcccaggttggccactacataggcatcgatgcctctgcatcgggtgtcaactatgcccgtgagctatgggagaacaggaggaaacctttcactgctgaattcatcgagttggatccttctgatgatggttttgaagctcaagtgcaggaaaagggcatccaagcagatatggtttgctgtatgcagcacttgcagttatgctttgagaatgaagaacaggcaaagaagcttctgaacaatgtatcatcacttctcaaacctggaggctacttctttggcataactccagattcatctacaatatggacaaaatatcaaaagaatgttgaggcttcacataataagggtttgaagactgttccaaatagcattcgctcagagaactataccattacctttgaagtcgaggaagagaagtttcccttttttggaaagaagtatcaactcaaattcgcgagtgacgcggtgtttgagaatcagtgcctggtccactttcccacccttatgagattatcaagggaagctggacttgaatatgtggagatccagaatttaaccgagttttatgatgataacagaacacaattcgctccaatgcttggtggttacggtgcaagttttttggatgctcgagggaagcttgttgctcgttcctacgacattttaggcttgtattcagcatttgtgttccagaagcctgatccagaggcaataccaccgattgtaactcccgacttgcctgatcctgataaaggtcacgaagaggagtggctccagccacagcaggcgtcagtggaagatgggagacgctcgcatgcggatgtgcttcccatagaccctgagaaaggcatcctgggtcctggacctgcagacatgaggctttagttgctggacattcaaatgcagctgagcctgggtagtgatttttttttccaccgtgggcattctcccatagtcccatgtggccatgtctcctttatgagtccacgaaaatagcgaacaacactacaaggctcatgaatcctgcacggacgcatgggctttcttgtaaaacaaatgctcgatacgtatgaccttgtacggtctttgatgtgtatatttgactgctcatactcagtaccattttttaattgcctaaattgtctagctgcaagacaacga

SEQ ID NO: 24530 - DNA, 2145 bp, Zea Mays
gtcatgaattctactggtaatattttttataatattattagttttctaaattcaccaaaatatgtcaaaaaatatgcaaagtctataaaaccagcgtttcaggttttgtacataaacttagcttttctaattaaaactattatttatttgagtttcatgctgctatgctaccgcctaccgctatggtggagctgctatgctgccactttatgcgtgtgtaacacagaagctgccgaaatgggtagaaacatgtaacattataattttttaatgatagatagttaagatcagacctttaaactgtatactttgaatatgcaatcttttaacgttatgtagccaattttctctggaatttggttccacaatctccttttagtgtggataggtagagatagaagagtagagaagtgagaagagaagaaagaagagactacagagaaaagacagtggcagcaagtataaattttcatgtatatttggcccaaggttcaccgctttgcctcgttcccgttctcctcctcgcaactctctcgtccatacgtcgtagccgccgcctgtctctcaccgccgacatcccgacagctctcagcccagatcgagcttcccccttcccaaatcgggttctgcttgggctcccgccaccgccgccctacaccaggtgccaaggccttcgccgacctcttcgccggcgaagagcgcccagcagagatgaatgtagcggtgccaccacaatctccacatcttcgtctatatgactttgccaagagtgccatcatcaaaatttttgcctttccttatgctacggtctgctatatgctcctctcttttatgatcttcagttcattccaaattagcgagaaactccggaggaatcctgaaagtaattttacatttattggttgccaaatgcctaaggtctgtgacctgtattgcgacggtggaatggatacagacaagtggtgtgatgcccaggttggccactacataggcatcgatgcctctgcatcgggtgtcaactatgcccgtgagctatgggagaacaggaggaaacctttcactgctgaattcatcgagttggatccttctgatgatggttttgaagctcaagtgcaggaaaagggcatccaagcagatatggtttgctgtatgcagcacttgcagttatgctttgagaatgaagaacaggcaaagaagcttctgaacaatgtatcatcacttctcaaacctggaggctacttctttggcataactccagattcatctacaatatggacaaaatatcaaaagaatgttgaggcttcacataataagggtttgaagactgttccaaatagcattcgctcagagaactataccattacctttgaagtcgaggaagagaagtttcccttttttggaaagaagtatcaactcaaattcgcgagtgacgcggtgtttgagaatcagtgcctggtccactttcccacccttatgaggttgtgttgaaacagattatcaagggaagctggacttgaatatgtggagatccagaatttaaccgagttttatgatgataacagaacacaattcgctccaatgcttggtggttacggtgcaagttttttggatgctcgagggaagcttgttgctcgttcctacgacattttaggcttgtattcagcatttgtgttccagaagcctgatccagaggcaataccaccgattgtaactcccgacttgcctgatcctgataaaggtcacgaagaggagtggctccagccacagcaggcgtcagtggaagatgggagacgctcgcatgcggatgtgcttcccatagaccctgagaaaggcatcctgggtcctggacctgcagacatgaggctttagttgctggacattcaaatgcagctgagcctgggtagtgatttttttttccaccgtgggcattctcccatagtcccatgtggccatgtctcctttatgagtccacgaaaatagcgaacaacactacaaggctcatgaatcctgcacggacgcatgggctttcttgtaaaacaaatgctcgatacgtatgaccttgtacggtctttgatgtgtatatttgactgctcatactcagtaccattttttaattgcctaaattgtctagctgcaagacaacga

SEQ ID NO: 24531 - DNA, 1702 bp, Zea Mays
ccgtgctcatcttctcctcatcttcggattgttcgttgagagtgtcgtcatgaattctactgtgtggataggtagagatagaagagtagagaagtgagaagagaagaaagaagagactacagagaaaagacagtggcagcaagtataaattttcatgtatatttggcccaaggttcaccgctttgcctcgttcccgttctcctcctcgcaactctctcgtccatacgtcgtagccgccgcctgtctctcaccgccgacatcccgacagctctcagcccagatcgagcttcccccttcccaaatcgggttctgcttgggctcccgccaccgccgccctacaccaggtgccaaggccttcgccgacctcttcgccggcgaagagcgcccagcagagatgaatgtagcggtgccaccacaatctccacatcttcgtctatatgactttgccaagagtgccatcatcaaaatttttgcctttccttatgctacggtctgtgacctgtattgcgacggtggaatggatacagacaagtggtgtgatgcccaggttggccactacataggcatcgatgcctctgcatcgggtgtcaactatgcccgtgagctatgggagaacaggaggaaacctttcactgctgaattcatcgagttggatccttctgatgatggttttgaagctcaagtgcaggaaaagggcatccaagcagatatggtttgctgtatgcagcacttgcagttatgctttgagaatgaagaacaggcaaagaagcttctgaacaatgtatcatcacttctcaaacctggaggctacttctttggcataactccagattcatctacaatatggacaaaatatcaaaagaatgttgaggcttcacataataagggtttgaagactgttccaaatagcattcgctcagagaactataccattacctttgaagtcgaggaagagaagtttcccttttttggaaagaagtatcaactcaaattcgcgagtgacgcggtgtttgagaatcagtgcctggtccactttcccacccttatgagattatcaagggaagctggacttgaatatgtggagatccagaatttaaccgagttttatgatgataacagaacacaattcgctccaatgcttggtggttacggtgcaagttttttggatgctcgagggaagcttgttgctcgttcctacgacattttaggcttgtattcagcatttgtgttccagaagcctgatccagaggcaataccaccgattgtaactcccgacttgcctgatcctgataaaggtcacgaagaggagtggctccagccacagcaggcgtcagtggaagatgggagacgctcgcatgcggatgtgcttcccatagaccctgagaaaggcatcctgggtcctggacctgcagacatgaggctttagttgctggacattcaaatgcagctgagcctgggtagtgatttttttttccaccgtgggcattctcccatagtcccatgtggccatgtctcctttatgagtccacgaaaatagcgaacaacactacaaggctcatgaatcctgcacggacgcatgggctttcttgtaaaacaaatgctcgatacgtatgaccttgtacggtctttgatgtgtatatttgactgctcatactcagtaccattttttaattgcctaaattgtctagctgcaagacaacga

SEQ ID NO: 24532 - DNA, 1651 bp, Zea Mays
catgtgtggtccagtatctgttgtgtgccaccaaccacataaagaacctgcacttaccagaaaacagcatggcttggtatgttctacatgtgtataccaactgggatagcattaggctatgtttatggcggactggttggaaaatatctgaactggcgtgctgctttctggggagagtcaatattgatggttccttttgttattcttggttttgtaataaagccactaaacctcaaaggatttgctcacaacacaacaaaagaatatggccagatgcttaatcctgaggttcaagatcagataaataataatgcgacaaagcatgttttgcctggtggaattgaggatctttcagggaaggttccacaaaagttctccttgtccagtttttgccacggtatcatgactgaaattggtcgcttcagcaaagatatgaaagaactactacaagagaaggtttttgtcatcgttgttttaggttatatatcctacaatttcgtcattggtgcttattcctactggggcccaaaggcaggtcaagagatctacaatatggggagtgcagatcttatgtttggtggaattactatagtgtgtggaattattggatcactagcaggaggtttcatccttgacaagatagggtctactattcctaatgccttcaagcttctttcgggtgcgacatttgtaggggcaatattctgctttggtgctttttgtttcaagagcctttatgggttcataccctcctttgcagttggggagctttcagtgttcgcaactcaggcacctgtaaattttgtatgccttcacgccgtgaagccacatttgcggccattggcaatggccgtatccactgtttcaatccatatatttggcgatgtgccttcttcacctcttgttgggcttcttcaggacaaaatcaataattggagggccacagctcttattttgacatccatccttttcgctgctgttgtgttctggttcattggcatatttatccccagcgtcgatcgtttcaatgaagagagcgagcatggccttactgtcgccgagagatcaaatctcaggccgctccttgatgaaaaggacgagccacggacatctgactaaaacctacgcaagtcataaccttttatttcttggcttagtccgtagtttttcccttatgccatcaacatgtgaaatgtaaatttgcatgcccattggctgtacctgtacatatacgaggtttgttcgttttgcgttattcttttacttttttttgtacaggctacagaaacaagcaaaagagtgctagaattcctttttttacgaattaaaacattttagaatttctttttacgaatgtaaaacgtgttcggattgtgacatggcataactttctggttatgcggttatgctctgctcacgggaggctaggtgatgtcactgtatgcctagatggatctgcaactactctttcgtggctactttgagcacctcgaatccccttggggattggagtggattaagagcttgttcgattagttcttaatccatgtggatttgggtattctaattttttttaatctcgtccaatccatgtataacgggaataaccgaacaaggtttaaggtggaaatgaactaatttcttcttcaat

SEQ ID NO: 24533 - DNA, 1815 bp, Zea Mays
tgacaagccagtttttgtacagttggagggacgagggtggatgatataatcctttcaggcttattggtgttggcttgttagtgtggactatcgcaacagctggttgtggagtatcatttgatttctggtcaattactatatgccgcatgtttgttggcgttggcgaagcttcatttataagtctcgcagctccattcattgatgacaatgcaccggtagctcagaaaacagcatggcttggtatgttctacatgtgtataccaactgggatagcattaggctatgtttatggcggactggttggaaaatatctgaactggcgtgctgctttctggggagagtcaatattgatggttccttttgttattcttggttttgtaataaagccactaaacctcaaaggatttgctcacaacacaacaaaagaatatggccagatgcttaatcctgaggttcaagatcagataaataataatgcgacaaagcatgttttgcctggtggaattgaggatctttcagggaaggttccacaaaagttctccttgtccagtttttgccacggtatcatgactgaaattggtcgcttcagcaaagatatgaaagaactactacaagagaaggtttttgtcatcgttgttttaggttatatatcctacaatttcgtcattggtgcttattcctactggggcccaaaggcaggtcaagagatctacaatatggggagtgcagatcttatgtttggtggaattactatagtgtgtggaattattggatcactagcaggaggtttcatccttgacaagatagggtctactattcctaatgccttcaagcttctttcgggtgcgacatttgtaggggcaatattctgctttggtgctttttgtttcaagagcctttatgggttcataccctcctttgcagttggggagctttcagtgttcgcaactcaggcacctgtaaattttgtatgccttcacgccgtgaagccacatttgcggccattggcaatggccgtatccactgtttcaatccatatatttggcgatgtgccttcttcacctcttgttgggcttcttcaggacaaaatcaataattggagggccacagctcttattttgacatccatccttttcgctgctgttgtgttctggttcattggcatatttatccccagcgtcgatcgtttcaatgaagagagcgagcatggccttactgtcgccgagagatcaaatctcaggccgctccttgatgaaaaggacgagccacggacatctgactaaaacctacgcaagtcataaccttttatttcttggcttagtccgtagtttttcccttatgccatcaacatgtgaaatgtaaatttgcatgcccattggctgtacctgtacatatacgaggtttgttcgttttgcgttattcttttacttttttttgtacaggctacagaaacaagcaaaagagtgctagaattcctttttttacgaattaaaacattttagaatttctttttacgaatgtaaaacgtgttcggattgtgacatggcataactttctggttatgcggttatgctctgctcacgggaggctaggtgatgtcactgtatgcctagatggatctgcaactactctttcgtggctactttgagcacctcgaatccccttggggattggagtggattaagagcttgttcgattagttcttaatccatgtggatttgggtattctaattttttttaatctcgtccaatccatgtataacgggaataaccgaacaaggtttaaggtggaaatgaactaatttcttcttcaat

SEQ ID NO: 24534 - DNA, 2060 bp, Zea Mays
cttaatccgaagctaacagccccacggtttactttggcatacgacataaacaattcaattacttgtcatgttctgcattatcaacatgctgaactatattgatcgaggagtaatagcaagtaatggggtcaatggtacccgcaaaagttgttctggtggcacatgcacctcgggctcaggaattcaaggagacttcaatcttaataatcttgaagatggtacactgtcctcagcatttatggttgggttgttggtgtcttcgttgatatttgcaagccttgtaaaaagatataatcctttcaggcttattggtgttggcttgttagtgtggactatcgcaacagctggttgtggagtatcatttgatttctggtcaattactatatgccgcatgtttgttggcgttggcgaagcttcatttataagtctcgcagctccattcattgatgacaatgcaccggtagctcagaaaacagcatggcttggtatgttctacatgtgtataccaactgggatagcattaggctatgtttatggcggactggttggaaaatatctgaactggcgtgctgctttctggggagagtcaatattgatggttccttttgttattcttggttttgtaataaagccactaaacctcaaaggatttgctcacaacacaacaaaagaatatggccagatgcttaatcctgaggttcaagatcagataaataataatgcgacaaagcatgttttgcctggtggaattgaggatctttcagggaaggttccacaaaagttctccttgtccagtttttgccacggtatcatgactgaaattggtcgcttcagcaaagatatgaaagaactactacaagagaaggtttttgtcatcgttgttttaggttatatatcctacaatttcgtcattggtgcttattcctactggggcccaaaggcaggtcaagagatctacaatatggggagtgcagatcttatgtttggtggaattactatagtgtgtggaattattggatcactagcaggaggtttcatccttgacaagatagggtctactattcctaatgccttcaagcttctttcgggtgcgacatttgtaggggcaatattctgctttggtgctttttgtttcaagagcctttatgggttcataccctcctttgcagttggggagctttcagtgttcgcaactcaggcacctgtaaattttgtatgccttcacgccgtgaagccacatttgcggccattggcaatggccgtatccactgtttcaatccatatatttggcgatgtgccttcttcacctcttgttgggcttcttcaggacaaaatcaataattggagggccacagctcttattttgacatccatccttttcgctgctgttgtgttctggttcattggcatatttatccccagcgtcgatcgtttcaatgaagagagcgagcatggccttactgtcgccgagagatcaaatctcaggccgctccttgatgaaaaggacgagccacggacatctgactaaaacctacgcaagtcataaccttttatttcttggcttagtccgtagtttttcccttatgccatcaacatgtgaaatgtaaatttgcatgcccattggctgtacctgtacatatacgaggtttgttcgttttgcgttattcttttacttttttttgtacaggctacagaaacaagcaaaagagtgctagaattcctttttttacgaattaaaacattttagaatttctttttacgaatgtaaaacgtgttcggattgtgacatggcataactttctggttatgcggttatgctctgctcacgggaggctaggtgatgtcactgtatgcctagatggatctgcaactactctttcgtggctactttgagcacctcgaatccccttggggattggagtggattaagagcttgttcgattagttcttaatccatgtggatttgggtattctaattttttttaatctcgtccaatccatgtataacgggaataaccgaacaaggtttaaggtggaaatgaactaatttcttcttcaat

SEQ ID NO: 24535 - DNA, 2043 bp, Zea Mays
ctcgaatttctacgtttctcctcgttcgctcgctttcgtgattacttgtcatgttctgcattatcaacatgctgaactatattgatcgaggagtaatagcaagtaatggggtcaatggtacccgcaaaagttgttctggtggcacatgcacctcgggctcaggaattcaaggagacttcaatcttaataatcttgaagatggtacactgtcctcagcatttatggttgggttgttggtgtcttcgttgatatttgcaagccttgtaaaaagatataatcctttcaggcttattggtgttggcttgttagtgtggactatcgcaacagctggttgtggagtatcatttgatttctggtcaattactatatgccgcatgtttgttggcgttggcgaagcttcatttataagtctcgcagctccattcattgatgacaatgcaccggtagctcagaaaacagcatggcttggtatgttctacatgtgtataccaactgggatagcattaggctatgtttatggcggactggttggaaaatatctgaactggcgtgctgctttctggggagagtcaatattgatggttccttttgttattcttggttttgtaataaagccactaaacctcaaaggatttgctcacaacacaacaaaagaatatggccagatgcttaatcctgaggttcaagatcagataaataataatgcgacaaagcatgttttgcctggtggaattgaggatctttcagggaaggttccacaaaagttctccttgtccagtttttgccacggtatcatgactgaaattggtcgcttcagcaaagatatgaaagaactactacaagagaaggtttttgtcatcgttgttttaggttatatatcctacaatttcgtcattggtgcttattcctactggggcccaaaggcaggtcaagagatctacaatatggggagtgcagatcttatgtttggtggaattactatagtgtgtggaattattggatcactagcaggaggtttcatccttgacaagatagggtctactattcctaatgccttcaagcttctttcgggtgcgacatttgtaggggcaatattctgctttggtgctttttgtttcaagagcctttatgggttcataccctcctttgcagttggggagctttcagtgttcgcaactcaggcacctgtaaattttgtatgccttcacgccgtgaagccacatttgcggccattggcaatggccgtatccactgtttcaatccatatatttggcgatgtgccttcttcacctcttgttgggcttcttcaggacaaaatcaataattggagggccacagctcttattttgacatccatccttttcgctgctgttgtgttctggttcattggcatatttatccccagcgtcgatcgtttcaatgaagagagcgagcatggccttactgtcgccgagagatcaaatctcaggccgctccttgatgaaaaggacgagccacggacatctgactaaaacctacgcaagtcataaccttttatttcttggcttagtccgtagtttttcccttatgccatcaacatgtgaaatgtaaatttgcatgcccattggctgtacctgtacatatacgaggtttgttcgttttgcgttattcttttacttttttttgtacaggctacagaaacaagcaaaagagtgctagaattcctttttttacgaattaaaacattttagaatttctttttacgaatgtaaaacgtgttcggattgtgacatggcataactttctggttatgcggttatgctctgctcacgggaggctaggtgatgtcactgtatgcctagatggatctgcaactactctttcgtggctactttgagcacctcgaatccccttggggattggagtggattaagagcttgttcgattagttcttaatccatgtggatttgggtattctaattttttttaatctcgtccaatccatgtataacgggaataaccgaacaaggtttaaggtggaaatgaactaatttcttcttcaat

SEQ ID NO: 24536 - DNA, 2143 bp, Zea Mays
gcacgtccactagcgcctgtctccctcgttgcaatcaccacgccgccggagtccggagggcagcgtgcgaactgcgaaaccgaactcggggagaggaaggaatctcctaccagccggcagccaacacccagcattcgtgctcccgtagccttcgtcgtccccagccccacggccgctgcgtcgccttcccctctcggtcgaaaccacaacggcctcttccggcataacaatatgcaccgaatattcagctcatccgctctcctataaaaacgaagcgcaaatccaaaaaaaaaaaaaccccgcccgcacgacgcattgtccgttccgtttggacccatgatatatctcgctgggatcttgaccgtgcgcgagacgaatctcctcgtgcggtaaccgataccccccaagtcaaaaatcagcccataaaatttttatgggcggaggatcacccgtcgccgcagttcaggacgcgagcgacgacggcgccagggtcgtggtgctagtcgcgggttctcccgtcgattccgcctccgattccctccctcctcccgttgcggcgactcctgctcctgcggcggaggccaagcaggagtcggtgtcggagacggaggaaactaagcaggcggcggcggcggcggcagcaccagcaacagcggcaggaggtgtgcaggccatggcggtcaccgtagtgcgggacgtcgagacgggcctggacgcgagcaccagcgaccgggacggtgacaagccttcctggttcacacctaagagattacttgtcatgttctgcattatcaacatgctgaactatattgatcgaggagtaatagcaagtaatggggtcaatggtacccgcaaaagttgttctggtggcacatgcacctcgggctcaggaattcaaggagacttcaatcttaataatcttgaagatggtacactgtcctcagcatttatggttgggttgttggtgtcttcgttgatatttgcaagccttgtaaaaagatataatcctttcaggcttattggtgttggcttgttagtgtggactatcgcaacagctggttgtggagtatcatttgatttctggtcaattactatatgccgcatgtttgttggcgttggcgaagcttcatttataagtctcgcagctccattcattgatgacaatgcaccggtagctcagaaaacagcatggcttggtatgttctacatgtgtataccaactgggatagcattaggctatgtttatggcggactggttggaaaatatctgaactggcgtgctgctttctggggagagtcaatattgatggttccttttgttattcttggttttgtaataaagccactaaacctcaaaggatttgctcacaacacaacaaaagaatatggccagatgcttaatcctgaggttcaagatcagataaataataatgcgacaaagcatgttttgcctggtggaattgaggatctttcagggaaggttccacaaaagttctccttgtccagtttttgccacggtatcatgactgaaattggtcgcttcagcaaagatatgaaagaactactacaagagaaggtttttgtcatcgttgttttaggttatatatcctacaatttcgtcattggtgcttattcctactggggcccaaaggcaggtcaagagatctacaatatggggagtgcagatcttatgtttggtggaattactatagtgtgtggaattattggatcactagcaggaggtttcatccttgacaagatagggtctactattcctaatgccttcaagcttctttcgggtgcgacatttgtaggggcaatattctgctttggtgctttttgtttcaagagcctttatgggttcataccctcctttgcagttggggagctttcagtgttcgcaactcaggcacctgtaaattttgtatgccttcacgccgtgaagccacatttgcggccattggcaatggccgtatccactgtttcaatccatatatttggcgatgtgccttcttcacctcttgttgggcttcttcaggacaaaatcaataattggagggccacagctcttattttgacatccatccttttcgctgctgttgtgttctggttcattggagcattttgatgttatgaccacttg

SEQ ID NO: 24537 - DNA, 1844 bp, Zea Mays
caataacctgttggaagtctgaacggataataagcgccatcggcaacagaactgataggagagaggacagaacccatacaaggttgcctagatattaccctccagatcttcagatattgcaagtcccgttacttcatgtgacagacaacggcactgcaccagagatctgaatacaagtatcgttgcaaaacgagatctgaacaagcaggcgttagcggttgtgactatgtttttctttttcttttttacgtatacataggttctatacattcgcatcatagccgatcgatccaacgaaggcctgaaagcagacacaagggccaatgggccagcgtgcatcttgtatgcaagcaaactcagcagcgcagttcaacaagcataggcacaaccgtaaaggtataaatacaaggtgcagagcatctggatcacaagttcacaacgtcgcacacacctcatcactgggccgccttccccagcgccgcctcgagccgcttgcaatcgacgaggtaagcgaacccgtacgccatgttggcgagcgtggcatcctgcaggtcctggctggccgtggccgtggcgtcggcggagaagaacacgcggaaccccctgacgaaggcgtcccgcgcggtggtctcgcagcacaggttggtcatcacgccggccacgatcacctccccggcgcccatccgccgcagcgtcgcctccagccccgtgcccacgaaggcgctgtacgtgcccttctccaccacgaggtccccctgggcgcggccggcccccgggagcagctcggccgcgggcgtgccggcgtcgatgcggtcgccgggccaccactcgccgagcgggggcaggcgcgggaccgggtccacgtggcgggtgtacacgaccggcacgcccgcggcgcggcacagagcgacggtggacgcgatggccggcatgatcggggcggccagcgaggcgaagtggccctgcacgtcgatcacgaggagcacggccgcgcgggggtccggatctcggcggcgggtctcgtacttggtgtacgtggtggcgagaggcggcatggtgattgagcggcgggcggtgcgatccccgctacgctacgtgcgcggataggatgaggccggaggacagctgttgcagagacgcgattgagggaatagctggttcccgcgcggacttaacatccgtcacccggttgcttagagtaggtccggtgtcatctgatgccacgtgaagcacgagcactctccacatctccgagttcgacgaaccacccaggcacccacacgccaacacggtggccaccagctcgtgcacaacatccgtgtgcacatccgtccgactcggccacgccgccggcccaaacgctgtgttgagtggtactggtacagcgtggcccgagccttctccattccatcgtgtgtgctctttctcttccatgacaatgactgggcgccgacctacgccaggtggtggtcagttgtagaggagatggtctctgacgcaagagtccggtactacaaaggctcaagacaaaatgatggagagaaaaagataaagaattaatcgaagagccaatcttatagacttatagtcagctttattatataagtgtatttattgttgattctagatgatatgtccaatgagttagaaccaccaatagactctattattaaactggctcttataagcaaagagaactaccagctgtgtcaaattccttctcttccttactatggagcaaaacggagcaccaaaaccctcttccttaagtaaattatctgcatcgactgcgaatagcatgtgttatcgacagattctgaaatatgaccacattgcactgcgag

SEQ ID NO: 24538 - DNA, 1482 bp, Zea Mays
aggaaaatgacctcctttttcagtaatgccatttaattggagaaaaaaacgtattcactttcatgatttcatgctgaatgtacatagtcgtcttcagatgcacaaaggtgtttcagatccccttgatgttgtagcagctgagatttcagatgaggccatcatattatgtcttgatgagtttatggtaactgatgttgctgatgctatgattctgaaccgtctgttcagacaattgttcagcaaaggcgttattcttgtttcgacttctaaccgtgctccagataagctttatgaaggtggcttacaacgggaccttttcttgccatttattgacaccttgaaagaaagatgcatcgtgcatgccattggatctgcggtggactatcgtcaactgggttctgctgaacaaggtttctattttgtcggaaaacattacagtacgcttctgaaacagaagctccagtctttaattggagatgagaaacccagcccacaaactgttgaagtaattatgggaaggaaattacaggttcccctaggagcaaatggttgtgcatattttccttttgaagacctttgtgataaacctttaggtgcagcagattactttggactctttaaaaaatttcacaccctggcacttgatggtattccaaagcttgggtctagtaacagaacagcagcttatcggttcgtcacactgattgatgttatgtacgagaacaaggcaaggctgttatgtacagccgaggctggaccagtaggactgttcgagaatatcgtgactgttgctgaagcacggaaggtttcaccaagatcttcacgctcacagaaaagcgacgacactgacctatgcgtggacaatgagcttggatttgccaaggatcgtacgattagcaggttgacagagatcaacagcagagaatatttggaggacttcgaaatgagattgaggcaacagcagcagctgcccttgcaaggtctagataaaaggtggtgatgctgtactaaacataagaagcagaaggcttctgcgcctcatcttgaaattcttgtattcacacccacctggcttacataggcaactgagaagctatgcttttccaacagtggtgcatgtaaatgtccaataaagctatgtaagggcatttttgctaacaggtgagtgatctataaaatggcccaacctgggggaggggggataccatatcgttttttttagtgtatcacatatttccaaacctttagagaggcctcctaaggctcaaaaacagcatgagttacactgcataaagccatatataggctgaaagctttcgctgaactttgtgaattgagggaaaaaaagtctaacaattgttcatgtttttctattgtacgagcttttctgacatgcttgacgtagtaaggaagatctggttattattgttgcgtcatgtctggagcagatttgctttattttccatggaaacctgccttttc

SEQ ID NO: 24539 - DNA, 2397 bp, Zea Mays
gcgcagtagcagtgtagcacccccacaattccagctcacgctgcactcctccatcccagtcgacctgttcccaacttcccatcccctcggcaccggcccgactaccggagcctcttgccgcatttttcagactgtcctgtttcgtgacgtcccaggattctaggagaagagaacaccctcgcccccctggggcatagtcgctgccgagccagtggtactggccgcgacggagcggtcagaagctgcggcggccggcgcggtttcggtttcggtttcctggctggcccgaggagtttgactcctctcctgatttgtggctcataacttctttatggtgtttggtgtgcctagaaagtggagaaataagatacacagtggaagatgagatcagttgttcggtcacttcgccagcttcgccgtttcactcagcaccatgcagaggggcactcacaagcaaccagattgttcgggcagcagaacgctttaatcatgtgcggttcgacatctggttcactgagcacgttacgttgtaatggtgaaattagcagatttgcaagccctggcgtcgagttgatgaggtccatgttctctactgtagtgactgatccgatcaaagatattggaagaggtggtccaatggtggaatatgagaggagaatagcatcaggagagctagtagacggtgatagctttcaggttgatacaattcaacaattacaaaggctctatgaggagttgattgagaatgaagaagactgtcagctggatagatataaatcatctgagaaatcaggccggagtcgatggctatggtcccgcctcattactcagccttctacgtatgctcctattaagggcctttacctctatggtggtgttggtacagggaagacaatgcttatggacttgttctatgaacagctgccatttaattggagaaaaaaacgtattcactttcatgatttcatgctgaatgtacatagtcgtcttcagatgcacaaaggtgtttcagatccccttgatgttgtagcagctgagatttcagatgaggccatcatattatgtcttgatgagtttatggtaactgatgttgctgatgctatgattctgaaccgtctgttcagacaattgttcagcaaaggcgttgtatgtggctactattttcttccattttcttatgggactaaactactcagataagctttatgaaggtggcttacaacgggaccttttcttgccatttattgacaccttgaaagaaagatgcatcgtgcatgccattggatctgcggtggactatcgtcaactgggttctgctgaacaaggtttctattttgtcggaaaacattacagtacgcttctgaaacagaagctccagtctttaattggagatgagaaacccagcccacaaactgttgaagtaattatgggaaggaaattacaggttcccctaggagcaaatggttgtgcatattttccttttgaagacctttgtgataaacctttaggtgcagcagattactttggactctttaaaaaatttcacaccctggcacttgatggtattccaaagcttgggtctagtaacagaacagcagcttatcggttcgtcacactgattgatgttatgtacgagaacaaggcaaggctgttatgtacagccgaggctggaccagtaggactgttcgagaatatcgtgactgttgctgaagcacggaaggtttcaccaagatcttcacgctcacagaaaagcgacgacactgacctatgcgtggacaatgagcttggatttgccaaggatcgtacgattagcaggttgacagagatcaacagcagagaatatttggaggacttcgaaatgagattgaggcaacagcagcagctgcccttgcaaggtctagataaaaggtggtgatgctgtactaaacataagaagcagaaggcttctgcgcctcatcttgaaattcttgtattcacacccacctggcttacataggcaactgagaagctatgcttttccaacagtggtgcatgtaaatgtccaataaagctatgtaagggcatttttgctaacaggtgagtgatctataaaatggcccaacctgggggaggggggataccatatcgttttttttagtgtatcacatatttccaaacctttagagaggcctcctaaggctcaaaaacagcatgagttacactgcataaagccatatataggctgaaagctttcgctgaactttgtgaattgagggaaaaaaagtctaacaattgttcatgtttttctattgtacgagcttttctgacatgcttgacgtagtaaggaagatctggttattattgttgcgtcatgtctggagcagatttgctttattttccatggaaacctgccttttc

SEQ ID NO: 24540 - DNA, 2477 bp, Zea Mays
gcgcagtagcagtgtagcacccccacaattccagctcacgctgcactcctccatcccagtcgacctgttcccaacttcccatcccctcggcaccggcccgactaccggagcctcttgccgcatttttcagactgtcctgtttcgtgacgtcccaggattctaggagaagagaacaccctcgcccccctggggcatagtcgctgccgagccagtggtactggccgcgacggagcggtcagaagctgcggcggccggcgcggtttcggtttcggtttcctggctggcccgaggagtttgactcctctcctgatttgtgcgccggggcgtctcttgttctgctgcagcggattgtcgcggactggacgcggtgaggcggacatccctgtgcggaaggcgtgctcgggcagggccagcccaaccgccgttcgtgcgctagagttcctcgctcagaaagtggagaaataagatacacagtggaagatgagatcagttgttcggtcacttcgccagcttcgccgtttcactcagcaccatgcagaggggcactcacaagcaaccagattgttcgggcagcagaacgctttaatcatgtgcggttcgacatctggttcactgagcacgttacgttgtaatggtgaaattagcagatttgcaagccctggcgtcgagttgatgaggtccatgttctctactgtagtgactgatccgatcaaagatattggaagaggtggtccaatggtggaatatgagaggagaatagcatcaggagagctagtagacggtgatagctttcaggttgatacaattcaacaattacaaaggctctatgaggagttgattgagaatgaagaagactgtcagctggatagatataaatcatctgagaaatcaggccggagtcgatggctatggtcccgcctcattactcagccttctacgtatgctcctattaagggcctttacctctatggtggtgttggtacagggaagacaatgcttatggacttgttctatgaacagctgccatttaattggagaaaaaaacgtattcactttcatgatttcatgctgaatgtacatagtcgtcttcagatgcacaaaggtgtttcagatccccttgatgttgtagcagctgagatttcagatgaggccatcatattatgtcttgatgagtttatggtaactgatgttgctgatgctatgattctgaaccgtctgttcagacaattgttcagcaaaggcgttattcttgtttcgacttctaaccgtgctccagataagctttatgaaggtggcttacaacgggaccttttcttgccatttattgacaccttgaaagaaagatgcatcgtgcatgccattggatctgcggtggactatcgtcaactgggttctgctgaacaaggtttctattttgtcggaaaacattacagtacgcttctgaaacagaagctccagtctttaattggagatgagaaacccagcccacaaactgttgaagtaattatgggaaggaaattacaggttcccctaggagcaaatggttgtgcatattttccttttgaagacctttgtgataaacctttaggtgcagcagattactttggactctttaaaaaatttcacaccctggcacttgatggtattccaaagcttgggtctagtaacagaacagcagcttatcggttcgtcacactgattgatgttatgtacgagaacaaggcaaggctgttatgtacagccgaggctggaccagtaggactgttcgagaatatcgtgactgttgctgaagcacggaaggtttcaccaagatcttcacgctcacagaaaagcgacgacactgacctatgcgtggacaatgagcttggatttgccaaggatcgtacgattagcaggttgacagagatcaacagcagagaatatttggaggacttcgaaatgagattgaggcaacagcagcagctgcccttgcaaggtctagataaaaggtggtgatgctgtactaaacataagaagcagaaggcttctgcgcctcatcttgaaattcttgtattcacacccacctggcttacataggcaactgagaagctatgcttttccaacagtggtgcatgtaaatgtccaataaagctatgtaagggcatttttgctaacaggtgagtgatctataaaatggcccaacctgggggaggggggataccatatcgttttttttagtgtatcacatatttccaaacctttagagaggcctcctaaggctcaaaaacagcatgagttacactgcataaagccatatataggctgaaagctttcgctgaactttgtgaattgagggaaaaaaagtctaacaattgttcatgtttttctattgtacgagcttttctgacatgcttgacgtagtaaggaagatctggttattattgttgcgtcatgtctggagcagatttgctttattttccatggaaacctgccttttc

SEQ ID NO: 24541 - DNA, 2606 bp, Zea Mays
gcgcagtagcagtgtagcacccccacaattccagctcacgctgcactcctccatcccagtcgacctgttcccaacttcccatcccctcggcaccggcccgactaccggagcctcttgccgcatttttcagactgtcctgtttcgtgacgtcccaggattctaggagaagagaacaccctcgcccccctggggcatagtcgctgccgagccagtggtactggccgcgacggagcggtcagaagctgcggcggccggcgcggtttcggtttcggtttcctggctggcccgaggagtttgactcctctcctgatttgtggaaaagtggttctagtacagagttgtcttgaggccccgtcgctgtctgtctcctcacgcttgactgctcgccggcggcgccactgtcggtggcagctactaatcgccgcgtccggtggccgcgttgcagcgccggggcgtctcttgttctgctgcagcggattgtcgcggactggacgcggtgaggcggacatccctgtgcggaaggcgtgctcgggcagggccagcccaaccgccgttcgtgcgctagagttcctcgctcagaaagtggagaaataagatacacagtggaagatgagatcagttgttcggtcacttcgccagcttcgccgtttcactcagcaccatgcagaggggcactcacaagcaaccagattgttcgggcagcagaacgctttaatcatgtgcggttcgacatctggttcactgagcacgttacgttgtaatggtgaaattagcagatttgcaagccctggcgtcgagttgatgaggtccatgttctctactgtagtgactgatccgatcaaagatattggaagaggtggtccaatggtggaatatgagaggagaatagcatcaggagagctagtagacggtgatagctttcaggttgatacaattcaacaattacaaaggctctatgaggagttgattgagaatgaagaagactgtcagctggatagatataaatcatctgagaaatcaggccggagtcgatggctatggtcccgcctcattactcagccttctacgtatgctcctattaagggcctttacctctatggtggtgttggtacagggaagacaatgcttatggacttgttctatgaacagctgccatttaattggagaaaaaaacgtattcactttcatgatttcatgctgaatgtacatagtcgtcttcagatgcacaaaggtgtttcagatccccttgatgttgtagcagctgagatttcagatgaggccatcatattatgtcttgatgagtttatggtaactgatgttgctgatgctatgattctgaaccgtctgttcagacaattgttcagcaaaggcgttattcttgtttcgacttctaaccgtgctccagataagctttatgaaggtggcttacaacgggaccttttcttgccatttattgacaccttgaaagaaagatgcatcgtgcatgccattggatctgcggtggactatcgtcaactgggttctgctgaacaaggtttctattttgtcggaaaacattacagtacgcttctgaaacagaagctccagtctttaattggagatgagaaacccagcccacaaactgttgaagtaattatgggaaggaaattacaggttcccctaggagcaaatggttgtgcatattttccttttgaagacctttgtgataaacctttaggtgcagcagattactttggactctttaaaaaatttcacaccctggcacttgatggtattccaaagcttgggtctagtaacagaacagcagcttatcggttcgtcacactgattgatgttatgtacgagaacaaggcaaggctgttatgtacagccgaggctggaccagtaggactgttcgagaatatcgtgactgttgctgaagcacggaaggtttcaccaagatcttcacgctcacagaaaagcgacgacactgacctatgcgtggacaatgagcttggatttgccaaggatcgtacgattagcaggttgacagagatcaacagcagagaatatttggaggacttcgaaatgagattgaggcaacagcagcagctgcccttgcaaggtctagataaaaggtggtgatgctgtactaaacataagaagcagaaggcttctgcgcctcatcttgaaattcttgtattcacacccacctggcttacataggcaactgagaagctatgcttttccaacagtggtgcatgtaaatgtccaataaagctatgtaagggcatttttgctaacaggtgagtgatctataaaatggcccaacctgggggaggggggataccatatcgttttttttagtgtatcacatatttccaaacctttagagaggcctcctaaggctcaaaaacagcatgagttacactgcataaagccatatataggctgaaagctttcgctgaactttgtgaattgagggaaaaaaagtctaacaattgttcatgtttttctattgtacgagcttttctgacatgcttgacgtagtaaggaagatctggttattattgttgcgtcatgtctggagcagatttgctttattttccatggaaacctgccttttc

SEQ ID NO: 24542 - DNA, 2186 bp, Zea Mays
gcgcagtagcagtgtagcacccccacaattccagctcacgctgcactcctccatcccagtcgacctgttcccaacttcccatcccctcggcaccggcccgactaccggagcctcttgccgcatttttcagactgtcctgtttcgtgacgtcccaggattctaggagaagagaacaccctcgcccccctggggcatagtcgctgccgagccagtggtactggccgcgacggagcggtcagaagctgcggcggccggcgcggtttcggtttcggtttcctggctggcccgaggagtttgactcctctcctgatttgtgaaagtggagaaataagatacacagtggaagatgagatcagttgttcggtcacttcgccagcttcgccgtttcactcagcaccatgcagaggggcactcacaagcaaccagattgttcgggcagcagaacgctttaatcatgtgcggttcgacatctggttcactgagcacgttacgttgtaatggtgaaattagcagatttgcaagccctggcgtcgagttgatgaggtccatgttctctactgtagtgactgatccgatcaaagatattggaagaggtggtccaatggtggaatatgagaggagaatagcatcaggagagctagtagacggtgatagctttcaggttgatacaattcaacaattacaaaggctctatgaggagttgattgagaatgaagaagactgtcagctggatagatataaatcatctgagaaatcaggccggccatttaattggagaaaaaaacgtattcactttcatgatttcatgctgaatgtacatagtcgtcttcagatgcacaaaggtgtttcagatccccttgatgttgtagcagctgagatttcagatgaggccatcatattatgtcttgatgagtttatggtaactgatgttgctgatgctatgattctgaaccgtctgttcagacaattgttcagcaaaggcgttataagctttatgaaggtggcttacaacgggaccttttcttgccatttattgacaccttgaaagaaagatgcatcgtgcatgccattggatctgcggtggactatcgtcaactgggttctgctgaacaaggtttctattttgtcggaaaacattacagtacgcttctgaaacagaagctccagtctttaattggagatgagaaacccagcccacaaactgttgaagtaattatgggaaggaaattacaggttcccctaggagcaaatggttgtgcatattttccttttgaagacctttgtgataaacctttaggtgcagcagattactttggactctttaaaaaatttcacaccctggcacttgatggtattccaaagcttgggtctagtaacagaacagcagcttatcggttcgtcacactgattgatgttatgtacgagaacaaggcaaggctgttatgtacagccgaggctggaccagtaggactgttcgagaatatcgtgactgttgctgaagcacggaaggtttcaccaagatcttcacgctcacagaaaagcgacgacactgacctatgcgtggacaatgagcttggatttgccaaggatcgtacgattagcaggttgacagagatcaacagcagagaatatttggaggacttcgaaatgagattgaggcaacagcagcagctgcccttgcaaggtctagataaaaggtggtgatgctgtactaaacataagaagcagaaggcttctgcgcctcatcttgaaattcttgtattcacacccacctggcttacataggcaactgagaagctatgcttttccaacagtggtgcatgtaaatgtccaataaagctatgtaagggcatttttgctaacaggtgagtgatctataaaatggcccaacctgggggaggggggataccatatcgttttttttagtgtatcacatatttccaaacctttagagaggcctcctaaggctcaaaaacagcatgagttacactgcataaagccatatataggctgaaagctttcgctgaactttgtgaattgagggaaaaaaagtctaacaattgttcatgtttttctattgtacgagcttttctgacatgcttgacgtagtaaggaagatctggttattattgttgcgtcatgtctggagcagatttgctttattttccatggaaacctgccttttc

SEQ ID NO: 24543 - DNA, 2316 bp, Zea Mays
gcgcagtagcagtgtagcacccccacaattccagctcacgctgcactcctccatcccagtcgacctgttcccaacttcccatcccctcggcaccggcccgactaccggagcctcttgccgcatttttcagactgtcctgtttcgtgacgtcccaggattctaggagaagagaacaccctcgcccccctggggcatagtcgctgccgagccagtggtactggccgcgacggagcggtcagaagctgcggcggccggcgcggtttcggtttcggtttcctggctggcccgaggagtttgactcctctcctgatttgtgaaagtggagaaataagatacacagtggaagatgagatcagttgttcggtcacttcgccagcttcgccgtttcactcagcaccatgcagaggggcactcacaagcaaccagattgttcgggcagcagaacgctttaatcatgtgcggttcgacatctggttcactgagcacgttacgttgtaatggtgaaattagcagatttgcaagccctggcgtcgagttgatgaggtccatgttctctactgtagtgactgatccgatcaaagatattggaagaggtggtccaatggtggaatatgagaggagaatagcatcaggagagctagtagacggtgatagctttcaggttgatacaattcaacaattacaaaggctctatgaggagttgattgagaatgaagaagactgtcagctggatagatataaatcatctgagaaatcaggccggagtcgatggctatggtcccgcctcattactcagccttctacgtatgctcctattaagggcctttacctctatggtggtgttggtacagggaagacaatgcttatggacttgttctatgaacagctgccatttaattggagaaaaaaacgtattcactttcatgatttcatgctgaatgtacatagtcgtcttcagatgcacaaaggtgtttcagatccccttgatgttgtagcagctgagatttcagatgaggccatcatattatgtcttgatgagtttatggtaactgatgttgctgatgctatgattctgaaccgtctgttcagacaattgttcagcaaaggcgttattcttgtttcgacttctaaccgtgctccagataagctttatgaaggtggcttacaacgggaccttttcttgccatttattgacaccttgaaagaaagatgcatcgtgcatgccattggatctgcggtggactatcgtcaactgggttctgctgaacaaggtttctattttgtcggaaaacattacagtacgcttctgaaacagaagctccagtctttaattggagatgagaaacccagcccacaaactgttgaagtaattatgggaaggaaattacaggttcccctaggagcaaatggttgtgcatattttccttttgaagacctttgtgataaacctttagaaaaatttcacaccctggcacttgatggtattccaaagcttgggtctagtaacagaacagcagcttatcggttcgtcacactgattgatgttatgtacgagaacaaggcaaggctgttatgtacagccgaggctggaccagtaggactgttcgagaatatcgtgactgttgctgaagcacggaaggtttcaccaagatcttcacgctcacagaaaagcgacgacactgacctatgcgtggacaatgagcttggatttgccaaggatcgtacgattagcaggttgacagagatcaacagcagagaatatttggaggacttcgaaatgagattgaggcaacagcagcagctgcccttgcaaggtctagataaaaggtggtgatgctgtactaaacataagaagcagaaggcttctgcgcctcatcttgaaattcttgtattcacacccacctggcttacataggcaactgagaagctatgcttttccaacagtggtgcatgtaaatgtccaataaagctatgtaagggcatttttgctaacaggtgagtgatctataaaatggcccaacctgggggaggggggataccatatcgttttttttagtgtatcacatatttccaaacctttagagaggcctcctaaggctcaaaaacagcatgagttacactgcataaagccatatataggctgaaagctttcgctgaactttgtgaattgagggaaaaaaagtctaacaattgttcatgtttttctattgtacgagcttttctgacatgcttgacgtagtaaggaagatctggttattattgttgcgtcatgtctggagcagatttgctttattttccatggaaacctgccttttc

SEQ ID NO: 24544 - DNA, 2368 bp, Zea Mays
atccaagcgcagtagcagtgtagcacccccacaattccagctcacgctgcactcctccatcccagtcgacctgttcccaacttcccatcccctcggcaccggcccgactaccggagcctcttgccgcatttttcagactgtcctgtttcgtgacgtcccaggattctaggagaagagaacaccctcgcccccctggggcatagtcgctgccgagccagtggtactggccgcgacggagcggtcagaagctgcggcggccggcgcggtttcggtttcggtttcctggctggcccgaggagtttgactcctctcctgatttgtgaaagtggagaaataagatacacagtggaagatgagatcagttgttcggtcacttcgccagcttcgccgtttcactcagcaccatgcagaggggcactcacaagcaaccagattgttcgggcagcagaacgctttaatcatgtgcggttcgacatctggttcactgagcacgttacgttgtaatggtgaaattagcagatttgcaagccctggcgtcgagttgatgaggtccatgttctctactgtagtgactgatccgatcaaagatattggaagaggtggtccaatggtggaatatgagaggagaatagcatcaggagagctagtagacggtgatagctttcaggttgatacaattcaacaattacaaaggctctatgaggagttgattgagaatgaagaagactgtcagctggatagatataaatcatctgagaaatcaggccggagtcgatggctatggtcccgcctcattactcagccttctacgtatgctcctattaagggcctttacctctatggtggtgttggtacagggaagacaatgcttatggacttgttctatgaacagctgccatttaattggagaaaaaaacgtattcactttcatgatttcatgctgaatgtacatagtcgtcttcagatgcacaaaggtgtttcagatccccttgatgttgtagcagctgagatttcagatgaggccatcatattatgtcttgatgagtttatggtaactgatgttgctgatgctatgattctgaaccgtctgttcagacaattgttcagcaaaggcgttgtatgtggctactattttcttccattttcttatgggactaaactactcagataagctttatgaaggtggcttacaacgggaccttttcttgccatttattgacaccttgaaagaaagatgcatcgtgcatgccattggatctgcggtggactatcgtcaactgggttctgctgaacaaggtttctattttgtcggaaaacattacagtacgcttctgaaacagaagctccagtctttaattggagatgagaaacccagcccacaaactgttgaagtaattatgggaaggaaattacaggttcccctaggagcaaatggttgtgcatattttccttttgaagacctttgtgataaacctttaggtgcagcagattactttggactctttaaaaaatttcacaccctggcacttgatggtattccaaagcttgggtctagtaacagaacagcagcttatcggttcgtcacactgattgatgttatgtacgagaacaaggcaaggctgttatgtacagccgaggctggaccagtaggactgttcgagaatatcgtgactgttgctgaagcacggaaggtttcaccaagatcttcacgctcacagaaaagcgacgacactgacctatgcgtggacaatgagcttggatttgccaaggatcgtacgattagcaggttgacagagatcaacagcagagaatatttggaggacttcgaaatgagattgaggcaacagcagcagctgcccttgcaaggtctagataaaaggtggtgatgctgtactaaacataagaagcagaaggcttctgcgcctcatcttgaaattcttgtattcacacccacctggcttacataggcaactgagaagctatgcttttccaacagtggtgcatgtaaatgtccaataaagctatgtaagggcatttttgctaacaggtgagtgatctataaaatggcccaacctgggggaggggggataccatatcgttttttttagtgtatcacatatttccaaacctttagagaggcctcctaaggctcaaaaacagcatgagttacactgcataaagccatatataggctgaaagctttcgctgaactttgtgaattgagggaaaaaaagtctaacaattgttcatgtttttctattgtacgagcttttctgacatgcttgacgtagtaaggaagatctggttattattgttgcgtcatgtctggagcagatttgctttattttccatggaaacctgccttttc

SEQ ID NO: 24545 - DNA, 2297 bp, Zea Mays
gaactgttaattaatcgcctatccaagcgcagtagcagtgtagcacccccacaattccagctcacgctgcactcctccatcccagtcgacctgttcccaacttcccatcccctcggcaccggcccgactaccggagcctcttgccgcatttttcagactgtcctgtttcgtgacgtcccaggattctaggagaagagaacaccctcgcccccctggggcatagtcgctgccgagccagtggtactggccgcgacggagcggtcagaagctgcggcggccggcgcggtttcggtttcggtttcctggctggcccgaggagtttgactcctctcctgatttgtggctcataacttctttatggtgtttggtgtgcctagaaagtggagaaataagatacacagtggaagatgagatcagttgttcggtcacttcgccagcttcgccgtttcactcagcaccatgcagaggggcactcacaagcaaccagattgttcgggcagcagaacgctttaatcatgtgcggttcgacatctggttcactgagcacgttacgttgtaatggtgaaattagcagatttgcaagccctggcgtcgagttgatgaggtccatgttctctactgtagtgactgatccgatcaaagatattggaagaggtggtccaatggtggaatatgagaggagaatagcatcaggagagctagtagacggtgatagctttcaggttgatacaattcaacaattacaaaggctctatgaggagttgattgagaatgaagaagactgtcagctggatagatataaatcatctgagaaatcaggccggccatttaattggagaaaaaaacgtattcactttcatgatttcatgctgaatgtacatagtcgtcttcagatgcacaaaggtgtttcagatccccttgatgttgtagcagctgagatttcagatgaggccatcatattatgtcttgatgagtttatggtaactgatgttgctgatgctatgattctgaaccgtctgttcagacaattgttcagcaaaggcgttgtatgtggctactattttcttccattttcttatgggactaaactactcagataagctttatgaaggtggcttacaacgggaccttttcttgccatttattgacaccttgaaagaaagatgcatcgtgcatgccattggatctgcggtggactatcgtcaactgggttctgctgaacaaggtttctattttgtcggaaaacattacagtacgcttctgaaacagaagctccagtctttaattggagatgagaaacccagcccacaaactgttgaagtaattatgggaaggaaattacaggttcccctaggagcaaatggttgtgcatattttccttttgaagacctttgtgataaacctttaggtgcagcagattactttggactctttaaaaaatttcacaccctggcacttgatggtattccaaagcttgggtctagtaacagaacagcagcttatcggttcgtcacactgattgatgttatgtacgagaacaaggcaaggctgttatgtacagccgaggctggaccagtaggactgttcgagaatatcgtgactgttgctgaagcacggaaggtttcaccaagatcttcacgctcacagaaaagcgacgacactgacctatgcgtggacaatgagcttggatttgccaaggatcgtacgattagcaggttgacagagatcaacagcagagaatatttggaggacttcgaaatgagattgaggcaacagcagcagctgcccttgcaaggtctagataaaaggtggtgatgctgtactaaacataagaagcagaaggcttctgcgcctcatcttgaaattcttgtattcacacccacctggcttacataggcaactgagaagctatgcttttccaacagtggtgcatgtaaatgtccaataaagctatgtaagggcatttttgctaacaggtgagtgatctataaaatggcccaacctgggggaggggggataccatatcgttttttttagtgtatcacatatttccaaacctttagagaggcctcctaaggctcaaaaacagcatgagttacactgcataaagccatatataggctgaaagctttcgctgaactttgtgaattgagggaaaaaaagtctaacaattgttcatgtttttctattgtacgagcttttctgacatgcttgacgtagtaaggaagatctggttattattgttgcgtcatgtctggagcagatttgctttattttccatggaaacctgccttttc

SEQ ID NO: 24546 - DNA, 1070 bp, Zea Mays
cctcacggggccaccaatggatttctttggaacccacggaggcacggacccacctccctgccccaccatgccaccccctggtcccactcgtctgacacgacccctacctccccttcccaactcccaagctcgtgtaattgctgcggcgacagtgcccaaataaaatcccctaaacctagcgccgccgccgccatgcttcgccgtctcgccgccgtcgcccagcggaccttctcctcctcttccccgcacgccccgccgctggctgcgtcgggctacaccccgcgccgcgagtacggcctggtgcccatggtgatcgagcatacctcccgcggggagcgcgcctacgacatcttctcgcgcttgctcaaggagcgcatcgtatgcatccatggccccatcactgacgatacggcgtccctcgtcgtcgcccagctgctcttccttgaatccgagaaccccgccaagcccgtccacctctacatcaactccccggggggcgtcgtcactgcgggcctcgccatctacgataccatgcagtacatccgctcccccgtcaccacgctctgcatcggtcaggccgcctccatggcgtcgctactcctcgccgctggggcgagcggggagaggcgggcgctgccgaacgcgcgggtcatgatccaccagccctccggtggcgcgtcggggcaggcgtcagacatcgccatccacgccaaggagatccttaaggtgcgggaccggctcaacaaaatctatgccaagcacacgggccaggccatcgaccgcatcgagcagtgtatggagagggacatgttcatggacccggaggaggcacatgattgggggcttatcgacgaggtcatcgagcaccgccctgtctctcttgtgtctgatgctgttggcagtgattcgcaaaacctcggtggaggcggagctggggtgaataaaggagcggatgagccatcctcagcgtgatggcattggacagtcgcaaggctaagggaggagagggttacatggctgctaggtggaaggcccatcgaacaaaggctcaccaacacctatctcattgt

SEQ ID NO: 24547 - DNA, 1404 bp, Zea Mays
tcgctcaagcccgtcttacccctccccaaaccgcatgcgctctcctgctccgcgccgcacatcccccgcgccgccgctggggacggatcgggcgtcgggaatggaggcaaggatggaggcggcggcgggggtggcgaggatgaagacgactgtgacgatgcggacttcggtccgctgctcggcttcaacgaggtgctgcacctcgccgcggcgcgcggcgttgcgctcccgggcgacatgctggaggcggccaaggacgccggcatccgggaagtcctcttgctccgctacttcgatctgcaggccgcgccgtggccactaggcgtgttgatccgcgccttctcgatgctccgcaaccggatgctcgccgacccgtcgttcctcttcaaagttagcaccgagattgtgatcgactcttgctgcgcgacatttgcagaggtgcagaagaggggaaaggatttttgggcagagtttgaactgtacgctgctgatcttcttgtcggtgtagcagttgatattgcacttgtggggctgctggctccatatgtgagaattgggaagccatctgcttcaacgggtctctttggaagattcagcaggatggctggatctttgccaagcagtgtttttgaagctgaaagaccaggctgcagatttacagcccagcaaagaatcggaacatacttttacaaggagtgtcaaaaaatcagatgaagatattcctgttccaccacttgttaaaagtgcagctctatggggtgtgttcctcgctgtatcatctaacacacgctaccagatcatcaatggcctggagcgggtagtggaggcatcgcctgtcgcaagacgtgttccccctgttgctatggcttttacggttggggttcgttttgccaacaatatctacggtggaatgcagttcgtggattgggctcggtggagcggcgttcagtaatgggctcttggttgcagttaccaaaacatcaatacattgtacgttcaaatcttagttgcagtaatcgttcaggtggatccgtgttgttttctcgttacatttcctggtaagtagcggaggctggggcagagctctatgaagttttaactcatttactatgagaaacaaggaagtacttcgcatcatatggcatttatattgctgctcctaattgatcatgtgcacttttgccatactgaatgaatagaagcgttctgactcctgcattgcccccaaaatcattgcctcagtgcgtgtttcagtcagctagtggcgaatgtgaagccgtgggaaagttgtacagctcttcaacgaattttgtgcacaaatgatattgaggactagtttggaaactcgtatctccttttcaattctgaaggttatttgagttttcaaactagccttgaagggaa

SEQ ID NO: 24548 - DNA, 1503 bp, Zea Mays
cttaaaccaacactccatacgttacacagctcatgtgacacgaggccaagaaaaccagtcaaacttccgcgcactgccgtctgtccactatggccttcgccgcctccccttccctctccgcactcgcttcctcctcgtcgtcaaccgccgccgcccccacgccttcttccaaccctttgcacgagccgaggcctctccacctctcgctcaagcccgtcttacccctccccaaaccgcatgcgctctcctgctccgcgccgcacatcccccgcgccgccgctggggacggatcgggcgtcgggaatggaggcaaggatggaggcggcggcgggggtggcgaggatgaagacgactgtgacgatgcggacttcggtccgctgctcggcttcaacgaggtgctgcacctcgccgcggcgcgcggcgttgcgctcccgggcgacatgctggaggcggccaaggacgccggcatccgggaagtcctcttgctccgctacttcgatctgcaggccgcgccgtggccactaggcgtgttgatccgcgccttctcgatgctccgcaaccggatgctcgccgacccgtcgttcctcttcaaagttagcaccgagattgtgatcgactcttgctgcgcgacatttgcagaggtgcagaagaggggaaaggatttttgggcagagtttgaactgtacgctgctgatcttcttgtcggtgtagcagttgatattgcacttgtggggctgctggctccatatgtgagaattgggaagccatctgcttcaacgggtctctttggaagattcagcaggatggctggatctttgccaagcagtgtttttgaagctgaaagaccaggctgcagatttacagcccagcaaagaatcggaacatacttttacaagggtgtcttgtatggttcagttggatttgtctgtggcataattggtcaaggaattgctaatatgataatgactgccaaaaggagtgtcaaaaaatcagatgaagatattcctgttccaccacttgttaaaagtgcagctctatggggtgtgttcctcgctgtatcatctaacacacgctaccagatcatcaatggcctggagcgggtagtggaggcatcgcctgtcgcaagacgtgttccccctgttgctatggcttttacggttggggttcgttttgccaacaatatctacggtggaatgcagttcgtggattgggctcggtggagcggcgttcagtaatgggctcttggttgcagttaccaaaacatcaatacattgtacgttcaaatcttagttgcagtaatcgttcaggtggatccgtgttgttttctcgttacatttcctgtgcgtgtttcagtcagctagtggcgaatgtgaagccgtgggaaagttgtacagctcttcaacgaattttgtgcacaaatgatattgaggactagtttggaaactcgtatctccttttcaattctgaaggttatttgagttttcaaactagccttgaagggaa

SEQ ID NO: 24549 - DNA, 747 bp, Zea Mays
gacggcgcgggcgcccgtctcctctcagctcgcgacggagccacgacagccagcgacagcgcgtgacggcgcgtgggttgcgcccgcccggcgcttcgcgtggagctcgattgcgacacagccccagaccgcgatgcagatctcggctgcgacgcggctgccaacggcagcgcgccggtgtccgcgcgcgaggacggtcgtcggctgtcgggcgtgcgtggtgccgtgatctgcgacgaacggcgcgggcgatcgggtctgtgagactgcgacggagtgacgccggccaaggacggcgcgtgggttgcggccggcgcttcgccgttagccaggtctgctacgtagcagaagggcaggcacgcgcagatcctctggctgtcctgtcggtctcttctgcagctgttccagttcagcagcgtgcttcccctagggggaaactccggacgactacaacgatcgccctaggcacaatcatttccgactatttcttccttcgacttgaactggtacctgttcgacatcctacttctcaaggtattgtttatttcttcatcttttttctaacttcgatataatcgatcagccacaacgattgcccctcctcccagtttattctcttcactatcgattttccttcaagttatgatgtgcatgacgtgttattctttttctaattaagttgtttatcattataatgtgtttatgccaaataattggtcaatgtagtggctgaaaccctaacttctg

SEQ ID NO: 24550 - DNA, 1485 bp, Zea Mays
cctgccttgcctcgatgcgtgctccgcatccgtcccgtcgccactgcttttgcaacagcgtcggctcgctgtgcttctgtccttcgccatagcgcccatgtcgctgctttttattttactacatatatggagcaccttcactcgtctcttcctctttccctccgcctggtactcggcgcaagcgcctttctcctcctcgactccgtcgtcgtggtctgctacgtagcagaagggcaggcacgcgcagatcctctggctgtcctgtcggtctcttctgcagctgttccagggaaacagcatacatgcccagatctatccttcgttgtgccaacagttcagtgcgctgctcgatgagggagggatatacaacttgaagtatttcttagtcaggaaagctaacagattctacaaaccagtagaaaactgcaacatgatcagctttacaaagtggactacggttgaggttgtcctccagatcccccctgcttttccggtttgcacatataacctcactcccatagaccagctccaaccgcgcgtggactacaaggaatatttcactgatgtgctcggtgttgtcagcgtgatctcccaggtttcatcagtacgcacaaggggacgacaggctgaggttatgaagagaacagtcactataagcaatgcaagggataccggtccaaccgttgatgttgtgctttggggcaagcgggccacatctttcccagctgaacaggtccacagggacagtggatcctcaccacagatcataatatttgttggcactctcgtgaggagctacgctgataatgtgtctttgtcgggaggatcgtcatgcaagtggtacataaacgaaccggtcccggaagtaaacgctctcagagctagtgctgaaaccaaccaccaccctgtcatctgggatcagggcaaagcagctgctgagagtacagtaattgcagttcctgaacataagaagctcaaggatattaagtacctccatccttttgaaaataagaagaaggaatggcttgtcatcgtaaaggtgctcaagattgatagctcatggtggtacaatgcatgcaaaaaatgccttaggacaaccaaaccgcacggtgacacatacaagtgcaccaatatttcctgtgacaacataggatcgcctaccccaagtgcttttggacacgagcaccaccagctatggaggcccgcttttggggaactgaggaccgcttttgggaactatcccagttcatctaggttgttgttagaacttcccccctactgtgtagggtgtatggttttatgcttgtaagatatggacaacgctatgttgtgtgcttgactgcaagatatgccttttgttgcttggtcatagctatgctatgcgtgcaatcctgcgaggaccatactcacgatgtgtaaagcatgcctatatagtctaggcctgaacaaaccagaaacgttgcttcctttggtacttctactatt

SEQ ID NO: 24551 - DNA, 2007 bp, Zea Mays
caagaaactataaggaattatttaatcaccggcatgctttattgcggaaccacatagagagagcaataggagttttgaagaagcgtttccctattctaaaagttggaacacaccacccaattaggaaccaagtgaaaataccagctgcggcagtgttgttccataatattatacggatgcataatggggatgaagattggttgaatagccaaacaagtaacatatcgccagaaacttttgttgatcttcctggaggagacaattactatagcaatgatgtcgtgtcgcttaatagccaagtggataatgggaactctgttagagatatgattgcattgaatatgtggaatgattatagtcaacatcgttcatgatatatcaagaatgtttggaagaggatctcctaggatgaacctgatccaagctgcagctatgcaaagagtatcccctagatctactactaacaagcgcaagaagagaacatcaccaaaagttggtcgtcttagagcaaactggaatagtggactagaaaagggtttagttgaaattcttcaagaccacaacaatgactgttataagggccaaaatgggtggtcatcggaagcatggaatagaattgtcaagttattccatgagaaattcccttatgtcacatttacaaaatgccaaatccaagataaagagaaagagttaaagagagactacaaggctcttaaagaggcaagacaacaaagtggggtatcatgggatgagcggttgtgtagaatagaggcagaagaacccatttggaataacctcaccattagtaacgagagacttaagaagtttcggactaaatctttcccactatttgaggctttaggagagctacatgatgggaatattgctgagggaaccatgaattttacttctattgagccttatcgacctccagtcacacaaccttgtcaaggtgctgctacacatccttctcaagctgcttttatgctcacacagccttctcaaccgtctttcacacaaccttctcaacccgctttcacacaaccttctcgaattgcttacacacaaccttctcaagccgctttcgcacagccttctcaagccgctttcgcacagccttctcaagccgctttcacacagccttctcaagccgctttcgcacatccttctcaagctacaatcacacaagccatttctaatgaagatgatgacctcagagtattagatccaatagcccctacatcagtgagcaaaagggcaaaaaatgttggtgctggtagttcaaggacaagaattgacaagcgtggacaagatgggaaggtggttgagatgatggaaaggtttctagagatgaaagaaaaacaagatgaggtggagaaaagggcgacaactaatgcaaatgaggatgatttccctattacaacatgcattgctattgtggatggaatggaagagctttctgatgatgagaaggttgatgcttatgatgtgtttaaggatgcccaaaacagggccattttcatgattgccaaagatgctacacgcataaaatggttgaggaagaagattgctagaacatgatatatgatactgcttatgatgttgtttgaaacttgagggatcaaagaaaatgcaacgaagaatttggaagaccttgaaattattactagcaattgtttgaaagcaatctagtaagcgaactttcagttggaacctgtcatggcacttgtgaaatcttcattttttataagcacctctgaatgtgatccttcttgtcattaaatcaagactacaaagatggatgtttatttaatttgccataagcacctctgattgtaatacttcttgttattaaatcaggactagaacgatgaatgtttttttctaagcacttttgaatgctatgttaatttgcacattcgatgtgccatggtcagtatttgtgctaatttttcagtgttattttaaatttcaatatgaatattagtttttttgttttattttaag

SEQ ID NO: 24552 - DNA, 1863 bp, Zea Mays
ctgggcgccggcacctgcgcaagcggcggctgggcgtctggcactagaaaaatacccaaggtgagcggcactagctgggcgccggcacctgcgcgagccgcggctgggcgtctggcactagaaaagggcgtctggcagctgggcgtctggcactagaatagacggcgcttcagattgatagacagaacctccagaggagaacacaaaagctagccaagatccatgtgatctgtaccaagaatgtttggaagaggatctcctaggatgaacctgatccaagctgcagctatgcaaagagtatcccctagatctactactaacaagcgcaagaagagaacatcaccaaaagttggtcgtcttagagcaaactggaatagtggactagaaaagggtttagttgaaattcttcaagaccacaacaatgactgttataagggccaaaatgggtggtcatcggaagcatggaatagaattgtcaagttattccatgagaaattcccttatgtcacatttacaaaatgccaaatccaagataaagagaaagagttaaagagagactacaaggctcttaaagaggcaagacaacaaagtggggtatcatgggatgagcggttgtgtagaatagaggcagaagaacccatttggaataacctcaccattagtaacgagagacttaagaagtttcggactaaatctttcccactatttgaggctttaggagagctacatgatgggaatattgctgagggaaccatgaattttacttctattgagccttatcgacctccagtcacacaaccttgtcaaggtgctgctacacatccttctcaagctgcttttatgctcacacagccttctcaaccgtctttcacacaaccttctcaacccgctttcacacaaccttctcgaattgcttacacacaaccttctcaagccgctttcgcacagccttctcaagccgctttcgcacagccttctcaagccgctttcacacagccttctcaagccgctttcgcacatccttctcaagctacaatcacacaagccatttctaatgaagatgatgacctcagagtattagatccaatagcccctacatcagtgagcaaaagggcaaaaaatgttggtgctggtagttcaaggacaagaattgacaagcgtggacaagatgggaaggtggttgagatgatggaaaggtttctagagatgaaagaaaaacaagatgaggtggagaaaagggcgacaactaatgcaaatgaggatgatttccctattacaacatgcattgctattgtggatggaatggaagagctttctgatgatgagaaggttgatgcttatgatgtgtttaaggatgcccaaaacagggccattttcatgattgccaaagatgctacacgcataaaatggttgaggaagaagattgctagaacatgatatatgatactgcttatgatgttgtttgaaacttgagggatcaaagaaaatgcaacgaagaatttggaagaccttgaaattattactagcaattgtttgaaagcaatctagtaagcgaactttcagttggaacctgtcatggcacttgtgaaatcttcattttttataagcacctctgaatgtgatccttcttgtcattaaatcaagactacaaagatggatgtttatttaatttgccataagcacctctgattgtaatacttcttgttattaaatcaggactagaacgatgaatgtttttttctaagcacttttgaatgctatgttaatttgcacattcgatgtgccatggtcagtatttgtgctaatttttcagtgttattttaaatttcaatatgaatattagtttttttgttttattttaag

SEQ ID NO: 24553 - DNA, 2629 bp, Zea Mays
atccattccaaccagggcagagaagagtagagagtgtgcgtgtgggagcaggagccacgatcggatcgctttattcggtccggccaaaagatgcagcgcaaaatatagaggcgatgaaaccaacaccaacttggcgcagaatctaacgcctatagtttgcttctagtattccagatccctccactccacgagcacatcaggttccttggttgcaggccttgcaggagagaaagggagagaggagaaaaaggctgctgggcgcgagcgagtggcagccacgctgacagaatccacttggggcacggagattccagaggccacccaggcactgttccctcccagtctttccccggcagagtgcgctggtgctcccgcaactatgggtggccgcctttcctcgccgcctgcaacttgctcgccgcagctgtcactcgctcgctcgctcccagcctgcgcttgcccctgcgactctggacatggatccgatccgcccaggcggggggccgcgcgattccatatattcgcgtaaaggaggccctctgagatcgattccgattccgttgctccgacagaacttgttcggttacatgggataaaaattccatcataaatttaatataggtatgaattgagtgaatccatacctcctactcaatcccattacggcctcgtttggcaacgggtgtaaaagcaagtattgaggcccaatacacgtcccgcgtgtattcaggtccacgatgggagcatgttccctgtgtggcccatatttgtctttggcaaatcgggtgtcggagtggattagggtcacatacacgccaatacgccggggatagaaaaatctccaccgagacgtggaagacagcccgtcgttctcgcgtggcggcgtcactagctaaccctagatcaagacgagtgcatccaccgctctccacgccgccgccgatctcgtcgagaggcatccacgactctccacgccgccgccgatctcgttcgtccagcgtcaagaatgtttggaagaggatctcctaggatgaacctgatccaagctgcagctatgcaaagagtatcccctagatctactactaacaagcgcaagaagagaacatcaccaaaagttggtcgtcttagagcaaactggaatagtggactagaaaagggtttagttgaaattcttcaagaccacaacaatgactgttataagggccaaaatgggtggtcatcggaagcatggaatagaattgtcaagttattccatgagaaattcccttatgtcacatttacaaaatgccaaatccaagataaagagaaagagttaaagagagactacaaggctcttaaagaggcaagacaacaaagtggggtatcatgggatgagcggttgtgtagaatagaggcagaagaacccatttggaataacctcaccattagtaacgagagacttaagaagtttcggactaaatctttcccactatttgaggctttaggagagctacatgatgggaatattgctgagggaaccatgaattttacttctattgagccttatcgacctccagtcacacaaccttgtcaaggtgctgctacacatccttctcaagctgcttttatgctcacacagccttctcaaccgtctttcacacaaccttctcaacccgctttcacacaaccttctcgaattgcttacacacaaccttctcaagccgctttcgcacagccttctcaagccgctttcgcacagccttctcaagccgctttcacacagccttctcaagccgctttcgcacatccttctcaagctacaatcacacaagccatttctaatgaagatgatgacctcagagtattagatccaatagcccctacatcagtgagcaaaagggcaaaaaatgttggtgctggtagttcaaggacaagaattgacaagcgtggacaagatgggaaggtggttgagatgatggaaaggtttctagagatgaaagaaaaacaagatgaggtggagaaaagggcgacaactaatgcaaatgaggatgatttccctattacaacatgcattgctattgtggatggaatggaagagctttctgatgatgagaaggttgatgcttatgatgtgtttaaggatgcccaaaacagggccattttcatgattgccaaagatgctacacgcataaaatggttgaggaagaagattgctagaacatgatatatgatactgcttatgatgttgtttgaaacttgagggatcaaagaaaatgcaacgaagaatttggaagaccttgaaattattactagcaattgtttgaaagcaatctagtaagcgaactttcagttggaacctgtcatggcacttgtgaaatcttcattttttataagcacctctgaatgtgatccttcttgtcattaaatcaagactacaaagatggatgtttatttaatttgccataagcacctctgattgtaatacttcttgttattaaatcaggactagaacgatgaatgtttttttctaagcacttttgaatgctatgttaatttgcacattcgatgtgccatggtcagtatttgtgctaatttttcagtgttattttaaatttcaatatgaatattagtttttttgttttattttaag

SEQ ID NO: 24554 - DNA, 990 bp, Zea Mays
acaaaagctagccaagatccatgtgatctgtacctatctacgtagtggctgggctgtgatctgtggatgaacaagaccaagcaggaacggatgggaatgaatagaagggttcgagatctaattaaccatatacaatgactcttaacctttgatttgttatattctaaaatttattagcccatttctttgttttgtatgctatgatatcagattgcattgtaccaaggataagaaaaaatggatcaactaattaggaagagaagagaagaggaggacgaggagttaatgctctttcttttccctgctctttatttaattagtaatagagggagagagaaaagagcaaggcatgcttctattctatctggcaaggagagacttaatgagattctcgaaggacatgagaagaattgtcttgtcgcattccgtatggagcctagtatattcaaaaatatagcatcatttcttagagaagaacacatcctacgtgatacaaggggtgtaactgtggaagaaaaattgggaatgttccttttcatgttgtcccataatgctagttatgaggatttacaacatgaattcaaacatagtggtgaaactatccatcgacacatccagtcatttttccatataatcccatctctcatgtatagatttgtgaagcctgccactggaatttcagttcattggaagattaccacggatgaacggttctttccttacttccagaattgcattggagctattgatggaacacatgttccaattaccatttcagcagaaaagcaagctccctataggaatagaaaaggcacactaagtcaaaatgtaatgttggtttgtgattttgacttgaactttacttttatatcatctggttgggagggatcagctacagatgctagggttctaaggtctgcgctacttggaggattccatgttcctgagggaaagtattatcttgtcgatgggggatatgctaacacacca

SEQ ID NO: 24555 - DNA, 4127 bp, Zea Mays
cgccttgcgcctgccacgttatccgaactgtctggctgaacaaaacctcaccccgtccgtccatccatcgagaaggcgagaaccacagccggtgcacgagctccgcctccgcaatggcatcgcggctcgctgtacaggcgctgtccgcgagcctgttgtcgcttgcggaaactacgtcccccaaaccaccgaagcaacagtcgcagaggccaagggcagccagcagcagcagcagcagccggaggaggctagcagcgacggcgggggcgataatcctggcgtcccagctactgccgcccgtggcgagtagcgccgccggcacgttcgacctgcagctcatgctgccggagaagtccagcgaggaggccgaggccgtggtgcggatccacgcgcgcaacctgctgggggtgaagcgcttcatcgacgccggggcgtggcgggagctgcaggcggcgctgcgctccaatgcgtccaacctcaagcaggacctgtacgccatcatacaggcgaggcccacggggcagcgctctgagctccgcaggctctactccgacctcttcaacagcgtcaccagcctggattacgccgccagagacaaggacgcgctccaggtgcaggagcactacggcaacatcgtctccgctctcgacgagattttctccaagatcacgtaggatactcagaaatctatatttccagttcgtggatacaaaggcggagcacggataagagagaactaggaacttagatcacgttcacatgaaggaagaactagcagcaaatggcgacaggcaaaaaggatccttcttgctatgtagcgacattttttttcttctagagagaactatttagctagttcttgtgagcttcctccgctacatctatttaccctactgtctgaaggggaaaccagaaagaatcacagttttttacaggtgcagcaaggccacaaaaactgcagttcctaaaaccctcgctgtgtagccaccaacgtctaagggtagctgcagggcagctgaacggtttcatccacctctcctttcgctttcagatagagaaagcagggggtccttggtgaatggtgaccctattcaccgccacttggtgtgcaaaatgaagcagtagttctccatatggtccatccatctaccaataaactgaaacatgctggcagtggatctaccatcctcttggctcctccttcaaatcgttgcttccaagaacttgatcctgataataaggaacataaattgggcagtaagccaagaagaacacatgtgtgcaatttgaagtaaacaaaaaaaacatgaaaggacctgaaatctcaagataaaatgcagctgtctgtgcgaaaagagtgctaattagcgttacgtcacttcaaattcttaccattgtaatgccaggaagcacgaagctagcaagattttcatctattgccacagtaagtggaggcatcttggtcctcagcccaggcagttgggtcgtgctgtttacataagcattatcatcagtgagagaagcagctgtatcacaaaaccaaacccttacaagcataactctagtattcgtgcaaaacaaaccgccaacatgtttcattagatgatgcttacatttgtacaagatcattaatgttccttcttgcccgatggaagagatcgatgttgttatgaggctgaaatctctgaatatttgtttcgatttgattaagaagcctattattttcctccagcagatgcagcactggacgatctatctctgaggctacataatacaaaaaacggcattgtcatatcatattacagacaaagcattggttaaatcttgccaaagtttaggacatgaatctgttatggtgcactactgaaaagtacaaggatctaaagtgcaatttatatgatgaacaaaatcaactgattaatcaaggaagaaacagcacgctacatgtttgtgtgtacttttgaatagtagcaagtagaaggctgtgtaatcccaaatttgttctaacaagttccacatgcccaaagctattctcattcatgttcttgaacagtaaacatccaaagtgtcaactttttttatccctttcagccactcgacactagaaactctgacaatatatatcattacaggcatacaggacttacaagtaaaaacagatgcattatgattatatattaaatatcaagctccggtggggtgcctacctgcgataaacttggcaatggagtcattaataaaatgaagtagttcagtcactctagtattggcagcagtatttatatatcctctcaaatgcaaaaaattcaaatgccggatcatgatattgataattgcacgagacagttaacagcatataacaagaaacaaagaagatagatggaagcaaacaattagacatgatactcatgtaatcaagtgacctaccaacctccagatataaacatagcgttttggccattatgcggcacaaatgaagaggctgtcatgcctgtttgaagaggatgatttgttccccacagcgcaggctctacaaatttatcctgataaacaaccataacggccaccatttaaaaacatataaatgcaaatgatgtatgaatagacccaatagagaactgacatggtatatattgatgggaatgaatttgagctcaacccccttaggctatctccagcagcgttcctatcccacccatatctcactacttattttaaacttcactctacaaacaatacactctacagtacaaaacaatgttttgcacgaccatatgcacgctctgttgagcacgatcttaggtgctccaatgatttcacaaaataaaaaagtgcacgaacacttccaccagaaacatggacggatagtgatgcaatgatctatgatgcaaactttgagattgaacaaaactttgtgcaaacgaaaagagaaaaaaaaaactaaaggtcagcatgcaattgggtcgggtgcagttttatctggatcagcaacccacaccaaatcacatgctgatcctctttttttttgtttcttcttgaaatttttttgaacttcaatattgttttcccttgaatctatcattgcatcatctaaattctaaacatccatattttggtggaaccgtaatgtgcatcgacctcaaaattggatttggaaacacgccttaacttttcgaactgaattattttctatttttcgtataatcagtggcagtaaataaatataaagagcacaatacagaacaaaattcatcaaatagaaaagaatattaatacctttctttcttttgtatttctcccagtatggtgttcttggggtttccttcgtcttgtatttactttcttctacaagatatatccaaattgttggtaatattaatactaatactaaataaaatgagcagaacagttaagttggacagaaaatgctcattcaagtagagacggattggtgcagaaattatctgtttttaaaatggaaatggaaaaatatatttgttattcagctagctatatttatgatggaagttccaaatataaaacaaatttagttcatcatatacatcaaatgaaatagttatcacacattcataccttagttgaatttgaatattagtgtccatagcaatcaaaaggaatatgtaagtgatggtcagtttattttagcagtagacctgttgcagctaacaaacatatagaacaaaaaagctggaatactgccaatagagagataagtgtgctttgtcatgaaataaggtcatgttgtcttttgatatcccttcccttttcttcagaatacaaataaaaagcgatacaataatagaccaaaatggtacagcgattgccaactcaggtctcactatgatcatggtccaaatgctcaagtcctattttgtaaatatagattgaaaacaagttcgtctatcattcatgctagtattagtatatgcacacatggttaatggaatcctatattcagatcaactttcagatgtaagataagttttggcatggcaagtaggaaaacagatcaaggaacaaaaggaactatgtaaatctatacacaaggaagtggttgatattcatgaacatttttgcacaagttgcatacattcagtgttcttccg

SEQ ID NO: 24556 - DNA, 4231 bp, Zea Mays
ccagaccaccgagtccccatatcgagcgtgacctacgccttgcgcctgccacgttatccgaactgtctggctgaacaaaacctcaccccgtccgtccatccatcgagaaggcgagaaccacagccggtgcacgagctccgcctccgcaatggcatcgcggctcgctgtacaggcgctgtccgcgagcctgttgtcgcttgcggaaactacgtcccccaaaccaccgaagcaacagtcgcagaggccaagggcagccagcagcagcagcagcagccggaggaggctagcagcgacggcgggggcgataatcctggcgtcccagctactgccgcccgtggcgagtagcgccgccggcacgttcgacctgcagctcatgctgccggagaagtccagcgaggaggccgaggccgtggtgcggatccacgcgcgcaacctgctgggggtgaagcgcttcatcgacgccggggcgtggcgggagctgcaggcggcgctgcgctccaatgcgtccaacctcaagcaggacctgtacgccatcatacaggcgaggcccacggggcagcgctctgagctccgcaggctctactccgacctcttcaacagcgtcaccagcctggattacgccgccagagacaaggacgcgctccaggtgcaggagcactacggcaacatcgtctccgctctcgacgagattttctccaagatcacgtaggatactcagaaatctatatttccagttcgtggatacaaaggcggagcacggataagagagaactaggaacttagatcacgttcacatgaaggaagaactagcagcaaatggcgacaggcaaaaaggatccttcttgctatgtagcgacattttttttcttctagagagaactatttagctagttcttgtgagcttcctccgctacatctatttaccctactgtctgaaggggaaaccagaaagaatcacagttttttacaggtgcagcaaggccacaaaaactgcagttcctaaaaccctcgctgtgtagccaccaacgtctaagggtagctgcagggcagctgaacggtttcatccacctctcctttcgctttcagatagagaaagcagggggtccttggtgaatggtgaccctattcaccgccacttggtgtgcaaaatgaagcagtagttctccatatggtccatccatctaccaataaactgaaacatgctggcagtggatctaccatcctcttggctcctccttcaaatcgttgcttccaagaacttgatccattgtaatgccaggaagcacgaagctagcaagattttcatctattgccacagtaagtggaggcatcttggtcctcagcccaggcagttgggtcgtgctgtttacataagcattatcatcagtgagagaagcagctgtatcacaaaaccaaacccttacaagcataactctagtattcgtgcaaaacaaaccgccaacatgtttcattagatgatgcttacatttgtacaagatcattaatgttccttcttgcccgatggaagagatcgatgttgttatgaggctgcaagggagaataaagataactattaaataatgcctgtcatgtattattggagggaaaaaaaagtaattttccttatgcagtctaactgaaatggaaggggtcatgctgttctaaaagcaatatatgcttttctatcagacgtacatttctcataatgttgtataatggaaaggatgaataaaaaaactgtaaaacagagtaaaataagaaaagggggactatacaaacctgaaatctctgaatatttgtttcgatttgattaagaagcctattattttcctccagcagatgcagcactggacgatctatctctgaggctacataatacaaaaaacggcattgtcatatcatattacagacaaagcattggttaaatcttgccaaagtttaggacatgaatctgttatggtgcactactgaaaagtacaaggatctaaagtgcaatttatatgatgaacaaaatcaactgattaatcaaggaagaaacagcacgctacatgtttgtgtgtacttttgaatagtagcaagtagaaggctgtgtaatcccaaatttgttctaacaagttccacatgcccaaagctattctcattcatgttcttgaacagtaaacatccaaagtgtcaactttttttatccctttcagccactcgacactagaaactctgacaatatatatcattacaggcatacaggacttacaagtaaaaacagatgcattatgattatatattaaatatcaagctccggtggggtgcctacctgcgataaacttggcaatggagtcattaataaaatgaagtagttcagtcactctagtattggcagcagtatttatatatcctctcaaatgcaaaaaattcaaatgccggatcatgatattgataattgcacgagacagttaacagcatataacaagaaacaaagaagatagatggaagcaaacaattagacatgatactcatgtaatcaagtgacctaccaacctccagatataaacatagcgttttggccattatgcggcacaaatgaagaggctgtcatgcctgtttgaagaggatgatttgttccccacagcgcaggctctacaaatttatcctgataaacaaccataacggccaccatttaaaaacatataaatgcaaatgatgtatgaatagacccaatagagaactgacatggtatatattgatgggaatgaatttgagctcaacccccttaggctatctccagcagcgttcctatcccacccatatctcactacttattttaaacttcactctacaaacaatacactctacagtacaaaacaatgttttgcacgaccatatgcacgctctgttgagcacgatcttaggtgctccaatgatttcacaaaataaaaaagtgcacgaacacttccaccagaaacatggacggatagtgatgcaatgatctatgatgcaaactttgagattgaacaaaactttgtgcaaacgaaaagagaaaaaaaaaactaaaggtcagcatgcaattgggtcgggtgcagttttatctggatcagcaacccacaccaaatcacatgctgatcctctttttttttgtttcttcttgaaatttttttgaacttcaatattgttttcccttgaatctatcattgcatcatctaaattctaaacatccatattttggtggaaccgtaatgtgcatcgacctcaaaattggatttggaaacacgccttaacttttcgaactgaattattttctatttttcgtataatcagtggcagtaaataaatataaagagcacaatacagaacaaaattcatcaaatagaaaagaatattaatacctttctttcttttgtatttctcccagtatggtgttcttggggtttccttcgtcttgtatttactttcttctacaagatatatccaaattgttggtaatattaatactaatactaaataaaatgagcagaacagttaagttggacagaaaatgctcattcaagtagagacggattggtgcagaaattatctgtttttaaaatggaaatggaaaaatatatttgttattcagctagctatatttatgatggaagttccaaatataaaacaaatttagttcatcatatacatcaaatgaaatagttatcacacattcataccttagttgaatttgaatattagtgtccatagcaatcaaaaggaatatgtaagtgatggtcagtttattttagcagtagacctgttgcagctaacaaacatatagaacaaaaaagctggaatactgccaatagagagataagtgtgctttgtcatgaaataaggtcatgttgtcttttgatatcccttcccttttcttcagaatacaaataaaaagcgatacaataatagaccaaaatggtacagcgattgccaactcaggtctcactatgatcatggtccaaatgctcaagtcctattttgtaaatatagattgaaaacaagttcgtctatcattcatgctagtattagtatatgcacacatggttaatggaatcctatattcagatcaactttcagatgtaagataagttttggcatggcaagtaggaaaacagatcaaggaacaaaaggaactatgtaaatctatacacaaggaagtggttgatattcatgaacatttttgcacaagttgcatacattcagtgttcttccg

SEQ ID NO: 24557 - DNA, 1114 bp, Zea Mays
cagcggtgggttctgggcgccggtgatgtagggaacagtgagactcctttttcaacctgccgaggaaagtggtgcaggtgcatctcatatgataagagaaggggttctggacggtgttgaagccatatttgcaatgcatgttgattatcgtataccaactggtgtaatagcagctcacccaggacctacacaagcggctgtatgtttcttcgaagcaaaaattgaaggtaaaagtgggatggctgaaaccccacacttaaatgtggatcctgttgtcgtcacatcattggccatcctgtccctgcagcagcttatttctagagaagatgatcctcttcacagccaagtggtctcggttacctatgtgaaagctggaaaagcccttgatgctacccctaaccttgttgaatttggaggtactttgaggagcctcaccactgaaggcctttactgtctgcaaagaagggttaaagaggtggtagaagggcaggcggctgtgcataggtgcaagggagctgtcgaaataaaggttgaggactacccggtgtaccctgccgttgtgaacgacgagaagctgcatcgacatgtagaggatgtcggcagaggcttgcttggcccgggcaaggtgagaccaggggaaaagatcatggccggcgaagacttcgctttctaccagcagcttgttcccggcgttatgtttggcatcggcattagaaacgaggaagctggttctgttcactcggctcacaacccctatttcttcgtcgatgaggacgtcattcctgttggggctgctttgcatgctgccattgcagaactgtacttcactgacggccccctctttcgacaaagaagactagtggtttctcgttcgtgcgtattttgtctggatcagtccgaacagatggcttcagctggccaatcagatctgaacatctggtccaccatgctgatcagccgcgctccgcggccagtatcaacctccaactatttttccctctgtaaccagaaacactacacatgtttctcaaccctacagtggtctagctattttattctctctttaaacagaaacactgcaaggttcctaaccttatagtgggatttagagcaa

SEQ ID NO: 24558 - DNA, 1830 bp, Zea Mays
gttcatcttctgaattctaaattcgagttgacatctgattcgaggctccacaaatgctccactggtgcacggtatgttatcattccgtgagctatgatgtacgtcagcgtccgtttcctcgaggctcgaccagtcgagcttgagaaaaatcaaagctcccacctacctcgagacccaggacgcgtggagagcggtgccaaaccaccatggcgatcctgctcctcttgctcttcgttttgtcctcagcttcagctgatgagtacggggaagagctgctgcagcgcgcgtggggggagcgggattggatggtgagcgtgcggcggcgcatccacgcgcatccggagctcgcgttccgggagcaccgcaccgcagccctcgtccgcgaggagctcgagcacctcggccttcccgcccgcgccgtcgccggaacgggcgtcgtcgctgatgtaggttccggggcgccccccttcgtggcgctccgcgccgacatggacgcgctcccgctccaggaattagtggagtgggagcataagagcaaggtggacggagtgatgcacgcctgcgggcacgatgtccacacagcgatgcttctgggagcagcaaagttactcagccagcgtaaggatcagctcaagtgagactcctttttcaacctgccgaggaaagtggtgcaggtgcatctcatatgataagagaaggggttctggacggtgttgaagccatatttgcaatgcatgttgattatcgtataccaactggtgtaatagcagctcacccaggacctacacaagcggctgtatgtttcttcgaagcaaaaattgaaggtaaaagtgggatggctgaaaccccacacttaaatgtggatcctgttgtcgtcacatcattggccatcctgtccctgcagcagcttatttctagagaagatgatcctcttcacagccaagtggtctcggttacctatgtgaaagctggaaaagcccttgatgctacccctaaccttgttgaatttggaggtactttgaggagcctcaccactgaaggcctttactgtctgcaaagaagggttaaagaggtggtagaagggcaggcggctgtgcataggtgcaagggagctgtcgaaataaaggttgaggactacccggtgtaccctgccgttgtgaacgacgagaagctgcatcgacatgtagaggatgtcggcagaggcttgcttggcccgggcaaggtgagaccaggggaaaagatcatggccggcgaagacttcgctttctaccagcagcttgttcccggcgttatgtttggcatcggcattagaaacgaggaagctggttctgttcactcggctcacaacccctatttcttcgtcgatgaggacgtcattcctgttggggctgctttgcatgctgccattgcagaactgtacttcactgacggccccctctttcgacaaagaagactagtggtttctcgttcgtgcggttggtctcgggttcagtaaatataaatatagtttgacatgtacaaatgcatttaaaagctcttttttacaaaattgtcaggttgttgatttggctttaatccgtactttcttctacagtattttgtctggatcagtccgaacagatggcttcagctggccaatcagatctgaacatctggtccaccatgctgatcagccgcgctccgcggccagtatcaacctccaactatttttccctctgtaaccagaaacactacacatgtttctcaaccctacagtggtctagctattttattctctctttaaacagaaacactgcaaggttcctaaccttatagtgggatttagagcaa

SEQ ID NO: 24559 - DNA, 1974 bp, Zea Mays
atagggccaaggctgcctaggtggggcccaaggcccaatagctaatagataagctctatctagttagttatacttatccaaagttagtagataaagatcagctctatctagatagttatacttatccaaagttagtagatagacttgagatagctctatatatagatctgtaaactctggaataaaggcaagcagaattccaatctattctggcttcccagagggagccagagtctcctgtgatcttctccctgcgcgcaacccagccaggatcacgacggcgccccagcgccgccaccctggtcccaccaaatcccctccctacaatctgcgcaatctgcccggaattagtggagtgggagcataagagcaaggtggacggagtgatgcacgcctgcgggcacgatgtccacacagcgatgcttctgggagcagcaaagttactcagccagcgtaaggatcagctcaagggaacagtgagactcctttttcaacctgccgaggaaagtggtgcaggtgcatctcatatgataagagaaggggttctggacggtgttgaagccatatttgcaatgcatgttgattatcgtataccaactggtgtaatagcagctcacccaggacctacacaagcggctgtatgtttcttcgaagcaaaaattgaaggtaaaagtgggatggctgaaaccccacacttaaatgtggatcctgttgtcgtcacatcattggccatcctgtccctgcagcagcttatttctagagaagatgatcctcttcacagccaagtggtctcggttacctatgtgaaagctggaaaagcccttgatgctacccctaaccttgttgaatttggaggtactttgaggagcctcaccactgaaggcctttactgtctgcaaagaagggttaaagaggtagtagaaggccaggctgtagtacatagacgcaagggagctgttgagataaatagtaatgactacccaatatactctgctgttgtgaacgatgagaagctgcatcaccatgtagaggatgttggcagacgcttgcttggtctggacatggtgaagcctgtagagaagatcatggcacgcgaagactttgctttgtaccagcagctaattcccggtgttggcatcgaaattaaaaacaagaaagctgactccgtcactcagctcaccacccttatttcttcgttgatgaggatgtcgttccattcggtgctgctttgcataatgcagttgcagaactttatctctctcaggcttccgctctgtacgaaggaggggacttgcagtcgcgttgacgatcttgagttgaaaagatggttgaaatgtggtagaagggcaggcggctgtgcataggtgcaagggagctgtcgaaataaaggttgaggactacccggtgtaccctgccgttgtgaacgacgagaagctgcatcgacatgtagaggatgtcggcagaggcttgcttggcccgggcaaggtgagaccaggggaaaagatcatggccggcgaagacttcgctttctaccagcagcttgttcccggcgttatgtttggcatcggcattagaaacgaggaagctggttctgttcactcggctcacaacccctatttcttcgtcgatgaggacgtcattcctgttggggctgctttgcatgctgccattgcagaactgtacttcactgacggccccctctttcgacaaagaagactagtggtttctcgttcgtgcgtattttgtctggatcagtccgaacagatggcttcagctggccaatcagatctgaacatctggtccaccatgctgatcagccgcgctccgcggccagtatcaacctccaactatttttccctctgtaaccagaaacactacacatgtttctcaaccctacagtggtctagctattttattctctctttaaacagaaacactgcaaggttcctaaccttatagtgggatttagagcaa

SEQ ID NO: 24560 - DNA, 4344 bp, Zea Mays
ccgctgtccgcagcgaacacctgtcctcctccggtcctccctgtgcggaacagtctcgccaatcgccatcactagtgtcgatctgcgccggcctacagcctacgtccgtcgtcgtgtgcgatggacgccttcttcagcggtctcgactcccggctgcgggaggcagtgaaggtggcggactccatcatggtggggctggtgaacgccgccatggaggacgcctacaagaagagcctctggaaggacggcgacctggagcgcctcttccagaagctccgcttcgccgagctcgctatcatgcagctcgagtggtgcctccgcttcgtgcggggggagatggaggccgacggcggtgccgacgacggccacgagcagctgctagacgacctcctcgagacgcgggaccggatccaggcccgcctcgacgaggccgaactcgccgtcgcccagacggactgcgactacatgcgccggaagcgcgatgaactcgacccgtcgcgccgccgggagacgccgtccgcagttgatcaccgcggcgccgaggtggagggcggtacgttcgaggaactcagggggtccgtgggccggaagatgacgaggatgagggctaggctggaggacgcgagctccgagctggcggcgctcatgcaaaaggtcagcggcgaggcgtcgccgatggcgaggctgcaggagcccggccacgagggcgacggggtcaagggcctctcgggattctacagcatggcgcagctgcttatggagttccaggagatggtcctggacgccggcgtcctcagagacagcgtcgcatctgcgttcgatgcgatggagaggtcggtctctgctcagcgggcagccatggaggagcagcagtggctcatggatgcagagaaggagatgtacagtgccgtcgttgaaggttttctccgggagatcaacgtggaatcgacgaaacgcaatcagtctgagggagagggatgcccgacacctacattgcatcatagcagagatgctcctgataataatagctcggacgaattccagtatctgaacgatgaaactagccagctgcactcagcaaggcgtatcccggcagagaagtcagagagcagactgcgttatactaattcagaagaggattgtttctgtctctctcaagaggaagctgaaaggctaacagaaacaacgattgattcagaaattagatttgaactgcagcgtgttttgtactcagcagcattcagagacctattaagcaaactttcggttcaggcatatcatgcacagaggcttacagaacaaagagatgaaacggaaatcagaagtaatatacagtatgagatggatagtatcatattcaaagacttggtgaagaacctatgtgttgaatccgttgatcatcttatcaagacctggatccaagatgaggtgcatagagctcttcttgccaagattatgaatccttggaagatcactactgagatggttcacagcgagagacttatcaaggaagagattgaatgcattgtttttggaggtttgataaatgatttggtaaatggtcaaaatttaagtgtggtcaaatatcaacaccaaaatagacccagcgataatctgggaagattcggtatgattgacagcgccgagcagttagtgaatgggaagatacaagtcaatgtaactactgaagatgatggtgtaggctctgatcaacatagaatacttgtgaatcaagaagttttaggtctaattggtaactgtgacaggcaaaattcaaaaggaagtgataagcaagctgaagaatcaataggcagagatgatgttaaggaacgattggatgattgcaggaagctgcaaacagaagaggtagctacaggtttgtgcatgccttctgaaggagtgattcaagaaatctgcattccattgacaaacatatatgaaatatttggggactttgaggctattacctgtgaaaaaataggaacatctgtgctgagattgagagacctggacaaacaattgtcaaacctgattgaaaaagtgaactctcttaaaacaagtgagtttctgtaccggagcgctttcactaggagatgttgcgaccttcaaacagcagaagcagaggtggatcttcttggcgatgaagtggagctgcttcttggacttctcagtaagacatacggagctctggttcactactcaccagttcttcaacactatgtgggggtaattatctaatttcaccgagttaaaaggcttcgatcagggaggtgctgaacctgcttgggaaggagcttgctcatatgcctaacaagacagtgatgccaggcaaggactgcctgcgccagcccgtgcagcatggtgtccgtgttggcagtgactttgctgccgcattgcaagcgcagtttcggaggcagcggaggttggtcgggacttggatgcaggggccgacgccgactggctggagccctcgacggcgactcggcgaggcgccgctgtctcgagaagaagctctattggaacttggaagtggtgctgttctccatttcggatacttctggagtttccagcggttagccacgtggattcttgcacctgtcctgtcctctccactgccaccgtcgttcctcaggtccgttccaagggtagctatggaactcgatctgccgccgcaaccgaccccgccactcaccgacctggccgcctccatccaccgcgccgcagcggccgcggcagtgctctcagcccccgcgccctcctcccatgccgccgccgcggtggctgcccttcgcgacgcccacgctgccatcggttctttcctctcccgcctcaacgtatcgtacggtgatgatcatcaacccatggcggatagcggcgaggagttggtggaggatggggagggggcgcagatggtcggggaggcggaggagaggctccggaactgcggcctgcaggggagcaagcggcggaaacgtcctgtgccgccttcatggcccctagggcgccgctcgagcagcagttccgaagcggcggcggcagccgccgcgccgggtgccggtgctggacgtcgaggagcggcgacgcgcgaccatggatctcttgatgcaattccatgcgtgatgcgtaggaaggaacgaattagtggagtgggagcataagagcaaggtggacggagtgatgcacgcctgcgggcacgatgtccacacagcgatgcttctgggagcagcaaagttactcagccagcgtaaggatcagctcaagggaacagtgagactcctttttcaacctgccgaggaaagtggtgcaggtgcatctcatatgataagagaaggggttctggacggtgttgaagccatatttgcaatgcatgttgattatcgtataccaactggtgtaatagcagctcacccaggacctacacaagcggctgtatgtttcttcgaagcaaaaattgaaggtaaaagtgggatggctgaaaccccacacttaaatgtggatcctgttgtcgtcacatcattggccatcctgtccctgcagcagcttatttctagagaagatgatcctcttcacagccaagtggtctcggttacctatgtgaaagctggaaaagcccttgatgctacccctaaccttgttgaatttggaggtactttgaggagcctcaccactgaaggcctttactgtctgcaaagaagggttaaagaggtggtagaagggcaggcggctgtgcataggtgcaagggagctgtcgaaataaaggttgaggactacccggtgtaccctgccgttgtgaacgacgagaagctgcatcgacatgtagaggatgtcggcagaggcttgcttggcccgggcaaggtgagaccaggggaaaagatcatggccggcgaagacttcgctttctaccagcagcttgttcccggcgttatgtttggcatcggcattagaaacgaggaagctggttctgttcactcggctcacaacccctatttcttcgtcgatgaggacgtcattcctgttggggctgctttgcatgctgccattgcagaactgtacttcactgacggccccctctttcgacaaagaagactagtggtttctcgttcgtgcgtattttgtctggatcagtccgaacagatggcttcagctggccaatcagatctgaacatctggtccaccatgctgatcagccgcgctccgcggccagtatcaacctccaactatttttccctctgtaaccagaaacactacacatgtttctcaaccctacagtggtctagctattttattctctctttaaacagaaacactgcaaggttcctaaccttatagtgggatttagagcaa

SEQ ID NO: 24561 - DNA, 4730 bp, Zea Mays
ccgctgtccgcagcgaacacctgtcctcctccggtcctccctgtgcggaacagtctcgccaatcgccatcactagtgtcgatctgcgccggcctacagcctacgtccgtcgtcgtgtgcgatggacgccttcttcagcggtctcgactcccggctgcgggaggcagtgaaggtggcggactccatcatggtggggctggtgaacgccgccatggaggacgcctacaagaagagcctctggaaggacggcgacctggagcgcctcttccagaagctccgcttcgccgagctcgctatcatgcagctcgagtggtgcctccgcttcgtgcggggggagatggaggccgacggcggtgccgacgacggccacgagcagctgctagacgacctcctcgagacgcgggaccggatccaggcccgcctcgacgaggccgaactcgccgtcgcccagacggactgcgactacatgcgccggaagcgcgatgaactcgacccgtcgcgccgccgggagacgccgtccgcagttgatcaccgcggcgccgaggtggagggcggtacgttcgaggaactcagggggtccgtgggccggaagatgacgaggatgagggctaggctggaggacgcgagctccgagctggcggcgctcatgcaaaaggtcagcggcgaggcgtcgccgatggcgaggctgcaggagcccggccacgagggcgacggggtcaagggcctctcgggattctacagcatggcgcagctgcttatggagttccaggagatggtcctggacgccggcgtcctcagagacagcgtcgcatctgcgttcgatgcgatggagaggtcggtctctgctcagcgggcagccatggaggagcagcagtggctcatggatgcagagaaggagatgtacagtgccgtcgttgaaggttttctccgggagatcaacgtggaatcgacgaaacgcaatcagtctgagggagagggatgcccgacacctacattgcatcatagcagagatgctcctgataataatagctcggacgaattccagtatctgaacgatgaaactagccagctgcactcagcaaggcgtatcccggcagagaagtcagagagcagactgcgttatactaattcagaagaggattgtttctgtctctctcaagaggaagctgaaaggctaacagaaacaacgattgattcagaaattagatttgaactgcagcgtgttttgtactcagcagcattcagagacctattaagcaaactttcggttcaggcatatcatgcacagaggcttacagaacaaagagatgaaacggaaatcagaagtaatatacagtatgagatggatagtatcatattcaaagacttggtgaagaacctatgtgttgaatccgttgatcatcttatcaagacctggatccaagatgaggtgcatagagctcttcttgccaagattatgaatccttggaagatcactactgagatggttcacagcgagagacttatcaaggaagagattgaatgcattgtttttggaggtttgataaatgatttggtaaatggtcaaaatttaagtgtggtcaaatatcaacaccaaaatagacccagcgataatctgggaagattcggtatgattgacagcgccgagcagttagtgaatgggaagatacaagtcaatgtaactactgaagatgatggtgtaggctctgatcaacatagaatacttgtgaatcaagaagttttaggtctaattggtaactgtgacaggcaaaattcaaaaggaagtgataagcaagctgaagaatcaataggcagagatgatgttaaggaacgattggatgattgcaggaagctgcaaacagaagaggtagctacaggtttgtgcatgccttctgaaggagtgattcaagaaatctgcattccattgacaaacatatatgaaatatttggggactttgaggctattacctgtgaaaaaataggaacatctgtgctgagattgagagacctggacaaacaattgtcaaacctgattgaaaaagtgaactctcttaaaacaagtgagtttctgtaccggagcgctttcactaggagatgttgcgaccttcaaacagcagaagcagaggtggatcttcttggcgatgaagtggagctgcttcttggacttctcagtaagacatacggagctctggttcactactcaccagttcttcaacactatgtggggatcagggaggtgctgaacctgcttgggaaggagcttgctcatatgcctaacaagacagtgatgccaggcaaggactgcctgcgccagcccgtgcagcatggtgtccgtgttggcagtgactttgctgccgcattgcaagcgcagtttcggaggcagcggaggttggtcgggacttggatgcaggggccgacgccgactggctggagccctcgacggcgactcggcgaggcgccgctgtctcgagaagaagctctattggaacttggaagtggtgctgttctccatttcggatacttctggagtttccagcggttagccacgtggattcttgcacctgtcctgtcctctccactgccaccgtcgttcctcaggtccgttccaagggtagctatggaactcgatctgccgccgcaaccgaccccgccactcaccgacctggccgcctccatccaccgcgccgcagcggccgcggcagtgctctcagcccccgcgccctcctcccatgccgccgccgcggtggctgcccttcgcgacgcccacgctgccatcggttctttcctctcccgcctcaacgtatcgtacggtgatgatcatcaacccatggcggatagcggcgaggagttggtggaggatggggagggggcgcagatggtcggggaggcggaggagaggctccggaactgcggcctgcaggggagcaagcggcggaaacgtcctgtgccgccttcatggcccctagggcgccgctcgagcagcagttccgaagcggcggcggcagccgccgcgccgggtgccggtgctggacgtcgaggagcggcgacgcgcgaccatggatctcttgatgcaattccatgcgtgatgcgtaggaaggaacgaattagtggagtgggagcataagagcaaggtggacggagtgatgcacgcctgcgggcacgatgtccacacagcgatgcttctgggagcagcaaagttactcagccagcgtaaggatcagctcaagggaacagtgagactcctttttcaacctgccgaggaaagtggtgcaggtgcatctcatatgataagagaaggggttctggacggtgttgaagccatatttgcaatgcatgttgattatcgtataccaactggtgtaatagcagctcacccaggacctacacaagcggctgtatgtttcttcgaagcaaaaattgaaggtaaaagtgggatggctgaaaccccacacttaaatgtggatcctgttgtcgtcacatcattggccatcctgtccctgcagcagcttatttctagagaagatgatcctcttcacagccaagtggtctcggttacctatgtgaaagctggaaaagcccttgatgctacccctaaccttgttgaatttggaggtactttgaggagcctcaccactgaaggcctttactgtctgcaaagaagggttaaagaggtagtagaaggccaggctgtagtacatagacgcaagggagctgttgagataaatagtaatgactacccaatatactctgctgttgtgaacgatgagaagctgcatcaccatgtagaggatgttggcagacgcttgcttggtctggacatggtgaagcctgtagagaagatcatggcacgcgaagactttgctttgtaccagcagctaattcccggtgttggcatcgaaattaaaaacaagaaagctgactccgtcactcagctcaccacccttatttcttcgttgatgaggatgtcgttccattcggtgctgctttgcataatgcagttgcagaactttatctctctcaggcttccgctctgtacgaaggaggggacttgcagtcgcgttgacgatcttgagttgaaaagatggttgaaatgtggtagaagggcaggcggctgtgcataggtgcaagggagctgtcgaaataaaggttgaggactacccggtgtaccctgccgttgtgaacgacgagaagctgcatcgacatgtagaggatgtcggcagaggcttgcttggcccgggcaaggtgagaccaggggaaaagatcatggccggcgaagacttcgctttctaccagcagcttgttcccggcgttatgtttggcatcggcattagaaacgaggaagctggttctgttcactcggctcacaacccctatttcttcgtcgatgaggacgtcattcctgttggggctgctttgcatgctgccattgcagaactgtacttcactgacggccccctctttcgacaaagaagactagtggtttctcgttcgtgcgtattttgtctggatcagtccgaacagatggcttcagctggccaatcagatctgaacatctggtccaccatgctgatcagccgcgctccgcggccagtatcaacctccaactatttttccctctgtaaccagaaacactacacatgtttctcaaccctacagtggtctagctattttattctctctttaaacagaaacactgcaaggttcctaaccttatagtgggatttagagcaa

SEQ ID NO: 24562 - DNA, 3435 bp, Zea Mays
ccgctgtccgcagcgaacacctgtcctcctccggtcctccctgtgcggaacagtctcgccaatcgccatcactagtgtcgatctgcgccggcctacagcctacgtccgtcgtcgtgtgcgatggacgccttcttcagcggtctcgactcccggctgcgggaggcagtgaaggtggcggactccatcatggtggggctggtgaacgccgccatggaggacgcctacaagaagagcctctggaaggacggcgacctggagcgcctcttccagaagctccgcttcgccgagctcgctatcatgcagctcgagtggtgcctccgcttcgtgcggggggagatggaggccgacggcggtgccgacgacggccacgagcagctgctagacgacctcctcgagacgcgggaccggatccaggcccgcctcgacgaggccgaactcgccgtcgcccagacggactgcgactacatgcgccggaagcgcgatgaactcgacccgtcgcgccgccgggagacgccgtccgcagttgatcaccgcggcgccgaggtggagggcggtacgttcgaggaactcagggggtccgtgggccggaagatgacgaggatgagggctaggctggaggacgcgagctccgagctggcggcgctcatgcaaaaggtcagcggcgaggcgtcgccgatggcgaggctgcaggagcccggccacgagggcgacggggtcaagggcctctcgggattctacagcatggcgcagctgcttatggagttccaggagatggtcctggacgccggcgtcctcagagacagcgtcgcatctgcgttcgatgcgatggagaggtcggtctctgctcagcgggcagccatggaggagcagcagtggctcatggatgcagagaaggagatgtacagtgccgtcgttgaaggttttctccgggagatcaacgtggaatcgacgaaacgcaatcagtctgagggagagggatgcccgacacctacattgcatcatagcagagatgctcctgataataatagctcggacgaattccagtatctgaacgatgaaactagccagctgcactcagcaaggcgtatcccggcagagaagtcagagagcagactgcgttatactaattcagaagaggattgtttctgtctctctcaagaggaagctgaaaggctaacagaaacaacgattgattcagaaattagatttgaactgcagcgtgttttgtactcagcagcattcagagacctattaagcaaactttcggttcaggcatatcatgcacagaggcttacagaacaaagagatgaaacggaaatcagaagtaatatacagtatgagatggatagtatcatattcaaagacttggtgaagaacctatgtgttgaatccgttgatcatcttatcaagacctggatccaagatgaggtgcatagagctcttcttgccaagattatgaatccttggaagatcactactgagatggttcacagcgagagacttatcaaggaagagattgaatgcattgtttttggaggtttgataaatgatttggtaaatggtcaaaatttaagtgtggtcaaatatcaacaccaaaatagacccagcgataatctgggaagattcggtatgattgacagcgccgagcagttagtgaatgggaagatacaagtcaatgtaactactgaagatgatggtgtaggctctgatcaacatagaatacttgtgaatcaagaagttttaggtctaattggtaactgtgacaggcaaaattcaaaaggaagtgataagcaagctgaagaatcaataggcagagatgatgttaaggaacgattggatgattgcaggaagctgcaaacagaagaggtagctacaggtttgtgcatgccttctgaaggagtgattcaagaaatctgcattccattgacaaacatatatgaaatatttggggactttgaggctattacctgtgaaaaaataggaacatctgtgctgagattgagagacctggacaaacaattgtcaaacctgattgaaaaagtgaactctcttaaaacaagtgagtttctgtaccggagcgctttcactaggagatgttgcgaccttcaaacagcagaagcagaggtggatcttcttggcgatgaagtggagctgcttcttggacttctcagtaagacatacggagctctggttcactactcaccagttcttcaacactatgtgggggaattagtggagtgggagcataagagcaaggtggacggagtgatgcacgcctgcgggcacgatgtccacacagcgatgcttctgggagcagcaaagttactcagccagcgtaaggatcagctcaagggaacagtgagactcctttttcaacctgccgaggaaagtggtgcaggtgcatctcatatgataagagaaggggttctggacggtgttgaagccatatttgcaatgcatgttgattatcgtataccaactggtgtaatagcagctcacccaggacctacacaagcggctgtatgtttcttcgaagcaaaaattgaaggtaaaagtgggatggctgaaaccccacacttaaatgtggatcctgttgtcgtcacatcattggccatcctgtccctgcagcagcttatttctagagaagatgatcctcttcacagccaagtggtctcggttacctatgtgaaagctggaaaagcccttgatgctacccctaaccttgttgaatttggaggtactttgaggagcctcaccactgaaggcctttactgtctgcaaagaagggttaaagaggtggtagaagggcaggcggctgtgcataggtgcaagggagctgtcgaaataaaggttgaggactacccggtgtaccctgccgttgtgaacgacgagaagctgcatcgacatgtagaggatgtcggcagaggcttgcttggcccgggcaaggtgagaccaggggaaaagatcatggccggcgaagacttcgctttctaccagcagcttgttcccggcgttatgtttggcatcggcattagaaacgaggaagctggttctgttcactcggctcacaacccctatttcttcgtcgatgaggacgtcattcctgttggggctgctttgcatgctgccattgcagaactgtacttcactgacggccccctctttcgacaaagaagactagtggtttctcgttcgtgcgtattttgtctggatcagtccgaacagatggcttcagctggccaatcagatctgaacatctggtccaccatgctgatcagccgcgctccgcggccagtatcaacctccaactatttttccctctgtaaccagaaacactacacatgtttctcaaccctacagtggtctagctattttattctctctttaaacagaaacactgcaaggttcctaaccttatagtgggatttagagcaa

SEQ ID NO: 24563 - DNA, 6016 bp, Zea Mays
gtcggaggccatggcgctcggccctcccggcgcggccatcaaccagcaggccgcccccgcgctcacaccggcccagatcgcggcgtccttggcggatctcagccacgccgtgcgcgatatgcagatcaccatgaacgccatgctgacaggccacctccccttccccaatccacaagccgccgcccatccaccccagccgcctcacccgtccctgacagcgcagccgccgccggccgcactgcccccacccacgcaaccacctgcgccactccctccactcgcccggcaaccaatttcttaccagtacgacatgctgatcgaccccgggccttcatccaccgcatcaccgaccacagcccccatccatatgatccgcttcccaccatccccatcccccatcccatcttgggcgcagggcgcgcctacggtttcaccaccagtgtactctgaggcactcccgcgaccggcgctcacgacttccttacccagcagcaccgtcggtgggcctcccgggatgctgttaggaggcggcgacggccccctgttcccgggtcgggggcccttgcgcccccacgtacccgcaacgacaacagcgtggtcaccgtaccacgggctacctcaggacgacgacgtggagaccgcagcctacgggggcgctgaggcgcgcgcgcctccacgctactacaaactggattttgccacatacgatggctccgaggatccgctgaactggctaaatcattgtgagcagttcttccgggggcagcgcacgccagcctcggatcgcacgtggctggcctcgtaccatcttaagggaccggcacagacgtggtactatgccctcgaacaggacgagggcatgccgtcttgggatcgcttcgccgagctatgtcgccttcgcttcggtccagcagtgcgcggttctcgccttgcggaactgggacgcctccccttcctgtccacggtccaggagtactcggaccgcttccaggcattgctgtgtcgagctcgggacgtctctcccatgcagaagacggagctattcgtgggcggccttcccgagtacttgcgggtggacgttgagctgcgcgacccgcaggatctacaaactgccatgtacctggcacgggcgttcgaacggcgcgcggcggcctggcccccattccagcagcgcgggtcacgaccaccgcaacgggcgcagggctcgggtcgcgtgacaccagctccgcccggggctctaccgaccggtacgacgacgccaggcgatagtacgactccgacacgcccgtttcgccgattgtccccgggagagcagcaggagcggcgccggcaggggctctgcttcaactgcgatgaaccctacgttcggggacacgtctgccagcggctgttctacttggaggtcgacgacttcctcgacgaggcgtccagtgagggtggggtcgacccccttgaggagtcggccgccccagacgtcacgggagccaacgcattggtggtctcgttacacgcgctggcgggcatccggacggacaagacgctgctgctaccagtcaccatcaacggcgagcgactactcgctctcatggacacagggtcaacccacaacttcctcaacgctgacacgatgagtcgcctcgggttagctatggcgggtggcgagcaccttcgggtcacggtggccaacggtggccgcctaccctgcgccggcatcgcccgtgacgtccccgtcatcatcaacgacgagtccttctccatcacgtgcgttgggatgcgcctgggctgcttcgacttcatcctcggcgtagacttcctggagacgctgggcaccatccagtggaacttccgagcactgaccctgtcgttccagcgccagggccggcgcatccactggcagggtgtgcgggccacgcaacagcctgccccgcaacagctggctgtggcagtcgtcgacactgcccaacagcccctcatggacgtccttctgcagcaacatggcgccatcttcgacgagcccacgggactgcccccggcccgcccctacgaccatcgcatccacctgctgcccggtacagctccggtggccgtacgaccgtaccggtacgcacagctgcagaaggacgagctggagcgacagtgtgaggccatgctcacacaaggcatcatacgacccagcacgtcgccgttctccgctccggtgctcttggttcgcaaggcggaccgctcgtggcgtttctgcatcgactaccgcgccctcaacgccaagacgtccaaggacaagttcccgatcccggtggtggacgagctcctcgacgagctccatggagcccgtttcttctccaagctggacctacgctcaggctaccaccaggtgcggatgcacaccgatgacatcgccaagacggcgttccgcacccatcatggccactatgagttcctggtcatgccgttcggcctctcgaacgcgcctgctactttccaggccctgatgaacgacgtactccgcccatatcttcggaagtttgtgcttgtcttcttcgacgatatcctgatctacagtgcatcatgggcggagcacctccagcatgtgggcatcgtcctcgagacattgcaggcaaaccacctccacctgaagcgctccaagtgtgcctttggcgccacatcagtggcctatctgggccatgtcatctccgagggcggggtcgccatggacgccgacaaggtcgtggcagtggcctcctggccgcccccgcggtctgcacgaggcctccggggcttcttgggactagcagggtactaccggaagttcatcaaagacttcggcctcatcgcagccccgctgacacgtctcttgcgacgagacgcgtttgcctgggacgatgacgcgacaacagccttccacgccctaaagcatgccctaacgacgggtccagtgcttcagatgccggacttcgccaagctctttgtcgtcgactgtgacgcatcaggtgcagggttcggtgctgtccttcatcagggcgcgggacctctcgcctacttcagcaagccatttgcagcccgccaccttaagttggcggcctacgagagggagctcatcggcctcgtgcaggccgtccgtcactggcgcccgtacttgtgggggcgccacttttctgttcggactgaccactacagtctcaaattcttgttggatcaacgcttgtccacagttcctcagcatcagtggaccagcaagttgttcggtttcgatttctcggtggaatacaggccggggcgcctgaacaccgtggccgacgccctgtcccgccgcgactcggaggctgccgtggaggacacggctatggcagcactggccatctcgggcccgacattctccctgctggacgacattaggcgggcgctggcagctgcacctgacgggcagcacctcctccagcagctacgggacggcgtattggctgcgccatggcgcctcattgacgggctgctcctgcacgacacacgcatcttcgtgccgaactacgacgacctgcgccaccaggtgctgacactggcgcactcggcaggtcatgagggcatccagaaaaccctccatcgactacgagcagacttctacatgccacatgatcgcgcgctcgtccaggactgggtgcggacctgcaccacgtgccagcaaaacaagacactggcgcagcagccgggcggcctcctgcaaccccttgaggtgccgtcccaggtgtgggccgacatctccatggacttcatcgaggggctgcccaaggtggcaggcaagtccgtcatcctcacggtggtggatcgcttctccaaatacgcccacttcatcgccctcggccacccctacaccgcgtcgtccgtagcacgagcattcttcgacggcatcgtacgactgcacgggttcccgttgtctattgtcagtgaccgggaccccgtcttcaccgggcacgtgtggcgcgacctcttcaggatggcgggggtgacactaaagatgagcaccgccttccacccacagacggatggacaatcggaggtggtcaacaaaattattgcgatgtatcttcggtgtgtcaccgacgatcgaccgcgggcatgggtggattggctgtcctgggcggagtattgctataatacctcctaccacacagcattgcgtgccactcccttcgaggtggtctatggcagatccccaccgtccatgctaccttacacgccagggacggcacgtactgaggccgcagacgacatgctacgctccagagatgagatgctggccgaggtgcgccagcgccttttgcaggcccagcagctcgccaagaagtattacgatgccgggcatcgggaggtccagttccaggtgggcgactgggtgtggctacgcctgctacactgcacttttcagtccctccatccgcgcgcgaagggaaagctgggacctcgctacgcaggccctttccgtgtccaggaaaggattgggtcggtagcctaccgcctacagttgccagatggtgctcgcatccatgatatcttccacgtcagcctgttgaagccgcatcgtggggatcctccttcaactccggggacgcttgacccagtgatggatggtcggctgcttcctgtgccggccaaggtgcttcgcgctcaacttaggcggggcgtgtggcaggttctcgtacagtggcgtggactggctgaagatgacgccacatgggaaaagcttgaagagttccgtactgcttaccccaacttacagctcgaggacgagctgtttgagaaggcggggagagatgttatatatggccaagcctatgttaggcgcaatagggccaaggctgcctaggtggggcccaaggcccaatagctaatagataagctctatctagttagttatacttatccaaagttagtagataaagatcagctctatctagatagttatacttatccaaagttagtagatagacttgagatagctctatatataaatctgtaaactctggaataaaggcaagcagaattccaatctattctggcttcccagagggagccagagtctcctgtgatcttctccctgcgcgcaacccagccaggatcacgacggcgccccagcgccgccaccctggtcccaccaaatcccctccctacaatctgcgcaatctgcccggaattagtggagtgggagcataagagcaaggtggacggagtgatgcacgcctgcgggcacgatgtccacacagcgatgcttctgggagcagcaaagttactcagccagcgtaaggatcagctcaagtcacatgctcaaggtggtattgctcaaatgatgaagacaaacttgttgcgactcctatgaagataaaatgagaaaaaatggcatatgtgaaggcttggagactcaaggaataccatagcattaagagggatgcaacatgagtagtttgataagtgtcaagtgctcaaactaaccgaacctcgagagttagcatgagaggaacacacaacacttgatttttggatcgtggggcttgttcttggttgggttggatagcccttggaataagtttttcaaaagagtcaaagattatcaaaattggagttcggagctaaaagttacggtgcttttggtagagtgttctatgctgtttttttaaaaaaaagtccacaagggggggccctacaaacttttggctttgcacaacaaattggtgactcggcaggagttggccttagtggtcaccggcgagtcaccaatttgtggtgcacagccaaaagtttgtaaagagcaaagaagactcattagtggattggtggaaagtggtcgctttggacccggccacgaatagacctttgttgtgtcactcgtcggcttccacaaccgagacgtataatttactttgtgaggcctgaactttggtaaaacaaatcagtgtcttctctattggtttggctgtatttacttttacattgtaatatttttgtttatcttgatctacttggttgtgcg

SEQ ID NO: 24564 - DNA, 5421 bp, Zea Mays
ccgctgtccgcagcgaacacctgtcctcctccggtcctccctgtgcggaacagtctcgccaatcgccatcactagtgtcgatctgcgccggcctacagcctacgtccgtcgtcgtgtgcgatggacgccttcttcagcggtctcgactcccggctgcgggaggcagtgaaggtggcggactccatcatggtggggctggtgaacgccgccatggaggacgcctacaagaagagcctctggaaggacggcgacctggagcgcctcttccagaagctccgcttcgccgagctcgctatcatgcagctcgagtggtgcctccgcttcgtgcggggggagatggaggccgacggcggtgccgacgacggccacgagcagctgctagacgacctcctcgagacgcgggaccggatccaggcccgcctcgacgaggccgaactcgccgtcgcccagacggactgcgactacatgcgccggaagcgcgatgaactcgacccgtcgcgccgccgggagacgccgtccgcagttgatcaccgcggcgccgaggtggagggcggtacgttcgaggaactcagggggtccgtgggccggaagatgacgaggatgagggctaggctggaggacgcgagctccgagctggcggcgctcatgcaaaaggtcagcggcgaggcgtcgccgatggcgaggctgcaggagcccggccacgagggcgacggggtcaagggcctctcgggattctacagcatggcgcagctgcttatggagttccaggagatggtcctggacgccggcgtcctcagagacagcgtcgcatctgcgttcgatgcgatggagaggtcggtctctgctcagcgggcagccatggaggagcagcagtggctcatggatgcagagaaggagatgtacagtgccgtcgttgaaggttttctccgggagatcaacgtggaatcgacgaaacgcaatcagtctgagggagagggatgcccgacacctacattgcatcatagcagagatgctcctgataataatagctcggacgaattccagtatctgaacgatgaaactagccagctgcactcagcaaggcgtatcccggcagagaagtcagagagcagactgcgttatactaattcagaagaggattgtttctgtctctctcaagaggaagctgaaaggctaacagaaacaacgattgattcagaaattagatttgaactgcagcgtgttttgtactcagcagcattcagagacctattaagcaaactttcggttcaggcatatcatgcacagaggcttacagaacaaagagatgaaacggaaatcagaagtaatatacagtatgagatggatagtatcatattcaaagacttggtgaagaacctatgtgttgaatccgttgatcatcttatcaagacctggatccaagatgaggtgcatagagctcttcttgccaagattatgaatccttggaagatcactactgagatggttcacagcgagagacttatcaaggaagagattgaatgcattgtttttggaggtttgataaatgatttggtaaatggtcaaaatttaagtgtggtcaaatatcaacaccaaaatagacccagcgataatctgggaagattcggtatgattgacagcgccgagcagttagtgaatgggaagatacaagtcaatgtaactactgaagatgatggtgtaggctctgatcaacatagaatacttgtgaatcaagaagttttaggtctaattggtaactgtgacaggcaaaattcaaaaggaagtgataagcaagctgaagaatcaataggcagagatgatgttaaggaacgattggatgattgcaggaagctgcaaacagaagaggtagctacaggtttgtgcatgccttctgaaggagtgattcaagaaatctgcattccattgacaaacatatatgaaatatttggggactttgaggctattacctgtgaaaaaataggaacatctgtgctgagattgagagacctggacaaacaattgtcaaacctgattgaaaaagtgaactctcttaaaacaagtgagtttctgtaccggagcgctttcactaggagatgttgcgaccttcaaacagcagaagcagaggtggatcttcttggcgatgaagtggagctgcttcttggacttctcagtaagacatacggagctctggttcactactcaccagttcttcaacactatgtggggatcagggaggtgctgaacctgcttgggaaggagcttgctcatatgcctaacaagacagtgatgccaggcaaggactgcctgcgccagcccgtgcagcatggtgtccgtgttggcagtgactttgctgccgcattgcaagcgcagtttcggaggcagcggaggttggtcgggacttggatgcaggggccgacgccgactggctggagccctcgacggcgactcggcgaggcgccgctgtctcgagaagaagctctattggaacttggaagtggtgctgttctccatttcggatacttctggagtttccagcggttagccacgtggattcttgcacctgtcctgtcctctccactgccaccgtcgttcctcaggtccgttccaagggtagctatggaactcgatctgccgccgcaaccgaccccgccactcaccgacctggccgcctccatccaccgcgccgcagcggccgcggcagtgctctcagcccccgcgccctcctcccatgccgccgccgcggtggctgcccttcgcgacgcccacgctgccatcggttctttcctctcccgcctcaacgtatcgtacggtgatgatcatcaacccatggcggatagcggcgaggagttggtggaggatggggagggggcgcagatggtcggggaggcggaggagaggctccggaactgcggcctgcaggggagcaagcggcggaaacgtcctgtgccgccttcatggcccctagggcgccgctcgagcagcagttccgaagcggcggcggcagccgccgcgccgggtgccggtgctggacgtcgaggagcggcgacgcgcgaccatggatctcttgatgcaattccatgcgtgatgcgtaggaaggaacgtgagtgatattctgtcttgacgccataacggaaatttagttgtttgcatcagtgttaaatgtgctttctaaatttttgtctctaaattatcattcggagagtcactatctatatcttttcatccttcaacaacttttctacatcgtttaatttctagaaagctattcttttttttttaattttggcttgcgagaaatccaggacagatgatgtctcagaacagaagtctatttgaacaactattcaaagaaactgttgaaatattttttactgaaatatacattcctagcaattagggaggtatagaaaagctgagttgctctaaatcgtgaaaatggtttgacatttctggatatttttattacctagataggtatcgttcatggttagttggagctggacaattagtggtgtagataaggcgaattgactatgagattgaaatgaactatggcaagaaaacgagataagtatactcaaatttcaccaacttccaatgccccctcatgtgcgaagtatgctcgattgaagtacacatttttatgatgctactaaggacatgtttggaagtaaagtatttcaaaactatggttctagaatactatgattttaaaacgtcatgacataactgtagtattttgtacatcactccaaacaatacaacaacatttcaaatcatggtatttagtatccatgagccaaaagttagtcatagtaaaaaactttggattggagttaagtttcaaatactccaaaaataccatggtaactattaaaccactgtattcaaaacagagtttttacaagctagccaagcacctcttggtaaaaaataccatagtaatctcaaaactccaaaaatgctttgcttccaaacactcccctaaacgtttataaattttggttggtgctaaatttacattagccaaattagagcttgaactctgaaatctaagaattgcacggctggtagcattgtatggcaactggcatgtagttgctaacacacctcaacaactttgtctaaagttttgtaaaatttagaaaggagaaatgcatatttggctgttatgaaagtggatgagctttgcctgtattaaatgagttacaaagttgaaggaattagcagttaataggtcgtactagggtatttatggatcctgccaaaattagtgtgctattcataactcttttagcacttgctagcaacatcgatcttgctaattctttctattagctagcacacctatttggatcttggtctactaatttttagttgctagctattagcaacatggatccaaacatgccctacttggtatcctctatgctgctcatagcaactaaaaattaggagtatgaatccaaacagtccgtctactgggaggtatgctagttacaagaaaaaaaatagaaggtcaatgttgctagtaagtgctaagagttaggatgctaattttaagatgatccatatagagctagtgaagtagtgtactgagtgctgacagagaaatatttggagatcatagcagaagttgtttgaggaaagatcatagtgaacattggcggcataaagcacataagcagggacatatgttctggctaatattcatattcgtagattcgtgttgccacagccattctttatctaaaatttccctatgcttgtgttagcaacctacgccctccgtgctcttttaagtgtgactatgatttgtactgatttgtagtttcacttttactctttaatcgtttgaccttttcttgtgcccctttagatcttgctggttcttgttggttttatctctttttatgtgtttctccgtttcgtcgtttttcggttctcctttgcatttgtctcccttttcttttctttgagggttgagctctgaggttttcatacggggtcatctctagcctacctcaacgtgcttgggacaaaaaagctttgttgttgttgttgttgttgttgtatttagtaaaagtcgagtacgtttgacttctcggtaaatgagaatgacgcttgagaaagtgacggaggggtatgcagtattcataggttatagcatgctacattacagaatacaaagttcaaagagatgttggtgctagctcatctgttaagtgatgatagataacggtatgtctacatgttgctctagcacgataaatggggtctgggattatttgcaacattgtttccaagctggatagccacatgtcagtacttagctgaagatatgctaatggtattcatttcctagggcagctagtaacactttcctgttatttcatttgaatagcatttcctactaatgcc

SEQ ID NO: 24565 - DNA, 708 bp, Zea Mays
aacaaggcagaacgcacccttctctcagtctcagcgccgtctttcttcgttacctgcccccgctccccgaaggctcgaaccctttacagccggcgaagaagatgcacctgtggccatcgctccggatccgcgactcgttcaagcacggctacctccagaagctggagctcaacctcggcaacatgaagcgcgcgcagcggcagcgccagggccggcagggagagagccaggaggaccaggacggccagcccggcggcaacgggaaggcgccgctgctcgaggaccgctcgccatcggggtccgtgcttgccggcgcgctcgagctcgcctgggacgccgtcttgctcctcacctgctgctgctgttgcttctgctgcggagcttgtagcgacgaagaggatcacccaactgcccgctaaggagcaacttcaggataatctgtgcggttgctgtttctcaccgacacaaaggcgtttggtccaggtgatgcttgcagcgcatgaatgccgagtctcttgctccctcggtttacaaaaacttgttttagacaggattttgagttaacttttaaaacttcgataacaaataacttttagggcttatttgggagaaagaaatttgagggaattaagggttgctttgggagcaagaagatttttgccacttcaatccttttttaaataggattttaaataggatggatatttt

SEQ ID NO: 24566 - DNA, 746 bp, Zea Mays
aacaaggcagaacgcacccttctctcagtctcagcgccgtctttcttcgttacctgcccccgctccccgaaggctcgaaccctttacagccggcgaagaagatgcacctgtggccatcgctccggatccgcgactcgttcaagcacggctacctccagaagctggagctcaacctcggcaacatgaagcgcgcgcagcggcagcgccagggccggcagggagagagccaggaggaccaggacggccagcccggcggcaacgggaaggcgccgctgctcgaggaccgctcgccatcggggtccgtgcttgccggcgcgctcgagctcgcctgggacgccgtcttgctcctcacctgctgctgctgttgcttctgctgcggagcttgtagcgacgaagaggatcacccaactgcccgctaaggagcaacttcaggtattttgggcgtgtaatcagttcgtatctgtattcaggataatctgtgcggttgctgtttctcaccgacacaaaggcgtttggtccaggtgatgcttgcagcgcatgaatgccgagtctcttgctccctcggtttacaaaaacttgttttagacaggattttgagttaacttttaaaacttcgataacaaataacttttagggcttatttgggagaaagaaatttgagggaattaagggttgctttgggagcaagaagatttttgccacttcaatccttttttaaataggattttaaataggatggatatttt

SEQ ID NO: 24567 - DNA, 1011 bp, Zea Mays
aaagatcccaacaaggcagaacgcacccttctctcagtctcagcgccgtctttcttcgttacctgcccccgctccccgaaggctcgaaccctttacagccggcgaagaagatgcacctgtggccatcgctccggatccgcgactcgttcaagcacggctacctccagaagctggagctcaacctcggcaacatgaagcgcgcgcagcggcagcgccagggccggcagggagagagccaggaggaccaggacggccagcccggcggcaacgggaaggcgccgctgctcgaggaccgctcgccatcggggtccgtgcttgccggcgcgctcgagctcgcctgggacgccgtcttgctcctcacctgctgctgctgttgcttctgctgcggagagaagcacagtattttaaccagcaggatctagttcaacattgtatcagattttaggctggcagaaagcttgtagcgacgaagaggatcacccaactgcccgctaaggagcaacttcaggtgcctgataattcatcagatcacgaaaaccagataacttgtgggcataatgaattgcagtcaaatagttcaaatagtttcggtcagctttgtacatatggttttctattcatccttatgccgcccatagatgtcattgataaacggaaaaaggatccttattttttttgttggaaacccgttgtgtaggtattttgggcgtgtaatcagttcgtatctgtattcaggataatctgtgcggttgctgtttctcaccgacacaaaggcgtttggtccaggtgatgcttgcagcgcatgaatgccgagtctcttgctccctcggtttacaaaaacttgttttagacaggattttgagttaacttttaaaacttcgataacaaataacttttagggcttatttgggagaaagaaatttgagggaattaagggttgctttgggagcaagaagatttttgccacttcaatccttttttaaataggattttaaataggatggatatttt

SEQ ID NO: 24568 - DNA, 1007 bp, Zea Mays
aagacccgaaaagatcccaacaaggcagaacgcacccttctctcagtctcagcgccgtctttcttcgttacctgcccccgctccccgaaggctcgaaccctttacagccggcgaagaagatgcacctgtggccatcgctccggatccgcgactcgttcaagcacggctacctccagaagctggagctcaacctcggcaacatgaagcgcgcgcagcggcagcgccagggccggcagggagagagccaggaggaccaggacggccagcccggcggcaacgggaaggcgccgctgctcgaggaccgctcgccatcggggtccgtgcttgccggcgcgctcgagctcgcctgggacgccgtcttgctcctcacctgctgctgctgttgcttctgctgcggaggagcctgagattgcacatgggacttccttcttgtatatacttcgcccttatatccttgtagcgacgaagaggatcacccaactgcccgctaaggagcaacttcaggtgcctgataattcatcagatcacgaaaaccagataacttgtgggcataatgaattgcagtcaaatagttcaaatagtttcggtcagctttgtacatatggttttctattcatccttatgccgcccatagatgtcattgataaacggaaaaaggatccttattttttttgttggaaacccgttgtgtaggtattttgggcgtgtaatcagttcgtatctgtattcaggataatctgtgcggttgctgtttctcaccgacacaaaggcgtttggtccaggtgatgcttgcagcgcatgaatgccgagtctcttgctccctcggtttacaaaaacttgttttagacaggattttgagttaacttttaaaacttcgataacaaataacttttagggcttatttgggagaaagaaatttgagggaattaagggttgctttgggagcaagaagatttttgccacttcaatccttttttaaataggattttaaataggatggatatttt

SEQ ID NO: 24569 - DNA, 848 bp, Zea Mays
aacaaggcagaacgcacccttctctcagtctcagcgccgtctttcttcgttacctgcccccgctccccgaaggctcgaaccctttacagccggcgaagaagatgcacctgtggccatcgctccggatccgcgactcgttcaagcacggctacctccagaagctggagctcaacctcggcaacatgaagcgcgcgcagcggcagcgccagggccggcagggagagagccaggaggaccaggacggccagcccggcggcaacgggaaggcgccgctgctcgaggaccgctcgccatcggggtccgtgcttgccggcgcgctcgagctcgcctgggacgccgtcttgctcctcacctgctgctgctgttgcttctgctgcggaggagcctgagattgcacatgggacttccttcttgtatatacttcgcccttatatcgatatccaacaaaaatgcacttcacagcacgaggatccaacttccccacctgaggtctatgatctttgacaaagcatgtacatccaaaaattttaggtggaaccacaaacttttctcaccgagaagaatctcacatggagtcttcattgcaagtatttttgaaggagtacgattaataagatatgtggcagtcaatacagcttcactccataggaacttcgaaacattcattgtaaacatcagcgaacgagcaacttccaaaatgtgacgattcttcctttcagccacaccattttgtggaggtgtatcaggacaggatgtctgatgtaatataccatttcttgacagaaaggcattaaattacttgtttacatactcggttccattgtctgttcttaggattttgacttgag

SEQ ID NO: 24570 - DNA, 2062 bp, Zea Mays
agttccccaaagttcccaacgccgccgcgacggcgctgctagctagtctttggtgttgcaggtgttcgattcctgattccaaattccagactccaaactcggttcttcaatcgacagattccgatttacatcccaaagctcttcggattgaaatccagccgcgacccaagagataagagtatttgggattagtagatagggagggtagataggatagtagaatagaagaggagcactttcgctgatgattacggcggaggagaagagccccgaaagggaggaggaggaggaggaggcgaacccgcgcgcggaggcttttctggagatcatctgccgcgtcccggcgggggaggtggaggcggcgctgtccgcttgcggcatcggccccacggccgaggtcgaggaactggtgctcaagtcccgcgaatgctacaagcgccctaagtccgccgtccgcttcttccgctgggcggggcagtccgtgtcgcacaccgcctacgcatggaacctccttgtcgacatcctcggcaaggccgccatgttcgagcccatgtgggacgccatccgctccatgaagcaggagggcggcggcgggctcgtctccgtcgccaccttcgcctccgtcttcgcctcctactgcgccgctggcaacatcaaagatgcaatcgcggccttagacgtcatggaccgctacggcctcaagcacgacgccgtcgcgctcaactcgctgctctcggcgatttgccgcgtcgagggtcgcgcgcaggatgcgcaggacgtcttcgagcgtaccaaggcaaccatcccacccgacggcgacacgttcgcgatactgctcgaggcatgggagaaggaggggaacgcggtgcgcgccaagagcgtctttggcgagatggtcgtccgcatcggctgggacgcagccaacgtatccgcgtgatgcggagcaagggctgcttgccggggatcaattttttttctacagctgtggatctggtcgtccgcaagggtgactacctcaacgccgtagccatctggcacatgatggtctctgaagccggcctcgttcccaatttctcaatgtacagcgccatgattggcctccactgcaatgctggtagcatagacgatgctcttgggttgcttgatgaaatgcccctcaacggcgtctttgcaaattctgtcacatacaacaccatactggaaggattcatcaagcatcgcaaggctcgtgaggctgaaagtttcctaacggagatgagcaagaatgagcaactgcctactgcatccaattgcgctgctgctatcagcttgttctttaaggagtttaacccatctgcagcaatcgacgtgtggcgctgtattgtggagcacaacattaccccagctgaggactctgccaaagagctaatagcagggctgcttgaatttggcaggtttactgaggtgacgaagcgtgctgatgagatgattgacatgagagttgagttgtcacggtccacaatggagaatatgaagcgtggttttgctaaggctggcaggcaccaatcatatgacaacattgcaagaaggctaaagcgatattagctgcacatgaatgctttaatcagctgaaactttgcggctcacggggtagaagtttaacgcctggactgctgaattgcatgacaaccaagaatttggactagcctggatcctggaatgtaagtctggaagtctggaactgtactctgatcccacaagcagtggtcgggatgttagtgtagctcttgtagattccggaccccatttgttagctggttactcatcgagtgtaataagtggctagtttagtgagactgcacattatcgctgtttatttttcagatatattttatgaatatgaaattgggttatgtaagtatcagatattcctggctgtcagcagcgtcaggcgcctctgctgatcctttgaccatattgtttttcgtggaagaagctttttaacttctttttttttttaccgggaaggtttgagcggttggtgttttctcttgtcattcttttaatcaggtcacttgctcat

SEQ ID NO: 24571 - DNA, 1753 bp, Zea Mays
ggctcgccaaggaagcatccactgaccagcatccaagcgaggcagcctgaccgcccaccgtactacacgcgagcgcgcgcttctgcccccgccctgtaaaactctgaacataaaagtgcatcgccctgcctccctctcttcatctccctcttccaaggagaacacccacctctctctctctctctctctctctctctctctctctcttgttgggacctggagaagaggaaggaacagggagcaggggggaagaagaggttgctgcgacggctcaagcctcaagcagacaagcagagaaacaccagttggtcaagatgtcagctggtttccagctcggtgtgatcgggtcacttgcactctctgtcgcatcctcagttgccattgtcatctgcaacaaagctctcatcagcacgcttggttttccgttcgccacaacattaacaagctggcatctgatggtgaccttctgcaccctccatgtggcacatcgcttgcatttcttcgagcccaaggcgattgatggacagacggtgatactctttgggttgctgaatggcacgtcaattggccttctcaacctgagcttaggattcaactccattggattctaccagatgacaaaattggcgatcatacctttcactgtgctattggagactatcttcttgaacaaaagattcagcgagagtatcaaactctctcttctggtcttacttcttggagtaggaattgcttcaattactgatctcaagctaaacatgcttggttccatcctttctggcctcgccattgccactacttgtgttggccaaattgtatcctacatttaatttaatagcaatacaattatcaatagtctcagaactgtaaggagaaagcaaatcaagcagatagattattagttcttttcaacccacttctcattgcaatgtacattgataaagcagtttattattaaaaaaacacaaggactcagtactgaaatcttattatctattcagagaccttctagtttgagccactttatgaatcacttggcatgaatctgtcacatgcttcccataccagtgccacatgctaatccttgaccaatatgtttttgaacgaagctcacaaatacaatacagaagaggttgaaggtctcctcaacgcagcttctgtaccaatctgcgccttaccaggcaggaattctgtttgcaactggcccttttgtggatcaacttcttactgaccggagtgtctttgcacacaaatactctgctccagttctgggtttcattgtcctatcttgcttgattgcggtgtctgtgaacttcagtacatttcttgtgatcggaacaacatccccagtgacataccaggaacatattgggcattctaattgccatatttggtatggcactatactcctacttctctgtaagagagggcaagaagaagtcagcaaatgatgctctaccagtttcacagatggcagataaggaggctgaaccacttttggcaactaaagacaacaacgacaccaagaaagcaaatggtttatctcacgactgctgaggcttttcttgtagtttaggtctagtatgaactgcccttcgaatttaaaggacctggaaagccattcttttcattcttgagttcctttttaggaaacggagcttttaaaatttgtatagaatgcatattttgacattaaaattattatttgattgtattctacacacagcagttccagctgaagttttactagtgc

SEQ ID NO: 24572 - DNA, 2455 bp, Zea Mays
cgtgtacaatacaccagtagcagcaacaacaacaacacatgctcgcatgctgcacgatgccttgtaggctcgccaaggaagcatccactgaccagcatccaagcgaggcagcctgaccgcccaccgtactacacgcgagcgcgcgcttctgcccccgccctgtaaaactctgaacataaaagtgcatcgccctgcctccctctcttcatctccctcttccaaggagaacacccacctctctctctctctctctctctctctctctctctctcttgttgggacctggagaagaggaaggaacagggagcaggggggaagaagaggttgctgcgacggctcaagcctcaaatttttggatccaggcagacaagcagagaaacaccagttggtcaagatgtcagctggtttccagctcggtgtgatcgggtcacttgcactctctgtcgcatcctcagttgccattgtcatctgcaacaaagctctcatcagcacgcttggttttccgttcgccacaacattaacaagctggcatctgatggtgaccttctgcaccctccatgtggcacatcgcttgcatttcttcgagcccaaggcgattgatggacagacggtgatactctttgggttgctgaatggcacgtcaattggccttctcaacctgagcttaggattcaactccattggattctaccagatgacaaaattggcgatcatacctttcactgtgctattggagactatcttcttgaacaaaagattcagcgagagtatcaaactctctcttctggtcttacttcttggagtaggaattgcttcaattactgatctcaagctaaacatgcttggttccatcctttctggcctcgccattgccactacttgtgttggccaaattctcacaaatacaatacagaagaggttgaaggtctcctcaacgcagcttctgtaccaatctgcgccttaccaggcaggaattctgtttgcaactggcccttttgtggatcaacttcttactgaccggagtgtctttgcacacaaatactctgctccagttctgggtttcattgtcctatcttgcttgattgcggtgtctgtgaacttcagtacatttcttgtgatcggaacaacatccccagtgacataccaggtgcttggtcaccttaagacatgtctggttctatcatttggttacactctattacatgatcctttcactctaaggaacatattgggcattctaattgccatatttggtatggcactatactcctacttctctgtaagagagggcaagaagaagtcagcaaatgatgctctaccagtttcacagatgactgcgagggttaaagggagatggctagggttacagggcgacgactagggttaggggcgctgggaggctggccgcaaaactttgcccacggtcgacaagagagaagggattttcttctaatctcttgcttaccttcgactgatacagtctctctccttatatagagagggttactttacctctaagcactagatctaatcttatctttaattttaattttaactaaaactaatctatctttatctaaacaacctgaggggcgtgctacagcgacgacattactgtagcgggccctcttgggccctgacacatacagtttttatggaataaaagggaataaattgataagtgataagcgtagaacggccatgccaatgactgtcttgcttcctatactaactcagcagcaataatcaagagtccattttcatcaaactaaatacagtagtgattgaatcttctattttggtataatcacgctgaaataaactttttttttaaaaatatattactttagatttgaatagaattggcacactaacaagaatcagtattaagcattagtatggtacagatagacaaaatttatgacccttctaatactgtgaaccagattggaccttataatactaagagaatgatctggactacaagccccatgtgtagtgaattattttagcttctagatgggataccaaatatgttcaacgcagctgcaacataatttacattatgaaagtgtgcaacaaaaaatgccaaatcgtcattgaagtacaatttaatatgaacaaacttttttcagtttacccttattgatgtttttgatgatgtatatgtagatggcagataaggaggctgaaccacttttggcaactaaagacaacaacgacaccaagaaagcaaatggtttatctcacgactgctgaggcttttcttgtagtttaggtctagtatgaactgcccttcgaatttaaaggacctggaaagccattcttttcattcttgagttcctttttaggaaacggagcttttaaaatttgtatagaatgcatattttgacattaaaattattatttgattgtattctacacacagcagttccagctgaagttttactagtgc

SEQ ID NO: 24573 - DNA, 833 bp, Zea Mays
atggagatcaaggaggtagcagcagcggaggcgatgacgatgggcatgccgacggtgccctctcggttcaggaggatctgcgtcttctgcggaagcagccaggggaggaagaagagctaccaggatgctgccgtcgagctcggcgaggagctggtctcaaggaacatcgatctggtctatggcgggggaagtgtcgggctgatgggcctggtctctcgagcagtctacaatggagggaggcacgtcataggggtgattcccaagaccctcatgccaagagagattacaggtgagacggttggggaggtgaaggccgtggcggatatgcatcagaggaaggctgagatggccagacaatctgatgccttcatagcacttcctggagggtatggaacccttgaagagctgctggaagtgatcgcgtgggcgcagcttggcatccacgacaagccggttggcctgctaaacgtggacgggtactacaactcgctcctatccttcatcgacaaagctgtggaggaggagttcatcagcccgactgctcgccacatcatcgtcttggcaccgacaccaaacgaactgctcgacaagctagaggagtactccccccggcacgaggaggtcgtgccgaagaccaagtgggagacggagcagctgagctgctgcaagagctgcgagatcccgccggggctcaaagaagggacgccgatcgtccaagcacagcgaggaaccatgcatgctctgaactaatggtgttagttagctattacgtactagccagtgaccacttagggtttctcaggaggcctgcacaagtggtggtgatgtaggaa

SEQ ID NO: 24574 - DNA, 1458 bp, Zea Mays
cggcggctcgacacggttctgcgccgacttgagcgtgaactcaccaacccctgcattgtcgccagggtcctcgtaagcgaacccaccgtgccgcgtcaggtccatgccggacatctcgtcgtcggccgagatgcgcagcagatccagcctcttgagcgcgtagaagagcgggcccatggtgcagctcacccacccggcgatcaccacgatctggacgatctgcgcggccaggagcttcccgccgccgcccatcaacagcccgtagggcctcccggcaccgtagatctcctccacgtactcttgcctcgcgaagagccccgtgaagaggacgccccacgcgccgcacccgccgtgcagctgcgccgcctccagcgggtcgtcgaacctgaggcgcgcggcgagggcgttggcgccgatgagcacccacgcggacacgaacccgcacacgacggccgcccacggctccaccacgctgcacccggccgtgatggccgcgaacccgccgaggagcccgttgcagacgtccaccacgttccagtggcccgcctggagccgcttcccgaacagcgtggtcagcgcggcgacgctgccggcgagggtggtggtgacggcggtgcggcccacggccgaccactgcccgtggacggtcccggcggggccgtacgacttgaggatggtggtgaacgacccggggttgaacccgtaccagccgaaccacagcaggaaggtgccgagcaccacgagcgacgcgctgtggcccctgagcgctacggagcggccggcgtggtcgaagcgcccgatacgggggccctcgacgagcgcgccccagaaccccgcgatgccgccgaccatgtggaccacgccggagccggcgaagtcgatggcgccggacccgaagagcagcgggccggacgtgcggccggcggcggcccacccgtcggcggaccagaaccagtgggacgccacggggtacacgaaccccgtcaggaacgcggagtagatgaggtaggcgacgaactgggtcctctcggcgatggagcccgacgtgatgcccgcggcggcgatggcgaaggcccactggtataggaagaagtcgtagtcgaagccggtcctgggcaggcgctggagcccgaagaagtgcctgccgatgaagccgttggacggcgtgccgaaggcgaaggcgaagccgaagaggtagtagaagagcgccccggcggcggcgtccagcacgttggtcagcatgatgttcatggtgttcttggcgcggacggagccggcgcacagcatggcgaagccgagctgcatggcgaagacgaggtaggccgagaagagcaggtacgtggcgtccaccgcggaggccgtgtccgcgaactggctgcagaggtagcccgtggcgttcgccgccgccgggcccagcagcggcgccaggtccgtcgcgcacgtcgccatcttcccttg

SEQ ID NO: 24575 - DNA, 2964 bp, Zea Mays
ctcgattagcgaaaaaaagcccagcgaaaactaaaaccctcgcatctttcctttcctccccaactgcggccgcctccacccgctccaccgccgatggccgagcctgagcctctgccgcaggtgtcgtctgaacctaccactccgccgcaggaaggcagcggaaggactaagacaaagaacaagaagaatcgttccaagaagcaaccgaagcgagccggcgctgacaccgacgggttatcctcaggcgccagcaccatggttgaggaccctttcttcgtcctcgccggcggaaaggaaggagggtttctggatttggaggagatcgatgaggcagacttcggcatcttcggaggcgtcttggatgacgtaggacagagcgtcgaggaagctgggaaggatcatgggaagaagaagaagaaaacaaagaagcggaagcgtgggggtgatggcgagggcttcagtggcgacgctgcgttggtagttgagaatgaccaggtggatgtcgagaaagtggagaaaaaggtcgaggatggggagaaaggggataagaaggggaagagaaagatgaacatgaagaagaggaaggtgaaggataatgagatgaacagggagagtgatgaggatgttgctagtgacaaagcagaagacatgcaagatgacactgagaatatggaacaaaatgaggacgatgagctgattttgggcgaagatgatgtctctgcatggagggagcttaggctgcaccctctgcttctcaaggcgatgcgcagacttggattcaaagagccaacacctatacaaaagtcttgctttcctgctgcagctcatcgaggcaaggatgttatcggtgctgcagagacaggttccggaaagacacttgcttttggcctcccagttttgcaacgtctccttgaagagcgagaaaaggccacaagattgcagcaggaagatgaaaaaatggaggaacgttcttgtggaagccctcttcgtgctcttattctgacacccactagggagctcgccaaacaggtatgcgatcatctaaaagatgtggccaagttcttaggaatccatgttgttccaattgttggtggtctatcaatggaaaaacaagagagacttttgaaaaaaaagcctgaaattgttgttggaactcctggaagattgtgggaacacatgtcgatgaacaatcaacacctagttgagaatgatcgaacgaggccatttccgtgaattacaatctatcattgagatgcttccactgaccaatggttctgatgaacaagctgcaagaacaatgccaaactgtgagactgtaccaattttgcaaataaagaagcggcaaacctttgtgttctcagccacacttgcactctcatctaattttcggaagaagttgaagcgtggcctatctacttcgaaggcatcgacgcctgatgatgtcagctctattgaagcattgtcaaaacaagctggaatgaaatctaatgctgaaatagttgatttgacaaaggcttcaatcttgcctgagaagcttgaagaatcttttattgagtgcagtgaagaggataaggatgcctatctgtattatatattgagtgttcatggtcaaggtcgcacaataatattttgtacatcaatcgccgcattacgtcacatttcttccatactgcgcattcttggaattaatgtattgacaaaccatgctcaaatgcaacaaagagctcgcatgaaggtctatatccacagaagtggaaggacagcacgcaagtcattggctggctgcagcattgcgttaatctctcctactgacaagtccaggttttattctctttgcaaatctttgtcaaaggagaatctccagcagtttcctgtagatcatacttacatgtctggagtgatgaacagactctcacttgctcggcagattgacaagattgcccgtaaaacttcacaggaaaatgctaacaaatcctggcttcaaaggaatgctgaatctatgggattgattttggatactagtgacagtgaagaagaccatgtgcagggacacaagaaacgaaaggctacttctgcacatctccaaaagcttcaacaggagttgagtgatctcttgcaatgcccattgcagcctaagactttctctcgccgctatttggctggggctggtgtctcacccttacttcagaagcaactagaagagttggccaagagaaatgcaagcaacaatagcagcaagagtaagaataaaggatctgggtttgttgttattggtcaggatcgtgtcgagcccttgcaagcacttcaaaattctgggcaagaggtctgtgtgaacatagacaaagaaagggaaaagcgaagagtcgctgagaactggaggcggaagaagcatgaagaaaagaaacgtacacaagagcagaagcgaaaggataagagaaaagctaaagagatggcttgatgacacatgagatagctaggggccttcaaggggtttacggaagctctttaagctcgcgtcaatcctttcagaaaggaaaggaatgcattcatcaatgttttgctgtaatacaatgcgtgcgctaagttagcgcttgcctttaacagattggaggtggtagtttgattttgttttgcggctgaagaaaataaacttagaatgcacgagcactggctctggatgagaaaagaaattaagcagatagctcacgtataacctcattggatctgtaatatgtacgcctatcagatttaaggtacaaattaattttattagggatgggaatcgactgacctggcctatctttggacttggacctggcccattgccttaaggccaattttaggagtgatggagattatgatcttgctggctatcatgggtttggcctagatatttttctgctataatgcatggacatgaatcctatcaatatttctataaagtattgtgataacagattaaaa

SEQ ID NO: 24576 - DNA, 3017 bp, Zea Mays
caaacaggccccctcgattagcgaaaaaaagcccagcgaaaactaaaaccctcgcatctttcctttcctccccaactgcggccgcctccacccgctccaccgccgatggccgagcctgagcctctgccgcaggtgtcgtctgaacctaccactccgccgcaggaaggcagcggaaggactaagacaaagaacaagaagaatcgttccaagaagcaaccgaagcgagccggcgctgacaccgacgggttatcctcaggcgccagcaccatggttgaggaccctttcttcgtcctcgccggcggaaaggaaggagggtttctggatttggaggagatcgatgaggcagacttcggcatcttcggaggcgtcttggatgacgtaggacagagcgtcgaggaagctgggaaggatcatgggaagaagaagaagaaaacaaagaagcggaagcgtgggggtgatggcgagggcttcagtggcgacgctgcgttggtagttgagaatgaccaggtggatgtcgagaaagtggagaaaaaggtcgaggatggggagaaaggggataagaaggggaagagaaagatgaacatgaagaagaggaaggtgaaggataatgagatgaacagggagagtgatgaggatgttgctagtgacaaagcagaagacatgcaagatgacactgagaatatggaacaaaatgaggacgatgagctgattttgggcgaagatgatgtctctgcatggagggagcttaggctgcaccctctgcttctcaaggcgatgcgcagacttggattcaaagagccaacacctatacaaaagtcttgctttcctgctgcagctcatcgaggcaaggatgttatcggtgctgcagagacaggttccggaaagacacttgcttttggcctcccagttttgcaacgtctccttgaagagcgagaaaaggccacaagattgcagcaggaagatgaaaaaatggaggaacgttcttgtggaagccctcttcgtgctcttattctgacacccactagggagctcgccaaacaggtatgcgatcatctaaaagatgtggccaagttcttaggaatccatgttgttccaattgttggtggtctatcaatggaaaaacaagagagacttttgaaaaaaaagcctgaaattgttgttggaactcctggaagattgtgggaacacatgtcgatgaacaatcaacacctagttgagctgcactcattgtcattcttcatcttggatgaggctgatagaatgatcgaacgaggccatttccgtgaattacaatctatcattgagatgcttccactgaccaatggttctgatgaacaagctgcaagaacaatgccaaactgtgagactgtaccaattttgcaaataaagaagcggcaaacctttgtgttctcagccacacttgcactctcatctaattttcggaagaagttgaagcgtggcctatctacttcgaaggcatcgacgcctgatgatgtcagctctattgaagcattgtcaaaacaagctggaatgaaatctaatgctgaaatagttgatttgacaaaggcttcaatcttgcctgagaagcttgaagaatcttttattgagtgcagtgaagaggataaggatgcctatctgtattatatattgagtgttcatggtcaaggtcgcacaataatattttgtacatcaatcgccgcattacgtcacatttcttccatactgcgcattcttggaattaatgtattgacaaaccatgctcaaatgcaacaaagagctcgcatgaaggtctatatccacagaagtggaaggacagcacgcaagtcattggctggctgcagcattgcgttaatctctcctactgacaagtccaggttttattctctttgcaaatctttgtcaaaggagaatctccagcagtttcctgtagatcatacttacatgtctggagtgatgaacagactctcacttgctcggcagattgacaagattgcccgtaaaacttcacaggaaaatgctaacaaatcctggcttcaaaggaatgctgaatctatgggattgattttggatactagtgacagtgaagaagaccatgtgcagggacacaagaaacgaaaggctacttctgcacatctccaaaagcttcaacaggagttgagtgatctcttgcaatgcccattgcagcctaagactttctctcgccgctatttggctggggctggtgtctcacccttacttcagaagcaactagaagagttggccaagagaaatgcaagcaacaatagcagcaagagtaagaataaaggatctgggtttgttgttattggtcaggatcgtgtcgagcccttgcaagcacttcaaaattctgggcaagaggtctgtgtgaacatagacaaagaaagggaaaagcgaagagtcgctgagaactggaggcggaagaagcatgaagaaaagaaacgtacacaagagcagaagcgaaaggataagagaaaagctaaagagatggcttgatgacacatgagatagctaggggccttcaaggggtttacggaagctctttaagctcgcgtcaatcctttcagaaaggaaaggaatgcattcatcaatgttttgctgtaatacaatgcgtgcgctaagttagcgcttgcctttaacagattggaggtggtagtttgattttgttttgcggctgaagaaaataaacttagaatgcacgagcactggctctggatgagaaaagaaattaagcagatagctcacgtataacctcattggatctgtaatatgtacgcctatcagatttaaggtacaaattaattttattagggatgggaatcgactgacctggcctatctttggacttggacctggcccattgccttaaggccaattttaggagtgatggagattatgatcttgctggctatcatgggtttggcctagatatttttctgctataatgcatggacatgaatcctatcaatatttctataaagtattgtgataacagattaaaa

SEQ ID NO: 24577 - DNA, 2762 bp, Zea Mays
caaacaggccccctcgattagcgaaaaaaagcccagcgaaaactaaaaccctcgcatctttcctttcctccccaactgcggccgcctccacccgctccaccgccgatggccgagcctgagcctctgccgcaggtgtcgtctgaacctaccactccgccgcaggaaggcagcggaaggactaagacaaagaacaagaagaatcgttccaagaagcaaccgaagcgagccggcgctgacaccgacgggttatcctcaggcgccagcaccatggttgaggaccctttcttcgtcctcgccggcggaaaggaaggagacatgcaagatgacactgagaatatggaacaaaatgaggacgatgagctgattttgggcgaagatgatgtctctgcatggagggagcttaggctgcaccctctgcttctcaaggcgatgcgcagacttggattcaaagagccaacacctatacaaaagtcttgctttcctgctgcagctcatcgaggcaaggatgttatcggtgctgcagagacaggttccggaaagacacttgcttttggcctcccagttttgcaacgtctccttgaagagcgagaaaaggccacaagattgcagcaggaagatgaaaaaatggaggaacgttcttgtggaagccctcttcgtgctcttattctgacacccactagggagctcgccaaacaggtatgcgatcatctaaaagatgtggccaagttcttaggaatccatgttgttccaattgttggtggtctatcaatggaaaaacaagagagacttttgaaaaaaaagcctgaaattgttgttggaactcctggaagattgtgggaacacatgtcgatgaacaatcaacacctagttgaggctgatagaatgatcgaacgaggccatttccgtgaattacaatctatcattgagatgcttccactgaccaatggttctgatgaacaagctgcaagaacaatgccaaactgtgagactgtaccaattttgcaaataaagaagcggcaaacctttgtgttctcagccacacttgcactctcatctaattttcggaagaagttgaagcgtggcctatctacttcgaaggcatcgacgcctgatgatgtcagctctattgaagcattgtcaaaacaagctggaatgaaatctaatgctgaaatagttgatttgacaaaggcttcaatcttgcctgagaagcttgaagaatcttttattgagtgcagtgaagaggataaggatgcctatctgtattatatattgagtgttcatggtcaaggtcgcacaataatattttgtacatcaatcgccgcattacgtcacatttcttccatactgcgcattcttggaattaatgtattgacaaaccatgctcaaatgcaacaaagagctcgcatgaaggctgtggatcgcttccgtgaaagtgaaaattccattttggtcgcaactgatggttttgcaaggggtatggattttgatgatgtgcgaacagttatccattatcagttgccacattcaactgatgtctatatccacagaagtggaaggacagcacgcaagtcattggctggctgcagcattgcgttaatctctcctactgacaagtccaggttttattctctttgcaaatctttgtcaaaggagaatctccagcagtttcctgtagatcatacttacatgtctggagtgatgaacagactctcacttgctcggcagattgacaagattgcccgtaaaacttcacaggaaaatgctaacaaatcctggcttcaaaggaatgctgaatctatgggattgattttggatactagtgacagtgaagaagaccatgtgcagggacacaagaaacgaaaggctacttctgcacatctccaaaagcttcaacaggagttgagtgatctcttgcaatgcccattgcagcctaagactttctctcgccgctatttggctggggctggtgtctcacccttacttcagaagcaactagaagagttggccaagagaaatgcaagcaacaatagcagcaagagtaagaataaaggatctgggtttgttgttattggtcaggatcgtgtcgagcccttgcaagcacttcaaaattctgggcaagaggtctgtgtgaacatagacaaagaaagggaaaagcgaagagtcgctgagaactggaggcggaagaagcatgaagaaaagaaacgtacacaagagcagaagcgaaaggataagagaaaagctaaagagatggcttgatgacacatgagatagctaggggccttcaaggggtttacggaagctctttaagctcgcgtcaatcctttcagaaaggaaaggaatgcattcatcaatgttttgctgtaatacaatgcgtgcgctaagttagcgcttgcctttaacagattggaggtggtagtttgattttgttttgcggctgaagaaaataaacttagaatgcacgagcactggctctggatgagaaaagaaattaagcagatagctcacgtataacctcattggatctgtaatatgtacgcctatcagatttaaggtacaaattaattttattagggatgggaatcgactgacctggcctatctttggacttggacctggcccattgccttaaggccaattttaggagtgatggagattatgatcttgctggctatcatgggtttggcctagatatttttctgctataatgcatggacatgaatcctatcaatatttctataaagtattgtgataacagattaaaa

SEQ ID NO: 24578 - DNA, 2713 bp, Zea Mays
ccaaacaggccccctcgattagcgaaaaaaagcccagcgaaaactaaaaccctcgcatctttcctttcctccccaactgcggccgcctccacccgctccaccgccgatggccgagcctgagcctctgccgcaggtgtcgtctgaacctaccactccgccgcaggaaggcagcggaaggactaagacaaagaacaagaagaatcgttccaagaagcaaccgaagcgagccggcgctgacaccgacgggttatcctcaggcgccagcaccatggttgaggaccctttcttcgtcctcgccggcggaaaggaaggagggtttctggatttggaggagatcgatgaggcagacttcggcatcttcggaggcgtcttggatgacgtaggacagagcgtcgaggaagctgggaaggatcatgggaagaagaagaagaaaacaaagaagcggaagcgtgggggtgatggcgagggcttcagtggcgacgctgcgttggtagttgagaatgaccaggtggatgtcgagaaagtggagaaaaaggtcgaggatggggagaaaggggataagaaggggaagagaaagatgaacatgaagaagaggaaggtgaaggataatgagatgaacagggagagtgatgaggatgttgctagtgacaaagcagaagacatgcaagatgacactgagaatatggaacaaaatgaggacgatgagctgattttgggcgaagatgatgtctctgcatggagggagcttaggctgcaccctctgcttctcaaggcgatgcgcagacttggattcaaagagccaacacctatacaaaagtcttgctttcctgctgcagctcatcgaggcaaggatgttatcggtgctgcagagacaggttccggaaagacacttgcttttggcctcccagttttgcaacgtctccttgaagagcgagaaaaggccacaagattgcagcaggaagatgaaaaaatggaggaacgttcttgtggaagccctcttcgtgctcttattctgacacccactagggagctcgccaaacaggtatgcgatcatctaaaagatgtggccaagttcttaggaatccatgttgttccaattgttggtggtctatcaatggaaaaacaagagagacttttgaaaaaaaagcctgaaattgttgttggaactcctggaagattgtgggaacacatgtcgatgaacaatcaacacctagttgagaatgatcgaacgaggccatttccgtgaattacaatctatcattgagatgcttccactgaccaatggttctgatgaacaagctgcaagaacaatgccaaactgtgagactgtaccaattttgcaaataaagaagcggcaaacctttgtgttctcagccacacttgcactctcatctaattttcggaagaagttgaagcgtggcctatctacttcgaaggcatcgacgcctgatgatgtcagctctattgaagcattgtcaaaacaagctggaatgaaatctaatgctgaaatagttgatttgacaaaggcttcaatcttgcctgagaagcttgaagaatcttttattgagtgcagtgaagaggataaggatgcctatctgtattatatattgagtgttcatggtcaaggtcgcacaataatattttgtacatcaatcgccgcattacgtcacatttcttccatactgcgcattcttggaattaatgtattgacaaaccatgctcaaatgcaacaaagagctcgcatgaaggctgtggatcgcttccgtgaaagtgaaaattccattttggtcgcaactgatggttttgcaaggggtatggattttgatgatgtgcgaacagttatccattatcagttgccacattcaactgatgtctatatccacagaagtggaaggacagcacgcaagtcattggctggtgtctcacccttacttcagaagcaactagaagagttggccaagagaaatgcaagcaacaatagcagcaagagtaagaataaaggatctgggtttgttgttattggtcaggatcgtgtcgagcccttgcaagcacttcaaaattctgggcaagaggtctgtgtgaacatagacaaagaaagggaaaagcgaagagtcgctgagaactggaggcggaagaagcatgaagaaaagaaacgtacacaagagcagaagcgaaaggataagagaaaagctaaagagatggcttgatgacacatgagatagctaggggccttcaaggggtttacggaagctctttaagctcgcgtcaatcctttcagaaaggaaaggaatgcattcatcaatgttttgctgtaatacaatgcgtgcgctaagttagcgcttgcctttaacagattggaggtggtagtttgattttgttttgcggctgaagaaaataaacttagaatgcacgagcactggctctggatgagaaaagaaattaagcagatagctcacgtataacctcattggatctgtaatatgtacgcctatcagatttaaggtacaaattaattttattagggatgggaatcgactgacctggcctatctttggacttggacctggcccattgccttaaggccaattttaggagtgatggagattatgatcttgctggctatcatgggtttggcctagatatttttctgctataatgcatggacatgaatcctatcaatatttctataaagtattgtgataacagattaaaa

SEQ ID NO: 24579 - DNA, 3049 bp, Zea Mays
ctgcaaccaaacaggccccctcgattagcgaaaaaaagcccagcgaaaactaaaaccctcgcatctttcctttcctccccaactgcggccgcctccacccgctccaccgccgatggccgagcctgagcctctgccgcaggtgtcgtctgaacctaccactccgccgcaggaaggcagcggaaggactaagacaaagaacaagaagaatcgttccaagaagcaaccgaagcgagccggcgctgacaccgacgggttatcctcaggcgccagcaccatggttgaggaccctttcttcgtcctcgccggcggaaaggaaggagggtttctggatttggaggagatcgatgaggcagacttcggcatcttcggaggcgtcttggatgacgtaggacagagcgtcgaggaagctgggaaggatcatgggaagaagaagaagaaaacaaagaagcggaagcgtgggggtgatggcgagggcttcagtggcgacgctgcgttggtagttgagaatgaccaggtggatgtcgagaaagtggagaaaaaggtcgaggatggggagaaaggggataagaaggggaagagaaagatgaacatgaagaagaggaaggtgaaggataatgagatgaacagggagagtgatgaggatgttgctagtgacaaagcagaagacatgcaagatgacactgagaatatggaacaaaatgaggacgatgagctgattttgggcgaagatgatgtctctgcatggagggagcttaggctgcaccctctgcttctcaaggcgatgcgcagacttggattcaaagagccaacacctatacaaaagtcttgctttcctgctgcagctcatcgaggcaaggatgttatcggtgctgcagagacaggttccggaaagacacttgcttttggcctcccagttttgcaacgtctccttgaagagcgagaaaaggccacaagattgcagcaggaagatgaaaaaatggaggaacgttcttgtggaagccctcttcgtgctcttattctgacacccactagggagctcgccaaacaggtatgcgatcatctaaaagatgtggccaagttcttaggaatccatgttgttccaattgttggtggtctatcaatggaaaaacaagagagacttttgaaaaaaaagcctgaaattgttgttggaactcctggaagattgtgggaacacatgtcgatgaacaatcaacacctagttgaggctgatagaatgatcgaacgaggccatttccgtgaattacaatctatcattgagatgcttccactgaccaatggttctgatgaacaagctgcaagaacaatgccaaactgtgagactgtaccaattttgcaaataaagaagcggcaaacctttgtgttctcagccacacttgcactctcatctaattttcggaagaagttgaagcgtggcctatctacttcgaaggcatcgacgcctgatgatgtcagctctattgaagcattgtcaaaacaagctggaatgaaatctaatgctgaaatagttgatttgacaaaggcttcaatcttgcctgagaagcttgaagaatcttttattgagtgcagtgaagaggataaggatgcctatctgtattatatattgagtgttcatggtcaaggtcgcacaataatattttgtacatcaatcgccgcattacgtcacatttcttccatactgcgcattcttggaattaatgtattgacaaaccatgctcaaatgcaacaaagagctcgcatgaaggctgtggatcgcttccgtgaaagtgaaaattccattttggtcgcaactgatggttttgcaaggggtatggattttgatgatgtgcgaacagttatccattatcagttgccacattcaactgatgtctatatccacagaagtggaaggacagcacgcaagtcattggctggctgcagcattgcgttaatctctcctactgacaagtccaggttttattctctttgcaaatctttgtcaaaggagaatctccagcagtttcctgtagatcatacttacatgtctggagtgatgaacagactctcacttgctcggcagattgacaagattgcccgtaaaacttcacagtgacagtgaagaagaccatgtgcagggacacaagaaacgaaaggctacttctgcacatctccaaaagcttcaacaggagttgagtgatctcttgcaatgcccattgcagcctaagactttctctcgccgctatttggctggggctggtgtctcacccttacttcagaagcaactagaagagttggccaagagaaatgcaagcaacaatagcagcaagagtaagaataaaggatctgggtttgttgttattggtcaggatcgtgtcgagcccttgcaagcacttcaaaattctgggcaagaggtctgtgtgaacatagacaaagaaagggaaaagcgaagagtcgctgagaactggaggcggaagaagcatgaagaaaagaaacgtacacaagagcagaagcgaaaggataagagaaaagctaaagagatggcttgatgacacatgagatagctaggggccttcaaggggtttacggaagctctttaagctcgcgtcaatcctttcagaaaggaaaggaatgcattcatcaatgttttgctgtaatacaatgcgtgcgctaagttagcgcttgcctttaacagattggaggtggtagtttgattttgttttgcggctgaagaaaataaacttagaatgcacgagcactggctctggatgagaaaagaaattaagcagatagctcacgtataacctcattggatctgtaatatgtacgcctatcagatttaaggtacaaattaattttattagggatgggaatcgactgacctggcctatctttggacttggacctggcccattgccttaaggccaattttaggagtgatggagattatgatcttgctggctatcatgggtttggcctagatatttttctgctataatgcatggacatgaatcctatcaatatttctataaagtattgtgataacagattaaaa

SEQ ID NO: 24580 - DNA, 3146 bp, Zea Mays
aaagcctgcaaccaaacaggccccctcgattagcgaaaaaaagcccagcgaaaactaaaaccctcgcatctttcctttcctccccaactgcggccgcctccacccgctccaccgccgatggccgagcctgagcctctgccgcaggtgtcgtctgaacctaccactccgccgcaggaaggcagcggaaggactaagacaaagaacaagaagaatcgttccaagaagcaaccgaagcgagccggcgctgacaccgacgggttatcctcaggcgccagcaccatggttgaggaccctttcttcgtcctcgccggcggaaaggaaggagggtttctggatttggaggagatcgatgaggcagacttcggcatcttcggaggcgtcttggatgacgtaggacagagcgtcgaggaagctgggaaggatcatgggaagaagaagaagaaaacaaagaagcggaagcgtgggggtgatggcgagggcttcagtggcgacgctgcgttggtagttgagaatgaccaggtggatgtcgagaaagtggagaaaaaggtcgaggatggggagaaaggggataagaaggggaagagaaagatgaacatgaagaagaggaaggtgaaggataatgagatgaacagggagagtgatgaggatgttgctagtgacaaagcagaagacatgcaagatgacactgagaatatggaacaaaatgaggacgatgagctgattttgggcgaagatgatgtctctgcatggagggagcttaggctgcaccctctgcttctcaaggcgatgcgcagacttggattcaaagagccaacacctatacaaaagtcttgctttcctgctgcagctcatcgaggcaaggatgttatcggtgctgcagagacaggttccggaaagacacttgcttttggcctcccagttttgcaacgtctccttgaagagcgagaaaaggccacaagattgcagcaggaagatgaaaaaatggaggaacgttcttgtggaagccctcttcgtgctcttattctgacacccactagggagctcgccaaacaggtatgcgatcatctaaaagatgtggccaagttcttaggaatccatgttgttccaattgttggtggtctatcaatggaaaaacaagagagacttttgaaaaaaaagcctgaaattgttgttggaactcctggaagattgtgggaacacatgtcgatgaacaatcaacacctagttgagctgcactcattgtcattcttcatcttggatgaggctgatagaatgatcgaacgaggccatttccgtgaattacaatctatcattgagatgcttccactgaccaatggttctgatgaacaagctgcaagaacaatgccaaactgtgagactgtaccaattttgcaaataaagaagcggcaaacctttgtgttctcagccacacttgcactctcatctaattttcggaagaagttgaagcgtggcctatctacttcgaaggcatcgacgcctgatgatgtcagctctattgaagcattgtcaaaacaagctggaatgaaatctaatgctgaaatagttgatttgacaaaggcttcaatcttgcctgagaagcttgaagaatcttttattgatgaagaggataaggatgcctatctgtattatatattgagtgttcatggtcaaggtcgcacaataatattttgtacatcaatcgccgcattacgtcacatttcttccatactgcgcattcttggaattaatgtattgacaaaccatgctcaaatgcaacaaagagctcgcatgaaggctgtggatcgcttccgtgaaagtgaaaattccattttggtcgcaactgatggttttgcaaggggtatggattttgatgatgtgcgaacagttatccattatcagttgccacattcaactgatgtctatatccacagaagtggaaggacagcacgcaagtcattggctggctgcagcattgcgttaatctctcctactgacaagtccaggttttattctctttgcaaatctttgtcaaaggagaatctccagcagtttcctgtagatcatacttacatgtctggagtgatgaacagactctcacttgctcggcagattgacaagattgcccgtaaaacttcacaggaaaatgctaacaaatcctggcttcaaaggaatgctgaatctatgggattgattttggatactagtgacagtgaagaagaccatgtgcagggacacaagaaacgaaaggctacttctgcacatctccaaaagcttcaacaggagttgagtgatctcttgcaatgcccattgcagcctaagactttctctcgccgctatttggctggggctggtgtctcacccttacttcagaagcaactagaagagttggccaagagaaatgcaagcaacaatagcagcaagagtaagaataaaggatctgggtttgttgttattggtcaggatcgtgtcgagcccttgcaagcacttcaaaattctgggcaagaggtctgtgtgaacatagacaaagaaagggaaaagcgaagagtcgctgagaactggaggcggaagaagcatgaagaaaagaaacgtacacaagagcagaagcgaaaggataagagaaaagctaaagagatggcttgatgacacatgagatagctaggggccttcaaggggtttacggaagctctttaagctcgcgtcaatcctttcagaaaggaaaggaatgcattcatcaatgttttgctgtaatacaatgcgtgcgctaagttagcgcttgcctttaacagattggaggtggtagtttgattttgttttgcggctgaagaaaataaacttagaatgcacgagcactggctctggatgagaaaagaaattaagcagatagctcacgtataacctcattggatctgtaatatgtacgcctatcagatttaaggtacaaattaattttattagggatgggaatcgactgacctggcctatctttggacttggacctggcccattgccttaaggccaattttaggagtgatggagattatgatcttgctggctatcatgggtttggcctagatatttttctgctataatgcatggacatgaatcctatcaatatttctataaagtattgtgataacagattaaaa

SEQ ID NO: 24581 - DNA, 3159 bp, Zea Mays
ctgaaagcctgcaaccaaacaggccccctcgattagcgaaaaaaagcccagcgaaaactaaaaccctcgcatctttcctttcctccccaactgcggccgcctccacccgctccaccgccgatggccgagcctgagcctctgccgcaggtgtcgtctgaacctaccactccgccgcaggaaggcagcggaaggactaagacaaagaacaagaagaatcgttccaagaagcaaccgaagcgagccggcgctgacaccgacgggttatcctcaggcgccagcaccatggttgaggaccctttcttcgtcctcgccggcggaaaggaaggagggtttctggatttggaggagatcgatgaggcagacttcggcatcttcggaggcgtcttggatgacgtaggacagagcgtcgaggaagctgggaaggatcatgggaagaagaagaagaaaacaaagaagcggaagcgtgggggtgatggcgagggcttcagtggcgacgctgcgttggtagttgagaatgaccaggtggatgtcgagaaagtggagaaaaaggtcgaggatggggagaaaggggataagaaggggaagagaaagatgaacatgaagaagaggaaggtgaaggataatgagatgaacagggagagtgatgaggatgttgctagtgacaaagcagaagacatgcaagatgacactgagaatatggaacaaaatgaggacgatgagctgattttgggcgaagatgatgtctctgcatggagggagcttaggctgcaccctctgcttctcaaggcgatgcgcagacttggattcaaagagccaacacctatacaaaagtcttgctttcctgctgcagctcatcgaggcaaggatgttatcggtgctgcagagacaggttccggaaagacacttgcttttggcctcccagttttgcaacgtctccttgaagagcgagaaaaggccacaagattgcagcaggaagatgaaaaaatggaggaacgttcttgtggaagccctcttcgtgctcttattctgacacccactagggagctcgccaaacaggtatgcgatcatctaaaagatgtggccaagttcttaggaatccatgttgttccaattgttggtggtctatcaatggaaaaacaagagagacttttgaaaaaaaagcctgaaattgttgttggaactcctggaagattgtgggaacacatgtcgatgaacaatcaacacctagttgagctgcactcattgtcattcttcatcttggatgaggctgatagaatgatcgaacgaggccatttccgtgaattacaatctatcattgagatgcttccactgaccaatggttctgatgaacaagctgcaagaacaatgccaaactgtgagactgtaccaattttgcaaataaagaagcggcaaacctttgtgttctcagccacacttgcactctcatctaattttcggaagaagttgaagcgtggcctatctacttcgaaggcatcgacgcctgatgatgtcagctctattgaagcattgtcaaaacaagctggaatgaaatctaatgctgaaatagttgatttgacaaaggcttcaatcttgcctgagaagcttgaagaatcttttattgagtgcagtgaagaggataaggatgcctatctgtattatatattgagtgttcatggtcaaggtcgcacaataatattttgtacatcaatcgccgcattacgtcacatttcttccatactgcgcattcttggaattaatgtattgacaaaccatgctcaaatgcaacaaagagctcgcatgaaggctgtggatcgcttccgtgaaagtgaaaattccattttggtcgcaactgatggttttgcaaggggtatggattttgatgatgtgcgaacagttatccattatcagttgccacattcaactgatgtaggtctatatccacagaagtggaaggacagcacgcaagtcattggctggctgcagcattgcgttaatctctcctactgacaagtccaggttttattctctttgcaaatctttgtcaaaggagaatctccagcagtttcctgtagatcatacttacatgtctggagtgatgaacagactctcacttgctcggcagattgacaagattgcccgtaaaacttcacaggaaaatgctaacaaatcctggcttcaaaggaatgctgaatctatgggattgattttggatactagtgacagtgaagaagaccatgtgcagggacacaagaaacgaaaggctacttctgcacatctccaaaagcttcaacaggagttgagtgatctcttgcaatgcccattgcagcctaagactttctctcgccgctatttggctggggctggtgtctcacccttacttcagaagcaactagaagagttggccaagagaaatgcaagcaacaatagcagcaagagtaagaataaaggatctgggtttgttgttattggtcaggatcgtgtcgagcccttgcaagcacttcaaaattctgggcaagaggtctgtgtgaacatagacaaagaaagggaaaagcgaagagtcgctgagaactggaggcggaagaagcatgaagaaaagaaacgtacacaagagcagaagcgaaaggataagagaaaagctaaagagatggcttgatgacacatgagatagctaggggccttcaaggggtttacggaagctctttaagctcgcgtcaatcctttcagaaaggaaaggaatgcattcatcaatgttttgctgtaatacaatgcgtgcgctaagttagcgcttgcctttaacagattggaggtggtagtttgattttgttttgcggctgaagaaaataaacttagaatgcacgagcactggctctggatgagaaaagaaattaagcagatagctcacgtataacctcattggatctgtaatatgtacgcctatcagatttaaggtacaaattaattttattagggatgggaatcgactgacctggcctatctttggacttggacctggcccattgccttaaggccaattttaggagtgatggagattatgatcttgctggctatcatgggtttggcctagatatttttctgctataatgcatggacatgaatcctatcaatatttctataaagtattgtgataacagattaaaa

SEQ ID NO: 24582 - DNA, 3145 bp, Zea Mays
ctgaaagcctgcaaccaaacaggccccctcgattagcgaaaaaaagcccagcgaaaactaaaaccctcgcatctttcctttcctccccaactgcggccgcctccacccgctccaccgccgatggccgagcctgagcctctgccgcaggtgtcgtctgaacctaccactccgccgcaggaaggcagcggaaggactaagacaaagaacaagaagaatcgttccaagaagcaaccgaagcgagccggcgctgacaccgacgggttatcctcaggcgccagcaccatggttgaggaccctttcttcgtcctcgccggcggaaaggaaggagggtttctggatttggaggagatcgatgaggcagacttcggcatcttcggaggcgtcttggatgacgtaggacagagcgtcgaggaagctgggaaggatcatgggaagaagaagaagaaaacaaagaagcggaagcgtgggggtgatggcgagggcttcagtggcgacgctgcgttggtagttgagaatgaccaggtggatgtcgagaaagtggagaaaaaggtcgaggatggggagaaaggggataagaaggggaagagaaagatgaacatgaagaagaggaaggtgaaggataatgagatgaacagggagagtgatgaggatgttgctagtgacaaagcagaagacatgcaagatgacactgagaatatggaacaaaatgaggacgatgagctgattttgggcgaagatgatgtctctgcatggagggagcttaggctgcaccctctgcttctcaaggcgatgcgcagacttggattcaaagagccaacacctatacaaaagtcttgctttcctgctgcagctcatcgaggcaaggatgttatcggtgctgcagagacaggttccggaaagacacttgcttttggcctcccagttttgcaacgtctccttgaagagcgagaaaaggccacaagattgcagcaggaagatgaaaaaatggaggaacgttcttgtggaagccctcttcgtgctcttattctgacacccactagggagctcgccaaacaggtatgcgatcatctaaaagatgtggccaagttcttaggaatccatgttgttccaattgttggtggtctatcaatggaaaaacaagagagacttttgaaaaaaaagcctgaaattgttgttggaactcctggaagattgtgggaacacatgtcgatgaacaatcaacacctagttgagctgcactcattgtcattcttcatcttggatgaggctgatagaatgatcgaacgaggccatttccgtgaattacaatctatcattgagatgcttccactgaccaatggttctgatgaacaagctgcaagaacaatgccaaactgtgagactgtaccaattttgcaaataaagaagcggcaaacctttgtgttctcagccacacttgcactctcatctaattttcggaagaagttgaagcgtggcctatctacttcgaaggcatcgacgcctgatgatgtcagctctattgaagcattgtcaaaacaagctggaatgaaatctaatgctgaaatagttgatttgacaaaggcttcaatcttgcctgagaagcttgaagaatcttttattgagtgcagtgaagaggataaggatgcctatctgtattatatattgagtgttcatggtcaaggtcgcacaataatattttgtacatcaatcgccgcattacgtcacatttcttccatactgcgcattcttggaattaatgtattgacaaaccatgctcaaatgcaacaaagagctcgcatgaaggctgtggatcgcttccgtgaaagtgaaaattccattttggtcgcaactgatggttttgcaaggggtatggattttgatgatgtgcgaacagttatccattatcagttgccacattcaactgatgtagaagtggaaggacagcacgcaagtcattggctggctgcagcattgcgttaatctctcctactgacaagtccaggttttattctctttgcaaatctttgtcaaaggagaatctccagcagtttcctgtagatcatacttacatgtctggagtgatgaacagactctcacttgctcggcagattgacaagattgcccgtaaaacttcacaggaaaatgctaacaaatcctggcttcaaaggaatgctgaatctatgggattgattttggatactagtgacagtgaagaagaccatgtgcagggacacaagaaacgaaaggctacttctgcacatctccaaaagcttcaacaggagttgagtgatctcttgcaatgcccattgcagcctaagactttctctcgccgctatttggctggggctggtgtctcacccttacttcagaagcaactagaagagttggccaagagaaatgcaagcaacaatagcagcaagagtaagaataaaggatctgggtttgttgttattggtcaggatcgtgtcgagcccttgcaagcacttcaaaattctgggcaagaggtctgtgtgaacatagacaaagaaagggaaaagcgaagagtcgctgagaactggaggcggaagaagcatgaagaaaagaaacgtacacaagagcagaagcgaaaggataagagaaaagctaaagagatggcttgatgacacatgagatagctaggggccttcaaggggtttacggaagctctttaagctcgcgtcaatcctttcagaaaggaaaggaatgcattcatcaatgttttgctgtaatacaatgcgtgcgctaagttagcgcttgcctttaacagattggaggtggtagtttgattttgttttgcggctgaagaaaataaacttagaatgcacgagcactggctctggatgagaaaagaaattaagcagatagctcacgtataacctcattggatctgtaatatgtacgcctatcagatttaaggtacaaattaattttattagggatgggaatcgactgacctggcctatctttggacttggacctggcccattgccttaaggccaattttaggagtgatggagattatgatcttgctggctatcatgggtttggcctagatatttttctgctataatgcatggacatgaatcctatcaatatttctataaagtattgtgataacagattaaaa

SEQ ID NO: 24583 - DNA, 3141 bp, Zea Mays
ctgaaagcctgcaaccaaacaggccccctcgattagcgaaaaaaagcccagcgaaaactaaaaccctcgcatctttcctttcctccccaactgcggccgcctccacccgctccaccgccgatggccgagcctgagcctctgccgcaggtgtcgtctgaacctaccactccgccgcaggaaggcagcggaaggactaagacaaagaacaagaagaatcgttccaagaagcaaccgaagcgagccggcgctgacaccgacgggttatcctcaggcgccagcaccatggttgaggaccctttcttcgtcctcgccggcggaaaggaaggagggtttctggatttggaggagatcgatgaggcagacttcggcatcttcggaggcgtcttggatgacgtaggacagagcgtcgaggaagctgggaaggatcatgggaagaagaagaagaaaacaaagaagcggaagcgtgggggtgatggcgagggcttcagtggcgacgctgcgttggtagttgagaatgaccaggtggatgtcgagaaagtggagaaaaaggtcgaggatggggagaaaggggataagaaggggaagagaaagatgaacatgaagaagaggaaggtgaaggataatgagatgaacagggagagtgatgaggatgttgctagtgacaaagcagaagttcatattttaccttgcagacatgcaagatgacactgagaatatggaacaaaatgaggacgatgagctgattttgggcgaagatgatgtctctgcatggagggagcttaggctgcaccctctgcttctcaaggcgatgcgcagacttggattcaaagagccaacacctatacaaaagtcttgctttcctgctgcagctcatcgaggcaaggatgttatcggtgctgcagagacaggttccggaaagacacttgcttttggcctcccagttttgcaacgtctccttgaagagcgagaaaaggccacaagattgcagcaggaagatgaaaaaatggaggaacgttcttgtggaagccctcttcgtgctcttattctgacacccactagggagctcgccaaacaggtatgcgatcatctaaaagatgtggccaagttcttaggaatccatgttgttccaattgttggtggtctatcaatggaaaaacaagagagacttttgaaaaaaaagcctgaaattgttgttggaactcctggaagattgtgggaacacatgtcgatgaacaatcaacacctagttgaggctgatagaatgatcgaacgaggccatttccgtgaattacaatctatcattgagatgcttccactgaccaatggttctgatgaacaagctgcaagaacaatgccaaactgtgagactgtaccaattttgcaaataaagaagcggcaaacctttgtgttctcagccacacttgcactctcatctaattttcggaagaagttgaagcgtggcctatctacttcgaaggcatcgacgcctgatgatgtcagctctattgaagcattgtcaaaacaagctggaatgaaatctaatgctgaaatagttgatttgacaaaggcttcaatcttgcctgagaagcttgaagaatcttttattgagtgcagtgaagaggataaggatgcctatctgtattatatattgagtgttcatggtcaaggtcgcacaataatattttgtacatcaatcgccgcattacgtcacatttcttccatactgcgcattcttggaattaatgtattgacaaaccatgctcaaatgcaacaaagagctcgcatgaaggctgtggatcgcttccgtgaaagtgaaaattccattttggtcgcaactgatggttttgcaaggggtatggattttgatgatgtgcgaacagttatccattatcagttgccacattcaactgatgtctatatccacagaagtggaaggacagcacgcaagtcattggctggctgcagcattgcgttaatctctcctactgacaagtccaggttttattctctttgcaaatctttgtcaaaggagaatctccagcagtttcctgtagatcatacttacatgtctggagtgatgaacagactctcacttgctcggcagattgacaagattgcccgtaaaacttcacaggaaaatgctaacaaatcctggcttcaaaggaatgctgaatctatgggattgattttggatactagtgacagtgaagaagaccatgtgcagggacacaagaaacgaaaggctacttctgcacatctccaaaagcttcaacaggagttgagtgatctcttgcaatgcccattgcagcctaagactttctctcgccgctatttggctggggctggtgtctcacccttacttcagaagcaactagaagagttggccaagagaaatgcaagcaacaatagcagcaagagtaagaataaaggatctgggtttgttgttattggtcaggatcgtgtcgagcccttgcaagcacttcaaaattctgggcaagaggtctgtgtgaacatagacaaagaaagggaaaagcgaagagtcgctgagaactggaggcggaagaagcatgaagaaaagaaacgtacacaagagcagaagcgaaaggataagagaaaagctaaagagatggcttgatgacacatgagatagctaggggccttcaaggggtttacggaagctctttaagctcgcgtcaatcctttcagaaaggaaaggaatgcattcatcaatgttttgctgtaatacaatgcgtgcgctaagttagcgcttgcctttaacagattggaggtggtagtttgattttgttttgcggctgaagaaaataaacttagaatgcacgagcactggctctggatgagaaaagaaattaagcagatagctcacgtataacctcattggatctgtaatatgtacgcctatcagatttaaggtacaaattaattttattagggatgggaatcgactgacctggcctatctttggacttggacctggcccattgccttaaggccaattttaggagtgatggagattatgatcttgctggctatcatgggtttggcctagatatttttctgctataatgcatggacatgaatcctatcaatatttctataaagtattgtgataacagattaaaa

SEQ ID NO: 24584 - DNA, 3147 bp, Zea Mays
ggcggtggcggctgaaagcctgcaaccaaacaggccccctcgattagcgaaaaaaagcccagcgaaaactaaaaccctcgcatctttcctttcctccccaactgcggccgcctccacccgctccaccgccgatggccgagcctgagcctctgccgcaggtgtcgtctgaacctaccactccgccgcaggaaggcagcggaaggactaagacaaagaacaagaagaatcgttccaagaagcaaccgaagcgagccggcgctgacaccgacgggttatcctcaggcgccagcaccatggttgaggaccctttcttcgtcctcgccggcggaaaggaaggagggtttctggatttggaggagatcgatgaggcagacttcggcatcttcggaggcgtcttggatgacgtaggacagagcgtcgaggaagctgggaaggatcatgggaagaagaagaagaaaacaaagaagcggaagcgtgggggtgatggcgagggcttcagtggcgacgctgcgttggtagttgagaatgaccaggtggatgtcgagaaagtggagaaaaaggtcgaggatggggagaaaggggataagaaggggaagagaaagatgaacatgaagaagaggaaggtgaaggataatgagatgaacagggagagtgatgaggatgttgctagtgacaaagcagaagacatgcaagatgacactgagaatatggaacaaaatgaggacgatgagctgattttgggcgaagatgatgtctctgcatggagggagcttaggctgcaccctctgcttctcaaggcgatgcgcagacttggattcaaagagccaacacctatacaaaagtcttgctttcctgctgcagctcatcgaggcaagagacaggttccggaaagacacttgcttttggcctcccagttttgcaacgtctccttgaagagcgagaaaaggccacaagattgcagcaggaagatgaaaaaatggaggaacgttcttgtggaagccctcttcgtgctcttattctgacacccactagggagctcgccaaacaggtatgcgatcatctaaaagatgtggccaagttcttaggaatccatgttgttccaattgttggtggtctatcaatggaaaaacaagagagacttttgaaaaaaaagcctgaaattgttgttggaactcctggaagattgtgggaacacatgtcgatgaacaatcaacacctagttgagctgcactcattgtcattcttcatcttggatgaggctgatagaatgatcgaacgaggccatttccgtgaattacaatctatcattgagatgcttccactgaccaatggttctgatgaacaagctgcaagaacaatgccaaactgtgagactgtaccaattttgcaaataaagaagcggcaaacctttgtgttctcagccacacttgcactctcatctaattttcggaagaagttgaagcgtggcctatctacttcgaaggcatcgacgcctgatgatgtcagctctattgaagcattgtcaaaacaagctggaatgaaatctaatgctgaaatagttgatttgacaaaggcttcaatcttgcctgagaagcttgaagaatcttttattgagtgcagtgaagaggataaggatgcctatctgtattatatattgagtgttcatggtcaaggtcgcacaataatattttgtacatcaatcgccgcattacgtcacatttcttccatactgcgcattcttggaattaatgtattgacaaaccatgctcaaatgcaacaaagagctcgcatgaaggctgtggatcgcttccgtgaaagtgaaaattccattttggtcgcaactgatggttttgcaaggggtatggattttgatgatgtgcgaacagttatccattatcagttgccacattcaactgatgtctatatccacagaagtggaaggacagcacgcaagtcattggctggctgcagcattgcgttaatctctcctactgacaagtccaggttttattctctttgcaaatctttgtcaaaggagaatctccagcagtttcctgtagatcatacttacatgtctggagtgatgaacagactctcacttgctcggcagattgacaagattgcccgtaaaacttcacaggaaaatgctaacaaatcctggcttcaaaggaatgctgaatctatgggattgattttggatactagtgacagtgaagaagaccatgtgcagggacacaagaaacgaaaggctacttctgcacatctccaaaagcttcaacaggagttgagtgatctcttgcaatgcccattgcagcctaagactttctctcgccgctatttggctggggctggtgtctcacccttacttcagaagcaactagaagagttggccaagagaaatgcaagcaacaatagcagcaagagtaagaataaaggatctgggtttgttgttattggtcaggatcgtgtcgagcccttgcaagcacttcaaaattctgggcaagaggtctgtgtgaacatagacaaagaaagggaaaagcgaagagtcgctgagaactggaggcggaagaagcatgaagaaaagaaacgtacacaagagcagaagcgaaaggataagagaaaagctaaagagatggcttgatgacacatgagatagctaggggccttcaaggggtttacggaagctctttaagctcgcgtcaatcctttcagaaaggaaaggaatgcattcatcaatgttttgctgtaatacaatgcgtgcgctaagttagcgcttgcctttaacagattggaggtggtagtttgattttgttttgcggctgaagaaaataaacttagaatgcacgagcactggctctggatgagaaaagaaattaagcagatagctcacgtataacctcattggatctgtaatatgtacgcctatcagatttaaggtacaaattaattttattagggatgggaatcgactgacctggcctatctttggacttggacctggcccattgccttaaggccaattttaggagtgatggagattatgatcttgctggctatcatgggtttggcctagatatttttctgctataatgcatggacatgaatcctatcaatatttctataaagtattgtgataacagattaaaa

SEQ ID NO: 24585 - DNA, 3094 bp, Zea Mays
caggcttgcccgggtggcggtggcggctgaaagcctgcaaccaaacaggccccctcgattagcgaaaaaaagcccagcgaaaactaaaaccctcgcatctttcctttcctccccaactgcggccgcctccacccgctccaccgccgatggccgagcctgagcctctgccgcaggtgtcgtctgaacctaccactccgccgcaggaaggcagcggaaggactaagacaaagaacaagaagaatcgttccaagaagcaaccgaagcgagccggcgctgacaccgacgggttatcctcaggcgccagcaccatggttgaggaccctttcttcgtcctcgccggcggaaaggaaggagggtttctggatttggaggagatcgatgaggcagacttcggcatcttcggaggcgtcttggatgacgtaggacagagcgtcgaggaagctgggaaggatcatgggaagaagaagaagaaaacaaagaagcggaagcgtgggggtgatggcgagggcttcagtggcgacgctgcgttggtagttgagaatgaccaggtggatgtcgagaaagtggagaaaaaggtcgaggatggggagaaaggggataagaaggggaagagaaagatgaacatgaagaagaggaaggtgaaggataatgagatgaacagggagagtgatgaggatgttgctagtgacaaagcagaagacatgcaagatgacactgagaatatggaacaaaatgaggacgatgagctgattttgggcgaagatgatgtctctgcatggagggagcttaggctgcaccctctgcttctcaaggcgatgcgcagacttggattcaaagagccaacacctatacaaaagtcttgctttcctgctgcagctcatcgaggcaaggatgttatcggtgctgcagagacaggttccggaaagacacttgcttttggcctcccagttttgcaacgtctccttgaagagcgagaaaaggccacaagattgcagcaggaagatgaaaaaatggaggaacgttcttgtggaagccctcttcgtgctcttattctgacacccactagggagctcgccaaacaggtatgcgatcatctaaaagatgtggccaagttcttaggaatccatgttgttccaattgttggtggtctatcaatggaaaaacaagagagacttttgaaaaaaaagcctgaaattgttgttggaactcctggaagattgtgggaacacatgtcgatgaacaatcaacacctagttgagctgcactcattgtcattcttcatcttggatgaggctgatagaatgatcgaacgaggccatttccgtgaattacaatctatcattgagatgcttccactgaccaatggttctgatgaacaagctgcaagaacaatgccaaactgtgagactgtaccaattttgcaaataaagaagcggcaaacctttgtgttctcagccacacttgcactctcatctaattttcggaagaagttgaagcgtggcctatctacttcgaaggcatcgacgcctgatgatgtcagctctattgaagcattgtcaaaacaagctggaatgaaatctaatgctgaaatagttgatttgacaaaggcttcaatcttgcctgagaagcttgaagaatcttttattgagtgcagtgaagaggataaggatgcctatctgtattatatattgagtgttcatggtcaaggtcgcacaataatattttgtacatcaatcgccgcattacgtcacatttcttccatactgcgcattcttggaattaatgtattgacaaaccatgctcaaatgcaacaaagagctcgcatgaaggctgtggatcgcttccgtgaaagtgaaaattccattttggtcgcaactgatggttttgcaaggggtatggattttgatgatgtgcgaacagttatccattatcagttgccacattcaactgatgtctatatccacagaagtggaaggacagcacgcaagtcattggctggctgcagcattgcgttaatctctcctactgacaagtccagactctcacttgctcggcagattgacaagattgcccgtaaaacttcacaggaaaatgctaacaaatcctggcttcaaaggaatgctgaatctatgggattgattttggatactagtgacagtgaagaagaccatgtgcagggacacaagaaacgaaaggctacttctgcacatctccaaaagcttcaacaggagttgagtgatctcttgcaatgcccattgcagcctaagactttctctcgccgctatttggctggggctggtgtctcacccttacttcagaagcaactagaagagttggccaagagaaatgcaagcaacaatagcagcaagagtaagaataaaggatctgggtttgttgttattggtcaggatcgtgtcgagcccttgcaagcacttcaaaattctgggcaagaggtctgtgtgaacatagacaaagaaagggaaaagcgaagagtcgctgagaactggaggcggaagaagcatgaagaaaagaaacgtacacaagagcagaagcgaaaggataagagaaaagctaaagagatggcttgatgacacatgagatagctaggggccttcaaggggtttacggaagctctttaagctcgcgtcaatcctttcagaaaggaaaggaatgcattcatcaatgttttgctgtaatacaatgcgtgcgctaagttagcgcttgcctttaacagattggaggtggtagtttgattttgttttgcggctgaagaaaataaacttagaatgcacgagcactggctctggatgagaaaagaaattaagcagatagctcacgtataacctcattggatctgtaatatgtacgcctatcagatttaaggtacaaattaattttattagggatgggaatcgactgacctggcctatctttggacttggacctggcccattgccttaaggccaattttaggagtgatggagattatgatcttgctggctatcatgggtttggcctagatatttttctgctataatgcatggacatgaatcctatcaatatttctataaagtattgtgataacagattaaaa

SEQ ID NO: 24586 - DNA, 3172 bp, Zea Mays
caaacacctaacaaaaggcagaggcaggcttgcccgggtggcggtggcggctgaaagcctgcaaccaaacaggccccctcgattagcgaaaaaaagcccagcgaaaactaaaaccctcgcatctttcctttcctccccaactgcggccgcctccacccgctccaccgccgatggccgagcctgagcctctgccgcaggtgtcgtctgaacctaccactccgccgcaggaaggcagcggaaggactaagacaaagaacaagaagaatcgttccaagaagcaaccgaagcgagccggcgctgacaccgacgggttatcctcaggcgccagcaccatggttgaggaccctttcttcgtcctcgccggcggaaaggaaggagggtttctggatttggaggagatcgatgaggcagacttcggcatcttcggaggcgtcttggatgacgtaggacagagcgtcgaggaagctgggaaggatcatgggaagaagaagaagaaaacaaagaagcggaagcgtgggggtgatggcgagggcttcagtggcgacgctgcgttggtagttgagaatgaccaggtggatgtcgagaaagtggagaaaaaggtcgaggatggggagaaaggggataagaaggggaagagaaagatgaacatgaagaagaggaaggtgaaggataatgagatgaacagggagagtgatgaggatgttgctagtgacaaagcagaagacatgcaagatgacactgagaatatggaacaaaatgaggacgatgagctgattttgggcgaagatgatgtctctgcatggagggagcttaggctgcaccctctgcttctcaaggcgatgcgcagacttggattcaaagagccaacacctatacaaaagtcttgctttcctgctgcagctcatcgaggcaaggatgttatcggtgctgcagagacaggttccggaaagacacttgcttttggcctcccagttttgcaacgtctccttgaagagcgagaaaaggccacaagattgcagcaggaagatgaaaaaatggaggaacgttcttgtggaagccctcttcgtgctcttattctgacacccactagggagctcgccaaacaggtatgcgatcatctaaaagatgtggccaagttcttaggaatccatgttgttccaattgttggtggtctatcaatggaaaaacaagagagacttttgaaaaaaaagcctgaaattgttgttggaactcctggaagattgtgggaacacatgtcgatgaacaatcaacacctagttgaggctgatagaatgatcgaacgaggccatttccgtgaattacaatctatcattgagatgcttccactgaccaatggttctgatgaacaagctgcaagaacaatgccaaactgtgagactgtaccaattttgcaaataaagaagcggcaaacctttgtgttctcagccacacttgcactctcatctaattttcggaagaagttgaagcgtggcctatctacttcgaaggcatcgacgcctgatgatgtcagctctattgaagcattgtcaaaacaagctggaatgaaatctaatgctgaaatagttgatttgacaaaggcttcaatcttgcctgagaagcttgaagaatcttttattgagtgcagtgaagaggataaggatgcctatctgtattatatattgagtgttcatggtcaaggtcgcacaataatattttgtacatcaatcgccgcattacgtcacatttcttccatactgcgcattcttggaattaatgtattgacaaaccatgctcaaatgcaacaaagagctcgcatgaaggctgtggatcgcttccgtgaaagtgaaaattccattttggtcgcaactgatggttttgcaaggggtatggattttgatgatgtgcgaacagttatccattatcagttgccacattcaactgatgtctatatccacagaagtggaaggacagcacgcaagtcattggctggctgcagcattgcgttaatctctcctactgacaagtccaggttttattctctttgcaaatctttgtcaaaggagaatctccagcagtttcctgtagatcatacttacatgtctggagtgatgaacagactctcacttgctcggcagattgacaagattgcccgtaaaacttcacaggaaaatgctaacaaatcctggcttcaaaggaatgctgaatctatgggattgattttggatactagtgacagtgaagaagaccatgtgcagggacacaagaaacgaaaggctacttctgcacatctccaaaagcttcaacaggagttgagtgatctcttgcaatgcccattgcagcctaagactttctctcgccgctatttggctggggctggtgtctcacccttacttcagaagcaactagaagagttggccaagagaaatgcaagcaacaatagcagcaagagtaagaataaaggatctgggtttgttgttattggtcaggatcgtgtcgagcccttgcaagcacttcaaaattctgggcaagaggtctgtgtgaacatagacaaagaaagggaaaagcgaagagtcgctgagaactggaggcggaagaagcatgaagaaaagaaacgtacacaagagcagaagcgaaaggataagagaaaagctaaagagatggcttgatgacacatgagatagctaggggccttcaaggggtttacggaagctctttaagctcgcgtcaatcctttcagaaaggaaaggaatgcattcatcaatgttttgctgtaatacaatgcgtgcgctaagttagcgcttgcctttaacagattggaggtggtagtttgattttgttttgcggctgaagaaaataaacttagaatgcacgagcactggctctggatgagaaaagaaattaagcagatagctcacgtataacctcattggatctgtaatatgtacgcctatcagatttaaggtacaaattaattttattagggatgggaatcgactgacctggcctatctttggacttggacctggcccattgccttaaggccaattttaggagtgatggagattatgatcttgctggctatcatgggtttggcctagatatttttctgctataatgcatggacatgaatcctatcaatatttctataaagtattgtgataacagattaaaa

SEQ ID NO: 24587 - DNA, 3223 bp, Zea Mays
gttttgggtctcaatattttaggtctattgttggactcagtcttagggtttctcaacatcaaacacctaacaaaaggcagaggcaggcttgcccgggtggcggtggcggctgaaagcctgcaaccaaacaggccccctcgattagcgaaaaaaagcccagcgaaaactaaaaccctcgcatctttcctttcctccccaactgcggccgcctccacccgctccaccgccgatggccgagcctgagcctctgccgcaggtgtcgtctgaacctaccactccgccgcaggaaggcagcggaaggactaagacaaagaacaagaagaatcgttccaagaagcaaccgaagcgagccggcgctgacaccgacgggttatcctcaggcgccagcaccatggttgaggaccctttcttcgtcctcgccggcggaaaggaaggagggtttctggatttggaggagatcgatgaggcagacttcggcatcttcggaggcgtcttggatgacgtaggacagagcgtcgaggaagctgggaaggatcatgggaagaagaagaagaaaacaaagaagcggaagcgtgggggtgatggcgagggcttcagtggcgacgctgcgttggtagttgagaatgaccaggtggatgtcgagaaagtggagaaaaaggtcgaggatggggagaaaggggataagaaggggaagagaaagatgaacatgaagaagaggaaggtgaaggataatgagatgaacagggagagtgatgaggatgttgctagtgacaaagcagaagacatgcaagatgacactgagaatatggaacaaaatgaggacgatgagctgattttgggcgaagatgatgtctctgcatggagggagcttaggctgcaccctctgcttctcaaggcgatgcgcagacttggattcaaagagccaacacctatacaaaagtcttgctttcctgctgcagctcatcgaggcaaggatgttatcggtgctgcagagacaggttccggaaagacacttgcttttggcctcccagttttgcaacgtctccttgaagagcgagaaaaggccacaagattgcagcaggaagatgaaaaaatggaggaacgttcttgtggaagccctcttcgtgctcttattctgacacccactagggagctcgccaaacaggtatgcgatcatctaaaagatgtggccaagttcttaggaatccatgttgttccaattgttggtggtctatcaatggaaaaacaagagagacttttgaaaaaaaagcctgaaattgttgttggaactcctggaagattgtgggaacacatgtcgatgaacaatcaacacctagttgagaatgatcgaacgaggccatttccgtgaattacaatctatcattgagatgcttccactgaccaatggttctgatgaacaagctgcaagaacaatgccaaactgtgagactgtaccaattttgcaaataaagaagcggcaaacctttgtgttctcagccacacttgcactctcatctaattttcggaagaagttgaagcgtggcctatctacttcgaaggcatcgacgcctgatgatgtcagctctattgaagcattgtcaaaacaagctggaatgaaatctaatgctgaaatagttgatttgacaaaggcttcaatcttgcctgagaagcttgaagaatcttttattgagtgcagtgaagaggataaggatgcctatctgtattatatattgagtgttcatggtcaaggtcgcacaataatattttgtacatcaatcgccgcattacgtcacatttcttccatactgcgcattcttggaattaatgtattgacaaaccatgctcaaatgcaacaaagagctcgcatgaaggctgtggatcgcttccgtgaaagtgaaaattccattttggtcgcaactgatggttttgcaaggggtatggattttgatgatgtgcgaacagttatccattatcagttgccacattcaactgatgtctatatccacagaagtggaaggacagcacgcaagtcattggctggctgcagcattgcgttaatctctcctactgacaagtccaggttttattctctttgcaaatctttgtcaaaggagaatctccagcagtttcctgtagatcatacttacatgtctggagtgatgaacagactctcacttgctcggcagattgacaagattgcccgtaaaacttcacaggaaaatgctaacaaatcctggcttcaaaggaatgctgaatctatgggattgattttggatactagtgacagtgaagaagaccatgtgcagggacacaagaaacgaaaggctacttctgcacatctccaaaagcttcaacaggagttgagtgatctcttgcaatgcccattgcagcctaagactttctctcgccgctatttggctggggctggtgtctcacccttacttcagaagcaactagaagagttggccaagagaaatgcaagcaacaatagcagcaagagtaagaataaaggatctgggtttgttgttattggtcaggatcgtgtcgagcccttgcaagcacttcaaaattctgggcaagaggtctgtgtgaacatagacaaagaaagggaaaagcgaagagtcgctgagaactggaggcggaagaagcatgaagaaaagaaacgtacacaagagcagaagcgaaaggataagagaaaagctaaagagatggcttgatgacacatgagatagctaggggccttcaaggggtttacggaagctctttaagctcgcgtcaatcctttcagaaaggaaaggaatgcattcatcaatgttttgctgtaatacaatgcgtgcgctaagttagcgcttgcctttaacagattggaggtggtagtttgattttgttttgcggctgaagaaaataaacttagaatgcacgagcactggctctggatgagaaaagaaattaagcagatagctcacgtataacctcattggatctgtaatatgtacgcctatcagatttaaggtacaaattaattttattagggatgggaatcgactgacctggcctatctttggacttggacctggcccattgccttaaggccaattttaggagtgatggagattatgatcttgctggctatcatgggtttggcctagatatttttctgctataatgcatggacatgaatcctatcaatatttctataaagtattgtgataacagattaaaa

SEQ ID NO: 24588 - DNA, 357 bp, Zea Mays
tcattatatcaagaattgctttaggtttagcacctgcatttgttcaaaaaataataataaggggtaatagtacttacaatagaaagccaacagtactttatacggtgatagtgatacagtgccgaaattctactttcacagccaccaagcagattgacagcatctacgaagcgatcatgcatctccatagtccaccgcatgcgtgccttggcccttttggggcaatgcgcattatttgtggttgccagaggagaaacggttggacacagttgctgaggttcttcagaaggaaccgagactgattcatgtaccatgtgctgctcatcatgttgccatgacttagaattcggatacgag

SEQ ID NO: 24589 - DNA, 1247 bp, Zea Mays
tatttttttaccgagcctaatcaagttacctaggcctttggaggtgctctaagtaagaaccagatggaggagccctgtctaagataccatgacttgcctagtttttttaatataaggttagttttttcgattcgaaccactaaacttagataagttgtggcgtcttagtcattaaaccaaacaaatccttagtatattttgtgccaatataattaactgtgctacaggcacgcagtagatgcaattttctggatgtaccggtttttaaaaagaatattataccataataaaaatccgcatgtctcgtatctagaaagtaattacacgatgccttggatcgacatgcacgtcttaagaatgcattgattcgtcgctataatgttacatctaaagaagaatgcattaattcatcattattattgtctaaaaaataaataatgcattggttgtgctaatcaatcagatcctgatttcactttgagcaattaaaatttcccaatccatggtagccaaacctctggtccagggcacactatatatgcgcgctagcttgcccaggactgtagagacatcagcaggtagtttgtttcctctaggctagagtcctctagctactctctatggccatgtcgatcccgtcaattgttatggcaatggcaatggtccttacggtagcgtctacggcgcactacgggcatcaggcgctggccgatgctcctgccgccgctccgagccctcgtcaccaccaccatggtcatcgcggcccggcggcgcagccgtcgggttctcatcatgctcatggccacgatggtgcaccggcggcaggtcatcgtggtcaccacggccaccatgcaccagcaccggcgccaagccatcatggtcatcacggccatcatcatacaccagcatcggcgccaggtcctcatggccaccacggtcaccaccacgcaccaggtcctcacggtcaccgtgccccagcaccggtacataacgaccaccaatcggctcaggctccgaaactgcatcatcatcaccatcacgctgcagcgcccgcccctgttcagagctcctactagtctagatgcagatggtcaaaacatgcgcatgtgtggcaataataagaagacgatatttacgtcttggttgtatttttgtattcttcgctatgcctctgcgttgttcatggtaatctctcggctaatcaaccggaatcgagttacagtttttctgcttacagttgcacctca

SEQ ID NO: 24590 - DNA, 4517 bp, Zea Mays
gggacgcgaggtgctgccgccgcccgcgcgcgggacgctcaaaacagccgcttccccaaccaaaaggcgcaagaaaactcgtccccgccgctcaaaaatctcccgcctcccgcggatgggatggcatccagtttcacagaccacacgcccacccgctccgccgctcgcgcccaaaaattttcgttcagccggctgcctgccccccaccaccacttccctcccgttccgaaaccccgattagccgccgacccgccgtctccccacgtatttgactggtgctagagccagcgcccagatcaaccttcctgagtccatcggcaccgcatctgcctcgcgatccgtctctctctctgtcccctcacggccgtagaccttttcgagggcggtatcggagggaggagagggggaggcgaaggcgggagtagtagaaactaggaagggccgttcgtgtcttgcggagaagatggagaacctgaggaggttcctgaacccgctggtgctcaacctgcagaagatggagctggagctcacctgccccgtctgcctgaagttgctcacctcgcccacaacgctgccgtgttaccacacatcctgcagcaagtgtgcccttacaccgacttcaaaaggctacagctgtgccatttgcaaatcaggctattgttctcaagatttaaggccagcttctcaccttgagtcgatagtgagcattcataggagcctcagctctaccgtcagcaccatgattgaacaacaggattctcaaattaacattcatgttgcaaaggcagcatctcatggaacaccagaatcaggaaacagaagtggggtggaggagaaatctgaccagatgaaatcttacaaccctgttgcttcaaagctagtatataaccaaccaactggacctgcatttgggaacattgatagtgttcaagcaaaagatcctgcatttgagaacaatgctggtgccgcagctgttgcaccaatggcttttgtacgaaagggtcattctgggtcacaatcttctgatggccctggagatttggactgtgacagcaatgacctcgaaggagaactgatgacaagcctatcacctcttcaaactgcattgaaacgagaggcaaatgcaatggatgatcataccagagaattgaagaagcaaaaatcaaatgatcaagttcaaagacaaacaaacatggccagtgcttggaaatgtgagttctgtcattcttcccaagttactgagtgtactggccctttgtcacattatttgaatggggagccagtagaagctgatcaagcttggaaatcaagtgttcagcatgtccatgagaaatgcattgaatgggctcctcaagcattctttactggtgacaccgcaaacaacttggggcctgagttggcccgtgcttctaagatcaaatgcagtgtttgtggcttaaaaggcgcagcacttggctgccttgtgaagagctgccgcaaaagttttcatgtcccatgtgcctacaacatcaaaggctgcaaatgggatcaagagaactttgttatgctgtgtcctacacattcgtcaaaaaagttgccttgtgagagattaaagccaaaaaagaaggccaagctgcagcaaccatcttccgacattgatggtccgatttcaccctctccgatgcaaagggctgaactttggactgcctcaccttttctgactagtgaatgggtgatatgtggatctgcgctcgttggccatgagaaggaaatcttggatcagtttgagtgtcacactggcatcacagtaaccaacacctggagttcagatgtgactcatgtgattgctaatacggatgaacgtggggcatgtgcacggacactcaaggtcctcatggctattttagctgggaagtgggttctcaatgtgaattggctgaaagcctgtatggaggctagggaaccagtcccagaagagccctacgagataaggtgtgatgttcatggctctgtcgacggccctcgctcaggaaggctccgagcgatgcagcaggcaccaggtctgtttgctgggttgaccttctacttcagtggccatttcatgccgggatacagggccaacctcgaagatttgatcgccgcagcaggggggtccgttctggagaaggccgagctctctagcacgtccttgatcctctacagcatggaggcgccgccgccccacaacaacctagacgccctcgagaccatcaacaagagattagccgaggcccaggaactggcgaccacggctggctgcaaagccattcctcatacatggcttctggactgtatcgcgtcgtgcgcggttgagttgaacgtgtcgtgttctactgcctaggttcaaacgtaggaatgtgacatctgctgctgtttttttttgaaaaaggagattaagagacgattggcttgttgtcttgatccaaagtatctttagacgttgtagcatgaaagcggaatttagtcggaataagcctgtgtatcttagtcaacgttactgtcggtgatgtcatccacatgtttcacctactgacaggtgcagtttgtctgatttttttcttcttgatttgtatctaaaaaaacataaaaggatgcactcagatccaacgctccagacggcgccatctgagaatttgcatatctgcctgtgggagtgaaatgattgtggagtgcattggaaacgaagcaaagcgggatggctgagctcaggtggttgcttcagaagtagttcaccagcaagcagccgggaggtcaggtccccctcacgcccctcggtatagcagtctcaccagtcaggcgtcctcctccctctggtctggtgtcccgtgaactctccttttttcggttcaccagaccatgatcctgatagcaaaccagttccccttttattcgatccatttataaggagccgctcctggtcctgagctagtgtgtgggtgtgcccacggcatggcgttcttcagcagcggatcccgggtgctggtcgaaatcctgacgaggatgcagagcgctgaaagaccaatgcctgtcgaccacaccttcttcgagtcgggatccattcgctaccatgtggaggcttcagcgtcggatcccgagaacgtgttcctatcgatatcgacgccatcgctctcctacgactacgaggaggctgcagctgctccctcgtcgagccgcctgcctgagctgaccctgcaggaggcgaggaagacgtatcacaggttcgccgagatggtggagccgccgagggaagggtacgtcctgacgctcaagctcaacttctccggcctcacccggcccaaagatcgcgtcaaggccattaaccaggtgtcgctgctgcaatccgtggtgctgagctcgcagctgaagcacatgctggggagcctcggctcgtcgggcacgatgaggctcgtgtacaacaaccagagggagcccttcttcgtcagcaagacggctgagaagataaacgctatcttccccatgcgtttcagggatgacacggacctggccatcgccacctccttcttccaggagctgcaggaggtcgggaactcgttcgcgagggcgcccaagtgcagctggtcgccgatcccaccgccggagctgcgcggggagaacgtgcaccacctcaccaccaacggcggattcgtctccttcggcgtcctgtcgcggcacgtgagggggaagcggccgccaagaccgcgtggatcctgctcaacttccagtcctacgtcaagtaccacatcaagtgcacccggagccacgtccagagccggatgcgggagcggctggaggccctgacggaggccgtccagaacgcgaggctgcgagggaatagcggcgacgacgacaagaagcggtcgtcacaagttgtgaagaagaggagcaagagacgtctcgccagcctggcgaaagcgagcgacagggtgcgcaagggtttcagggccgtcctggacaagatgaagcggctgcggctgagggtcagggtgaagggcctggaccggctccggcggcagttccggtgccggtgcttcgccgtgcctaggctgcccgcgccatctcgcaccggcagaaggaaggagcactacagataccacaaactggccgagtaatctatatatataccgaactttggtcatcgacgacgtcgattctacgtactgtattaactgatgatgagcatggctgctagtttaatagcgatggcactccgctattatatctagcattggagcgcaaaaaagagtttagatcttttctcctcacacaggcttaaaaggttttagcctctgcctaatgtggtaggcttagagttagagatggacattgaagacgccttaagtgtccatgcttcagtgttgttgcatttgagctaatttgtacctgtacttttagtgcccgtttggcacagctccagctcctgattctaagcgaggatctggaggagccgtgccaaacgggtattttttaaaccgattctcgtgtgaagccgaaagattggg

SEQ ID NO: 24591 - DNA, 1116 bp, Zea Mays
ctccttgaaccagaattttttctgcttccttccatcctctcccgtctccctctctcgctctccaccgctcccccctccttccccttgcctctgccctggcaagttacggtcctgcccctgtgcgaaccgaggccgtcgatatgtcgctcagcgagaagctggaggcggcgcgtgtcgctctcggcaagcgaaaggagcgtgagcgcgagctgcaggccgcacaggcgcagccgctcccggtgccggctaaagccgagccgaggaagccggctccggcttgtgcggccgccgccgccggcggcgacaacaagctcctggccggccacctggcccacgagttcctcgtccacggcacgctcctggggcggcggatcgagccgagccgcggagccccagctccggctcaggctccggcgcgggccgagccggaccccaaaaggaggtatgcggaggtgtcgtggctgctaatggcgagaggggcccacgtccccggcgtcgtcaacccgacgcagctcggccgctggctgcagataaaggagtgacggccacgtcggcgtggcaggtggcgcggcgccattgggcggggccgccgatcgacgacctgcgtgcgcgcgcggcgggagaggctgttacaaaaacagagaagctcacatcggccaagtggtttcgccatctccgccgcccctggatcactcggtgctctcctctcctactctcccattcagattctctaagaaaaaaaggtctagatctagcgagatcgtgctgtagtagccttgttgcttggcgcatcgttgtttgttaacattacatgcttactgttgcccgtgtgcgtgtatcaccactgtatccatccatccatgtttgtttctgcatgaaacggtgcgtgcgcgcgtgttgtcccgggtgtagaaggctgccgcgcgctctggacgaagcaggctcatctcgtgttccagtgcggcagtgcaatgcaaaaactgcaaggccatcgtcctcgagccttgaaaccatggggccggcaaggcatcggcacggccgaaagttgatggatcatgcgtctcgcgtctcatgtgtattattcgcatggcgaaatcgctgcggtggtgtgtgtat

SEQ ID NO: 24592 - DNA, 1118 bp, Zea Mays
ctccttgaaccagaattttttctgcttccttccatcctctcccgtctccctctctcgctctccaccgctcccccctccttccccttgcctctgccctggcaagttacggtcctgcccctgtaggcgaaccgaggccgtcgatatgtcgctcagcgagaagctggaggcggcgcgtgtcgctctcggcaagcgaaaggagcgtgagcgcgagctgcaggccgcacaggcgcagccgctcccggtgccggctaaagccgagccgaggaagccggctccggcttgtgcggccgccgccgccggcggcgacaacaagctcctggccggccacctggcccacgagttcctcgtccacggcacgctcctggggcggcggatcgagccgagccgcggagccccagctccggctcaggctccggcgcgggccgagccggaccccaaaaggaggtatgcggaggtgtcgtggctgctaatggcgagaggggcccacgtccccggcgtcgtcaacccgacgcagctcggccgctggctgcagataaaggagtgacggccacgtcggcgtggcaggtggcgcggcgccattgggcggggccgccgatcgacgacctgcgtgcgcgcgcggcgggagaggctgttacaaaaacagagaagctcacatcggccaagtggtttcgccatctccgccgcccctggatcactcggtgctctcctctcctactctcccattcagattctctaagaaaaaaaggtctagatctagcgagatcgtgctgtagtagccttgttgcttggcgcatcgttgtttgttaacattacatgcttactgttgcccgtgtgcgtgtatcaccactgtatccatccatccatgtttgtttctgcatgaaacggtgcgtgcgcgcgtgttgtcccgggtgtagaaggctgccgcgcgctctggacgaagcaggctcatctcgtgttccagtgcggcagtgcaatgcaaaaactgcaaggccatcgtcctcgagccttgaaaccatggggccggcaaggcatcggcacggccgaaagttgatggatcatgcgtctcgcgtctcatgtgtattattcgcatggcgaaatcgctgcggtggtgtgtgtat

SEQ ID NO: 24593 - DNA, 1833 bp, Zea Mays
ccgccgtgatggcgcgtctcttcttcctcctcctcctctttccgctcctctactcctccgtcaccggcctcaaccgcagcgacttcccgccgtccttcctcttcggcgccagcacgtcgtcttaccaggtcgaaggcgcatacctagacgacagcaagggcctaagcaattgggatgtcttctcccatgttccaggaaatattgacgatggaagcaatggcgacgtagctgctgaccattatcatcgatacaaggacgacatagaaatgatgcattcgattggtctcagctcctacagattctcattgtcgtggtcgagaattcttccaaagggtcgcttcggaggtgttaatcaggcaggcgttaaattctacaatagcctcatcaacggactgctagaaaaagggatacaaccatttgtgacgatcaaccactatgacatacctgaagaactccaagaaagatacaattcttggttgaacccagagattcaggaggacttcacctacttcgttgagctttgcttcaagatgtttggtgaccgagtaaagcactgggtcacattcaatgagccaaatcttattgtaaagcttgcatactccattggggcatttccacccaaccgttgttccgagccatatgggaaatgtgattcagggaattcatcaactgagccctacattgcagcgcataacatgatattagctcatgcaaagacggtcaacatctacagaaagaattacaagtccaagcaaggtggctttgtaggaatttcattacatctaagatggtatgaaccactaaggaatatcacagaggaccacttggcagatcttggatcccttgttctttggtgactatcctcaccagatgcgccaaatcttaggtccaaacttgccaaaatttacagaaggagagaagaaactactgaagaaccaaattgacttcatcgggaacgaaatgggatacccattggaaaaccggtaaaaatcggcattgtatattgcattattctattcaacaagaatcctagttacaaattaattatgcacaagctaacacaactaaactaatattgcagacacctgttgcaaacacctatgtcgttccaagctccatggagaagttggtcatgtatttaaagcagagatataaaagcatacctttgtacatcacagagaacggttatgcccaaatagccaatattagcactacagcagaagaaataattaatgatattgaaagatcaacttacattcgtgactacctcacttacttgagctttgcaataaggttgttgcatgcctcaattatcttttcatgtaaactgctctccagccaggtaataataaaactttgctacttttgtgcaggaaaggagcagatgtgagaggttattttgtgtggtctttgatggataacttcgaatggatctctggttacaccgtaaagtatggtctttgtcatgtgaatttcaagtcactaaagcgaacaccaaaattgtctgctaaatggtatagcaagtttatcaagggctatgaacagatagagatggcctctgaagaattgcctaagcatatggtttcctagtacagaaatacagaattctcaaagtccttgtttctacattactcaatgatttgttaaaaatgtttacaccgtaatttttctcatgcccatgtatgccagtgccataataaaatctaagcttatttttttcaaatatgtatctaaagggagtttactgaaaaggaagaagcagagtagtagagtacatagtctggccaagcagagtagtagagtacatagtctggccatcctccttctagccca

SEQ ID NO: 24594 - DNA, 1738 bp, Zea Mays
ccgccgtgatggcgcgtctcttcttcctcctcctcctctttccgctcctctactcctccgtcaccggcctcaaccgcagcgacttcccgccgtccttcctcttcggcgccagcacgtcgtcttaccaggtcgaaggcgcatacctagacgacagcaagggcctaagcaattgggatgtcttctcccatgttccaggaaatattgacgatggaagcaatggcgacgtagctgctgaccattatcatcgatacaaggacgacatagaaatgatgcattcgattggtctcagctcctacagattctcattgtcgtggtcgagaattcttccaaagggtcgcttcggaggtgttaatcaggcaggcgttaaattctacaatagcctcatcaacggactgctagaaaaagggatacaaccatttgtgacgatcaaccactatgacatacctgaagaactccaagaaagatacaattcttggttgaacccagagattcaggaggacttcacctacttcgttgagctttgcttcaagatgtttggtgaccgagtaaagcactgggtcacattcaatgagccaaatcttattgtaaagcttgcatactccattggggcatttccacccaaccgttgttccgagccatatgggaaatgtgattcagggaattcatcaactgagccctacattgcagcgcataacatgatattagctcatgcaaagacggtcaacatctacagaaagaattacaagtccaagcaaggtggctttgtaggaatttcattacatctaagatggtatgaaccactaaggaatatcacagaggaccacttggcagtaagccgagctctgtctttcgatgctccatggatcttggatcccttgttctttggtgactatcctcaccagatgcgccaaatcttaggtccaaacttgccaaaatttacagaaggagagaagaaactactgaagaaccaaattgacttcatcgggacacctgttgcaaacacctatgtcgttccaagctccatggagaagttggtcatgtatttaaagcagagatataaaagcatacctttgtacatcacagagaacggttatgcccaaatagccaatattagcactacagcagaagaaataattaatgatattgaaagatcaacttacattcgtgactacctcacttacttgagctttgcaataaggttgttgcatgcctcaattatcttttcatgtaaactgctctccagccaggtaataataaaactttgctacttttgtgcaggaaaggagcagatgtgagaggttattttgtgtggtctttgatggataacttcgaatggatctctggttacaccgtaaagtatggtctttgtcatgtgaatttcaagtcactaaagcgaacaccaaaattgtctgctaaatggtatagcaagtttatcaagggctatgaacagatagagatggcctctgaagaattgcctaagcatatggtttcctagtacagaaatacagaattctcaaagtccttgtttctacattactcaatgatttgttaaaaatgtttacaccgtaatttttctcatgcccatgtatgccagtgccataataaaatctaagcttatttttttcaaatatgtatctaaagggagtttactgaaaaggaagaagcagagtagtagagtacatagtctggccaagcagagtagtagagtacatagtctggccatcctccttctagccca

SEQ ID NO: 24595 - DNA, 1635 bp, Zea Mays
ccgccgtgatggcgcgtctcttcttcctcctcctcctctttccgctcctctactcctccgtcaccggcctcaaccgcagcgacttcccgccgtccttcctcttcggcgccagcacgtcgtcttaccaggtcgaaggcgcatacctagacgacagcaagggcctaagcaattgggatgtcttctcccatgttccaggaaatattgacgatggaagcaatggcgacgtagctgctgaccattatcatcgatacaaggacgacatagaaatgatgcattcgattggtctcagctcctacagattctcattgtcgtggtcgagaattcttccaaagggtcgcttcggaggtgttaatcaggcaggcgttaaattctacaatagcctcatcaacggactgctagaaaaagggatacaaccatttgtgacgatcaaccactatgacatacctgaagaactccaagaaagatacaattcttggttgaacccagagattcaggaggacttcacctacttcgttgagctttgcttcaagatgtttggtgaccgagtaaagcactgggtcacattcaatgagccaaatcttattgtaaagcttgcatactccattggggcatttccacccaaccgttgttccgagccatatgggaaatgtgattcagggaattcatcaactgagccctacattgcagcgcataacatgatattagctcatgcaaagacggtcaacatctacagaaagaattacaagtccaagcaaggtggctttgtaggaatttcattacatctaagatggtatgaaccactaaggaatatcacagaggaccacttggcagtaagccgagctctgtctttcgatgctccatggatcttggatcccttgttctttggtgactatcctcaccagatgcgccaaatcttaggtccaaacttgccaaaatttacagaaggagagaagaaactactgaagaaccaaattgacttcatcggggttatgcccaaatagccaatattagcactacagcagaagaaataattaatgatattgaaagatcaacttacattcgtgactacctcacttacttgagctttgcaataaggttgttgcatgcctcaattatcttttcatgtaaactgctctccagccaggtaataataaaactttgctacttttgtgcaggaaaggagcagatgtgagaggttattttgtgtggtctttgatggataacttcgaatggatctctggttacaccgtaaagtatggtctttgtcatgtgaatttcaagtcactaaagcgaacaccaaaattgtctgctaaatggtatagcaagtttatcaagggctatgaacagatagagatggcctctgaagaattgcctaagcatatggtttcctagtacagaaatacagaattctcaaagtccttgtttctacattactcaatgatttgttaaaaatgtttacaccgtaatttttctcatgcccatgtatgccagtgccataataaaatctaagcttatttttttcaaatatgtatctaaagggagtttactgaaaaggaagaagcagagtagtagagtacatagtctggccaagcagagtagtagagtacatagtctggccatcctccttctagccca

SEQ ID NO: 24596 - DNA, 1681 bp, Zea Mays
gctgcccgccgtgatggcgcgtctcttcttcctcctcctcctctttccgctcctctactcctccgtcaccggcctcaaccgcagcgacttcccgccgtccttcctcttcggcgccagcacgtcgtcttaccaggtcgaaggcgcatacctagacgacagcaagggcctaagcaattgggatgtcttctcccatgttccaggaaatattgacgatggaagcaatggcgacgtagctgctgaccattatcatcgatacaaggacgacatagaaatgatgcattcgattggtctcagctcctacagattctcattgtcgtggtcgagaattcttccaaagggtcgcttcggaggtgttaatcaggcaggcgttaaattctacaatagcctcatcaacggactgctagaaaaagggatacaaccatttgtgacgatcaaccactatgacatacctgaagaactccaagaaagatacaattcttggttgaacccagagattcaggaggacttcacctacttcgttgagctttgcttcaagatgtttggtgaccgagtaaagcactgggtcacattcaatgagccaaatcttattgtaaagcttgcatactccattggggcatttccacccaaccgttgttccgagccatatgggaaatgtgattcagggaattcatcaactgagccctacattgcagcgcataacatgatattagctcatgcaaagacggtcaacatctacagaaagaattacaagtccaagcaaggtggctttgtaggaatttcattacatctaagatggtatgaaccactaaggaatatcacagaggaccacttggcagtaagccgagctctgtctttcgatgctccatggatcttggatcccttgttctttggtgactatcctcaccagatgcgccaaatcttaggtccaaacttgccaaaatttacagaaggagagaagaaactactgaagaaccaaattgacttcatcgggaacgaaatgggatacccattggaaaaccgacacctgttgcaaacacctatgtcgttccaagctccatggagaagttggtcatgtatttaaagcagagatataaaagcatacctttgtacatcacagagaacggttatgcccaaatagccaatattagcactacagcagaagaaataattaatgatattgaaagatcaacttacattcgtgactacctcacttacttgagctttgcaataagatgtgagaggttattttgtgtggtctttgatggataacttcgaatggatctctggttacaccgtaaagtatggtctttgtcatgtgaatttcaagtcactaaagcgaacaccaaaattgtctgctaaatggtatagcaagtttatcaagggctatgaacagatagagatggcctctgaagaattgcctaagcatatggtttcctagtacagaaatacagaattctcaaagtccttgtttctacattactcaatgatttgttaaaaatgtttacaccgtaatttttctcatgcccatgtatgccagtgccataataaaatctaagcttatttttttcaaatatgtatctaaagggagtttactgaaaaggaagaagcagagtagtagagtacatagtctggccaagcagagtagtagagtacatagtctggccatcctccttctagccca

SEQ ID NO: 24597 - DNA, 300 bp, Zea Mays
cctctggctgtgggtacagcagtgcccgcgcagccctcgacgacgagcacgtcggcgcgcccacagcgacagagctacgttcacgagccatcctgagggacccgacccccaagagtacttgttggtgaggtggcagccaagcacgacgatcatcgcacggcagacaaagttctccgccgccatgagtacgatgtcccgcgcctggcgaccagcttctgctccatcagcatgcacaaccgggtaggctacggccagcgattggttgcccagaagcagatcgtcgatggagacaccagcggg

SEQ ID NO: 24598 - DNA, 887 bp, Zea Mays
cgacagttcacattgggttaactccgtatccaatcccatccgcacaattgtgagatggtcttcttcctctggctgtgggtacagcagtgcccgcgcagccctcgacgacgagcacgtcggcgcgcccacagcgacagagctacgttcacgagccatcctgagggacccgacccccaagagtacttgttggtgaggtggcagccaagcacgacgatcatcgcacggcagacaaagttctccgccgccatgagtacgatgtcccgcgcctggcgaccagcttctgctccatcagcatgcacaaccgggtaggctacggccagcgattggttgcccagaagcagatcgtcgatggagacaccagcgggtcgtttccggattccgctcgatttactagcgattccgcggccagcatgaaggggaaagagatggtgagtgggccccaccaagcagagaaacgatccacaagcacgagcttgcgcgcggagactgggtggccggccaatgggcctcgcatggcggtggtgcggcgcgagcgtatggaaaatgggacccacatgtcggcgcgttggcggtgtttcttgggccgcacgaggggtaagtgatgatgggctgaatatgaggatgttggcccgggcagggtttcattttctttttcttttcctattcgaattcctattccaaatctaatcataaattccaaatttgttccaaactcaatttgatttggggttcaaatttcccggttgaatgcacacaagcaaaaccctagaatgaatgcaaccattatattttacttatctattttatctctttaagcatagaggcataaaaatatataattcaataataggaatgattgtattccaaacaaacataatctatgtaca

SEQ ID NO: 24599 - DNA, 1244 bp, Zea Mays
atggcgcgtctcttcttcctcctcctcctctttcccctcctctactcctccgtcaccggcctcaaccgtagcgacttcccgccgtccttcctcttcggcgccggcacgtcgtcttatcagcctaatttccacgctcatacatattgcatgttaattagacgtatctatttagaagtcttggcaattaaccataaatcaggaaatattgacgatggaagcaatggcgacgtggctgctgaccattatcatcgatacaaggacgacatagaaatgatgcattcgattggcctcggctcctacagattctcattgtcgtggtctagaattcttccaaagggtcgcttcggaggtgttaatcaggcaggcattaaattctacaatagcctcatcaacggactgctggaaaaagggatacaaccattggtgacgatcaaccactttgacatacctgaagaactccaagaaagatacaattcttggttaagcccagagattcaggaggacttcacctacttcgctgagctttgtttcaagatgtttggtgaccgagtaaagcattgggtcacattcaatgagccaaatcttgttgtaaagcttgcatactccattggggcatttccacccaaccactgttctgagccatatgggaaatgtgattcagggaattcatcaactgagccctacattgcagcgcataacatgatattagctcatgcaaagacggtcaacatctacagaaagaattacaagtccaagcaaggtggctttgtaggaatttcattacatctaagatggtatgaaccactaaggaatatcacagaggaccacttggcaatgcgccaaatcttaggtccaaacttgccaaaattcacagaaggagagaagaaactactaaagaaccaaattgacttcatcggggttatgcccaaatagccaatattagcactacaacagaagaaataattaatgatactgaaagatcaacttacattcgtgactacctcacttacttgagctttgcaataaggaaaggagcagatgtgagaggttattttgtgtggtctttgatggataactttgaatggatctctggttacaccgtaaagtatggtctttgtcatgtgaatttcaagtcactaaagcgaacaccaaaactgtctgctaaatggtatagcaagtttatcaaaggctatgaacagatagagatggcctctgaagatttacctaagtatatggtttcctag

SEQ ID NO: 24600 - DNA, 1531 bp, Zea Mays
gccgtcatggcgcgtctcttcctcctcctcctattctccctcctccactcctccgtcactgggctcaggcgcagcgacttcccgccgtccttcctcttcggcgccggctcgtcgtcttaccagattgaaggcgcttacctagaagacaacaagggcctgagcaattgggatgtcttcacccatattaaaggaaatattgatgatggaagcaatggcgacatggccactgaccattatcatcgatacaaggacgacattgaaatgatgcattcgattggcctcacctcctacaaattctcattgtcctggtcgagaattcttccaaagggtcgctttggaggtattaatcaggcaggcattaaattctacaataacctcatcaatggactgctggaaaaagggatacaaccattggtgacgatcaaccactatgacatacccgaggaactccaagaaagatacaactcatggttgaacccagagattcaggaggacttcacctactttgctgagctttgcttcaagatgtttggtgaccgagtaaagcactgggtcacattcaatgagccaaatcttttggcaaagctcgaatacttcatcgggggatttccccccaaccgctgttctgagccaaatgggaaatgtgattatgggaattcatcaactgagccctacattgcagcgcataacatgatattagctcatgcaaagacgaacaacatctacagaaagaattacaagtccaagcaaggtggctcagttggaattacaatacatatgagatggtatgaaccactgaggaatatcacagaggaccacttggcagtaagccgagctctgtctttcgaagctccatggttcttggatcccttgttctttggtgactatcctcatcaaatgcgccaaatcttaggcccaaacttgccgaaattcacagcaggagaggagaaactattgaagaaccaaattgacttcatcggagtaaatcactaccaaacattctatgtcaaggattgcatatattctctatgtgatattgacccctacacatctgaagctttagtttctgaatcaacagaacgaaatgggatacccattggaaaactgacacaggatgcaaacacctatgtcgttccaagctctatggagaaattggtcatgtatttaaaggagagatataataacatacctttgtacatcacagagaatggttatgctcaaatacccaatatcagcactacagtagaagaaataattaatgacactgaaaggataaattacattcgtgactacctcacttacttgagttttgcaataaggagcagatgtgagaggttattttgtgtggtctttgatggataactttgaatggatctctggttacaccgtaaagtatggtctttgtcatgtgaatttcaagtcactaaagcgaacaccaaaactgtctgctaaatggtatagcaagtttatcaaaggctatgaacagatagagatggcctctgaagatttacctaagtatatggtttcctag

SEQ ID NO: 24601 - DNA, 1536 bp, Zea Mays
gccgtcatggcgcgtctcttcctcctcctcctattctccctcctccactcctccgtcactgggctcaggcgcagcgacttcccgccgtccttcctcttcggcgccggctcgtcgtcttaccagattgaaggcgcttacctagaagacaacaagggcctgagcaattgggatgtcttcacccatattaaaggaaatattgatgatggaagcaatggcgacatggccactgaccattatcatcgatacaaggacgacattgaaatgatgcattcgattggcctcacctcctacaaattctcattgtcctggtcgagaattcttccaaagggtcgctttggaggtattaatcaggcaggcattaaattctacaataacctcatcaatggactgctggaaaaagggatacaaccattggtgacgatcaaccactatgacatacccgaggaactccaagaaagatacaactcatggttgaacccagagattcaggaggacttcacctactttgctgagctttgcttcaagatgtttggtgaccgagtaaagcactgggtcacattcaatgagccaaatcttttggcaaagctcgaatacttcatcgggggatttccccccaaccgctgttctgagccaaatgggaaatgtgattatgggaattcatcaactgagccctacattgcagcgcataacatgatattagctcatgcaaagacgaacaacatctacagaaagaattacaagtccaagcaaggtggctcagttggaattacaatacatatgagatggtatgaaccactgaggaatatcacagaggaccacttggcagtaagccgagctctgtctttcgaagctccatggatcttggatcccttgttctttggtgactatcctcaccagatgcgccaaatcttaggtccaaacttgccaaaattcacagaaggagagaagaaactactaaagaaccaaattgacttcatcggggtaaatcattaccaaacattctatgttaaggattgcatatattctccatgtgatatggacgcctacccttctgaagctttagtttctatatcaacagaacgaaatgggatacccattggaaaaccgacacctgttgcaaacacatatgccgttccaagctccatggagaagttggtcatgtatttaaaccagagatataaaaacatacctttgtacatcacagagaatggttatgcccaaatagccaatattagcactacaacagaagaaataattaatgatactgaaagatcaacttacattcgtgactacctcacttacttgagctttgcaataaggaaaggagcagatgtgagaggttattttgtgtggtctttgatggataactttgaatggatctctggttacaccgtaaagtatggtctttgtcatgtgaatttcaagtcactaaagcgaacaccaaaactgtctgctaaatggtatagcaagtttatcaaaggctatgaacagatagagatggcctctgaagatttacctaagtatatggtttcctag

SEQ ID NO: 24602 - DNA, 2601 bp, Zea Mays
caaccactcaaaaaccgaacggacggcacatgcggcggccgcggccgtgcgcacatgcattccgcttccgccgccctcgtccgcgctgcgcctaagccgtggcccgagcagcatcctctccgcttctttccggcaacttcgaaggcggcgggtgagctccaccccacgacctactacactaccctcctcgcgtcgctctcccgggagtgccgacacgcccaccacccgttcgacgcaggtcttcaccgaacccatcaggcgcgggcatgcggggtcctgcacgcacggatcttgcgcctcggcctgcccctccggggtcgcctcggcgacgcgctcgtcgacctgtacggcaggtccggccgcgtgggctacgcctggcgcgcgctggcctgctgcaccggggctccagcgtcaagcgcggcggcgagctcggtgctgtcctgccacgctcggtcagggtcccctcgggatgttctcgatgcgttccagcgtatcaggtgttccattggtagcacgccggaccagtttggcattgcggtggttctgtccgcgtgttcgcggctgggtgccctcgagcacggcaggcaggtgcattgtgacgtgctgaagagcgggttctgctcgagtgtcttctgtcaggcgggtctggtggacatgtatgccaaatgcggcgaggtcgacgatgcaaggaggatgtttgatgggattgcttgccctgacacaatatgctggacaagcatgattgcgggctaccatcgggttggacgctaccagcaagcgctagctttgttttccaggatggagaagatgggttctgtcccagaccaggtaacgtgtgttaccatcatttccactcttgcaagcatgggcagattgggcgacgctagaactctactgaagaggatacggatgacgagcacggttgcttggaatgctgtcatcgcaagttactcacaaagtggtcttgacagtgaagtgtttggcctatataaggatatgaagaaacagggattgatgccaactaggtccacttttgcgagcattctaagtgcagcagccaacatgacagcgtttgatgaaggtcggcagatacatgcaacggcagtaaagcatggcttagatgcaaatgtttttgtgggcagttcactcatcaacctgtatgtgaaacatggctgcatctctgatgcaaagaaggtgtttgacttctccactgaaaagaacattgtgatgtggaatgctatcctttatgggtttgttcaaaatgagctccaagaagagaccattcagatgtttcagtatatgaggagagctgatcttgaggctgatgattttacatttgatacttcacttggcatctctctggttggaatatatttgaagtgcaaattgcttgaggatgcaaacaaactcttagaggaggtgccagatcacaaaaacctggttgagtggacagctactatttcagggtatgctcaaaatggttacagtgttcaatctttggtgatgttttggagaatgcgcagttatgatgttcgttcagatgaggccacattcactagtgttctgaaagcttgttctgagatggcagctcttacagatggaaaagagatacatggcctcattgtaaaatctggttttgtttcctatgaaactgcaaccagtgccctcatggacatgtactccaagtgtggggatgttatttcttcctttgaaatcttcaaggaattgaaaaacaggcaaaatataatgccatggaactccatgattgttggttttgcgaaaaatggttatgcaaatgaggcacttcttctcttccagaagatgcaagaatcacaaataaagcctgatgatgtcacactccttggtgttctgattgcttgtagccatgctggtttaatttccgaaggcttacatttcttcgattctatgagccaagtttatggtatagtacccagagtagatcactatgcatgtctcatcgatctacttgggcgtggtggtcaccttcaaaaggctcaagaagttattgaccagttaccattcagagctgatggtgtgatctgggctacataccttgcagcatgtcaaatgcacaaggatgaagagagagggaaagttgcagcaaagaaacttgttgagatggaaccacaaagctcatccacgtacgtgttcctttcaagcttacatgctgcggctggtaactgggttgaagccaaagtagccagagaagcaatgcgagaaaaaggggtgatgaaatttccagggtgtagttggatcacagtggggaacaaacaaagcgtatttgttgtacaggacacacatcatccggacgctctgagcatctacaaaatgcttgatgatctaactggaatgatgaataaagatggcagaatcaaggaatgcttacttgagggacaatgaccctgtttaactaatatatcatgctaaataatcaagggcctagattgatcttctactgtaatagaaagatgtctggttatttaggtgaggaatttggtacccttgcatagtataagtaatacaattactcataaattaaggatttaggcttttatcacatctcaccaaattggttgatga

SEQ ID NO: 24603 - DNA, 1552 bp, Zea Mays
atgattttagtgtccacactatccatgttttggaatcagtcacatcacgacatccacagcttcactatgaatcaaaactatacatgcttttgcagggtggaactgggattccacatcttaagtggttcggggtggaggggcagtacaatgtcatggtgattgatctgcttggtccaagtctggaggacttatttaactactgcagcagaaagttctcccttaaaacagtactaatgcttgctgatcagatgatcagtagagtagaatacatgcacacaagggggtttctacatcgtgacatcaagcctgataattttctcatgggtttaggacgtaaagcaaaccaggtatttgtcatcgactatggccttgcgaagaagtatcgagatctccaaactcataagcacataccatacagggaaaacaaaaatctcacaggaacagcacgatatgccagtgtaaatacccatcttggagttgagcaaagcagaagagatgatctggaatctcttggttatgtgctcatgtatttcttaagaggaagtctcccttggcaaggcctgaaagctggcacaaagaagcagaagtatgataggatcagtgaaaagaaaatgctgacgccagttgaggtcctctgtaaatcatatccatcagagtttactgcatactttcattactgtagatcactacgattcgaagataaaccagattactcctatttgaagagactcttccgtgacttatttatccgcgaggggtaccaactagattatgtatttgactggaccattatgaaatatcctcagtttagagataaaagcaaaattcagtctagcggcaagatgagtgggttggcaggcccttctgcagaaaggactgatagaactgcagctgaagctttgtttagaaggactggatctggttctggtcacaatcgagagcacaccaagcacagaagtcttctggagtcactgatgccatccaaggtggctgttgattcggataaagcaaggccacaatcatcgtcgcgcaacgggagcacatcaagaagagctgtcatttcatcaagcaaaccaagctcttctggggatctaagcgacccgaaccgcttggggggccgcctggcccctagtagcagcagccgcccaccgactgcccaaagggagatcagatcctcgtctttgtcaaaaatcggaaggtcttcacatgacgacgctatcaggaacctcgagctgctctcacttggtgctgacaagagaaaataagggaaccgacgaaatgggctagggtctggactctggatgatgacgatgcagggctgagcaggcagctccattatctgtatgttgaaaatattcttttcggaataaaagagattatataacttatgggattgtttcccggagctgtgctgctccaatccaataacccgcaagagttacgtagcaaagctaaattatgctgtcctagtagatcactgtatatctgaggacaggcggtgagacaacgaaggggagttgatagcaagatacaccattgcaggagttctatg

SEQ ID NO: 24604 - DNA, 2109 bp, Zea Mays
ctccgtttcggcatttttttcccactcccacccactcccccgtcttcctcctcccgacacacctctttaactcgcgtcggcttccaaaaaatgctccagctataatttaatccagacgaggaatcgcctcgcccgggatctctccccccccgcgaatccccaggcccgctcgccgacaggaccccgcgatcggctccagcgtgagcttgacttgcgttgcggcggggacgtcgccgacgctcggcacggggctcgtcggttcggcggtcgctttaggctcgggccccgtcgaggccagcggtgccggggcaatgcggtcagttcgtggagctgtttgaggcgcttggctgggatctgagggtgccagcgtgccaggtaggggaagcaagcgagctctctgtcggtgggggagctgctggtggttgtaagtgtagagcgcgcgtttggctgacagaatggagcacgtagtcgggggcaagttcaagctcgggaagaagatcgggagtggatcatttggggaactttacctcgccgtgaacgtgcagaatggcgaggaggtggctgtcaaactggaatcagtcacatcacgacatccacagcttcactatgaatcaaaactatacatgcttttgcagggtggaactgggattccacatcttaagtggttcggggtggaggggcagtacaatgtcatggtgattgatctgcttggtccaagtctggaggacttatttaactactgcagcagaaagttctcccttaaaacagtactaatgcttgctgatcagatgatcagtagagtagaatacatgcacacaagggggtttctacatcgtgacatcaagcctgataattttctcatgggtttaggacgtaaagcaaaccagttgagcacactccacaggtatttgtcatcgactatggccttgcgaagaagtatcgagatctccaaactcataagcacataccatacagggaaaacaaaaatctcacaggaacagcacgatatgccagtgtaaatacccatcttggagttgagcaaagcagaagagatgatctggaatctcttggttatgtgctcatgtatttcttaagaggaagtctcccttggcaaggcctgaaagctggcacaaagaagcagaagtatgataggatcagtgaaaagaaaatgctgacgccagttgaggtcctctgtaaatcatatccatcagagtttactgcatactttcattactgtagatcactacgattcgaagataaaccagattactcctatttgaagagactcttccgtgacttatttatccgcgaggggtaccaactagattatgtatttgactggaccattatgaaatatcctcagtttagagataaaagcaaaattcagtctagcggcaagatgagtgggttggcaggcccttctgcagaaaggactgatagaactgcagctgaagctttgtttagaaggactggatctggttctggtcacaatcgagagcacaccaagcacagaagtcttctggagtcactgatgccatccaaggtggctgttgattcggataaagcaaggccacaatcatcgtcgcgcaacgggagcacatcaagaagagctgtcatttcatcaagcaaaccaagctcttctggggatctaagcgacccgaaccgcttggggggccgcctggcccctagtagcagcagccgcccaccgactgcccaaagggagatcagatcctcgtctttgtcaaaaatcggaaggtcttcacatgacgacgctatcaggaacctcgagctgctctcacttggtgctgacaagagaaaataagggaaccgacgaaatgggctagggtctggactctggatgatgacgatgcagggctgagcaggcagctccattatctgtatgttgaaaatattcttttcggaataaaagagattatataacttatgggattgtttcccggagctgtgctgctccaatccaataacccgcaagagttacgtagcaaagctaaattatgctgtcctagtagatcactgtatatctgaggacaggcggtgagacaacgaaggggagttgatagcaagatacaccattgcaggagttctatg

SEQ ID NO: 24605 - DNA, 2022 bp, Zea Mays
ctccgtttcggcatttttttcccactcccacccactcccccgtcttcctcctcccgacacacctctttaactcgcgtcggcttccaaaaaatgctccagctataatttaatccagacgaggaatcgcctcgcccgggatctctccccccccgcgaatccccaggcccgctcgccgacaggaccccgcgatcggctccagcgtgagcttgacttgcgttgcggcggggacgtcgccgacgctcggcacggggctcgtcggttcggcggtcgctttaggctcgggccccgtcgaggccagcggtgccggggcaatgcggtcagttcgtggagctgtttgaggcgcttggctgggatctgagggtgccagcgtgccaggtaggggaagcaagcgagctctctgtcggtgggggagctgctggtggttgtaagtgtagagcgcgcgtttggctgacagaatggagcacgtagtcgggggcaagttcaagctcgggaagaagatcgggagtggatcatttggggaactttacctcgccgtgaacgtgcagaatggcgaggaggtggctgtcaaactgctgggattccacatcttaagtggttcggggtggaggggcagtacaatgtcatggtgattgatctgcttggtccaagtctggaggacttatttaactactgcagcagaaagttctcccttaaaacagtactaatgcttgctgatcagatgatcagtagagtagaatacatgcacacaagggggtttctacatcgtgacatcaagcctgataattttctcatgggtttaggacgtaaagcaaaccaggtatttgtcatcgactatggccttgcgaagaagtatcgagatctccaaactcataagcacataccatacagggaaaacaaaaatctcacaggaacagcacgatatgccagtgtaaatacccatcttggagttgagcaaagcagaagagatgatctggaatctcttggttatgtgctcatgtatttcttaagaggaagtctcccttggcaaggcctgaaagctggcacaaagaagcagaagtatgataggatcagtgaaaagaaaatgctgacgccagttgaggtcctctgtaaatcatatccatcagagtttactgcatactttcattactgtagatcactacgattcgaagataaaccagattactcctatttgaagagactcttccgtgacttatttatccgcgaggggtaccaactagattatgtatttgactggaccattatgaaatatcctcagtttagagataaaagcaaaattcagtctagcggcaagatgagtgggttggcaggcccttctgcagaaaggactgatagaactgcagctgaagctttgtttagaaggactggatctggttctggtcacaatcgagagcacaccaagcacagaagtcttctggagtcactgatgccatccaaggtggctgttgattcggataaagcaaggccacaatcatcgtcgcgcaacgggagcacatcaagaagagctgtcatttcatcaagcaaaccaagctcttctggggatctaagcgacccgaaccgcttggggggccgcctggcccctagtagcagcagccgcccaccgactgcccaaagggagatcagatcctcgtctttgtcaaaaatcggaaggtcttcacatgacgacgctatcaggaacctcgagctgctctcacttggtgctgacaagagaaaataagggaaccgacgaaatgggctagggtctggactctggatgatgacgatgcagggctgagcaggcagctccattatctgtatgttgaaaatattcttttcggaataaaagagattatataacttatgggattgtttcccggagctgtgctgctccaatccaataacccgcaagagttacgtagcaaagctaaattatgctgtcctagtagatcactgtatatctgaggacaggcggtgagacaacgaaggggagttgatagcaagatacaccattgcaggagttctatg

SEQ ID NO: 24606 - DNA, 2010 bp, Zea Mays
ctccgtttcggcatttttttcccactcccacccactcccccgtcttcctcctcccgacacacctctttaactcgcgtcggcttccaaaaaatgctccagctataatttaatccagacgaggaatcgcctcgcccgggatctctccccccccgcgaatccccaggcccgctcgccgacaggaccccgcgatcggctccagcgtgagcttgacttgcgttgcggcggggacgtcgccgacgctcggcacggggctcgtcggttcggcggtcgctttaggctcgggccccgtcgaggccagcggtgccggggcaatgcggtcagttcgtggagctgtttgaggcgcttggctgggatctgagggtgccagcgtgccagaatggagcacgtagtcgggggcaagttcaagctcgggaagaagatcgggagtggatcatttggggaactttacctcgccgtgaacgtgcagaatggcgaggaggtggctgtcaaactggaatcagtcacatcacgacatccacagcttcactatgaatcaaaactatacatgcttttgcagggtggaactgggattccacatcttaagtggttcggggtggaggggcagtacaatgtcatggtgattgatctgcttggtccaagtctggaggacttatttaactactgcagcagaaagttctcccttaaaacagtactaatgcttgctgatcagatgatcagtagagtagaatacatgcacacaagggggtttctacatcgtgacatcaagcctgataattttctcatgggtttaggacgtaaagcaaaccaggtatttgtcatcgactatggccttgcgaagaagtatcgagatctccaaactcataagcacataccatacagggaaaacaaaaatctcacaggaacagcacgatatgccagtgtaaatacccatcttggagttgagcaaagcagaagagatgatctggaatctcttggttatgtgctcatgtatttcttaagaggaagtctcccttggcaaggcctgaaagctggcacaaagaagcagaagtatgataggatcagtgaaaagaaaatgctgacgccagttgaggtcctctgtaaatcatatccatcagagtttactgcatactttcattactgtagatcactacgattcgaagataaaccagattactcctatttgaagagactcttccgtgacttatttatccgcgaggggtaccaactagattatgtatttgactggaccattatgaaatatcctcagtttagagataaaagcaaaattcagtctagcggcaagatgagtgggttggcaggcccttctgcagaaaggactgatagaactgcagctgaagctttgtttagaaggactggatctggttctggtcacaatcgagagcacaccaagcacagaagtcttctggagtcactgatgccatccaaggctgttgattcggataaagcaaggccacaatcatcgtcgcgcaacgggagcacatcaagaagagctgtcatttcatcaagcaaaccaagctcttctggggatctaagcgacccgaaccgcttggggggccgcctggcccctagtagcagcagccgcccaccgactgcccaaagggagatcagatcctcgtctttgtcaaaaatcggaaggtcttcacatgacgacgctatcaggaacctcgagctgctctcacttggtgctgacaagagaaaataagggaaccgacgaaatgggctagggtctggactctggatgatgacgatgcagggctgagcaggcagctccattatctgtatgttgaaaatattcttttcggaataaaagagattatataacttatgggattgtttcccggagctgtgctgctccaatccaataacccgcaagagttacgtagcaaagctaaattatgctgtcctagtagatcactgtatatctgaggacaggcggtgagacaacgaaggggagttgatagcaagatacaccattgcaggagttctatg

SEQ ID NO: 24607 - DNA, 2100 bp, Zea Mays
cgcaaggcaaaaaagcacccctccatatgccccgctgtcctatccgctcgccagtcgccacctccgtttcggcatttttttcccactcccacccactcccccgtcttcctcctcccgacacacctctttaactcgcgtcggcttccaaaaaatgctccagctataatttaatccagacgaggaatcgcctcgcccgggatctctccccccccgcgaatccccaggcccgctcgccgacaggaccccgcgatcggctccagcgtgagcttgacttgcgttgcggcggggacgtcgccgacgctcggcacggggctcgtcggttcggcggtcgctttaggctcgggccccgtcgaggccagcggtgccggggcaatgcggtcagttcgtggagctgtttgaggcgcttggctgggatctgagggtgccagcgtgccaggtaggggaagcaagcgagctctctgtcggtgggggagctgctggtggttgtaagtgtagagcgcgcgtttggctgacagaatggagcacgtagtcgggggcaagttcaagctcgggaagaagatcgggagtggatcatttggggaactttacctcgccgtgaacgtgcagaatggcgaggaggtggctgtcaaactggaatcagtcacatcacgacatccacagcttcactatgaatcaaaactatacatgcttttgcagggtggaactgggattccacatcttaagtggttcggggtggaggggcagtacaatgtcatggtgattgatctgcttggtccaagtctggaggacttatttaactactgcagcagaaagttctcccttaaaacagtactaatgcttgctgatcagatgatcagtagagtagaatacatgcacacaagggggtttctacatcgtgacatcaagcctgataattttctcatgggtttaggacgtaaagcaaaccaggtatttgtcatcgactatggccttgcgaagaagtatcgagatctccaaactcataagcacataccatacagggaaaacaaaaatctcacaggaacagcacgatatgccagtgtaaatacccatcttggagttgagcaaagcagaagagatgatctggaatctcttggttatgtgctcatgtatttcttaagaggaagtctcccttggcaaggcctgaaagctggcacaaagaagcagaagtatgataggatcagtgaaaagaaaatgctgacgccagttgagatcactacgattcgaagataaaccagattactcctatttgaagagactcttccgtgacttatttatccgcgaggggtaccaactagattatgtatttgactggaccattatgaaatatcctcagtttagagataaaagcaaaattcagtctagcggcaagatgagtgggttggcaggcccttctgcagaaaggactgatagaactgcagctgaagctttgtttagaaggactggatctggttctggtcacaatcgagagcacaccaagcacagaagtcttctggagtcactgatgccatccaaggtggctgttgattcggataaagcaaggccacaatcatcgtcgcgcaacgggagcacatcaagaagagctgtcatttcatcaagcaaaccaagctcttctggggatctaagcgacccgaaccgcttggggggccgcctggcccctagtagcagcagccgcccaccgactgcccaaagggagatcagatcctcgtctttgtcaaaaatcggaaggtcttcacatgacgacgctatcaggaacctcgagctgctctcacttggtgctgacaagagaaaataagggaaccgacgaaatgggctagggtctggactctggatgatgacgatgcagggctgagcaggcagctccattatctgtatgttgaaaatattcttttcggaataaaagagattatataacttatgggattgtttcccggagctgtgctgctccaatccaataacccgcaagagttacgtagcaaagctaaattatgctgtcctagtagatcactgtatatctgaggacaggcggtgagacaacgaaggggagttgatagcaagatacaccattgcaggagttctatg

SEQ ID NO: 24608 - DNA, 3984 bp, Zea Mays
cacggtcagatgtagccaccgcctgacctccacaaccacagtatctaccgactcgccgtcatgtccgtttccgaggccgcttatccaccgccgcccccgtcctcatgggcacaacagatccgcgcggccgctgccgagggccacttctgcgacgctgtctccctcttcctccggatgcgcgcctccgccgcgccacgctcgtctgtcccggcctcactcccggccgcgctcaagtcctgtgccgccctaggcctgagcgccctcggcgcctccctccatgcgctggccatccgctccggtgcattcgccgaccgttttaccgccaatgccctcctcaacctctactgcaaggtcccgtgttcgtatctcgactccactggtgtggccatagtggatgtacccggatcatcaaccgcatttgagagcgtgcggaaggtgttcgacgaaatgatcgagagggacgtggtgtcctggaacactttggtgctgggctgcgcggaggaagggaggcaccatgaagcactggggtttgtcaggaagatgtgcagggaagggtttaggcctgactcgttcaccttatccactgtgctcccaatcttcgcggagtgtgctgatgtcaagagaggcttggaggtgcatggttttgccttcaggaatgggtttgatagcgatgtgttcgttggcagtagcctgatcgatatgtatgcgaattgtacaaggacggattattctgtcaaagtgtttgacaacctcccggtacgagaccatattctgtggaactccctgcttgcaggttgtgcacaaaatggttcagttgaggaggcccttggaatattccgtcggatgctgcaggctggtgttagacctgtgcccgtgactttctcgagcctcatacctgtctgtggtaatttggcatcattgcgcttcgggaagcagctgcacgcctatgtgatctgtggtgggtttgaagataacgtgtttatatctagctccctgattgacatgtactgcaaatgtggggagattagcattgcccattgcatatttgacaagatgagttcaccagacgttgtatcgtggactgcgatgatcatggggtatgcattgcatggtccagcaagagaggcacttgtgctgtttgagagaatggaactgggaaatgcaaagcctaaccatatcacctttcttgcggttctgactgcatgtagtcatgctggcttagtggataagggctggaaatatttcaagagtatgtcaaatcattatggaattgttcctactctagagcattttgcagcgcttgctgacacccttggtcgtgcaggagagttagacgaagcatataattttatatcgaagatgcaaataaaaccaactgcgagtgtctggtccacattgttaagggcttgcagggtccataaaaataccatgttagctgaggaagtagccaagaaaataatggagcttgaacctaggagcattgggtctcatgtagtattgtcaaatatgtattcagcttctgggagatggaatgaagcagcacacctacgagaatccatgagaaaaaagggtatgaagaaggatccagcttgtagttggattgaagtgaagagcaaactgcatgtctttgtagctcatgataggtcccacccttggtatgacaggattattgatgcactgaatgctttctcagagcagatggcacgcgaaggtcatgtacccaatacagaggatgttttccaggatattgaagaagagcacaagtcatatgtgttatgtggtcacagtgagaaacttgctatagtgtttggtattataagcacgcctgctggaacaaaaattcgtgtgatgaagaatctccgagtctgtattgattgccacacagtaactaaatttatttcaaagttagctgatagggagattgtggtgcgtgatgcaaaccgtttccaccactttaaggatggaaactgttcctgcggggacttttggtgatcgggtaaccacttgggattatcatatgtgttgcgatataaagtgaattgcttatttttctccatctacttaagcttttgagttgaattggtcggatcatgcaatgagttccaatcattgcgagaacattagagccatctgaacactatatgttcttactctttgattatattaagtttcatctgcttttgatgccagttctgcaatccatcaaagtactagctacagtgtgctcaatttctcaaattatgttttcattgttgaatcatggtcaccttatccccaccttgcataaagaataaagaaagattgtgaagatacagaaaaaaaaaatcgtcattctcatttggtggaaggacaatgcacacagattgtcgcttttggttcacatggcccaggatgtccttgcaataccaatatcaacagtagctttagagtccgtcttcagcacaagtggatgtattttggaagactttcgtacctcccttactctattcatgttggaggtccttgtatgtacccaagattggccccgaaggtctactcccattgacatacaagataatattgaggaattggccattatagaaaaagagctaattgaagaatttggtaatggtggcaaaggaaaaattaaggagtctgcttccacttccaagtctcaagcaacagcaactagcagtaggtgcctctccaaaggtatatatattttgttgtatgagcccataactgtttactggtatgactatgagcgcatgactgtttattgctatgagctgcactgtttacttatactccatccgtttctttttaattgtcgctggatagttcaattttgcactatccagcgacaactaaaacgaaacggagggagtatatattttgcttcaacctgtgtatgttggacagaatgacaggataactggataataagtgtgctgtgtgcaaccggtgctgcctgtgtgtctgtgcatgtccacgtccccctttggcgttggcgatctccctgtctccctgtgtgcaagtgcaacactggaagtctgcaataggtgctggcgtgctgcactgctgcctctgtcgactgtgtctttgtctgtgtgtgcatgagccatatccctgtctctatttggctttggcgtcttgggctcttggatcttggcgaattgcgattggcgatgtccctgtctccctgtgagtgtgtgcaaccggtaatagcagtagcactactgcagagaacctgaatgtatttttcatgctgccagcctgccagtctatgaactatgatcaatgtgaatcaaaactttgtattcaaatttatgagttaaatttgtgagttagaacttagaatggctaagtgacattcttcgtatgtttttcaaaaatgttaatcagaactttgtatgcttccactttaaataggcagttaatgtggataaaatcaatttggctaccgggagtacccatgcccagtcctgcccgtgtagagcgcaccgtgtcggggcatcgagcacgcgtgcgacaggtggcgcggcgctcgagcgcggagccggggcgtcgagtgcgtagtgttggtcgacctcgaccacaacttctggcgacgaccgacgagggcacattgtggagggtgccgggttgctggctgcaggcactgggtacaccaaatgagcagctcgtggtggaggcccatgattccagggaagtgcagcacattctggactgtggtctgtggagagtggagacgggagaccgccattctttttcttcagcatggagccaccacaacaatgtaccggtacttagttcgtccatttttttgtcattcggtataccttggtaacaggtatgatccgcagtgtgtaattgttgtgacatcagagttagatctgaaaggcatatatattgaaactaccgcggtaataatcccgatcagcatgattattccggtggtatgctatactataccctgtagtctgtagctgtacccagtacgag

SEQ ID NO: 24609 - DNA, 3826 bp, Zea Mays
gtcagatgtagccaccgcctgacctccacaaccacagtatctaccgactcgccgtcatgtccgtttccgaggccgcttatccaccgccgcccccgtcctcatgggcacaacagatccgcgcggccgctgccgagggccacttctgcgacgctgtctccctcttcctccggatgcgcgcctccgccgcgccacgctcgtctgtcccggcctcactcccggccgcgctcaagtcctgtgccgccctaggcctgagcgccctcggcgcctccctccatgcgctggccatccgctccggtgcattcgccgaccgttttaccgccaatgccctcctcaacctctactgcaaggtcccgtgttcgtatctcgactccactggtgtggccatagtggatgtacccggatcatcaaccgcatttgagagcgtgcggaaggtgttcgacgaaatgatcgagagggacgtggtgtcctggaacactttggtgctgggctgcgcggaggaagggaggcaccatgaagcactggggtttgtcaggaagatgtgcagggaagggtttaggcctgactcgttcaccttatccactgtgctcccaatcttcgcggagtgtgctgatgtcaagagaggcttggaggtgcatggttttgccttcaggaatgggtttgatagcgatgtgttcgttggcagtagcctgatcgatatgtatgcgaattgtacaaggacggattattctgtcaaagtgtttgacaacctcccggtacgagaccatattctgtggaactccctgcttgcaggttgtgcacaaaatggttcagttgaggaggcccttggaatattccgtcggatgctgcaggctggtgttagacctgtgcccgtgactttctcgagcctcatacctgtctgtggtaatttggcatcattgcgcttcgggaagcagctgcacgcctatgtgatctgtggtgggtttgaagataacgtgtttatatctagctccctgattgacatgtactgcaaatgtggggagattagcattgcccattgcatatttgacaagatgagttcaccagacgttgtatcgtggactgcgatgatcatggggtatgcattgcatggtccagcaagagaggcacttgtgctgtttgagagaatggaactgggaaatgcaaagcctaaccatatcacctttcttgcggttctgactgcatgtagtcatgctggcttagtggataagggctggaaatatttcaagagtatgtcaaatcattatggaattgttcctactctagagcattttgcagcgcttgctgacacccttggtcgtgcaggagagttagacgaagcatataattttatatcgaagatgcaaataaaaccaactgcgagtgtctggtccacattgttaagggcttgcagggtccataaaaataccatgttagctgaggaagtagccaagaaaataatggagcttgaacctaggagcattgggtctcatgtagtattgtcaaatatgtattcagcttctgggagatggaatgaagcagcacacctacgagaatccatgagaaaaaagggtatgaagaaggatccagcttgtagttggattgaagtgaagagcaaactgcatgtctttgtagctcatgataggtcccacccttggtatgacaggattattgatgcactgaatgctttctcagagcagatggcacgcgaaggtcatgtacccaatacagaggatgttttccaggatattgaagaagagcacaagtcatatgtgttatgtggtcacagtgagaaacttgctatagtgtttggtattataagcacgcctgctggaacaaaaattcgtgtgatgaagaatctccgagtctgtattgattgccacacagtaactaaatttatttcaaagttagctgatagggagattgtggtgcgtgatgcaaaccgtttccaccactttaaggatggaaactgttcctgcggggacttttggtgatcgggtaaccacttgggattatcatatgtgttgcgatataaagtgaattgcttatttttctccatctacttaagcttttgagttgaattggtcggatcatgcaatgagttccaatcattgcgagaacattagagccatctgaacactatatgttcttactctttgattatattaagtttcatctgcttttgatgccagttctgcaatccatcaaagtactagctacagtgtgctcaatttctcaaattatgttttcattgttgaatcatggtcaccttatccccaccttgcataaagaataaagaaagattgtcgcttttggttcacatggcccaggatgtccttgcaataccaatatcaacagtagctttagagtccgtcttcagcacaagtggatgtattttggaagactttcgtacctcccttactctattcatgttggaggtccttgtatgtacccaagattggccccgaaggtctactcccattgacatacaagataatattgaggaattggccattatagaaaaagagctaattgaagaatttggtaatggtggcaaaggaaaaattaaggagtctgcttccacttccaagtctcaagcaacagcaactagcagtaggtgcctctccaaagaatgacaggataactggataataagtgtgctgtgtgcaaccggtgctgcctgtgtgtctgtgcatgtccacgtccccctttggcgttggcgatctccctgtctccctgtgtgcaagtgcaacactggaagtctgcaataggtgctggcgtgctgcactgctgcctctgtcgactgtgtctttgtctgtgtgtgcatgagccatatccctgtctctatttggctttggcgtcttgggctcttggatcttggcgaattgcgattggcgatgtccctgtctccctgtgagtgtgtgcaaccggtaatagcagtagcactactgcagagaacctgaatgtatttttcatgctgccagcctgccagtctatgaactatgatcaatgtgaatcaaaactttgtattcaaatttatgagttaaatttgtgagttagaacttagaatggctaagtgacattcttcgtatgtttttcaaaaatgttaatcagaactttgtatgcttccactttaaataggcagttaatgtggataaaatcaatttggctaccgggagtacccatgcccagtcctgcccgtgtagagcgcaccgtgtcggggcatcgagcacgcgtgcgacaggtggcgcggcgctcgagcgcggagccggggcgtcgagtgcgtagtgttggtcgacctcgaccacaacttctggcgacgaccgacgagggcacattgtggagggtgccgggttgctggctgcaggcactgatactagtcaaggattgatgaagtcaaccttcatccaaggtggtatgtgaacctggggcaaagcggagaagcttgatcttcgaggggttcacatacgaacgaagtcgggtatggaggcttcgacttcatgtcatcactatgcgaagcaggcgacaaaggagagatattccaaaagcccggctattgcgacggatacaagaaaagacgatttcgcccccacaagtgttatggatcatgtaaataggacttttgggcatctttgtaattttgccttcatacaaagttatacctcaccactataaatagagaaacagtcccatacattacgtacacgttgttgatcaatgtattctgaaaccactctgccttcgaaggtgtttttcgttacctttgaactcctctttgtaaagctgaaggtatctttgtaattatttgtaagtaaaaaaaagagaagctgag

SEQ ID NO: 24610 - DNA, 4253 bp, Zea Mays
gtcagatgtagccaccgcctgacctccacaaccacagtatctaccgactcgccgtcatgtccgtttccgaggccgcttatccaccgccgcccccgtcctcatgggcacaacagatccgcgcggccgctgccgagggccacttctgcgacgctgtctccctcttcctccggatgcgcgcctccgccgcgccacgctcgtctgtcccggcctcactcccggccgcgctcaagtcctgtgccgccctaggcctgagcgccctcggcgcctccctccatgcgctggccatccgctccggtgcattcgccgaccgttttaccgccaatgccctcctcaacctctactgcaaggtcccgtgttcgtatctcgactccactggtgtggccatagtggatgtacccggatcatcaaccgcatttgagagcgtgcggaaggtgttcgacgaaatgatcgagagggacgtggtgtcctggaacactttggtgctgggctgcgcggaggaagggaggcaccatgaagcactggggtttgtcaggaagatgtgcagggaagggtttaggcctgactcgttcaccttatccactgtgctcccaatcttcgcggagtgtgctgatgtcaagagaggcttggaggtgcatggttttgccttcaggaatgggtttgatagcgatgtgttcgttggcagtagcctgatcgatatgtatgcgaattgtacaaggacggattattctgtcaaagtgtttgacaacctcccggtacgagaccatattctgtggaactccctgcttgcaggttgtgcacaaaatggttcagttgaggaggcccttggaatattccgtcggatgctgcaggctggtgttagacctgtgcccgtgactttctcgagcctcatacctgtctgtggtaatttggcatcattgcgcttcgggaagcagctgcacgcctatgtgatctgtggtgggtttgaagataacgtgtttatatctagctccctgattgacatgtactgcaaatgtggggagattagcattgcccattgcatatttgacaagatgagttcaccagacgttgtatcgtggactgcgatgatcatggggtatgcattgcatggtccagcaagagaggcacttgtgctgtttgagagaatggaactgggaaatgcaaagcctaaccatatcacctttcttgcggttctgactgcatgtagtcatgctggcttagtggataagggctggaaatatttcaagagtatgtcaaatcattatggaattgttcctactctagagcattttgcagcgcttgctgacacccttggtcgtgcaggagagttagacgaagcatataattttatatcgaagatgcaaataaaaccaactgcgagtgtctggtccacattgttaagggcttgcagggtccataaaaataccatgttagctgaggaagtagccaagaaaataatggagcttgaacctaggagcattgggtctcatgtagtattgtcaaatatgtattcagcttctgggagatggaatgaagcagcacacctacgagaatccatgagaaaaaagggtatgaagaaggatccagcttgtagttggattgaagtgaagagcaaactgcatgtctttgtagctcatgataggtcccacccttggtatgacaggattattgatgcactgaatgctttctcagagcagatggcacgcgaaggtcatgtacccaatacagaggatgttttccaggatattgaagaagagcacaagtcatatgtgttatgtggtcacagtgagaaacttgctatagtgtttggtattataagcacgcctgctggaacaaaaattcgtgtgatgaagaatctccgagtctgtattgattgccacacagtaactaaatttatttcaaagttagctgatagggagattgtggtgcgtgatgcaaaccgtttccaccactttaaggatggaaactgttcctgcggggacttttggtgatcgggtaaccacttgggattatcatatgtgttgcgatataaagtgaattgcttatttttctccatctacttaagcttttgagttgaattggtcggatcatgcaatgagttccaatcattgcgagaacattagagccatctgaacactatatgttcttactctttgattatattaagtttcatctgcttttgatgccagttctgcaatccatcaaagtactagctacagtgtgctcaatttctcaaattatgttttcattgttgaatcatggtcaccttatccccaccttgcataaagaataaagaaaggtatggattcttgaagtgtgcttaaatagttaatcatccaacctcagtgtccaccttgacagtggtaaacactgaatgatagcaccaatacccatactatattaaatgtagcatcaccttgcattgtgtagctgtattgaatgtagcaccaacactcatacttgtaatcatttgactgagtgagcaccctgcagcaatctttttctgaatcaagatctttcatgggctgttatctcagtttcttctcatgtttgaccatatgctcataacatttgctccctccgttcacaaatatattatgccgttgatttttttctaaaactttgacaactcgtcgtatttacttgacaaatatttatctgaagattgtgaagatacagaaaaaaaaaatcgtcattctcatttggtggaaggacaatgcacacagattgtcgcttttggttcacatggcccaggatgtccttgcaataccaatatcaacagtagctttagagtccgtcttcagcacaagtggatgtattttggaagactttcgtacctcccttactctattcatgttggaggtccttgtatgtacccaagattggccccgaaggtctactcccattgacatacaagataatattgaggaattggccattatagaaaaagagctaattgaagaatttggtaatggtggcaaaggaaaaattaaggagtctgcttccacttccaagtctcaagcaacagcaactagcagtaggtgcctctccaaagaatgacaggataactggataataagtgtgctgtgtgcaaccggtgctgcctgtgtgtctgtgcatgtccacgtccccctttggcgttggcgatctccctgtctccctgtgtgcaagtgcaacactggaagtctgcaataggtgctggcgtgctgcactgctgcctctgtcgactgtgtctttgtctgtgtgtgcatgagccatatccctgtctctatttggctttggcgtcttgggctcttggatcttggcgaattgcgattggcgatgtccctgtctccctgtgagtgtgtgcaaccggtaatagcagtagcactactgcagagaacctgaatgtatttttcatgctgccagcctgccagtctatgaactatgatcaatgtgaatcaaaactttgtattcaaatttatgagttaaatttgtgagttagaacttagaatggctaagtgacattcttcgtatgtttttcaaaaatgttaatcagaactttgtatgcttccactttaaataggcagttaatgtggataaaatcaatttggctaccgggagtacccatgcccagtcctgcccgtgtagagcgcaccgtgtcggggcatcgagcacgcgtgcgacaggtggcgcggcgctcgagcgcggagccggggcgtcgagtgcgtagtgttggtcgacctcgaccacaacttctggcgacgaccgacgagggcacattgtggagggtgccgggttgctggctgcaggcactgatactagtcaaggattgatgaagtcaaccttcatccaaggtggtatgtgaacctggggcaaagcggagaagcttgatcttcgaggggttcacatacgaacgaagtcgggtatggaggcttcgacttcatgtcatcactatgcgaagcaggcgacaaaggagagatattccaaaagcccggctattgcgacggatacaagaaaagacgatttcgcccccacaagtgttatggatcatgtaaataggacttttgggcatctttgtaattttgccttcatacaaagttatacctcaccactataaatagagaaacagtcccatacattacgtacacgttgttgatcaatgtattctgaaaccactctgccttcgaaggtgtttttcgttacctttgaactcctctttgtaaagctgaaggtatctttgtaattatttgtaagtaaaaaaaagagaagctgag

SEQ ID NO: 24611 - DNA, 3892 bp, Zea Mays
cacggtcagatgtagccaccgcctgacctccacaaccacagtatctaccgactcgccgtcatgtccgtttccgaggccgcttatccaccgccgcccccgtcctcatgggcacaacagatccgcgcggccgctgccgagggccacttctgcgacgctgtctccctcttcctccggatgcgcgcctccgccgcgccacgctcgtctgtcccggcctcactcccggccgcgctcaagtcctgtgccgccctaggcctgagcgccctcggcgcctccctccatgcgctggccatccgctccggtgcattcgccgaccgttttaccgccaatgccctcctcaacctctactgcaaggtcccgtgttcgtatctcgactccactggtgtggccatagtggatgtacccggatcatcaaccgcatttgagagcgtgcggaaggtgttcgacgaaatgatcgagagggacgtggtgtcctggaacactttggtgctgggctgcgcggaggaagggaggcaccatgaagcactggggtttgtcaggaagatgtgcagggaagggtttaggcctgactcgttcaccttatccactgtgctcccaatcttcgcggagtgtgctgatgtcaagagaggcttggaggtgcatggttttgccttcaggaatgggtttgatagcgatgtgttcgttggcagtagcctgatcgatatgtatgcgaattgtacaaggacggattattctgtcaaagtgtttgacaacctcccggtacgagaccatattctgtggaactccctgcttgcaggttgtgcacaaaatggttcagttgaggaggcccttggaatattccgtcggatgctgcaggctggtgttagacctgtgcccgtgactttctcgagcctcatacctgtctgtggtaatttggcatcattgcgcttcgggaagcagctgcacgcctatgtgatctgtggtgggtttgaagataacgtgtttatatctagctccctgattgacatgtactgcaaatgtggggagattagcattgcccattgcatatttgacaagatgagttcaccagacgttgtatcgtggactgcgatgatcatggggtatgcattgcatggtccagcaagagaggcacttgtgctgtttgagagaatggaactgggaaatgcaaagcctaaccatatcacctttcttgcggttctgactgcatgtagtcatgctggcttagtggataagggctggaaatatttcaagagtatgtcaaatcattatggaattgttcctactctagagcattttgcagcgcttgctgacacccttggtcgtgcaggagagttagacgaagcatataattttatatcgaagatgcaaataaaaccaactgcgagtgtctggtccacattgttaagggcttgcagggtccataaaaataccatgttagctgaggaagtagccaagaaaataatggagcttgaacctaggagcattgggtctcatgtagtattgtcaaatatgtattcagcttctgggagatggaatgaagcagcacacctacgagaatccatgagaaaaaagggtatgaagaaggatccagcttgtagttggattgaagtgaagagcaaactgcatgtctttgtagctcatgataggtcccacccttggtatgacaggattattgatgcactgaatgctttctcagagcagatggcacgcgaaggtcatgtacccaatacagaggatgttttccaggatattgaagaagagcacaagtcatatgtgttatgtggtcacagtgagaaacttgctatagtgtttggtattataagcacgcctgctggaacaaaaattcgtgtgatgaagaatctccgagtctgtattgattgccacacagtaactaaatttatttcaaagttagctgatagggagattgtggtgcgtgatgcaaaccgtttccaccactttaaggatggaaactgttcctgcggggacttttggtgatcgggtaaccacttgggattatcatatgtgttgcgatataaagtgaattgcttatttttctccatctacttaagcttttgagttgaattggtcggatcatgcaatgagttccaatcattgcgagaacattagagccatctgaacactatatgttcttactctttgattatattaagtttcatctgcttttgatgccagttctgcaatccatcaaagtactagctacagtgtgctcaatttctcaaattatgttttcattgttgaatcatggtcaccttatccccaccttgcataaagaataaagaaagattgtgaagatacagaaaaaaaaaatcgtcattctcatttggtggaaggacaatgcacacagattgtcgcttttggttcacatggcccaggatgtccttgcaataccaatatcaacagtagctttagagtccgtcttcagcacaagtggatgtattttggaagactttcgtacctcccttactctattcatgttggaggtccttgtatgtacccaagattggccccgaaggtctactcccattgacatacaagataatattgaggaattggccattatagaaaaagagctaattgaagaatttggtaatggtggcaaaggaaaaattaaggagtctgcttccacttccaagtctcaagcaacagcaactagcagtaggtgcctctccaaagaatgacaggataactggataataagtgtgctgtgtgcaaccggtgctgcctgtgtgtctgtgcatgtccacgtccccctttggcgttggcgatctccctgtctccctgtgtgcaagtgcaacactggaagtctgcaataggtgctggcgtgctgcactgctgcctctgtcgactgtgtctttgtctgtgtgtgcatgagccatatccctgtctctatttggctttggcgtcttgggctcttggatcttggcgaattgcgattggcgatgtccctgtctccctgtgagtgtgtgcaaccggtaatagcagtagcactactgcagagaacctgaatgtatttttcatgctgccagcctgccagtctatgaactatgatcaatgtgaatcaaaactttgtattcaaatttatgagttaaatttgtgagttagaacttagaatggctaagtgacattcttcgtatgtttttcaaaaatgttaatcagaactttgtatgcttccactttaaataggcagttaatgtggataaaatcaatttggctaccgggagtacccatgcccagtcctgcccgtgtagagcgcaccgtgtcggggcatcgagcacgcgtgcgacaggtggcgcggcgctcgagcgcggagccggggcgtcgagtgcgtagtgttggtcgacctcgaccacaacttctggcgacgaccgacgagggcacattgtggagggtgccgggttgctggctgcaggcactgatactagtcaaggattgatgaagtcaaccttcatccaaggtggtatgtgaacctggggcaaagcggagaagcttgatcttcgaggggttcacatacgaacgaagtcgggtatggaggcttcgacttcatgtcatcactatgcgaagcaggcgacaaaggagagatattccaaaagcccggctattgcgacggatacaagaaaagacgatttcgcccccacaagtgttatggatcatgtaaataggacttttgggcatctttgtaattttgccttcatacaaagttatacctcaccactataaatagagaaacagtcccatacattacgtacacgttgttgatcaatgtattctgaaaccactctgccttcgaaggtgtttttcgttacctttgaactcctctttgtaaagctgaaggtatctttgtaattatttgtaagtaaaaaaaagagaagctgag

SEQ ID NO: 24612 - DNA, 4480 bp, Zea Mays
ctgactttgcccgcacggtcagatgtagccaccgcctgacctccacaaccacagtatctaccgactcgccgtcatgtccgtttccgaggccgcttatccaccgccgcccccgtcctcatgggcacaacagatccgcgcggccgctgccgagggccacttctgcgacgctgtctccctcttcctccggatgcgcgcctccgccgcgccacgctcgtctgtcccggcctcactcccggccgcgctcaagtcctgtgccgccctaggcctgagcgccctcggcgcctccctccatgcgctggccatccgctccggtgcattcgccgaccgttttaccgccaatgccctcctcaacctctactgcaaggtcccgtgttcgtatctcgactccactggtgtggccatagtggatgtacccggatcatcaaccgcatttgagagcgtgcggaaggtgttcgacgaaatgatcgagagggacgtggtgtcctggaacactttggtgctgggctgcgcggaggaagggaggcaccatgaagcactggggtttgtcaggaagatgtgcagggaagggtttaggcctgactcgttcaccttatccactgtgctcccaatcttcgcggagtgtgctgatgtcaagagaggcttggaggtgcatggttttgccttcaggaatgggtttgatagcgatgtgttcgttggcagtagcctgatcgatatgtatgcgaattgtacaaggacggattattctgtcaaagtgtttgacaacctcccggtacgagaccatattctgtggaactccctgcttgcaggttgtgcacaaaatggttcagttgaggaggcccttggaatattccgtcggatgctgcaggctggtgttagacctgtgcccgtgactttctcgagcctcatacctgtctgtggtaatttggcatcattgcgcttcgggaagcagctgcacgcctatgtgatctgtggtgggtttgaagataacgtgtttatatctagctccctgattgacatgtactgcaaatgtggggagattagcattgcccattgcatatttgacaagatgagttcaccagacgttgtatcgtggactgcgatgatcatggggtatgcattgcatggtccagcaagagaggcacttgtgctgtttgagagaatggaactgggaaatgcaaagcctaaccatatcacctttcttgcggttctgactgcatgtagtcatgctggcttagtggataagggctggaaatatttcaagagtatgtcaaatcattatggaattgttcctactctagagcattttgcagcgcttgctgacacccttggtcgtgcaggagagttagacgaagcatataattttatatcgaagatgcaaataaaaccaactgcgagtgtctggtccacattgttaagggcttgcagggtccataaaaataccatgttagctgaggaagtagccaagaaaataatggagcttgaacctaggagcattgggtctcatgtagtattgtcaaatatgtattcagcttctgggagatggaatgaagcagcacacctacgagaatccatgagaaaaaagggtatgaagaaggatccagcttgtagttggattgaagtgaagagcaaactgcatgtctttgtagctcatgataggtcccacccttggtatgacaggattattgatgcactgaatgctttctcagagcagatggcacgcgaaggtcatgtacccaatacagaggatgttttccaggatattgaagaagagcacaagtcatatgtgttatgtggtcacagtgagaaacttgctatagtgtttggtattataagcacgcctgctggaacaaaaattcgtgtgatgaagaatctccgagtctgtattgattgccacacagtaactaaatttatttcaaagttagctgatagggagattgtggtgcgtgatgcaaaccgtttccaccactttaaggatggaaactgttcctgcggggacttttggtgatcgggtaaccacttgggattatcatatgtgttgcgatataaagtgaattgcttatttttctccatctacttaagcttttgagttgaattggtcggatcatgcaatgagttccaatcattgcgagaacattagagccatctgaacactatatgttcttactctttgattatattaagtttcatctgcttttgatgccagttctgcaatccatcaaagtactagctacagtgtgctcaatttctcaaattatgttttcattgttgaatcatggtcaccttatccccaccttgcataaagaataaagaaaggtatggattcttgaagtgtgcttaaatagttaatcatccaacctcagtgtccaccttgacagtggtaaacactgaatgatagcaccaatacccatactatattaaatgtagcatcaccttgcattgtgtagctgtattgaatgtagcaccaacactcatacttgtaatcatttgactgagtgagcaccctgcagcaatctttttctgaatcaagatctttcatgggctgttatctcagtttcttctcatgtttgaccatatgctcataacatttgctccctccgttcacaaatatattatgccgttgatttttttctaaaactttgacaactcgtcgtatttacttgacaaatatttatctgaagattgtgaagatacagaaaaaaaaaatcgtcattctcatttggtggaaggacaatgcacacagattgtcgcttttggttcacatggcccaggatgtccttgcaataccaatatcaacagtagctttagagtccgtcttcagcacaagtggatgtattttggaagactttcgtacctcccttactctattcatgttggaggtccttgtatgtacccaagattggccccgaaggtctactcccattgacatacaagataatattgaggaattggccattatagaaaaagagctaattgaagaatttggtaatggtggcaaaggaaaaattaaggagtctgcttccacttccaagtctcaagcaacagcaactagcagtaggtgcctctccaaaggtatatatattttgttgtatgagcccataactgtttactggtatgactatgagcgcatgactgtttattgctatgagctgcactgtttacttatactccatccgtttctttttaattgtcgctggatagttcaattttgcactatccagcgacaactaaaacgaaacggagggagtatatattttgcttcaacctgtgtatgttggacagaatgacaggataactggataataagtgtgctgtgtgcaaccggtgctgcctgtgtgtctgtgcatgtccacgtccccctttggcgttggcgatctccctgtctccctgtgtgcaagtgcaacactggaagtctgcaataggtgctggcgtgctgcactgctgcctctgtcgactgtgtctttgtctgtgtgtgcatgagccatatccctgtctctatttggctttggcgtcttgggctcttggatcttggcgaattgcgattggcgatgtccctgtctccctgtgagtgtgtgcaaccggtaatagcagtagcactactgcagagaacctgaatgtatttttcatgctgccagcctgccagtctatgaactatgatcaatgtgaatcaaaactttgtattcaaatttatgagttaaatttgtgagttagaacttagaatggctaagtgacattcttcgtatgtttttcaaaaatgttaatcagaactttgtatgcttccactttaaataggcagttaatgtggataaaatcaatttggctaccgggagtacccatgcccagtcctgcccgtgtagagcgcaccgtgtcggggcatcgagcacgcgtgcgacaggtggcgcggcgctcgagcgcggagccggggcgtcgagtgcgtagtgttggtcgacctcgaccacaacttctggcgacgaccgacgagggcacattgtggagggtgccgggttgctggctgcaggcactgatactagtcaaggattgatgaagtcaaccttcatccaaggtggtatgtgaacctggggcaaagcggagaagcttgatcttcgaggggttcacatacgaacgaagtcgggtatggaggcttcgacttcatgtcatcactatgcgaagcaggcgacaaaggagagatattccaaaagcccggctattgcgacggatacaagaaaagacgatttcgcccccacaagtgttatggatcatgtaaataggacttttgggcatctttgtaattttgccttcatacaaagttatacctcaccactataaatagagaaacagtcccatacattacgtacacgttgttgatcaatgtattctgaaaccactctgccttcgaaggtgtttttcgttacctttgaactcctctttgtaaagctgaaggtatctttgtaattatttgtaagtaaaaaaaagagaagctgag

SEQ ID NO: 24613 - DNA, 4115 bp, Zea Mays
ctgactttgcccgcacggtcagatgtagccaccgcctgacctccacaaccacagtatctaccgactcgccgtcatgtccgtttccgaggccgcttatccaccgccgcccccgtcctcatgggcacaacagatccgcgcggccgctgccgagggccacttctgcgacgctgtctccctcttcctccggatgcgcgcctccgccgcgccacgctcgtctgtcccggcctcactcccggccgcgctcaagtcctgtgccgccctaggcctgagcgccctcggcgcctccctccatgcgctggccatccgctccggtgcattcgccgaccgttttaccgccaatgccctcctcaacctctactgcaaggtcccgtgttcgtatctcgactccactggtgtggccatagtggatgtacccggatcatcaaccgcatttgagagcgtgcggaaggtgttcgacgaaatgatcgagagggacgtggtgtcctggaacactttggtgctgggctgcgcggaggaagggaggcaccatgaagcactggggtttgtcaggaagatgtgcagggaagggtttaggcctgactcgttcaccttatccactgtgctcccaatcttcgcggagtgtgctgatgtcaagagaggcttggaggtgcatggttttgccttcaggaatgggtttgatagcgatgtgttcgttggcagtagcctgatcgatatgtatgcgaattgtacaaggacggattattctgtcaaagtgtttgacaacctcccggtacgagaccatattctgtggaactccctgcttgcaggttgtgcacaaaatggttcagttgaggaggcccttggaatattccgtcggatgctgcaggctggtgttagacctgtgcccgtgactttctcgagcctcatacctgtctgtggtaatttggcatcattgcgcttcgggaagcagctgcacgcctatgtgatctgtggtgggtttgaagataacgtgtttatatctagctccctgattgacatgtactgcaaatgtggggagattagcattgcccattgcatatttgacaagatgagttcaccagacgttgtatcgtggactgcgatgatcatggggtatgcattgcatggtccagcaagagaggcacttgtgctgtttgagagaatggaactgggaaatgcaaagcctaaccatatcacctttcttgcggttctgactgcatgtagtcatgctggcttagtggataagggctggaaatatttcaagagtatgtcaaatcattatggaattgttcctactctagagcattttgcagcgcttgctgacacccttggtcgtgcaggagagttagacgaagcatataattttatatcgaagatgcaaataaaaccaactgcgagtgtctggtccacattgttaagggcttgcagggtccataaaaataccatgttagctgaggaagtagccaagaaaataatggagcttgaacctaggagcattgggtctcatgtagtattgtcaaatatgtattcagcttctgggagatggaatgaagcagcacacctacgagaatccatgagaaaaaagggtatgaagaaggatccagcttgtagttggattgaagtgaagagcaaactgcatgtctttgtagctcatgataggtcccacccttggtatgacaggattattgatgcactgaatgctttctcagagcagatggcacgcgaaggtcatgtacccaatacagaggatgttttccaggatattgaagaagagcacaagtcatatgtgttatgtggtcacagtgagaaacttgctatagtgtttggtattataagcacgcctgctggaacaaaaattcgtgtgatgaagaatctccgagtctgtattgattgccacacagtaactaaatttatttcaaagttagctgatagggagattgtggtgcgtgatgcaaaccgtttccaccactttaaggatggaaactgttcctgcggggacttttggtgatcgggtaaccacttgggattatcatatgtgttgcgatataaagtgaattgcttatttttctccatctacttaagcttttgagttgaattggtcggatcatgcaatgagttccaatcattgcgagaacattagagccatctgaacactatatgttcttactctttgattatattaagtttcatctgcttttgatgccagttctgcaatccatcaaagtactagctacagtgtgctcaatttctcaaattatgttttcattgttgaatcatggtcaccttatccccaccttgcataaagaataaagaaagattgtgaagatacagaaaaaaaaaatcgtcattctcatttggtggaaggacaatgcacacagattgtcgcttttggttcacatggcccaggatgtccttgcaataccaatatcaacagtagctttagagtccgtcttcagcacaagtggatgtattttggaagactttcgtacctcccttactctattcatgttggaggtccttgtatgtacccaagattggccccgaaggtctactcccattgacatacaagataatattgaggaattggccattatagaaaaagagctaattgaagaatttggtaatggtggcaaaggaaaaattaaggagtctgcttccacttccaagtctcaagcaacagcaactagcagtaggtgcctctccaaaggtatatatattttgttgtatgagcccataactgtttactggtatgactatgagcgcatgactgtttattgctatgagctgcactgtttacttatactccatccgtttctttttaattgtcgctggatagttcaattttgcactatccagcgacaactaaaacgaaacggagggagtatatattttgcttcaacctgtgtatgttggacagaatgacaggataactggataataagtgtgctgtgtgcaaccggtgctgcctgtgtgtctgtgcatgtccacgtccccctttggcgttggcgatctccctgtctccctgtgtgcaagtgcaacactggaagtctgcaataggtgctggcgtgctgcactgctgcctctgtcgactgtgtctttgtctgtgtgtgcatgagccatatccctgtctctatttggctttggcgtcttgggctcttggatcttggcgaattgcgattggcgatgtccctgtctccctgtgagtgtgtgcaaccggtaatagcagtagcactactgcagagaacctgaatgtatttttcatgctgccagcctgccagtctatgaactatgatcaatgtgaatcaaaactttgtattcaaatttatgagttaaatttgtgagttagaacttagaatggctaagtgacattcttcgtatgtttttcaaaaatgttaatcagaactttgtatgcttccactttaaataggcagttaatgtggataaaatcaatttggctaccgggagtacccatgcccagtcctgcccgtgtagagcgcaccgtgtcggggcatcgagcacgcgtgcgacaggtggcgcggcgctcgagcgcggagccggggcgtcgagtgcgtagtgttggtcgacctcgaccacaacttctggcgacgaccgacgagggcacattgtggagggtgccgggttgctggctgcaggcactgatactagtcaaggattgatgaagtcaaccttcatccaaggtggtatgtgaacctggggcaaagcggagaagcttgatcttcgaggggttcacatacgaacgaagtcgggtatggaggcttcgacttcatgtcatcactatgcgaagcaggcgacaaaggagagatattccaaaagcccggctattgcgacggatacaagaaaagacgatttcgcccccacaagtgttatggatcatgtaaataggacttttgggcatctttgtaattttgccttcatacaaagttatacctcaccactataaatagagaaacagtcccatacattacgtacacgttgttgatcaatgtattctgaaaccactctgccttcgaaggtgtttttcgttacctttgaactcctctttgtaaagctgaaggtatctttgtaattatttgtaagtaaaaaaaagagaagctgag

SEQ ID NO: 24614 - DNA, 3029 bp, Zea Mays
ctcgccgtcatgtccgtttccgaggccgcttatccaccgccgcccccgtcctcatgggcacaacagatccgcgcggccgctgccgagggccacttctgcgacgctgtctccctcttcctccggatgcgcgcctccgccgcgccacgctcgtctgtcccggcctcactcccggccgcgctcaagtcctgtgccgccctaggcctgagcgccctcggcgcctccctccatgcgctggccatccgctccggtgcattcgccgaccgttttaccgccaatgccctcctcaacctctactgcaaggtcccgtgttcgtatctcgactccactggtgtggccatagtggatgtacccggatcatcaaccgcatttgagagcgtgcggaaggtgttcgacgaaatgatcgagagggacgtggtgtcctggaacactttggtgctgggctgcgcggaggaagggaggcaccatgaagcactggggtttgtcaggaagatgtgcagggaagggtttaggcctgactcgttcaccttatccactgtgctcccaatcttcgcggagtgtgctgatgtcaagagaggcttggaggtgcatggttttgccttcaggaatgggtttgatagcgatgtgttcgttggcagtagcctgatcgatatgtatgcgaattgtacaaggacggattattctgtcaaagtgtttgacaacctcccggtacgagaccatattctgtggaactccctgcttgcaggttgtgcacaaaatggttcagttgaggaggcccttggaatattccgtcggatgctgcaggctggtgttagacctgtgcccgtgactttctcgagcctcatacctgtctgtggtaatttggcatcattgcgcttcgggaagcagctgcacgcctatgtgatctgtggtgggtttgaagataacgtgtttatatctagctccctgattgacatgtactgcaaatgtggggagattagcattgcccattgcatatttgacaagatgagttcaccagacgttgtatcgtggactgcgatgatcatggggtatgcattgcatggtccagcaagagaggcacttgtgctgtttgagagaatggaactgggaaatgcaaagcctaaccatatcacctttcttgcggttctgactgcatgtagtcatgctggcttagtggataagggctggaaatatttcaagagtatgtcaaatcattatggaattgttcctactctagagcattttgcagcgcttgctgacacccttggtcgtgcaggagagttagacgaagcatataattttatatcgaagatgcaaataaaaccaactgcgagtgtctggtccacattgttaagggcttgcagggtccataaaaataccatgttagctgaggaagtagccaagaaaataatggagcttgaacctaggagcattgggtctcatgtagtattgtcaaatatgtattcagcttctgggagatggaatgaagcagcacacctacgagaatccatgagaaaaaagggtatgaagaaggatccagcttgtagttggattgaagtgaagagcaaactgcatgtctttgtagctcatgataggtcccacccttggtatgacaggattattgatgcactgaatgctttctcagagcagatggcacgcgaaggtcatgtacccaatacagaggatgttttccaggatattgaagaagagcacaagtcatatgtgttatgtggtcacagtgagaaacttgctatagtgtttggtattataagcacgcctgctggaacaaaaattcgtgtgatgaagaatctccgagtctgtattgattgccacacagtaactaaatttatttcaaagttagctgatagggagattgtggtgcgtgatgcaaaccgtttccaccactttaaggatggaaactgttcctgcggggacttttggtgatcgggtaaccacttgggattatcatatgtgttgcgatataaagtgaattgcttatttttctccatctacttaagcttttgagttgaattggtcggatcatgcaatgagttccaatcattgcgagaacattagagccatctgaacactatatgttcttactctttgattatattaagattgtgaagatacagaaaaaaaaaatcgtcattctcatttggtggaaggacaatgcacacagattgtcgcttttggttcacatggcccaggatgtccttgcaataccaatatcaacagtagctttagagtccgtcttcagcacaagtggatgtattttggaagactttcgtacctcccttactctattcatgttggaggtccttgtatgtacccaagattggccccgaaggtctactcccattgacatacaagataatattgaggaattggccattatagaaaaagagctaattgaagaatttggtaatggtggcaaaggaaaaattaaggagtctgcttccacttccaagtctcaagcaacagcaactagcagcagttaatgtggataaaatcaatttggctaccgggagtacccatgcccagtcctgcccgtgtagagcgcaccgtgtcggggcatcgagcacgcgtgcgacaggtggcgcggcgctcgagcgcggagccggggcgtcgagtgcgtagtgttggtcgacctcgaccacaacttctggcgacgaccgacgagggcacattgtggagggtgccgggttgctggctgcaggcactggtatggccctctcgtctacatctcctattttaaaccctacagtactatatctttactgttaccacggtatataattatatttgatagtatagtacaacagtcatacgacacccgagggttcagtgacaagccagatgatggatcctcataaaaaataaatttaaaattaaagtagaccatctccataaaaaatcaatttaaattaaagtagacctatgatccacatatcttatactgcacatcattttaactaaaagttaaagaaagatatgagtggaaaaagagacatgtctctttttatagctcg

SEQ ID NO: 24615 - DNA, 3736 bp, Zea Mays
gtcagatgtagccaccgcctgacctccacaaccacagtatctaccgactcgccgtcatgtccgtttccgaggccgcttatccaccgccgcccccgtcctcatgggcacaacagatccgcgcggccgctgccgagggccacttctgcgacgctgtctccctcttcctccggatgcgcgcctccgccgcgccacgctcgtctgtcccggcctcactcccggccgcgctcaagtcctgtgccgccctaggcctgagcgccctcggcgcctccctccatgcgctggccatccgctccggtgcattcgccgaccgttttaccgccaatgccctcctcaacctctactgcaaggtcccgtgttcgtatctcgactccactggtgtggccatagtggatgtacccggatcatcaaccgcatttgagagcgtgcggaaggtgttcgacgaaatgatcgagagggacgtggtgtcctggaacactttggtgctgggctgcgcggaggaagggaggcaccatgaagcactggggtttgtcaggaagatgtgcagggaagggtttaggcctgactcgttcaccttatccactgtgctcccaatcttcgcggagtgtgctgatgtcaagagaggcttggaggtgcatggttttgccttcaggaatgggtttgatagcgatgtgttcgttggcagtagcctgatcgatatgtatgcgaattgtacaaggacggattattctgtcaaagtgtttgacaacctcccggtacgagaccatattctgtggaactccctgcttgcaggttgtgcacaaaatggttcagttgaggaggcccttggaatattccgtcggatgctgcaggctggtgttagacctgtgcccgtgactttctcgagcctcatacctgtctgtggtaatttggcatcattgcgcttcgggaagcagctgcacgcctatgtgatctgtggtgggtttgaagataacgtgtttatatctagctccctgattgacatgtactgcaaatgtggggagattagcattgcccattgcatatttgacaagatgagttcaccagacgttgtatcgtggactgcgatgatcatggggtatgcattgcatggtccagcaagagaggcacttgtgctgtttgagagaatggaactgggaaatgcaaagcctaaccatatcacctttcttgcggttctgactgcatgtagtcatgctggcttagtggataagggctggaaatatttcaagagtatgtcaaatcattatggaattgttcctactctagagcattttgcagcgcttgctgacacccttggtcgtgcaggagagttagacgaagcatataattttatatcgaagatgcaaataaaaccaactgcgagtgtctggtccacattgttaagggcttgcagggtccataaaaataccatgttagctgaggaagtagccaagaaaataatggagcttgaacctaggagcattgggtctcatgtagtattgtcaaatatgtattcagcttctgggagatggaatgaagcagcacacctacgagaatccatgagaaaaaagggtatgaagaaggatccagcttgtagttggattgaagtgaagagcaaactgcatgtctttgtagctcatgataggtcccacccttggtatgacaggattattgatgcactgaatgctttctcagagcagatggcacgcgaaggtcatgtacccaatacagaggatgttttccaggatattgaagaagagcacaagtcatatgtgttatgtggtcacagtgagaaacttgctatagtgtttggtattataagcacgcctgctggaacaaaaattcgtgtgatgaagaatctccgagtctgtattgattgccacacagtaactaaatttatttcaaagttagctgatagggagattgtggtgcgtgatgcaaaccgtttccaccactttaaggatggaaactgttcctgcggggacttttggtgatcgggtaaccacttgggattatcatatgtgttgcgatataaagtgaattgcttatttttctccatctacttaagcttttgagttgaattggtcggatcatgcaatgagttccaatcattgcgagaacattagagccatctgaacactatatgttcttactctttgattatattaagtttcatctgcttttgatgccagttctgcaatccatcaaagtactagctacagtgtgctcaatttctcaaattatgttttcattgttgaatcatggtcaccttatccccaccttgcataaagaataaagaaagattgtgaagatacagaaaaaaaaaatcgtcattctcatttggtggaaggacaatgcacacagattgtcgcttttggttcacatggcccaggatgtccttgcaataccaatatcaacagtagctttagagtccgtcttcagcacaagtggatgtattttggaagactttcgtacctcccttactctattcatgttggaggtccttgtatgtacccaagattggccccgaaggtctactcccattgacatacaagataatattgaggaattggccattatagaaaaagagctaattgaagaatttggtaatggtggcaaaggaaaaattaaggagtctgcttccacttccaagtctcaagcaacagcaactagcagtaggtgcctctccaaagaatgacaggataactggataataagtgtgctgtgtgcaaccggtgctgcctgtgtgtctgtgcatgtccacgtccccctttggcgttggcgatctccctgtctccctgtgtgcaagtgcaacactggaagtctgcaataggtgctggcgtgctgcactgctgcctctgtcgactgtgtctttgtctgtgtgtgcatgagccatatccctgtctctatttggctttggcgtcttgggctcttggatcttggcgaattgcgattggcgatgtccctgtctccctgtgagtgtgtgcaaccggtaatagcagtagcactactgcagagaacctgaatgtatttttcatgctgccagcctgccagtctatgaactatgatcaatgtgaatcaaaactttgtattcaaatttatgagttaaatttgtgagttagaacttagaatggctaagtgacattcttcgtatgtttttcaaaaatgttaatcagaactttgtatgcttccactttaaataggcagttaatgtggataaaatcaatttggctaccgggagtacccatgcccagtcctgcccgtgtagagcgcaccgtgtcggggcatcgagcacgcgtgcgacaggtggcgcggcgctcgagcgcggagccggggcgtcgagtgcgtagtgttggtcgacctcgaccacaacttctggcgacgaccgacgagggcacattgtggagggtgccgggttgctggctgcaggcactggtatggccctctcgtctacatctcctattttaaaccctacagtactatatctttactgttaccacggtatataattatatttgatagtatagtacaacagtcatacgacacccgagggttcagtgacaagccagatgatggatcctcataaaaaataaatttaaaattaaagtagaccatctccataaaaaatcaatttaaattaaagtagacctatgatccacatatcttatactgcacatcattttaactaaaagttaaagaaagatatgagtggaaaaagagacatgtctctttttatagctcg

SEQ ID NO: 24616 - DNA, 3591 bp, Zea Mays
gtcagatgtagccaccgcctgacctccacaaccacagtatctaccgactcgccgtcatgtccgtttccgaggccgcttatccaccgccgcccccgtcctcatgggcacaacagatccgcgcggccgctgccgagggccacttctgcgacgctgtctccctcttcctccggatgcgcgcctccgccgcgccacgctcgtctgtcccggcctcactcccggccgcgctcaagtcctgtgccgccctaggcctgagcgccctcggcgcctccctccatgcgctggccatccgctccggtgcattcgccgaccgttttaccgccaatgccctcctcaacctctactgcaaggtcccgtgttcgtatctcgactccactggtgtggccatagtggatgtacccggatcatcaaccgcatttgagagcgtgcggaaggtgttcgacgaaatgatcgagagggacgtggtgtcctggaacactttggtgctgggctgcgcggaggaagggaggcaccatgaagcactggggtttgtcaggaagatgtgcagggaagggtttaggcctgactcgttcaccttatccactgtgctcccaatcttcgcggagtgtgctgatgtcaagagaggcttggaggtgcatggttttgccttcaggaatgggtttgatagcgatgtgttcgttggcagtagcctgatcgatatgtatgcgaattgtacaaggacggattattctgtcaaagtgtttgacaacctcccggtacgagaccatattctgtggaactccctgcttgcaggttgtgcacaaaatggttcagttgaggaggcccttggaatattccgtcggatgctgcaggctggtgttagacctgtgcccgtgactttctcgagcctcatacctgtctgtggtaatttggcatcattgcgcttcgggaagcagctgcacgcctatgtgatctgtggtgggtttgaagataacgtgtttatatctagctccctgattgacatgtactgcaaatgtggggagattagcattgcccattgcatatttgacaagatgagttcaccagacgttgtatcgtggactgcgatgatcatggggtatgcattgcatggtccagcaagagaggcacttgtgctgtttgagagaatggaactgggaaatgcaaagcctaaccatatcacctttcttgcggttctgactgcatgtagtcatgctggcttagtggataagggctggaaatatttcaagagtatgtcaaatcattatggaattgttcctactctagagcattttgcagcgcttgctgacacccttggtcgtgcaggagagttagacgaagcatataattttatatcgaagatgcaaataaaaccaactgcgagtgtctggtccacattgttaagggcttgcagggtccataaaaataccatgttagctgaggaagtagccaagaaaataatggagcttgaacctaggagcattgggtctcatgtagtattgtcaaatatgtattcagcttctgggagatggaatgaagcagcacacctacgagaatccatgagaaaaaagggtatgaagaaggatccagcttgtagttggattgaagtgaagagcaaactgcatgtctttgtagctcatgataggtcccacccttggtatgacaggattattgatgcactgaatgctttctcagagcagatggcacgcgaaggtcatgtacccaatacagaggatgttttccaggatattgaagaagagcacaagtcatatgtgttatgtggtcacagtgagaaacttgctatagtgtttggtattataagcacgcctgctggaacaaaaattcgtgtgatgaagaatctccgagtctgtattgattgccacacagtaactaaatttatttcaaagttagctgatagggagattgtggtgcgtgatgcaaaccgtttccaccactttaaggatggaaactgttcctgcggggacttttggtgatcgggtaaccacttgggattatcatatgtgttgcgatataaagtgaattgcttatttttctccatctacttaagcttttgagttgaattggtcggatcatgcaatgagttccaatcattgcgagaacattagagccatctgaacactatatgttcttactctttgattatattaagtttcatctgcttttgatgccagttctgcaatccatcaaagtactagctacagtgtgctcaatttctcaaattatgttttcattgttgaatcatggtcaccttatccccaccttgcataaagaataaagaaaggtatggattcttgaagtgtgcttaaatagttaatcatccaacctcagtgtccaccttgacagtggtaaacactgaatgatagcaccaatacccatactatattaaatgtagcatcaccttgcattgtgtagctgtattgaatgtagcaccaacactcatacttgtaatcatttgactgagtgagcaccctgcagcaatctttttctgaatcaagatctttcatgggctgttatctcagtttcttctcatgtttgaccatatgctcataacatttgctccctccgttcacaaatatattatgccgttgatttttttctaaaactttgacaactcgtcgtatttacttgacaaatatttatctgaagattgtgaagatacagaaaaaaaaaatcgtcattctcatttggtggaaggacaatgcacacagattgtcgcttttggttcacatggcccaggatgtccttgcaataccaatatcaacagtagctttagagtccgtcttcagcacaagtggatgtattttggaagactttcgtacctcccttactctattcatgttggaggtccttgtatgtacccaagattggccccgaaggtctactcccattgacatacaagataatattgaggaattggccattatagaaaaagagctaattgaagaatttggtaatggtggcaaaggaaaaattaaggagtctgcttccacttccaagtctcaagcaacagcaactagcagtaggtgcctctccaaaggcagttaatgtggataaaatcaatttggctaccgggagtacccatgcccagtcctgcccgtgtagagcgcaccgtgtcggggcatcgagcacgcgtgcgacaggtggcgcggcgctcgagcgcggagccggggcgtcgagtgcgtagtgttggtcgacctcgaccacaacttctggcgacgaccgacgagggcacattgtggagggtgccgggttgctggctgcaggcactggtatggccctctcgtctacatctcctattttaaaccctacagtactatatctttactgttaccacggtatataattatatttgatagtatagtacaacagtcatacgacacccgagggttcagtgacaagccagatgatggatcctcataaaaaataaatttaaaattaaagtagaccatctccataaaaaatcaatttaaattaaagtagacctatgatccacatatcttatactgcacatcattttaactaaaagttaaagaaagatatgagtggaaaaagagacatgtctctttttatagctcg

SEQ ID NO: 24617 - DNA, 3752 bp, Zea Mays
gtcagatgtagccaccgcctgacctccacaaccacagtatctaccgactcgccgtcatgtccgtttccgaggccgcttatccaccgccgcccccgtcctcatgggcacaacagatccgcgcggccgctgccgagggccacttctgcgacgctgtctccctcttcctccggatgcgcgcctccgccgcgccacgctcgtctgtcccggcctcactcccggccgcgctcaagtcctgtgccgccctaggcctgagcgccctcggcgcctccctccatgcgctggccatccgctccggtgcattcgccgaccgttttaccgccaatgccctcctcaacctctactgcaaggtcccgtgttcgtatctcgactccactggtgtggccatagtggatgtacccggatcatcaaccgcatttgagagcgtgcggaaggtgttcgacgaaatgatcgagagggacgtggtgtcctggaacactttggtgctgggctgcgcggaggaagggaggcaccatgaagcactggggtttgtcaggaagatgtgcagggaagggtttaggcctgactcgttcaccttatccactgtgctcccaatcttcgcggagtgtgctgatgtcaagagaggcttggaggtgcatggttttgccttcaggaatgggtttgatagcgatgtgttcgttggcagtagcctgatcgatatgtatgcgaattgtacaaggacggattattctgtcaaagtgtttgacaacctcccggtacgagaccatattctgtggaactccctgcttgcaggttgtgcacaaaatggttcagttgaggaggcccttggaatattccgtcggatgctgcaggctggtgttagacctgtgcccgtgactttctcgagcctcatacctgtctgtggtaatttggcatcattgcgcttcgggaagcagctgcacgcctatgtgatctgtggtgggtttgaagataacgtgtttatatctagctccctgattgacatgtactgcaaatgtggggagattagcattgcccattgcatatttgacaagatgagttcaccagacgttgtatcgtggactgcgatgatcatggggtatgcattgcatggtccagcaagagaggcacttgtgctgtttgagagaatggaactgggaaatgcaaagcctaaccatatcacctttcttgcggttctgactgcatgtagtcatgctggcttagtggataagggctggaaatatttcaagagtatgtcaaatcattatggaattgttcctactctagagcattttgcagcgcttgctgacacccttggtcgtgcaggagagttagacgaagcatataattttatatcgaagatgcaaataaaaccaactgcgagtgtctggtccacattgttaagggcttgcagggtccataaaaataccatgttagctgaggaagtagccaagaaaataatggagcttgaacctaggagcattgggtctcatgtagtattgtcaaatatgtattcagcttctgggagatggaatgaagcagcacacctacgagaatccatgagaaaaaagggtatgaagaaggatccagcttgtagttggattgaagtgaagagcaaactgcatgtctttgtagctcatgataggtcccacccttggtatgacaggattattgatgcactgaatgctttctcagagcagatggcacgcgaaggtcatgtacccaatacagaggatgttttccaggatattgaagaagagcacaagtcatatgtgttatgtggtcacagtgagaaacttgctatagtgtttggtattataagcacgcctgctggaacaaaaattcgtgtgatgaagaatctccgagtctgtattgattgccacacagtaactaaatttatttcaaagttagctgatagggagattgtggtgcgtgatgcaaaccgtttccaccactttaaggatggaaactgttcctgcggggacttttggtgatcgggtaaccacttgggattatcatatgtgttgcgatataaagtgaattgcttatttttctccatctacttaagcttttgagttgaattggtcggatcatgcaatgagttccaatcattgcgagaacattagagccatctgaacactatatgttcttactctttgattatattaagattgtcgcttttggttcacatggcccaggatgtccttgcaataccaatatcaacagtagctttagagtccgtcttcagcacaagtggatgtattttggaagactttcgtacctcccttactctattcatgttggaggtccttgtatgtacccaagattggccccgaaggtctactcccattgacatacaagataatattgaggaattggccattatagaaaaagagctaattgaagaatttggtaatggtggcaaaggaaaaattaaggagtctgcttccacttccaagtctcaagcaacagcaactagcagtaggtgcctctccaaaggtatatatattttgttgtatgagcccataactgtttactggtatgactatgagcgcatgactgtttattgctatgagctgcactgtttacttatactccatccgtttctttttaattgtcgctggatagttcaattttgcactatccagcgacaactaaaacgaaacggagggagtatatattttgcttcaacctgtgtatgttggacagaatgacaggataactggataataagtgtgctgtgtgcaaccggtgctgcctgtgtgtctgtgcatgtccacgtccccctttggcgttggcgatctccctgtctccctgtgtgcaagtgcaacactggaagtctgcaataggtgctggcgtgctgcactgctgcctctgtcgactgtgtctttgtctgtgtgtgcatgagccatatccctgtctctatttggctttggcgtcttgggctcttggatcttggcgaattgcgattggcgatgtccctgtctccctgtgagtgtgtgcaaccggtaatagcagtagcactactgcagagaacctgaatgtatttttcatgctgccagcctgccagtctatgaactatgatcaatgtgaatcaaaactttgtattcaaatttatgagttaaatttgtgagttagaacttagaatggctaagtgacattcttcgtatgtttttcaaaaatgttaatcagaactttgtatgcttccactttaaataggcagttaatgtggataaaatcaatttggctaccgggagtacccatgcccagtcctgcccgtgtagagcgcaccgtgtcggggcatcgagcacgcgtgcgacaggtggcgcggcgctcgagcgcggagccggggcgtcgagtgcgtagtgttggtcgacctcgaccacaacttctggcgacgaccgacgagggcacattgtggagggtgccgggttgctggctgcaggcactggtatggccctctcgtctacatctcctattttaaaccctacagtactatatctttactgttaccacggtatataattatatttgatagtatagtacaacagtcatacgacacccgagggttcagtgacaagccagatgatggatcctcataaaaaataaatttaaaattaaagtagaccatctccataaaaaatcaatttaaattaaagtagacctatgatccacatatcttatactgcacatcattttaactaaaagttaaagaaagatatgagtggaaaaagagacatgtctctttttatagctcg

SEQ ID NO: 24618 - DNA, 3230 bp, Zea Mays
cacggtcagatgtagccaccgcctgacctccacaaccacagtatctaccgactcgccgtcatgtccgtttccgaggccgcttatccaccgccgcccccgtcctcatgggcacaacagatccgcgcggccgctgccgagggccacttctgcgacgctgtctccctcttcctccggatgcgcgcctccgccgcgccacgctcgtctgtcccggcctcactcccggccgcgctcaagtcctgtgccgccctaggcctgagcgccctcggcgcctccctccatgcgctggccatccgctccggtgcattcgccgaccgttttaccgccaatgccctcctcaacctctactgcaaggtcccgtgttcgtatctcgactccactggtgtggccatagtggatgtacccggatcatcaaccgcatttgagagcgtgcggaaggtgttcgacgaaatgatcgagagggacgtggtgtcctggaacactttggtgctgggctgcgcggaggaagggaggcaccatgaagcactggggtttgtcaggaagatgtgcagggaagggtttaggcctgactcgttcaccttatccactgtgctcccaatcttcgcggagtgtgctgatgtcaagagaggcttggaggtgcatggttttgccttcaggaatgggtttgatagcgatgtgttcgttggcagtagcctgatcgatatgtatgcgaattgtacaaggacggattattctgtcaaagtgtttgacaacctcccggtacgagaccatattctgtggaactccctgcttgcaggttgtgcacaaaatggttcagttgaggaggcccttggaatattccgtcggatgctgcaggctggtgttagacctgtgcccgtgactttctcgagcctcatacctgtctgtggtaatttggcatcattgcgcttcgggaagcagctgcacgcctatgtgatctgtggtgggtttgaagataacgtgtttatatctagctccctgattgacatgtactgcaaatgtggggagattagcattgcccattgcatatttgacaagatgagttcaccagacgttgtatcgtggactgcgatgatcatggggtatgcattgcatggtccagcaagagaggcacttgtgctgtttgagagaatggaactgggaaatgcaaagcctaaccatatcacctttcttgcggttctgactgcatgtagtcatgctggcttagtggataagggctggaaatatttcaagagtatgtcaaatcattatggaattgttcctactctagagcattttgcagcgcttgctgacacccttggtcgtgcaggagagttagacgaagcatataattttatatcgaagatgcaaataaaaccaactgcgagtgtctggtccacattgttaagggcttgcagggtccataaaaataccatgttagctgaggaagtagccaagaaaataatggagcttgaacctaggagcattgggtctcatgtagtattgtcaaatatgtattcagcttctgggagatggaatgaagcagcacacctacgagaatccatgagaaaaaagggtatgaagaaggatccagcttgtagttggattgaagtgaagagcaaactgcatgtctttgtagctcatgataggtcccacccttggtatgacaggattattgatgcactgaatgctttctcagagcagatggcacgcgaaggtcatgtacccaatacagaggatgttttccaggatattgaagaagagcacaagtcatatgtgttatgtggtcacagtgagaaacttgctatagtgtttggtattataagcacgcctgctggaacaaaaattcgtgtgatgaagaatctccgagtctgtattgattgccacacagtaactaaatttatttcaaagttagctgatagggagattgtggtgcgtgatgcaaaccgtttccaccactttaaggatggaaactgttcctgcggggacttttggtgatcgggtaaccacttgggattatcatatgtgttgcgatataaagtgaattgcttatttttctccatctacttaagcttttgagttgaattggtcggatcatgcaatgagttccaatcattgcgagaacattagagccatctgaacactatatgttcttactctttgattatattaagtttcatctgcttttgatgccagttctgcaatccatcaaagtactagctacagtgtgctcaatttctcaaattatgttttcattgttgaatcatggtcaccttatccccaccttgcataaagaataaagaaagattgtgaagatacagaaaaaaaaaatcgtcattctcatttggtggaaggacaatgcacacagattgtcgcttttggttcacatggcccaggatgtccttgcaataccaatatcaacagtagctttagagtccgtcttcagcacaagtggatgtattttggaagactttcgtacctcccttactctattcatgttggaggtccttgtatgtacccaagattggccccgaaggtctactcccattgacatacaagataatattgaggaattggccattatagaaaaagagctaattgaagaatttggtaatggtggcaaaggaaaaattaaggagtctgcttccacttccaagtctcaagcaacagcaactagcagtaggtgcctctccaaaggcagttaatgtggataaaatcaatttggctaccgggagtacccatgcccagtcctgcccgtgtagagcgcaccgtgtcggggcatcgagcacgcgtgcgacaggtggcgcggcgctcgagcgcggagccggggcgtcgagtgcgtagtgttggtcgacctcgaccacaacttctggcgacgaccgacgagggcacattgtggagggtgccgggttgctggctgcaggcactggtatggccctctcgtctacatctcctattttaaaccctacagtactatatctttactgttaccacggtatataattatatttgatagtatagtacaacagtcatacgacacccgagggttcagtgacaagccagatgatggatcctcataaaaaataaatttaaaattaaagtagaccatctccataaaaaatcaatttaaattaaagtagacctatgatccacatatcttatactgcacatcattttaactaaaagttaaagaaagatatgagtggaaaaagagacatgtctctttttatagctcg

SEQ ID NO: 24619 - DNA, 1378 bp, Zea Mays
acgctcatgacttttaagagtgtcgacccttggcttgggtccagccttcagacttcagaggcaggctgcaagagagttcatcgatctagctagctagctagcgtgtgtttagggtacctagctagctagcttcaacatatatatcttagttgcacacacagctcaaaagaaaggaatcatcgatcgatcggcagggagggatggggctgagggagatcgagtccacattgccgccggggttcaggttctatcccagcgacgaggagctggtgtgccactacctctacaagaaggtggccaacgagcgcgccgcgcaggggacgctggtggaggtcgacctgcacgcgcgagagccatgggagcttccagcttccgggaccgcaagtacgccacggggtcgcgcaccaaccgcgccaccaagacggggtactggaaggccaccggcaaggaccgcgaggtgcgcagcccggccacccgcgccgtcgtcgccatgaggaagacgctcgtcttctaccagggacgcgcacccaacggcgtcaagtcctgctgggtcatgcacgagttccgcctcgactcgccgcatacgccaccaaaggaggactgggtgctctgcagggtgttccagaagcggaaagacagcgagcaagacaacggcggcggctcctcctcgccgccgacctttgccggcgcgtcgtcgcagggggtcgttctagatctgccggacgaccagcagcccagcatgacgatggccggcgcgtacgtagcagtggaccaccaccagccaggctcttccgccgtcgggttcgcactgccgccgcatgcgcaggacaacggcctcggcgatggcggcctggacgcgttgctgatgaacggagcgaccatgtggcagtacagctcatcggccctcgccgaccacttcccgccggaggaagtgaccgccgcgcccatgatggggctaggctccaggggaggaggtgacgggtgcagcttcttctacgacagcggcttcgacgacatggcgaacatggggttcccgcagggatggatgggctgaggaggcaaggcaccaactgcaacaacgccatgggatgatggattgtgaaggaaacgattgaattgattccattagtggtagtattgtacagtaggtacgtagtgtgaggttagtttattggaaattattagagtgcacctccccaatccaaaacaacggaatgaaaagtagagcgcatgacgacaattgtatgtatccattcactcctactactatgcttgtacattaattaattagtataaacgaatccaagtacgtacatgcatgtgtgtgccacgccaactgttaattactgatcaacaggaggcatcgttttcatttgct

SEQ ID NO: 24620 - DNA, 2835 bp, Zea Mays
acgctcatgacttttaagagtgtcgacccttggcttgggtccagccttcagacttcagaggcaggctgcaagagagttcatcgatctagctagctagctagcgtgtgtttagggtacctagctagctagcttcaacatatatatcttagttgcacacacagctcaaaagaaaggaatcatcgatcgatcggcagggagggatggggctgagggagatcgagtccacattgccgccggggttcaggttctatcccagcgacgaggagctggtgtgccactacctctacaagaaggtggccaacgagcgcgccgcgcaggggacgctggtggaggtcgacctgcacgcgcgagagccatgggagcttccaggtgactcttcccctctctctagatctgccatgcatgattatgcactcctcgatctccctctgcagttatcatctagctcgatctttacgtgtctcacctgccgactctctctccccctctcatggttgttgctagctccatacgaatctctatgcttcccatggatatccatgcgtcttgacgagatgttcatattccttgtgcgcactattagtattcgtgttaatcactagtactcggccggcctcgatcttcaccaattgtatagacgacggctttgagaatatatatgacgttggcctagtgatcagggattttgcttatggaaaatggaaccagagtaagctagcgatgtgtgtgtgtggccattgctgatgaatatatatgcatatgcctgtatgcatggcttagcatggtctttccgatccttaaaggtatccaacattattggtgcccagtgcccatggcttagcataaaggctgcgtgcatcacatggtgcaaagagatgctctaaacacgcatgcatgttccaattctctaaacacaaacaacaagcaatgagacgtatttatttcgtgtttattacatatatgtgctcggtcgttaattagattcacgaaacttgcgtgtgtccgttacacgtgtcctatgtatatatactgtccttcaacgtcgttgctcgatcatgtgtaggtaggagtaggactcctcgtcgtcctcgatcgcacacacgacgtacagaggatcatttttctaaagaaaaagtactactgcaaataaaccaccaaaccatgtatacgacggggtatatagtttgatatactttttgatggacggagccgtgtttttttgtttcaaaacggatggtgattggactggtcacctgctatagctagagctgatgctgctgtctgtggtatcacgcgcgcgtacgtacgtacgtgtagttcatgtcgtcgagcccccctgtgtaaactaatataatgttccgtatgcatcatatctgcaataatgatccttaatcaatacatattccatctgcaccgggtgtaatctctttcaagctgctagaacgaaatcaattgatctcggtcccaacgcaacgcaacgcatagcgtcttgcttactcgtcaccatccttgatggcggccttggaggatccggtccacttcctagctagctacgtcacatgagtaacagccacgattcttcctagctctcggttccttcgaagcttcaatttccggcccgatcgatcacttatcgtctcagcagaccctgctgtgtacgtacacacacacacacacaacgcatgtacacacgcatgtacatgcattatataaattcttatatcgtacgctactagctagctagctgctaatggacacgtacgtacgtacgtcgaatacatgtcagacgcggccaagctgacggcgagcgagtggtacttcttcagcttccgggaccgcaagtacgccacggggtcgcgcaccaaccgcgccaccaagacggggtactggaaggccaccggcaaggaccgcgaggtgcgcagcccggccacccgcgccgtcgtcgccatgaggaagacgctcgtcttctaccagggacgcgcacccaacggcgtcaagtcctgctgggtcatgcacgagttccgcctcgactcgccgcatacgccaccaaaggaggactgggtgctctgcagggtgttccagaagcggaaagacagcgagcaagacaacggcggcggctcctcctcgccgccgacctttgccggcgcgtcgtcgcagggggtcgttctagatctgccggacgaccagcagcccagcatgacgatggccggcgcgtacgtagcagtggaccaccaccagccaggctcttccgccgtcgggttcgcactgccgccgcatgcgcaggacaacggcctcggcgatggcggcctggacgcgttgctgatgaacggagcgaccatgtggcagtacagctcatcggccctcgccgaccacttcccgccggaggaagtgaccgccgcgcccatgatggggctaggctccaggggaggaggtgacgggtgcagcttcttctacgacagcggcttcgacgacatggcgaacatggggttcccgcagggatggatgggctgaggaggcaaggcaccaactgcaacaacgccatgggatgatggattgtgaaggaaacgattgaattgattccattagtggtagtattgtacagtaggtacgtagtgtgaggttagtttattggaaattattagagtgcacctccccaatccaaaacaacggaatgaaaagtagagcgcatgacgacaattgtatgtatccattcactcctactactatgcttgtacattaattaattagtataaacgaatccaagtacgtacatgcatgtgtgtgccacgccaactgttaattactgatcaacaggaggcatcgttttcatttgct

SEQ ID NO: 24621 - DNA, 1813 bp, Zea Mays
tctcgcgtgtaggactttagttgccacgttggtgttccgttctgttctgttggcagcaagtgcaatgagcatcaatgcatcaaccatcgtgctggtacttccaaaagagcgaaaggattgccaattctgaaggagaaagcaaaccatatctgaaatacaaagcgcggacggaccatttgagcatccaattcgtgagctttggcgtctgtgtatttttaatcgggagctgtaggctgtagctagctagagaggtttagagcagcaccaaatggcgagcaaggtggtggacctccggtcagacacggtcaccaagccctccgaggccatgcgggccgccatggccgccgccgacgtcgacgacgacgtcctgggcgcggacccgaccgcgcatcgcttcgaggcggagatggccgcggtcatgggcaaggaagccgcgctgttcgtgccgtcgggcaccatgggcaacctcatctccgtcctcgtgcactgcgacgtcaggggcagcgaggccatcctcggcgacaactcgcacatccacgtctacgagaacggcggcatctccaccatcggcggcgtgcaccccaggaccgtgaagaacaaccccgacggcaccatggatatcgacaagatcgttgccgccatcaggcatcctgatctccattacccgacgaccagattgatctgcttggagaacacacatgggaatactggtggaaagtgtttatctgtagaatacactgacaaggttggtgaaattgccaagagccatggcttgaagcttcatatcgatggagctcgcatcttcaatgcgtctgtggcacttggagttcctgtagatagactcgtgaaagctgctgattcagtttcggtatgcctatcgaaagggttaggcgcacccgtcggatcagtgattgttggttcgaaggccttcattgacaaggccagaattctccggaagaccctaggcggtggaatgagacaggtgggagttctttgtgctgctgctcatgttgccgttcgtgacactgtgggaaagcttgcggatgaccacaggaaggctaaagctttggcagagggactgaagaaaatcgagcagattacagtggattcagcttcggtcgagaccaatatggtattctttgaggtcatggatccaagaatatcacctgacaaactgtgtcaagtcttggaacaggacaacgtgcttgcactgccagccaattcaaaaagtattaggttcgtcatccattaccagatttcagacgctgatgttgggtacgcattggcatgtgtcgagtacgatttcatgttttcagaaagcaatcaaagagctactggaaggcagtactgagttggggcattcgataaacggagctaccaaaagctcgtatgggcactagatcactcggattctgccaacctgatgcatcgacacatggtacccagctgcttgttagctgctctgcttgtctgtgaccaacgcctagctgttgtagtctcgcctttcccgaataattgttgctgttcagtctctgtttggatctgcttgttctcgtgtctctgcttcatctgctttcgcttcatggtactgagtactgacgctgtgaagtggaacaagtactctctcccccaaaaaggccggtagacccaaacatcttttcttgcgggctggtaaagccaaaaatttttaaatgtactcgaacgaaaatatcatagcatagtcttgcatacaaaggaagaaatacgataagaagtgaatgtaaagcaaagcactacagatgcaaagagaaacgcaggtctcgtatgatggtgc

SEQ ID NO: 24622 - DNA, 2225 bp, Zea Mays
tctcgcgtgtaggactttagttgccacgttggtgttccgttctgttctgttggcagcaagtgcaatgagcatcaatgcatcaaccatcgtgctggtacttccaaaagagcgaaaggattgccaattctgaaggagaaagcaaaccatatctgaaatacaaagcgcggacggaccatttgagcatccaattcgtgagctttggcgtctgtgtatttttaatcgggagctgtaggctgtagctagctagagaggtttagagcagcaccaaatggcgagcaaggtggtggacctccggtcagacacggtcaccaagccctccgaggccatgcgggccgccatggccgccgccgacgtcgacgacgacgtcctgggcgcggacccgaccgcgcatcgcttcgaggcggagatggccgcggtcatgggcaaggaagccgcgctgttcgtgccgtcgggcaccatgggcaacctcatctccgtcctcgtgcactgcgacgtcaggggcagcgaggccatcctcggcgacaactcgcacatccacgtctacgagaacggcggcatctccaccatcggcggcgtgcaccccaggaccgtgaagaacaaccccgacggcaccatggatatcgacaagatcgttgccgccatcaggcatcctgatctccattacccgacgaccagattgatctgcttggagaacacacatgggaatactggtggaaagtgtttatctgtagaatacactgacaaggttggtgaaattgccaagagccatggcttgaagcttcatatcgatggagctcgcatcttcaatgcgtctgtggcacttggagttcctgtagatagactcgtgaaagctgctgattcagtttcggtatgcctatcgaaagggttaggcgcacccgtcggatcagtgattgttggttcgaaggccttcattgacaaggccagaattctccggaagaccctaggcggtggaatgagacaggtgggagttctttgtgctgctgctcatgttgccgttcgtgacactgtgggaaagcttgcggatgaccacaggaaggctaaagctttggcagagggactgaagaaaatcgagcagattacagtggattcagcttcggtcgagaccaatatggtattctttgaggtcatggatccaagaatatcacctgacaaactgtgtcaagtcttggaacaggacaacgtgcttgcactgccagccaattcaaaaaggtgaagtttcattctgtgtttgaatgcactagcgctaatagttagttagctaaaaattactagttgaattaggtagctaacaaatatctagctaactattagctaatttgctaaaaatagctaatagttggactattagttagactatttggatgattttggctaattttagcagctaactattaactctagtgcatttaaacatggcctctcttggccgatcctttattcctaccatcactttggctgtttgtgcaacattgcctcccatttccggtaacaagctagactgcatatcatagtctggctgaaactccatgttcaattagcagaaccaaccttttactccaagcaagtctataatcatatcgagtttttgtaaggtccgcatttaacttaactgtccgtattcgaacttctgtgtcgtgcagtattaggttcgtcatccattaccagatttcagacgctgatgttgggtacgcattggcatgtgtcgagaaagcaatcaaagagctactggaaggcagtactgagttggggcattcgataaacggagctaccaaaagctcgtatgggcactagatcactcggattctgccaacctgatgcatcgacacatggtacccagctgcttgttagctgctctgcttgtctgtgaccaacgcctagctgttgtagtctcgcctttcccgaataattgttgctgttcagtctctgtttggatctgcttgttctcgtgtctctgcttcatctgctttcgcttcatggtactgagtactgacgctgtgaagtggaacaagtactctctcccccaaaaaggccggtagacccaaacatcttttcttgcgggctggtaaagccaaaaatttttaaatgtactcgaacgaaaatatcatagcatagtcttgcatacaaaggaagaaatacgataagaagtgaatgtaaagcaaagcactacagatgcaaagagaaacgcaggtctcgtatgatggtgc

SEQ ID NO: 24623 - DNA, 2258 bp, Zea Mays
tgctgtcagactgcgctcgtggcggcgcgcccagttccactctcccagggcgccgcctgcgcctctcgttctctatataaaacaccgccgccccgcgtccgcgaaggccaaggttctcagcacggcgcgcggcccgcctccccaccggtctcgctctcgcagtccctcgaccgctcgtcccggcagagcagtcgcagcacgatggtgaccaacgtggtggacctccggtcggacacggtcaccaagccgtccgacgccatgcgcgccgccatggccgcggccgacgtcgacgacgacgtcctgggcgctgaccccaccgcgcgccgcttcgaggcggagatggccgcgctcctgggcaaggaggcggcgctgttcgtgccctcgggcaccatggccaacctcgtctccgtcctcgcgcactgcgacgtccgcggcagcgaggtcatcctcggggacgcctcccacatccacgtctacgagaacggcggcatctccaccctcggcggcgtgcaccccaggaccgtgcccaacaaccccgacggcaccatggacctcgccaggatcgtcgacgccatcaggaaccccgacggggcgctgctgtacccgacgaccaggctcatctgcctggagaacacgcatgccaattctggtgggaaatgcttgtctgtagagtacacagacaaggttggcgaaattgccgtgaaccacggcttgaagcttcacatcgatggagctcgtattttcaatgcctctgtggcactgggagttcctgtacatagacttgtaaaagctgccgactcagtttcggtatgcctatctaaagggttaggcgcacccatcggatcagttgttgttggttcagaggccttcatcgacaaggctagaattcttaggaagaccctaggcggtgggatgaggcaggttggagttctttgtgccgctgcttatgttgctgttcgtgacaccgtgggaaagcttgcggatgatcacaggaaggctaaagccttggcagagggcctgaagaaaattaaacagcttacggtggattcgtcttcagtcgagaccaatatggtgttcttcgatatcgtggatccacgcatttcaccgagcaagctatgccaagtcttggaacagcgcaatgttcttgcaatgccagcaagttcaaaaagtactggtggaaagtgtttatctgtagaatacactgacaaggttggtgaaattgccaagagccatggcttgaagcttcatatcgatggagctcgcatcttcaatgcgtctgtggcacttggagttcctgtagatagactcgtgaaagctgctgattcagtttcggtatgcctatcgaaagggttaggcgcacccgtcggatcagtgattgttggttcgaaggccttcattgacaaggccagaattctccggaagaccctaggcggtggaatgagacaggtgggagttctttgtgctgctgctcatgttgccgttcgtgacactgtgggaaagcttgcggatgaccacaggaaggctaaagctttggcagagggactgaagaaaatcgagcagattacagtggattcagcttcggtcgagaccaatatggtattctttgaggtcatggatccaagaatatcacctgacaaactgtgtcaagtcttggaacaggacaacgtgcttgcactgccagccaattcaaaaagtattaggttcgtcatccattaccagatttcagacgctgatgttgggtacgcattggcatgtgtcgagaaagcaatcaaagagctactggaaggcagtactgagttggggcattcgataaacggagctaccaaaagctcgtatgggcactagatcactcggattctgccaacctgatgcatcgacacatggtacccagctgcttgttagctgctctgcttgtctgtgaccaacgcctagctgttgtagtctcgcctttcccgaataattgttgctgttcagtctctgtttggatctgcttgttctcgtgtctctgcttcatctgctttcgcttcatggtactgagtactgacgctgtgaagtggaacaagtactctctcccccaaaaaggccggtagacccaaacatcttttcttgcgggctggtaaagccaaaaatttttaaatgtactcgaacgaaaatatcatagcatagtcttgcatacaaaggaagaaatacgataagaagtgaatgtaaagcaaagcactacagatgcaaagagaaacgcaggtctcgtatgatggtgc

SEQ ID NO: 24624 - DNA, 1397 bp, Zea Mays
tgctgtcagactgcgctcgtggcggcgcgcccagttccactctcccagggcgccgcctgcgcctctcgttctctatataaaacaccgccgccccgcgtccgcgaaggccaaggttctcagcacggcgcgcggcccgcctccccaccggtctcgctctcgcagtccctcgaccgctcgtcccggcagagcagtcgcagcacgatggtgaccaacgtggtggacctccggtcggacacggtcaccaagccgtccgacgccatgcgcgccgccatggccgcggccgacgtcgacgacgacgtcctgggcgctgaccccaccgcgcgccgcttcgaggcggagatggccgcgctcctgggcaaggaggcggcgctgttcgtgccctcgggcaccatggccaacctcgtctccgtcctcgcgcactgcgacgtccgcggcagcgaggtcatcctcggggacgcctcccacatccacgtctacgagaacggcggcatctccaccctcggcggcgtgcaccccaggaccgtgcccaacaaccccgacggcaccatggacctcgccaggatcgtcgacgccatcaggaaccccgacggggcgctgctgtacccgacgaccaggctcatctgcctggagaacacgcatgccaattctggtgggaaatgcttgtctgtagagtacacagacaaggttggcgaaattgccgtgaaccacggcttgaagcttcacatcgatggagctcgtattttcaatgcctctgtggcactgggagttcctgtacatagacttgtaaaagctgccgactcagtttcggtatgcctatctaaagggttaggcgcacccatcggatcagttgttgttggttcagaggccttcatcgacaaggctagaattcttaggaagaccctaggcggtgggatgaggcaggttggagttctttgtgccgctgcttatgttgctgttcgtgacaccgtgggaaagcttgcggatgatcacaggaaggctaaagccttggcagagggcctgaagaaaattaaacagcttacggtggattcgtcttcagtcgagaccaatatggtgttcttcgatatcgtggatccacgcatttcaccgagcaagctatgccaagtcttggaacagcgcaatgttcttgcaatgccagcaagttcaaaaagtgtcaggttcgtcatccattaccagatttcagacagcgatgttcaatatgcattgacgtgtgtcgagaaagctgttgaagagctactgaagggcggtacaaagttggagcatttgacgaatggtgcgtgcgtttagttgatggcatggaatggaagacagctgcactgtcagtcatcactcatcaatcccagctcaatgtatcgccttatgtcttgtttggatattcg

SEQ ID NO: 24625 - DNA, 1591 bp, Zea Mays
tgctgtcagactgcgctcgtggcggcgcgcccagttccactctcccagggcgccgcctgcgcctctcgttctctatataaaacaccgccgccccgcgtccgcgaaggccaaggttctcagcacggcgcgcggcccgcctccccaccggtctcgctctcgcagtccctcgaccgctcgtcccggcagagcagtcgcagcacgatggtgaccaacgtggtggacctccggtcggacacggtcaccaagccgtccgacgccatgcgcgccgccatggccgcggccgacgtcgacgacgacgtcctgggcgctgaccccaccgcgcgccgcttcgaggcggagatggccgcgctcctgggcaaggaggcggcgctgttcgtgccctcgggcaccatggccaacctcgtctccgtcctcgcgcactgcgacgtccgcggcagcgaggtcatcctcggggacgcctcccacatccacgtctacgagaacggcggcatctccaccctcggcggcgtgcaccccaggaccgtgcccaacaaccccgacggcaccatggacctcgccaggatcgtcgacgccatcaggaaccccgacggggcgctgctgtacccgacgaccaggctcatctgcctggagaacacgcatgccaattctggtgggaaatgcttgtctgtagagtacacagacaaggttggcgaaattgccgtgaaccacggcttgaagcttcacatcgatggagctcgtattttcaatgcctctgtggtatgcctatctaaagggttaggcgcacccatcggatcagttgttgttggttcagaggccttcatcgacaaggctagaattcttaggaagaccctaggcggtgggatgaggcaggttggagttctttgtgccgctgcttatgttgctgttcgtgacaccgtgggaaagcttgcggatgatcacaggaaggctaaagccttggcagagggcctgaagaaaattaaacagcttacggtggattcgtcttcagtcgagaccaatatggtgttcttcgatatcgtggatccacgcatttcaccgagcaagctatgccaagtcttggaacagcgcaatgttcttgcaatgccagcaagttcaaaaagtgtcaggttcgtcatccattaccagatttcagacagcgatgttcaatatgcattgacgtgtgtcgagaaagctgttgaagagctactgaagggcggtacaaagttggagcatttgacgaatggtactgccaaaaactcatattggcactagacgtcagcagggtgtcctgcttgtttgttatcaacgctagctgttaaaactcttctctattaatgaaatagggcacaccactcgtgtgcccgtttgatccaaaaaaaaatctagctgttaatttgtagtcacacctttgccggatggctgttgctgtttactcttcactcggatgtgttcgttcttgtgctctatagcttaccttctcagaattacctggtccgtttccgcttcctggtaagacggatgcaatgaagtattgcaaatgcagaacatacgttgcccagacaatacagtttctttagctatgttgccgcactga

SEQ ID NO: 24626 - DNA, 2527 bp, Zea Mays
ccaataaatgctgctctatgcagtgtgtgtgtctataatgcggcgcgctaaaaaggtttcggaaaaaataataaatcacaaacgccaaaaaaaaaaaattacagccccacttggcccagctagaggatccacttgcccggaagttgcgtgggcttacgcattcgagcacgtgtccgtttgaactctcaaaagctctatgtcatcgctcgccaccaccaagataaatacccgggcaaggcaccctcgccgacgatccaccctttgccttcagcacagcacgaccaggacacagtgctccctccccaaagacaaacaggcgagcagcaaacacacacgctcgaaccgagacaagccaatctaataatggggagggctccgtgctgcgagaagatggggctgaagaaggggccatggacgcccgaggaggacaaggtcctggtcgcccatatccagagcttcggccacagcaactggcgcgcgctgcccaagcaagccgggctgctgcggtgcggcaagagctgccggctccggtggatcaactacctgcgcccggacatcaagcgcggcaacttcagcaaggaggaggaggacgccatcatcagcctccacgagcagctcggcaacaggtactttttactcacgccgctgttctttcccttcctcgcattgctgtcttctcgggtgtaaaaatcggagaatcaatgattgtttgcatgttgcttcaaacgcaaattactattcgtcttcgtctgaattgttcctgtcagtggggtagggcatacaatacattatccccgtgggccccgcctcgaggcccgcccgacgaagggagaaagaaaatccaagtgtgctgaccacttggtcgctagttaattcatggcgtcagacgtcagtgatgcatgagcatgatgatacgcgagatctgccggagatttccacctcctctagtttgtccgtcgtctagcttgtctagagctctcagtgcagttaaaaaaaaagaatggggattccgctccgccgttaaacaagtgcatgtgatccctcccggcggcaaggggaatcaaatcacgcagcagcagagatactaggactcaggagtagatctagcatggatcatgcatgtcatgtcatctcgcagatagagtggtccgccatcgccgccaggctgcccgggcggacggacaacgagatcaagaacgtctggcacacgcacctcaagaagcgcctggatcccaccaagcaggagcagcagcagcagcacgggacgacgccggcggctggcgccggcaagaagcacaggcccgcggcggcggcgaagcgcgggggcggcggagccaggaaggcgacggccaacgccgacgccgtcgtcgtcccggccccggccccggccaccgctgcgccggcgtctcccgaacggtcggcggcctcgtcgtcggtgaccgagtcgtccatgacggagcaggagcaggagcacggcaacacggggagctcgcccgcgttccccaaggaggagagcctcaccacctcctcctcggacgccgaggagttccagttcgacgacagcttctggtccgagacgctgtcgatgccgctggacagcctcgacgacgtcgtccccatggagccctccgacgacgacgcgttcggcgacgtcgacgtggctgccgcctcctcctcgtccgtcggcgccgacggcgacctggactactggctcagagtgttcatggagtccggcgacgcgcacccagaactgccgcagatttagaccgctcgcgcgagaattttcggctcctaattgattcatcgttcttttgtctctatctctctctgcacgtcttgcatcggaggggacggacaaggacagcagcagctgattaacagagaaggaaatcaggcagaaacaacgcgacacgccgttgcaacttggatcgatcttgtttgccttcttgttgtatagatactagaatccatccaagcctatgcgttctgagaacagaagcacgctgtgctgtgcatgcagattcccatgtatgtacagtagccacggccgccgccagaacagaaatggatccggcctcttccaaattccaattcgttgagttaattcatctagctcgtgctactcgtgtttcggtcggttacgaaatcacgtcatggcgatgctgtacgcctccagtcccgcggtctgttcatctccagtgcacgcttcgtctcgcagcacagctgaggttgaactagtggtaactgctgcctgcctgcctttgagaaagagaaaaaaaaaaggctggaacacgtgtgcagaggaaccggacaaaccaaaggaggatttttttgcgccattgacagttaaacaatgccaatcacagatctggctgtctcctgattgattctgcgtcacctttgttgtggctttgtttgatctggaaaaaaaaagtaaacgaagaacatgtgggctgctatgctgatccatgtacaagtgcgtattggcgccgccattttctattccaacctgtgcctttcatgctta

SEQ ID NO: 24627 - DNA, 3251 bp, Zea Mays
  misc_feature (1)..(2): n is a, c, g, or t
nnagtcttcaagatcctgaaaagacaacagtgaccattgatttggtgccattaggccagaaatttgataggacttcagccttactgattagcaacagatttttgcaaaagaaggtgccaataaactcatccacttttggtgattatgttgctacatatgttcattatccaggccttgcttctttagtacctattcctggatcattgggtccagtaagcagtaatgaggacccttttggtgcaaatatacacaatagaaggcaccacaagattaactctaaaactgttgccataattgctctatcagctgtggtttttgttttgacgtgcttggccattggcatcacttggagattcaatggactaaaacattctcatgctatgggccctatttcaagttcgtccatcactagaaaaggagctatgaggtcatcgttctctggtacgagcagctcggcagcatcatttggttcaacaataggaacctgcccatccaccgtgaagacatttacaataactgagcttgagaaggccacagaaaacttcagcttcaacaaaataataggcgaagggggttatggacgcgtctatcgtggtgtaattgaagatggtgttgaggttgctgtcaaattgctcacaaggaaacatcaaaacagagaccgcgagttcattgcagaggttgagatgctaagtcgtctacatcaccgcaaccttgtcaagctgattggtatatgcattgagcggagcacaaggtgcttggtttttgagctcgttccaaacggaagtgttgaatctcatctacatggctcagataaaatatatggcccgactgattttgacactagaatgaaaatagccctcggcgcagcaaggggactagcctatctgcatgaggacgccaaccctcatgtcattcaccgggatttcaaggctagcaatgttctactggaaaacgatttcacccccaaggttgctgattttgggctggcaaaggaagcatcagatgggatggatcatatttctactcaggtcatggggactttcgggtacgttgccccagagtatgcgatgacagggcatctgcttgtcaagagcgacgtctacagctacggagtggtgctcctggagctgctgtcaggccgaaaacccgtggacatgacccagccgccggggtccgagaacctggtcacctgggcgcgcccgctcctcaccacgcgggaaggactgcagcggctggtggacccgtcgctcccggccggttacgacttcgagaagctggccaaggcggcggccatcgcgtccatgtgcgtgcacgtcgaggcgtcgcaccggccgttcatgggcgaggtcgtgcaggcgctgaagctgatccacagcggcggaggcggcgacgagacctgcagcggctccttcgtgggcggcgcaacagaggagtccccgtggaacgacgtcagcaggagctcgtggaacgacgacccgccggccactccgggcccggcgctccccctgggatacggctcggaccctgccggcgccgacgagcgcaggccacggtcggcgtcgagcgcggtgctggacaagatcgagtccctggcgatgtacgactggtccggcccgctgcgcaccaaggggaggggcagcttctacaggctgagggggagcatgagcgagcacggtcgcccctcggacgacggtagcgtcgaaggttacttgatgtagccggcggcccgacgaccgtgcgcagcagattgccgcggcaggcatacctcgcgtttcttttgtctgtctagaattgtatagctgctgcttgacgagattttggtgcctgttgcgaagaatacatcgttctggacatcggacgtatccgatgcagtttggtcaagagatgttcagaatttgcgtatgtcgaattgaatcacatatcagagctacattggtcggatcgtcatggacgagaatcatgttttcatagtagaaaatgaggaggtttataatcaaaccataatttctgactgcttccagcatgtgttctcgcattcacagatatgttagcaacaccttcgcagcgagtaatcagcatagcaagcattatatgctatttagtcgttcttaaaatatactggatctcaaaacttagtttacagttgctgcgatctcatgagtgctgaatagatggtgcccaaggtacaaaatctcataacataatgtcttcactcttttaagtgggagaaactagctaacatattcgaccttgaatttgctagctccacaatcaagtcaagtgctgcaacaaatacaagtacagttagataaaaaaatagtttaatctggatacaattttgtcacgaagaatcaaaacctgtttcaaatgaaagttgggcggttcttagttttggggataccaatcccccaaagactgataatgcttttgatctcgctctttgaacctaatgtgcaaaatggccaaaaggagaatcaacaaatctgaacatcccagaagtatagcaatttcttattcactgtaccaaaatacagctgttccatacccagctgttgatagaaacctaactgaaattggcttagcatactgcaatatattattcttgtggtatttatgttaaccattggcatatcttggatcaagcatatcaaggggcaaatttcagccactggtaactcaagcacataaaacctatgtttttgcattgaacatagctcatgaattagtcataaatctttgctccctctaagcagtatttcactatctgacattccaatgcctttgaagaaaggaacttttgtaccaaacttacacgattgctagcatcagcacctgtagacagtgttgtggtgtttgcactttcatggtttcccttttcttcaagtcaagcaaagagatcagatcagcacattttttacttaacagggagtagaaaaaggccacattttaatacctggggtagtaactgatcctcgatgcctcatctttggctcagtaaaatctctctcactgagatcataggtggagtgacattcttcttgcaaagaccactttgatagagcaaagtgtggtattgactctgaaatatgatcagacattaataattatgaactgaacaattgctgcaaatagctcgtaatttgtgtatggaatcgccattctagttttatttaaaaatatgcttcagtaaaacaaaccttgaactgaggaaccatattcaagagaaaacaaaaggcattcctaaaatctag

SEQ ID NO: 24628 - DNA, 347 bp, Zea Mays
gggaaaggggaggacggggagctgggggcggggcaggaggcggacgcacggctaccggagcggcctggcgaggcggactgtggctactacctccgcacggctaccggaccggcctggcgaggcggctgcggctatcgctggtggcgtcgtggggtacagtgacagcgaggtgttcagcaattcaccttttccacctgcagagatgcgtcgagttcctcaattctcccaggcagggtggaacaagaggcagtcaggcagataactcgattggaagttaccagatttctctgttaccagaatttgctgcgcatatgtgcgtaatctgactgcgacgaatctctagatcc

SEQ ID NO: 24629 - DNA, 303 bp, Zea Mays
tggacgacgatggggaaaggggaggacggggagctgggggcggggcaggaggcggactgtggctactacctccgcacggctaccggaccggcctggcgaggcggctgcggctatcgctggtggcgtcgtggggtacagtgacagcgaggtgttcagagatgcgtcgagttcctcaattctcccaggcagggtggaacaagaggcagtcaggcagataactcgattggaagttaccagatttctctgttaccagaatttgctgcgcatatgtgcgtaatctgactgcgacgaatctctagatcc

SEQ ID NO: 24630 - DNA, 2500 bp, Zea Mays
tttctctccctcgcggtgtcttcttcaccgcgcggcgctcacatcttccgtcggagctctgctccctctcttcctcagcagcgaccgagctccatctctggcgatctcgccctgccccacggcgttcctcccctttcttcaatctcctaccacgccatgccgaactccctgtgcgcgcgtgcctaggatttttattctctccatggcgcttctctctgctccgtctgccgcgcgtgagttttttttccctggtgccctgctcgaagctccctctgcccagctcggatctccttctctggtgcgcgcggctcccaggagcttggcttctcgtcgccggccgctgcatcctctcgggcatggaagttgcgcgcgcccctgctcctctgcgcgcgcccagtcatggtctccagcgtcggtcggagctcccctgctcccatggctgcttgctcagcgcatctctctctggtgttcttccatgcgcgcgcgttccgttcttcctgcgcgtgctgccgtgagctcctctgcccggccgccgtcgtgctccctgcgctcatttggccatgctccgcctcgctgcaggcactcgtctcctccctctcctcaagcacgtcgtgcctggctcaccccctgtgccacgcaccgcttcaccagctcgcccctgcgcatgcgtcctcccgcgcccgcgccgtccctactcatcgccgcgcgcctgcttcctatgcgcgcagccgctccatcccagccgtgaagctcccttttcagttctcctccgtcgcgttgtcgtgcgcgtgaaactactcgcagtcggcatcaatttaaccgctcggccctgttccctggccagcgctcgactctgagctccgatcttcctgcatgccgtcgttcccctcgtagcctgtggaggtggacctcggcagcgtccccaccgcgtcgtcgacctcgtcgcttgtcgtcgttcgtcgtcgcgtcgtgtgtgctcgtcctcgccaagatctggccctacgagctccatgcgccttggttgtgctcgccgtgtcctctgtagatattttcgactagccgtgcggtccttgtcgtcgtcttggtcgtcgatgccacgcaaccatccacgtgttgttgtcctcatggacaccgcttcacaccatcaccctgttttcaccatccgtagcgtcgtcaagatgtcctggctgcagcacgagcgtcctcgaccttgcccaaagctctaggttggattcgtcagtgtgctactcgtccgctagctcctcgtcgtcgcgctgtcatttcttaccatgtcgggacacctcccctctgctcagatgctcgactgggaccccgtcgtcgacaactttggttttacgtcgccgggtctgtgtttcaaatagcaacaaccttattgtcgttgtgttcgctccgactttgcctctatgtgctcgccttcgatcaccgctgcaatttttaggaatttgagtgaagaagtgaagcccgctgggcgcttgtcaggggctcgatagaaggcatgaacaagaatcagcaacgtttgcttgaaattctaattgaataggtaaccgttctttagttcgctattttttaattgattgagtcgatggattgaatagatatatattaatcgtaataatcctcgtgttagcataggcgcgttgtggtagtgttaaatatgtgtgagatacgatggagttagtaatgcaaaagatagattaattcgtgtgatattcgggcgagctgatgacgtaaaaaaaggtttagtatttctatcggctagttaataaattttctagtgttattatgtcggcttggttaatagatgaagtcgatatcctgtgctagtagttagtatcatctatgtttgtgatcgataatgttggagtcggatattgagtaattagattaatatgcttctttactctaaattgtcggtatttaaaaatagtgaatgttttactctaaattgtcggtattcaaaaatagtaaatgaaaatatgacgagtaatttgatattgggtgtttcgataaaagacttgtgcttagcctattattacttgatgtttaaagtagatgcgatcacgctagaaaaatgtgataattgagcgtagtcgtatatcgataactagtgtttccgtatgaaattgtacaacgcctcgccgctaggtgtttaattcgctatcgcgtagcactatttaggtatgtgatattcctgtctatatgcattcatgtgcataatgcatttcattcaggtacgtgaattaaccacgtgatgtggagaaccagaactaagtcgaccacaagatgctggaaagcgtgagcttctccacaagatgatgttggtggattaacctgaagatggatagacgaagcaagtatcggaacaaaggctgatcgtcaagtaatcgacgtctaacaacactaacctagtgttcttccaggcaagccccgatgcatgcaaccccttccttgtgtttttaaatgatttttacacacttta

SEQ ID NO: 24631 - DNA, 1794 bp, Zea Mays
ggtgtcttcttcaccgcgcggcgctcacatcttccgtcggagctctgctccctctcttcctcagcagcgaccgagctccatctctggcgatctcgccctgccccacggcgttcctcccctttcttcaatctcctaccacgccatgccgaactccctgtgcgcgcgtgcctaggatttttattctctccatggcgcttctctctgctccgtctgccgcgcgtgagttttttttccctggtgccctgctcgaagctccctctgcccagctcggatctccttctctggtgcgcgcggctcccaggagcttggcttctcgtcgccggccgctgcatcctctcgggcatggaagttgcgcgcgcccctgctcctctgcgcgcgcccagtcatggtctccagcgtcggtcggagctcccctgctcccatggctgcttgctcagcgcatctctctctggtgttcttccatgcgcgcgcgttccgttcttcctgcgcgtgctgccgtgagctcctctgcccggccgccgtcgtgctccctgcgctcatttggccatgctccgcctcgctgcaggcactcgtctcctccctctcctcaagcacgtcgtgcctggctcaccccctgtgccacgcaccgcttcaccagctcgcccctgcgcatgcgtcctcccgcgcccgcgccgtccctactcatcgccgcgcgcctgcttcctatgcgcgcagccgctccatcccagccgtgaagctcccttttcagttctcctccgtcgcgttgtcgtgcgcgtgaaactactcgcagtcggcatcaatttaaccgctcggccctgttccctggccagcgctcgactctgagctccgatcttcctgcatgccgtcgttcccctcgtagcctgtggaggtggacctcggcagcgtccccaccgcgtcgtcgacctcgtcgcttgtcgtcgttcgtcgtcgcgtcgtgtgtgctcgtcctcgccaagatctggccctacgagctccatgcgccttggttgtgctcgccgtgtcctctgtagatattttcgactagccgtgcggtccttgtcgtcgtcttggtcgtcgatgccacgcaaccatccacgtgttgttgtcctcatggacaccgcttcacaccatcaccctgttttcaccatccgtagcgtcgtcaagatgtcctggctgcagcacgagcgtcctcgaccttgcccaaagctctaggttggattcgtcagtgtgctactcgtccgctagctcctcgtcgtcgcgctgtcatttcttaccatgtcgggacacctcccctctgctcagatgctcgactgggaccccgtcgtcgacaactttggttttacgtcgccgggtctgtgtttcaaatagcaacaaccttattgtcgttgtgttcgctccgactttgcctctatgtgctcgccttcgatcaccgctgcaatttttaggaatttgagtgaagaagtgaagcccgctgggcgcttgtcaggggctcgatagaaggcatgaacaagaatcagcaacgtttgcttgaaattctaattgaataggtacgtgaattaaccacgtgatgtggagaaccagaactaagtcgaccacaagatgctggaaagcgtgagcttctccacaagatgatgttggtggattaacctgaagatggatagacgaagcaagtatcggaacaaaggctgatcgtcaagtaatcgacgtctaacaacactaacctagtgttcttccaggcaagccccgatgcatgcaaccccttccttgtgtttttaaatgatttttacacacttt

SEQ ID NO: 24632 - DNA, 2899 bp, Zea Mays
ccagccaccaaggtggccgttggggaggctgttgtcgatgggcgcaccgggacagttcggtgcgccgccggaccagtccggtgtgccaccggacactcattgtccagtgtccgatgcgtcgccatgtcatccaaccgttagggttcggagctcgggcgaccgttggaactttgtcctcttgcggcaccggatagtccggtgccacaccggacagtctggtgcccctctgacttcgctgctctgacttctgtgtagcactgttgctcattgtagctcctatcagagtggaccgttgcgtgagttagccgttgctccactggcacactagacagtccggtgaattatagcggagctagcctgcgttttcccgagagtggctgcttcagagttgtacgggcatggtgcaccggacactgtccggtgcgccagttcacagcacactcaagcctttgctccatttcaatttagtccctaacttgaatcttttattagtttgtgttgaaccttatgcacctgtaatacatgaattcttggcaaactagttagtccatgtgtttgtgttgacgatcaactaccaaaactaattataggaaaaggttaaccctatttccctttcaatctccaccttttttgtgattgataccaacacaaaccaaagcaaataataagtgcagagatgaactagtttgcataaggtaagtgcataggtaacttgaaattaaaccaattgataatctcactagatatgaatggattgcttttcttttctttaacattttggaccacatttgcaccacttgttttgtttttgcaaatccttttggaaaatcttttcaaagtcttttgcaagtagtcaaaggtatatgaataagattgcaagaagcattttcaagatttgaattttctccccctgtttcaaatgcttttcctttgactaaaaaactcctaaatgaaattctcctcttagctttcaagagggttttaaaatagataccaatttaaagatgaacttctaaagaattggataccaattttgaaaatctacctttaaagataccaattgaagagatttccattgtgtggataccaatgtgaaaatcatcaattaaaactttattttgaaattttttgaaatggtggtgcggtcctttttgctttgggcttaatatcttctcctttggcattaattgccgaaaacggagactttgagagcccgtttttacttttttccaattggtacaagtaaataagagtgaaggattataccaattggagagagagcggagtagcgacgaagggtaaatgataccgttagagtggagtggaagccttatcttcgtcaaatactccaattccctttcaatctacgacttagtatagaaatacacttggaaacatattagtcgtagtcttggcgcaagaataataagaaatatgcatttgtaccaaaatgaaagagatatgatcaaaggtatataaattagctatgtgtgcaatgtttcaatcaaagttccgagaatcaagtatatttagctcattcctaagtttgctaaaggttttctcatctaatggcttggtaaagatatcgactagttgattcttgatgtttacataagctatttcgatatccccctttgctgatgattcctcagaaagtgataccgaatgtctatgtgcttagtgcggctgtgttcaatggcattatccgccaagcggattgcactctcattatcatattggagagggactttgcttaatttgtagccatagtccatgtggcagaacctcccaaattataggacccacatgcacctatccttgtctcaaagacctgaaacagctatgcatgtatgcctgataacttaacatgatctgtccgagtatcccaggggacttcggataaaccactaccaccaagatcgcaagattaagtaaacacgaatcacacacatcaatatttttgcagcgaaaattttattaccaaattttagaagttacaaaaattttatattattttcatcggagtgagtacaaaagtataagtttgaaatatatgctagctcaagagaccatccttaataagaagtatagaagggttacttagacttataagaaggtcgagcccaccgacacttaacaccaccatcagcagcataaaactaagacctggtgtggaatgagctcagggtgacgtcggcgttcagcagctccatgagacgacgcaccagagcaaggaaaaatgagtcaggtggcggattccaagcgcgacgaggaggatgttgttcagcgagtgccgcttgaggctgtggcggtgttgaatgcgatggggagcaggtgagcagttgtaggacgctgaacgctggtagatgtagaggcaaggacgagcgcgaccagaccgaacgcgacgccggcgtccagtggcttgagcggatgcggcagggtgtaggcacaaggacgagtagcaggggcggctgggcttctgggccgcgacggagacaagcagggctagtggtgtccggtggctgaagacgactacgccgaccgcagcagggtgccgagctcgcgactgatggagcgaatcggccaaggatgatgtcgcccaggcaaggccgggcacggacaggagcaacagcggtgggatttttttcctaggaaccagaacgcttgcttgtgatgtgagaagaaggtacgaaacttcactccaagtattccagcaccaagcacggagataaaggacggtgtgggagagaacgacctgaagatgcaagcgttggggaaaagatcagagatagcgatcgagctggagatagagcggtggagattttttttgtttcttcagaaaccgacgttcaccagccactggggagaggataagcaagacgagaaaaaaacaaaaaaa

SEQ ID NO: 24633 - DNA, 3964 bp, Zea Mays
ccagccaccaaggtggccgttggggaggctgttgtcgatgggcgcaccgggacagttcggtgcgccgccggaccagtccggtgtgccaccggacactcattgtccagtgtccgatgcgtcgccatgtcatccaaccgttagggttcggagctcgggcgaccgttggaactttgtcctcttgcggcaccggatagtccggtgccacaccggacagtctggtgcccctctgacttcgctgctctgacttctgtgtagcactgttgctcattgtagctcctatcagagtggaccgttgcgtgagttagccgttgctccactggcacactagacagtccggtgaattatagcggagctagcctgcgttttcccgagagtggctgcttcagagttgtacgggcatggtgcaccggacactgtccggtgcgccagttcacagcacactcaagcctttgctccatttcaatttagtccctaacttgaatcttttattagtttgtgttgaaccttatgcacctgtaatacatgaattcttggcaaactagttagtccatgtgtttgtgttgacgatcaactaccaaaactaattataggaaaaggttaaccctatttccctttcaatctccaccttttttgtgattgataccaacacaaaccaaagcaaataataagtgcagagatgaactagtttgcataaggtaagtgcataggtaacttgaaattaaaccaattgataatctcactagatatgaatggattgcttttcttttctttaacattttggaccacatttgcaccacttgttttgtttttgcaaatccttttggaaaatcttttcaaagtcttttgcaagtagtcaaaggtatatgaataagattgcaagaagcattttcaagatttgaattttctccccctgtttcaaatgcttttcctttgactaaaaaactcctaaatgaaattctcctcttagctttcaagagggttttaaaatagataccaatttaaagatgaacttctaaagaattggataccaattttgaaaatctacctttaaagataccaattgaagagatttccattgtgtggataccaatgtgaaaatcatcaattaaaactttattttgaaattttttgaaatggtggtgcggtcctttttgctttgggcttaatatcttctcctttggcattaattgccgaaaacggagactttgagagcccgtttttacttttttccaattggtacaagtaaataagagtgaaggattataccaattggagagagagcggagtagcgacgaagggtaaatgataccgttagagtggagtggaagccttatcttcgtcaaatactccaattccctttcaatctacgacttagtatagaaatacacttggaaacatattagtcgtagtcttggcgcaagaataataagaaatatgcatttgtaccaaaatgaaagagatatgatcaaaggtatataaattagctatgtgtgcaatgtttcaatcaaagttccgagaatcaagtatatttagctcattcctaagtttgctaaaggttttctcatctaatggcttggtaaagatatcgactagttgattcttgatgtttacataagctatttcgatatccccctttgctgatgattcctcagaaagtgataccgaatgtctatgtgcttagtgcggctgtgttcaatggcattatccgccaagcggattgcactctcattatcatattggagagggactttgcttaatttgtagccatagtccatgtggcagaacctcccaaattataggacccacatgcacctatccttgtctcaaagacctgaaacagctatgcatgtatgcctgataacttaacatgatctgtccgagtatcccaggggacttcggataaaccactaccaccaagatcgcaagattaagtaaacacgaatcacacacatcaatatttttgcagcgaaaattttattaccaaattttagaagttacaaaaattttatattattttcatcggagtgagtacaaaagtataagtttgaaatatatgctagctcaagagaccatccttaataagaagtatagaagggttacttagacttataagaaggtcgagcccaccgacacttaacaccaccatcagcagcataaaactaagacctgaaaaacaacagggaataaaaccctgagtacgcaattactcagcaagacttatccgactaaagaaaagactctcaagggtatgctggctagagggagtcaaggtaaggctaagcaataatcaaggactcattttgcagaaacgcttactaatagtggatccttaagccatcttttaattatcaatttacgttcttacctgtttctagattttcctgaactagagcattcacttgtcctatctagctttcttttagccaattcgtgtttcacttattaactacgatgagtggtcggagggtcaagtctccataatcgaggagcaacgacaattcgaaccaattatacccagctggggattcctaaccacatgacatatgtagcacttaacccttgcatatgtcaaccgttcccacagatcctccacaacgtgaaccggtccgcgctacccgggagcacaatactcctccgtccaacctctagccaggagggtacacgctactcccaccatctcccacgcccaatgcgcggttgtcttttcacgtatggaatagccgggttcaggcttaccgaggcatgtggctagttgcaaagtctcaaccacaacaggcctacatcgaacgatccttaatcgacacagacggagcactacaccgactcatttcacgatgcaagccacccgtctggtctcatattaattatctaactcaagttcattcacacataacaataaccagtaatcaaaataaatttcaaaatcctatcactttaagcagggctaagcggcactagtttttcataaaataggtatcaaggaatgattattcaaattctcaaggatgataatgcataaattgtttgatcacgcaactcctatcacctaatgcagcatatcaagtgataaaagttttgtaaacaacaaggaaagtggtgagtacaccggggcttgcctttgttgcatagaagagccaaagactaaggaaataaaatttcacaagtcttcaaggtgacgacaagtctccagaaaattgtttcaccaagcgattgatccacggataacgtaatctggtgtggaatgagctcagggtgacgtcggcgttcagcagctccatgagacgacgcaccagagcaaggaaaaatgagtcaggtggcggattccaagcgcgacgaggaggatgttgttcagcgagtgccgcttgaggctgtggcggtgttgaatgcgatggggagcaggtgagcagttgtaggacgctgaacgctggtagatgtagaggcaaggacgagcgcgaccagaccgaacgcgacgccggcgtccagtggcttgagcggatgcggcagggtgtaggcacaaggacgagtagcaggggcggctgggcttctgggccgcgacggagacaagcagggctagtggtgtccggtggctgaagacgactacgccgaccgcagcagggtgccgagctcgcgactgatggagcgaatcggccaaggatgatgtcgcccaggcaaggccgggcacggacaggagcaacagcggtgggatttttttcctaggaaccagaacgcttgcttgtgatgtgagaagaaggtacgaaacttcactccaagtattccagcaccaagcacggagataaaggacggtgtgggagagaacgacctgaagatgcaagcgttggggaaaagatcagagatagcgatcgagctggagatagagcggtggagattttttttgtttcttcagaaaccgacgttcaccagccactggggagaggataagcaagacgagaaaaaaacaaaaaaa

SEQ ID NO: 24634 - DNA, 1225 bp, Zea Mays
ggttaacgtccagtggctgcaatacagcccctagccctgaagacttcttcggcggcatgacgaagttggagcttgccgaaggtggtcgaatgagttcaccggaggtgggcaccaatgttggtcacttgttctcaaatgctatgagttaagaataaggcaacacaaactgttaatagtcaaagaccttcgtccttcaaatcattatctcccttaggatataatgatcttcagacgaaggttatgaaggacataccttcatcatctccgcatataataatgaaagtagaaacatatgagacatggaaaacaacctaaataatcatataatattatcaggacatttttattataatatcatgaatgaatatgaacaatatcgaattacatttataccttcatcttgacagaaaggtaaaaggctcgagagtgacgtgcaaagcgaatacaagtcaacgtgaacaatacagtgctactgttcatctatttataggcacaagacgcagcctgggtaaattacattcatgcccttgacatttactattgacctagggataatctatcaaggactagacaaccttttcccctttaggtcggttccattttttgctgttaagccgaagcttctccacaggtagcttcggaactggttcatccttctcccgatccctgctttttatatcatgtatagcttcatcccaaggccgaaggtccctgtatatatatttgaacttgggaaacatgttagtcgtgtttttgaggaccttcagaagacgaaggccccaacaggggtgaataagcgaaacctgaaatttataaacttaaacatgcactaaggtcgagggttagcgttagagttaaacttcaagtcacaaagagagggaaaacaaatcaaccaagaaataaggagagtgagcatggtgatttgttttaccgagattcagttccaaagaacctagtccccgttgaggaggtcacaaagactgggtatattccaaccctttccctctctcaaacggtcacttagaccgagtgagccttcttccttaatctcacaggtcactaagaccccgcaagaccaccacacacttggtgtctcttgcctcgcttacagagcacttgagaataagaatatgaaaataagaaagccaatccaagcaacaagaactcaaatgaacacaaaaatctctctctcacaagccactaagtgttttggagtggattttgg

SEQ ID NO: 24635 - DNA, 1277 bp, Zea Mays
cgcctggcccatgtgctggtccccgaatcccgacctcgcctccagttccactcttccggcggcgtcggcggccgccccttccccacgcccacaccatgtacggcgtcggcggcggcttcaacgcgccctccaccgctgcctctcggcgccgcaacccaggcgacgaagaggaggacgaggaggatgagggcggtgagggccgcgtcctggaggcgtgggagcgcgcgtacgcggacgaacggtcgtgggagtcactgcaggaggatgagtcgggcctcctccgtcccgtcgacaccaagaccctcgtccacgcgcagtaccgccggcgcctcctactccggtctgccgccgccgccgctgcccgcatccaaaaggggctcatccgctacctctacatcgtcatagacctctcccgggcggcttcagagatggattatcgtcctagtcgaatggctgttgttgcaaaacatgctgaggctttcataagagaattctttgaccagaatccattgagccatgttggcctagtgacaattaaagatggtattgcccatcgacttacagaaatcggagggagcccagagtcacagattaaggctttgatggggaagcttgagtgttctggtgattcatccctgcagaatgctctagacctcgtacatggttatttagatcaagtaccatcatatggtcacaaggaagttctgattttatactctgccctgaatacatttgatcctggtgatatcacggagacaatagcaaagtgtaagaagtcaaaaattagatgctctgttattggtcttgctgcagagatcttcatttgcaaacatctatgtgaagagactggtggatcttacacagttgcactggatgagtctcatttcaaagagttgttactggaacatgctcccccacctcctgcaatagcagaatatgctgcagctaatttgattaagatgggctttccacagaggggtgctgaggagcttatctctatttgctcttgtcacaagaagataaaatctggggctgaaggttacatatgtcctagatgcaaagttaatgtctgtgagcttccaacagaatgtcgaacttgtggtcttacgctagttagttctccacacttggcaaggtcgtatcatcatctcttcccagtaccaccgtttgatgaggtcacccctgtcccaaatagaattcaaaggggagggcagatctgtttcagctgccagcagagcctttataacccagcacaagcatcgactcctcccatgtct

SEQ ID NO: 24636 - DNA, 2062 bp, Zea Mays
ctggaggcaccaagcacccgcctggcccatgtgctggtccccgaatcccgacctcgcctccagttccactcttccggcggcgtcggcggccgccccttccccacgcccacaccatgtacggcgtcggcggcggcttcaacgcgccctccaccgctgcctctcggcgccgcaacccaggcgacgaagaggaggacgaggaggatgagggcggtgagggccgcgtcctggaggcgtgggagcgcgcgtacgcggacgaacggtcgtgggagtcactgcaggaggatgagtcgggcctcctccgtcccgtcgacaccaagaccctcgtccacgcgcagtaccgccggcgcctcctactccggtctgccgccgccgccgctgcccgcatccaaaaggggctcatccgctacctctacatcgtcatagacctctcccggagatggattatcgtcctagtcgaatggctgttgttgcaaaacatgctgaggctttcataagagaattctttgaccagaatccattgagccatgttggcctagtgacaattaaagatggtattgcccatcgacttacagaaatcggagggagcccagagtcacagattaaggctttgatggggaagcttgagtgttctggtgattcatccctgcagaatgctctagacctcgtacatggttatttagatcaagtaccatcatatggtcacaaggaagttctgattttatactctgccctgaatacatttgatcctggtgatatcacggagacaatagcaaagtgtaagaagtcaaaaattagatgctctgttattggtcttgctgcagagatcttcatttgcaaacatctatgtgaagagactggtggatcttacacagttgcactggatgagtctcatttcaaagagttgttactggaacatgctcccccacctcctgcaatagcagaatatgctgcagctaatttgattaagatgggctttccacagaggggtgctgaggagcttatctctatttgctcttgtcacaagaagataaaatctggggctgaaggttacatatgtcctagatgcaaagttaatgtctgtgagcttccaacagaatgtcgaacttgtggtcttacgctagttagttctccacacttggcaaggtcgtatcatcatctcttcccagtaccaccgtttgatgaggtcacccctgtcccaaatagaattcaaaggggagggcagatctgtttcagctgccagcagagcctttataacccagacggccaatctaacctccatgtgcgctgcccaaaatgcaaccaacacttctgccttgattgtgatatttacatccatgagagcctgcacaattgccctggttgtgagagccaacgcagcatcgcttcatagagaccgtgttactgcgtgcattattcaggttgtaccttaagctttctcctacactgtaacagccagcaaagttgtttcatgatcagcttttttctggctagcttttctgagaatctagctgtagagagaatctggctgtgagaagaatctgtgtatcgtgggaattacgtgcggaggaagatgaagtggtccaaatagttcaggatctagaaagcgatggatttctaccatcgcgatgattcaaccgattctgtgtttatgttgattttggatggtttctaccaaaacgattcttataaaagcgggttgaaaagctggatgtttgacagtccgcagcagcttttggtggccagaagctaaaaaaaagcccaaacaaacagggtcattccggcatccttttattgatagttcctgttagattgagtacctactagctagtgttgagctattgctacccatcagaggccaatgggttgatagttttaatttgtgccgagaagagaagctgaaagtgtataacatgaccgagacttgactcttgctgtttttttttcttccctgaagcgtgacagtatatttatttgttttcatttgtttatgctaaaactttgtcataaattgagttgtggattgggtcgggggtttcatcaatggattgatagaagaaaaacg

SEQ ID NO: 24637 - DNA, 678 bp, Zea Mays
ctgtatctcgttcctatcaatgattaaatctgaggcaggtcttcactatggttactgcttagtcccctttctaagcaaaacttcctgccctttctgcgtccgtgtgaagcagttgttcgagaagctcggagcaagctacaaggccattgagttggataaggaaagtgatggagctgagctccagaatgccctgaaggagtggactggacagaggactgtcccaaatgtcttcatcaatgggaagcatattggcggctgtgatgatactatggcactgaacaatgatgggaagctggtgcctctgctgactgaggctggagccatcgccggttctgcctcgaagacaaccatcactgcttgacatgtgtgttaccattcccgtgcttaaaaataatgatgctttgcaagtgctgaacttgcagatgctatgtgggagtgactgttcgttccctgtgtaaaactccctagacatcagtcgagtcgtgttgctgtggtggttgtgaaatctacaataatcattgctacaataatgtcgtgttccctagacatcagatgagaaagatgagaagaaataacattataatcttattcgaactatcatctgtaagcttcttttgatacaatatttttatttatagattttaaaaacatttgtaggactaataagatttttaggca

SEQ ID NO: 24638 - DNA, 672 bp, Zea Mays
gcagatctgctccaaccaatgttggaaatgcataatcaggattgtacccgtcttatttggatagatagacaaaacttcctgccctttctgcgtccgtgtgaagcagttgttcgagaagctcggagcaagctacaaggccattgagttggataaggaaagtgatggagctgagctccagaatgccctgaaggagtggactggacagaggactgtcccaaatgtcttcatcaatgggaagcatattggcggctgtgatgatactatggcactgaacaatgatgggaagctggtgcctctgctgactgaggctggagccatcgccggttctgcctcgaagacaaccatcactgcttgacatgtgtgttaccattcccgtgcttaaaaataatgatgctttgcaagtgctgaacttgcagatgctatgtgggagtgactgttcgttccctgtgtaaaactccctagacatcagtcgagtcgtgttgctgtggtggttgtgaaatctacaataatcattgctacaataatgtcgtgttccctagacatcagatgagaaagatgagaagaaataacattataatcttattcgaactatcatctgtaagcttcttttgatacaatatttttatttatagattttaaaaacatttgtaggactaataagatttttaggca

SEQ ID NO: 24639 - DNA, 635 bp, Zea Mays
ctctctcacgcgcaccatgaactactgactagcaaaacttcctgccctttctgcgtccgtgtgaagcagttgttcgagaagctcggagcaagctacaaggccattgagttggataaggaaagtgatggagctgagctccagaatgccctgaaggagtggactggacagaggactgtcccaaatgtcttcatcaatgggaagcatattggcggctgtgatgatactatggcactgaacaatgatgggaagctggtgcctctgctgactgaggctggagccatcgccggttctgcctcgaagacaaccatcactgcttgacatgtgtgttaccattcccgtgcttaaaaataatgatgctttgcaagtgctgaacttgcagatgctatgtgggagtgactgttcgttccctgtgtaaaactccctagacatcagtcgagtcgtgttgctgtggtggttgtgaaatctacaataatcattgctacaataatgtcgtgttccctagacatcagatgagaaagatgagaagaaataacattataatcttattcgaactatcatctgtaagcttcttttgatacaatatttttatttatagattttaaaaacatttgtaggactaataagatttttaggca

SEQ ID NO: 24640 - DNA, 1719 bp, Zea Mays
ctctcttcgtctacaagagggacaccgccgcgccacctttcagtccccgtgcgccacgccacctgccagtactagctcgcccgctcgatcgcgcccatcaatcaatcaattctcgacctcactactcgatctcgtctcatcagtgtgagtgtccgagcacggcagcacgcgcaatggacgctctgctcgtgactacgaccttcctcgtccccgtggtggcgctcctcctcgggtccgggtccgggtccgcggcggcgctgccgcgcgccttcttcgtgttcggtgactccctcgtggacaacggcaacaacaactacctgatgacgacggcgcgcgccgacgcgccgccctacgggatcgacttccccacgcacatggccacggggcggttctccaacgggctgaacatccccgacatcatcagcgagcacctcggctcccagcccgcgctgccgtacctgagccccgacctccgcggcgcccagctcctggtgggcgccaacttcgcgtccgccggcgtcggcatcctcaacgacaccggcatacagttcgtgaacatcatcaggatcgggcagcagctgcgcaacttccaggagtaccagcagaggctggcggcgttcgtcggcgacgaggacgcggcgcggcaggccgtcagcgacgcgctcgtgctcatcacgctcggcggcaacgacttcgtcaacaactactacctggtgcccttctccgtccgctctcgccagtttgccatccaagactacgtcccctacctcatctccgagtacaggaagatcctcacgcggctgtacgagctcggggcccggcgcgtggtggtgacgggcaccgggatgatcgggtgcgtgccggcggagctcgccatgcacagcgtcgacggcgagtgcgcgcgcgacctcacggaggcggccgacctcttcaacccgcagctggtgcagatgctctcggagctcaacgccgacatcggcgccgacgtcttcatcgccgccaacaccaaccgggtcagcttcgacttcatgttcaacccgcaggactacggtggcgtgctgcgggcagggcccctacaacgggatcgggctatgcacgccggcgtccaacgtgtgccccaaccgggacgtgtacgcgtactgggacgcgttccaccccacggagcgcgccaaccggatcatcgtcggccagttcatgcacggatccaccgaccacatcagccccatgaacatcagcaccatcctcgccatggacaacaggaactaggccctgcgcgtggcgtgcctcgacctccatccatccatccatccatctcaatcccagctggctagctgctaatctgccattgatccgtccgcgtccggacactggcagctatactacgactacgacgacacacatagctactgcatgcatgcgtaatactactagtataagttcgtgtcattggtaattggttatgttcatgaagcttcttttttgtggtttagattgacgtgaattgatggtgagaaattaatcctttattagagatgcatgggttcaatataatacagctgtatgtcaagtttctttgatccagcagattgtttggctggcaggggctagctataggaacttcagaaattagcaagtactggcactaccacctagtccgcccgatcgattaattcaagaaattaaatttgttgcactttgtagtgtgatcccgaacttttg

SEQ ID NO: 24641 - DNA, 1618 bp, Zea Mays
ggcagagctcttccaacgactttagcaagatcaaaatctgtcccagtgtcatcgtccatgttgatgacatagcaccaaatgccccgtcatccaattgtgaaggctgtaaaacaccaaactcggccacaagatctgataaagcaaagtcatcattcaaagggagagtttcgagttttttcttccctaaaaataaaaggcagtcaaaagagaaaatcatcccatctgctagctttgatgggaaagtcgaagtcacttgttttggcagcatgaaaccacagggtggtcataatattggttctatgccattttgtgaggacacagatgatagttctgctactcaaacaatatgttcttcaaaagatgttgtttctattgaagtacctatttcttctgcctgtccaagtgaacatattgatggatcgagatcaggtggtctgaattgtagctgtgataagcctagccctacttcaattcttgatgtatcatttgaagatagcaaccttaatggatctgaatcgtcaagaagcattccttgtagcaacgagagaattgccttacgatccgatgccaattgaatctgtcacgcgctcattatccatgggagggaggatatgagctcaccttcgcctttacttgattcgacaaacttaaccccaatctcaagcgtggacgacgatgaacttgaatgtgttgcctttgtacaaaagattgtatcatctgctgggctaggcgacctgcggttggatatggtcttcacaggctggtacttgcctgactgccctgtagaccctgcattgtgcgacaagctattggaccggaaggaggaggctgctaagtcgagggagcggaggtcgaaccaaaagcttcttttcgattacgtgaacatggcagtggtcgagattggccatgacaccttactatgcgcctacccctggaggcaggcgtgctccatggcctgggaggagaccctctctcaagctttggcggaggaagtgccacaccatatgagggattggctccatggatcaggaaagtttgcaggaaacgagaacgacaacgccggaacgttgttggagagagtcatgcggcaggaggtggaagggagaggctgggtgaaatccatgagatgggagttggatgagatcacagagcagattgcaggaaatgtgctggatgaaatagtggtagaagcattggatggtctcgggatttgttctccgtggccagaaatggccatggcaataccgaatctgtagtagtagcgattgctctgtgtatgagaaatgagaactgctcttaaaattattttgtgctggaaaaaaaaactctcgagcatctgcatctcttgtatttagcacttctgaatatgcgctagctcactagagtggagactgtagaatttgctgttatatagagaacagccaaaagtaaaatagaaaaccgtacagccaatactggtgcatgtcaaacattttttttgcagcatagatgcttggatggtggtgtcagtaatttcctattcctaggctcatcaccacgtggtacgtactgctactggagaacactgttgactgttcgaatcctttctcttttgtgtgtggttttgtttttttagaag

SEQ ID NO: 24642 - DNA, 1295 bp, Zea Mays
cgcgtcgcgccccgcgccccgcgccggcgaatgctccggctctcctcgccgcaggttctccagcgtgtagaagcaggcaagatgccaagagaacagttgatcctgctaaagtttataccaacgataaagtaggagctagtaactggagctcatccagaaataaatcaaatgtgtctccattgaatgtggcgttagaaaaggagatgtccaaggaattggaatcaaagaagaagtcaccaagtgtggttgccagattgatgggacttgaagaagatctacctggtcaagagccagcattaccttccactaaaagaaatttgaagaaaagacacctaaatggcaacttggtcaaaacaaacaatctccatcgacatcaagagcagtaccattccagtatgacaacatgcgacaaacacataggacccaaagaaacagttgaatttaaggatgtttatgaagtcagtgaagaaccattgagaacataccattttcaggaccaaacttttcctagggaaatgtcttccaggagcaagagagacataaggatggaaattgttcgtcagaagttcatggaagcaaagcgtcttgctacagatgagaaactcctgcattcaaaggagtttcaagaagctcttgaggttctaagttctaacagagatttgttccttaagtttcttgaggaaccaaactctactttctcaaagcagctagctggacttcacagaagcccatcaccacctcagacaaagcgtattactgtgttgaaaccaactaaatttgttgagagcgattgcagaagggaaatcagaacacacagaataaatgaaggaaatgaacacgtgatgcggaggacacactggagatctcattcagcagaagataccttatcccagccaactaggatagtggtcctgaagcctagtcctggcaagcctagcagaacaatggctaggctaacaaccgaagcagccccagctcagttcgctgagcagataggtttttatggaggtttagaaggtcacaattacccatcagatgctctacatcggcgggatgagtctttattatcttctgtatactcaaatggctatggtggagatgaaagttctttcggcagatcagaagttgactacattgatgaagaagatagtaacctaagtgactcggagatcgttagcccagtaccgccgctgcattcatgggatcacttcaaaagatacagcagtcctcactcaggttcaacttttagcagaacatctcggtcgcccgagtcatctgtgatcacggaaagctaa

SEQ ID NO: 24643 - DNA, 4358 bp, Zea Mays
gtccatctcacatttgcaagctggagagactgaatcattttcacagcaacattcaatgagatgtacaaacacatgggatcacaatttcatgaagagttgcagcgccataatctgccttcatatatgctaaaagaaataaattcgagattggataaaatagaaccaaaggttcgatcatctgatacagcaatgcagtataaggctgtagagtctagatctgttagtgccaatcccaaaagaggcagtccaaggacaaaaagcacaccaagggaaagtacactatatggaggtgacaccgatgttacagaaaaccctgtggaaccagtaaaagttcattctgagaaagaattacttcgggaatttgagaagatcgcagctaccctttctccagaaaaggattggtctttacgtattgctgccttgcaaaggattgaagccctggtttatggaggtgccattgattatccatcatttcttatgctcttgaagcaactggttcctccattgtctaatcagctgtgtgatcgacgttctagtattgtcaaacaggcatgccacctacttaatatactatccaaagaactgctcggtgattttgagccatgtgctgaactattcatcccgatgctttttaagcttgttgtcataaccgtgcttgtgatcgctgaatctgcagatacatgcataaaaactattctgcggaattgcaaggttgctaggattcttcctcgcatagttgacacagcaaagaatgaccggagtgcaatcctccgtgcaaggtaaatgtgtttgactgttttcacattgtccattggtttcttgccagtttttaagtttacttgtactattccaggtgctgtgagtatgcacttctgatactggagtattgggctgatgcctcagaaatacaacgttcagctgatttatatgaggatatgataaaatgctgtgtcgcagatgcgatgagcgaggttagggcaactgcaagaacttgctatagaatgtttgcaaagacatggcctgagcgttcacgccgtctttttatgttatttgatcctgcgatacagaggataataaacgatgaagatggtggtgtgcataaaagatatgcttctccctcattgcgtgatagggttgtgcaaccttcacgtgcttcctctcattcaagtggtacatatgtacctggatatggcacttcagctattgttgcaatggacaagagtgcagctatttcttcagattcatcttttccatcaaccaatcttcggttatcacagtcaaagacgattggcagaagttctgagagaagcctggagagcgtgcttagctccagtaaagaaaaagtttctgccattgaaagtttgctgaaaggtgtcagcatgtcagggcaaaatttctctgctgcacgctcaacaagtttggatcttgtgcaggagttgatcctccatcatctcgtgatcctcctgtgctgcttgcagcaccagcatcaaatgttctatcattgcagaactcagcactgttggactcatcccttcctaccatcccacctagttcgcgaaatggaggttcccgcttattggaaacgatgacaacacacttgcccaccaaagaaagatcaaggtcaccatacttgagtaatatgtcatctgagtccatgtctggcttatcactgccttactcaagaagatcttcggagaggcttcaagaaggaggccgcatggatgagagctatgatatccgttcaactaggcgaatgcctcaaatgcacttcgacagaaactatgttgatatgccttacagggatgccagccacagagattcacataacaacaatgtcccaaattttcagagacctcttctaaggaaacaagtaatgtcaagggcttctgcaagtggcagacacagctttgatgatagtcatgtaccatcaggtgacgtgcctagctatacagattctctggcttctctaaatgatgcactttctgagggtctcagccctagttctgactgggtagcaagagtttcagctttcgagtttattagaaatttattgaaacaaggccagaaaggcattcaagaaattactcagaattttgagaaggttatgaagctgtttttccgtcatttggatgatcctcaccataaggttgcacaggcagctttctctacacttgcagagattatcccagcttccaagaagccatttgaaagttatgtagagcgaattctaccttatgtattttcacggcttattgatccaaaagagttggtgaaaaaaccatgctccataacattggaggttgttggtcgaacatatgctattgatatgttactacctgcactagtacgctcattagatgaacagagatctccaaaggcaaaattggccgttcttgagtttgcaaataaatcattcagcaagtacactgtggactctgatggttatagtaacagtggcttccttaaactatggctttcaaaattggcacctttggtaaatgaaaagaatgcaaaattaaaggaggcatctatttctggtatcatatccgtttattctcattttgattcaacagcagtgctaaattttattctcagtttgtcagttgaagatcaaaacctcttgaggagagctctgaagatcaaaacccctcgtatcgaggttgatctggtgaactacttgcagagcaagaaagaacgtccacgccccaaatcttatgaccaggtggattttggaacttcggaggatggctatgcactgacatccaagaagagctatccatttggacggttttcttctagttcccttgatgctgaagggggaaagatgatcagttcgatgcacgaaccagtgctgcataatgtttctataggtcgaacaacttctgatatgagcatggatcatgctattcaaagtttggagtcatctacaggagctgaagttcatttaactaggagtagggaaccaaagaataacattaactcagttgtggaagctgctcgctcttggacaaactacactgaaaaaactgatgcctctttagatggtgaaactgctaccagtactcctcggttagatgtcagccggtttgtaacttctgatgggcataatactgttggctcaaccactgaagaaagtgttcaagagggtgatatgattgtgaatcttagttctataaagaccagccttcaaatggacaacggtctgagcgtaccacaacttctctatcagataagcaatgacactgaagtttcaagctcagaaaagcgggaagcactacaacaattggtcgatgcttccctcgataacaacagctccatttgggcaaagtacttcaatcaaatcttaaaggttgtgcttgaagtattagatgactctgattcatccatgagggagcttgctttatctttgattactgagatgctcaactaccagaaagatgcaattgaagactctatggagattgtttttgaaaaactcctgcatgtgaccaaagatgctgtggccaagatttcaaatgaggcaaaccaatgcttaaatgttctattggcaaaatacaaccctttcacatgtcttgctattactgtacctttattggtcagtgatgatgagaagatgcttgttgtgtgtatcaactgcttgacaaagcttgttggacgcctttctcaagaggaattgattgttcaattgcctacatttctgccagcattatttgatgcttttaacaaccaaagtccagatgtccgaaagactgttgtgttctgtctggtggatatctacatcatgcttgggaaagcatttgctccatacttggaagggcttagcagcacgcagctccgcctagtaaccatctacgctaaccggatttcacaggcgaggtccggcaagccaatcgattctaaccaatgaggttgtaacattgttattatttgtggtctatatgagcatttctccggtagggtggttttcttgtcatttgtttgtgtatgtgtatagtataaacaagcgcctcccatctgttaagagctcctggtttttgccctgtgtgattatgcattccctctttacgccttttcctctcttttccccctttggtagcttgtggagagtgctaatgagtgtggcttcatttgtactacttggtacatactctgtacaaagaaaggaaagtgtagtttcgtggagaacagttatgcaagtgatttttttgacgccattttccttggcgggatgacagtttgccggcctgtttgtggtgaaatatggcaaaactgttatgtattctcttcttcagctcgatcacttctcttcgtattacgtctgttagaagagtgaaagtagacgaaagagtgaattgctc

SEQ ID NO: 24644 - DNA, 4477 bp, Zea Mays
attttatgctctgttcttgaccgtatgatctctatttctgttgatcttgttcaatttcccaatagtccatctcacatttgcaagctggagagactgaatcattttcacagcaacattcaatgagatgtacaaacacatgggatcacaatttcatgaagagttgcagcgccataatctgccttcatatatgctaaaagaaataaattcgagattggataaaatagaaccaaaggttcgatcatctgatacagcaatgcagtataaggctgtagagtctagatctgttagtgccaatcccaaaagaggcagtccaaggacaaaaagcacaccaagggaaagtacactatatggaggtgacaccgatgttacagaaaaccctgtggaaccagtaaaagttcattctgagaaagaattacttcgggaatttgagaagatcgcagctaccctttctccagaaaaggattggtctttacgtattgctgccttgcaaaggattgaagccctggtttatggaggtgccattgattatccatcatttcttatgctcttgaagcaactggttcctccattgtctaatcagctgtgtgatcgacgttctagtattgtcaaacaggcatgccacctacttaatatactatccaaagaactgctcggtgattttgagccatgtgctgaactattcatcccgatgctttttaagcttgttgtcataaccgtgcttgtgatcgctgaatctgcagatacatgcataaaaactattctgcggaattgcaaggttgctaggattcttcctcgcatagttgacacagcaaagaatgaccggagtgcaatcctccgtgcaaggtaaatgtgtttgactgttttcacattgtccattggtttcttgccagtttttaagtttacttgtactattccaggtgctgtgagtatgcacttctgatactggagtattgggctgatgcctcagaaatacaacgttcagctgatttatatgaggatatgataaaatgctgtgtcgcagatgcgatgagcgaggttagggcaactgcaagaacttgctatagaatgtttgcaaagacatggcctgagcgttcacgccgtctttttatgttatttgatcctgcgatacagaggataataaacgatgaagatggtggtgtgcataaaagatatgcttctccctcattgcgtgatagggttgtgcaaccttcacgtgcttcctctcattcaagtggtacatatgtacctggatatggcacttcagctattgttgcaatggacaagagtgcagctatttcttcagattcatcttttccatcaaccaatcttcggttatcacagtcaaagacgattggcagaagttctgagagaagcctggagagcgtgcttagctccagtaaagaaaaagtttctgccattgaaagtttgctgaaaggtgtcagcatgtcagggcaaaatttctctgctgcacgctcaacaagtttggatcttggagttgatcctccatcatctcgtgatcctcctgtgctgcttgcagcaccagcatcaaatgttctatcattgcagaactcagcactgttggactcatcccttcctaccatcccacctagttcgcgaaatggaggttcccgcttattggaaacgatgacaacacacttgcccaccaaagaaagatcaaggtcaccatacttgagtaatatgtcatctgagtccatgtctggcttatcactgccttactcaagaagatcttcggagaggcttcaagaaggaggccgcatggatgagagctatgatatccgttcaactaggcgaatgcctcaaatgcacttcgacagaaactatgttgatatgccttacagggatgccagccacagagattcacataacaacaatgtcccaaattttcagagacctcttctaaggaaacaagtaatgtcaagggcttctgcaagtggcagacacagctttgatgatagtcatgtaccatcaggtgacgtgcctagctatacagattctctggcttctctaaatgatgcactttctgagggtctcagccctagttctgactgggtagcaagagtttcagctttcgagtttattagaaatttattgaaacaaggccagaaaggcattcaagaaattactcagaattttgagaaggttatgaagctgtttttccgtcatttggatgatcctcaccataaggttgcacaggcagctttctctacacttgcagagattatcccagcttccaagaagccatttgaaagttatgtagagcgaattctaccttatgtattttcacggcttattgatccaaaagagttggtgaaaaaaccatgctccataacattggaggttgttggtcgaacatatgctattgatatgttactacctgcactagtacgctcattagatgaacagagatctccaaaggcaaaattggccgttcttgagtttgcaaataaatcattcagcaagtacactgtggactctgatggttatagtaacagtggcttccttaaactatggctttcaaaattggcacctttggtaaatgaaaagaatgcaaaattaaaggaggcatctatttctggtatcatatccgtttattctcattttgattcaacagcagtgctaaattttattctcagtttgtcagttgaagatcaaaacctcttgaggagagctctgaagatcaaaacccctcgtatcgaggttgatctggtgaactacttgcagagcaagaaagaacgtccacgccccaaatcttatgaccaggtggattttggaacttcggaggatggctatgcactgacatccaagaagagctatccatttggacggttttcttctagttcccttgatgctgaagggggaaagatgatcagttcgatgcacgaaccagtgctgcataatgtttctataggtcgaacaacttctgatatgagcatggatcatgctattcaaagtttggagtcatctacaggagctgaagttcatttaactaggagtagggaaccaaagaataacattaactcagttgtggaagctgctcgctcttggacaaactacactgaaaaaactgatgcctctttagatggtgaaactgctaccagtactcctcggttagatgtcagccggtttgtaacttctgatgggcataatactgttggctcaaccactgaagaaagtgttcaagagggtgatatgattgtgaatcttagttctataaagaccagccttcaaatggacaacggtctgagcgtaccacaacttctctatcagataagcaatgacactgaagtttcaagctcagaaaagcgggaagcactacaacaattggtcgatgcttccctcgataacaacagctccatttgggcaaagtacttcaatcaaatcttaaaggttgtgcttgaagtattagatgactctgattcatccatgagggagcttgctttatctttgattactgagatgctcaactaccagaaagatgcaattgaagactctatggagattgtttttgaaaaactcctgcatgtgaccaaagatgctgtggccaagatttcaaatgaggcaaaccaatgcttaaatgttctattggcaaaatacaaccctttcacatgtcttgctattactgtacctttattggtcagtgatgatgagaagatgcttgttgtgtgtatcaactgcttgacaaagctttgatttagtgcagagagcatcatgtgattgtgtatcagtcttgattctaaatttgagcttgttggacgcctttctcaagaggaattgattgttcaattgcctacatttctgccagcattatttgatgcttttaacaaccaaagtccagatgtccgaaagactgttgtgttctgtctggtggatatctacatcatgcttgggaaagcatttgctccatacttggaagggcttagcagcacgcagctccgcctagtaaccatctacgctaaccggatttcacaggcgaggtccggcaagccaatcgattctaaccaatgaggttgtaacattgttattatttgtggtctatatgagcatttctccggtagggtggttttcttgtcatttgtttgtgtatgtgtatagtataaacaagcgcctcccatctgttaagagctcctggtttttgccctgtgtgattatgcattccctctttacgccttttcctctcttttccccctttggtagcttgtggagagtgctaatgagtgtggcttcatttgtactacttggtacatactctgtacaaagaaaggaaagtgtagtttcgtggagaacagttatgcaagtgatttttttgacgccattttccttggcgggatgacagtttgccggcctgtttgtggtgaaatatggcaaaactgttatgtattctcttcttcagctcgatcacttctcttcgtattacgtctgttagaagagtgaaagtagacgaaagagtgaattgctc

SEQ ID NO: 24645 - DNA, 4327 bp, Zea Mays
cccacctcacccctcccgccccctccctcctcagatccggccatctcctgcccgcctcgccgccggtcccgcggcccggaaccctaaagctcacccccgtggcggtgcccccggtcgcgtggggagaatggaggcggcgctggaggcggcgcgcgccaaggacaccaaggagcgcctggccggggtcgagcggctgcacgaggcgctcgacgccgcggcgcgccgcgggctgaccgcggccgaggtcaccgcgctcgtggacacctgcatggatctgacgcgggacgccaacttccgcatcgcccagggcggcctccaggcgctctccgccgccgccgtcgtcgccggcgaccacttcaagatccatctcaacgccctcgtcccggccgccgtcgaacgcctcggcgacggcaagcagcccgttcgcgacgccgcgcggcagctcctcattactctgatggaggcatgccacctacttaatatactatccaaagaactgctcggtgattttgagccatgtgctgaactattcatcccgatgctttttaagcttgttgtcataaccgtgcttgtgatcgctgaatctgcagatacatgcataaaaactattctgcggaattgcaaggttgctaggattcttcctcgcatagttgacacagcaaagaatgaccggagtgcaatcctccgtgcaaggtaaatgtgtttgactgttttcacattgtccattggtttcttgccagtttttaagtttacttgtactattccaggtgctgtgagtatgcacttctgatactggagtattgggctgatgcctcagaaatacaacgttcagctgatttatatgaggatatgataaaatgctgtgtcgcagatgcgatgagcgaggttagggcaactgcaagaacttgctatagaatgtttgcaaagacatggcctgagcgttcacgccgtctttttatgttatttgatcctgcgatacagaggataataaacgatgaagatggtggtgtgcataaaagatatgcttctccctcattgcgtgatagggttgtgcaaccttcacgtgcttcctctcattcaagtggtacatatgtacctggatatggcacttcagctattgttgcaatggacaagagtgcagctatttcttcagattcatcttttccatcaaccaatcttcggttatcacagtcaaagacgattggcagaagttctgagagaagcctggagagcgtgcttagctccagtaaagaaaaagtttctgccattgaaagtttgctgaaaggtgtcagcatgtcagggcaaaatttctctgctgcacgctcaacaagtttggatcttggagttgatcctccatcatctcgtgatcctcctgtgctgcttgcagcaccagcatcaaatgttctatcattgcagaactcagcactgttggactcatcccttcctaccatcccacctagttcgcgaaatggaggttcccgcttattggaaacgatgacaacacacttgcccaccaaagaaagatcaaggtcaccatacttgagtaatatgtcatctgagtccatgtctggcttatcactgccttactcaagaagatcttcggagaggcttcaagaaggaggccgcatggatgagagctatgatatccgttcaactaggcgaatgcctcaaatgcacttcgacagaaactatgttgatatgccttacagggatgccagccacagagattcacataacaacaatgtcccaaattttcagagacctcttctaaggaaacaagtaatgtcaagggcttctgcaagtggcagacacagctttgatgatagtcatgtaccatcaggtgacgtgcctagctatacagattctctggcttctctaaatgatgcactttctgagggtctcagccctagttctgactgggtagcaagagtttcagctttcgagtttattagaaatttattgaaacaaggccagaaaggcattcaagaaattactcagaattttgagaaggttatgaagctgtttttccgtcatttggatgatcctcaccataaggttgcacaggcagctttctctacacttgcagagattatcccagcttccaagaagccatttgaaagttatgtagagcgaattctaccttatgtattttcacggcttattgatccaaaagagttggtgaaaaaaccatgctccataacattggaggttgttggtcgaacatatgctattgatatgttactacctgcactagtacgctcattagatgaacagagatctccaaaggcaaaattggccgttcttgagtttgcaaataaatcattcagcaagtacactgtggactctgatggttatagtaacagtggcttccttaaactatggctttcaaaattggcacctttggtaaatgaaaagaatgcaaaattaaaggaggcatctatttctggtatcatatccgtttattctcattttgattcaacagcagtgctaaattttattctcagtttgtcagttgaagatcaaaacctcttgaggagagctctgaagatcaaaacccctcgtatcgaggttgatctggtgaactacttgcagagcaagaaagaacgtccacgccccaaatcttatgaccaggtggattttggaacttcggaggatggctatgcactgacatccaagaagagctatccatttggacggttttcttctagttcccttgatgctgaagggggaaagatgatcagttcgatgcacgaaccagtgctgcataatgtttctataggtcgaacaacttctgatatgagcatggatcatgctattcaaagtttggagtcatctacaggagctgaagttcatttaactaggagtagggaaccaaagaataacattaactcagttgtggaagctgctcgctcttggacaaactacactgaaaaaactgatgcctctttagatggtgaaactgctaccagtactcctcggttagatgtcagccggtttgtaacttctgatgggcataatactgttggctcaaccactgaagaaagtgttcaagagggtgatatgattgtgaatcttagttctataaagaccagccttcaaatggacaacggtctgagcgtaccacaacttctctatcagataagcaatgacactgaagtttcaagctcagaaaagcgggaagcactacaacaattggtcgatgcttccctcgataacaacagctccatttgggcaaagtacttcaatcaaatcttaaaggttgtgcttgaagtattagatgactctgattcatccatgagggagcttgctttatctttgattactgagatgctcaactaccagaaagatgcaattgaagactctatggagattgtttttgaaaaactcctgcatgtgaccaaagatgctgtggccaagatttcaaatgaggcaaaccaatgcttaaatgttctattggcaaaatacaaccctttcacatgtcttgctattactgtacctttattggtcagtgatgatgagaagatgcttgttgtgtgtatcaactgcttgacaaagctttgatttagtgcagagagcatcatgtgattgtgtatcagtcttgattctaaatttgagcttgttggacgcctttctcaagaggaattgattgttcaattgcctacatttctgccagcattatttgatgcttttaacaaccaaagtccagatgtccgaaagactgttgtgttctgtctggtggatatctacatcatgcttgggaaagcatttgctccatacttggaagggcttagcagcacgcagctccgcctagtaaccatctacgctaaccggatttcacaggcgaggtccggcaagccaatcgattctaaccaatgaggttgtaacattgttattatttgtggtctatatgagcatttctccggtagggtggttttcttgtcatttgtttgtgtatgtgtatagtataaacaagcgcctcccatctgttaagagctcctggtttttgccctgtgtgattatgcattccctctttacgccttttcctctcttttccccctttggtagcttgtggagagtgctaatgagtgtggcttcatttgtactacttggtacatactctgtacaaagaaaggaaagtgtagtttcgtggagaacagttatgcaagtgatttttttgacgccattttccttggcgggatgacagtttgccggcctgtttgtggtgaaatatggcaaaactgttatgtattctcttcttcagctcgatcacttctcttcgtattacgtctgttagaagagtgaaagtagacgaaagagtgaattgctc

SEQ ID NO: 24646 - DNA, 4724 bp, Zea Mays
cccacctcacccctcccgccccctccctcctcagatccggccatctcctgcccgcctcgccgccggtcccgcggcccggaaccctaaagctcacccccgtggcggtgcccccggtcgcgtggggagaatggaggcggcgctggaggcggcgcgcgccaaggacaccaaggagcgcctggccggggtcgagcggctgcacgaggcgctcgacgccgcggcgcgccgcgggctgaccgcggccgaggtcaccgcgctcgtggacacctgcatggatctgacgcgggacgccaacttccgcatcgcccagggcggcctccaggcgctctccgccgccgccgtcgtcgccggcgaccacttcaagatccatctcaacgccctcgtcccggccgccgtcgaacgcctcggcgacggcaagcagcccgttcgcgacgccgcgcggcagctcctcattactctgatggaggtttcttcaccaacaatcatagttgaaagagctggtagttatgcatggactcataagagttggagggtgcgggaagagtttgtacgtacggtggcaactgcaattgggctatttgcttctactgagatttccttgcaacgggttttgctttcacctgtcctgcaattgatgaatgattcgaaccaaagtgtccgagatgctgctatctattgtattgaggagatgtacaaacacatgggatcacaatttcatgaagagttgcagcgccataatctgccttcatatatgctaaaagaaataaattcgagattggataaaatagaaccaaaggttcgatcatctgatacagcaatgcagtataaggctgtagagtctagatctgttagtgccaatcccaaaagaggcagtccaaggacaaaaagcacaccaagggaaagtacactatatggaggtgacaccgatgttacagaaaaccctgtggaaccagtaaaagttcattctgagaaagaattacttcgggaatttgagaagatcgcagctaccctttctccagaaaaggattggtctttacgtattgctgccttgcaaaggattgaagccctggtttatggaggtgccattgattatccatcatttcttatgctcttgaagcaactggttcctccattgtctaatcagctgtgtgatcgacgttctagtattgtcaaacaggcatgccacctacttaatatactatccaaagaactgctcggtgattttgagccatgtgctgaactattcatcccgatgctttttaagcttgttgtcataaccgtgcttgtgatcgctgaatctgcagatacatgcataaaaactattctgcggaattgcaaggttgctaggattcttcctcgcatagttgacacagcaaagaatgaccggagtgcaatcctccgtgcaaggtgctgtgagtatgcacttctgatactggagtattgggctgatgcctcagaaatacaacgttcagctgatttatatgaggatatgataaaatgctgtgtcgcagatgcgatgagcgaggttagggcaactgcaagaacttgctatagaatgtttgcaaagacatggcctgagcgttcacgccgtctttttatgttatttgatcctgcgatacagaggataataaacgatgaagatggtggtgtgcataaaagatatgcttctccctcattgcgtgatagggttgtgcaaccttcacgtgcttcctctcattcaagtggtacatatgtacctggatatggcacttcagctattgttgcaatggacaagagtgcagctatttcttcagattcatcttttccatcaaccaatcttcggttatcacagtcaaagacgattggcagaagttctgagagaagcctggagagcgtgcttagctccagtaaagaaaaagtttctgccattgaaagtttgctgaaaggtgtcagcatgtcagggcaaaatttctctgctgcacgctcaacaagtttggatcttggagttgatcctccatcatctcgtgatcctcctgtgctgcttgcagcaccagcatcaaatgttctatcattgcagaactcagcactgttggactcatcccttcctaccatcccacctagttcgcgaaatggaggttcccgcttattggaaacgatgacaacacacttgcccaccaaagaaagatcaaggtcaccatacttgagtaatatgtcatctgagtccatgtctggcttatcactgccttactcaagaagatcttcggagaggcttcaagaaggaggccgcatggatgagagctatgatatccgttcaactaggcgaatgcctcaaatgcacttcgacagaaactatgttgatatgccttacagggatgccagccacagagattcacataacaacaatgtcccaaattttcagagacctcttctaaggaaacaagtaatgtcaagggcttctgcaagtggcagacacagctttgatgatagtcatgtaccatcaggtgacgtgcctagctatacagattctctggcttctctaaatgatgcactttctgagggtctcagccctagttctgactgggtagcaagagtttcagctttcgagtttattagaaatttattgaaacaaggccagaaaggcattcaagaaattactcagaattttgagaaggttatgaagctgtttttccgtcatttggatgatcctcaccataaggttgcacaggcagctttctctacacttgcagagattatcccagcttccaagaagccatttgaaagttatgtagagcgaattctaccttatgtattttcacggcttattgatccaaaagagttggtgaaaaaaccatgctccataacattggaggttgttggtcgaacatatgctattgatatgttactacctgcactagtacgctcattagatgaacagagatctccaaaggcaaaattggccgttcttgagtttgcaaataaatcattcagcaagtacactgtggactctgatggttatagtaacagtggcttccttaaactatggctttcaaaattggcacctttggtaaatgaaaagaatgcaaaattaaaggaggcatctatttctggtatcatatccgtttattctcattttgattcaacagcagtgctaaattttattctcagtttgtcagttgaagatcaaaacctcttgaggagagctctgaagatcaaaacccctcgtatcgaggttgatctggtgaactacttgcagagcaagaaagaacgtccacgccccaaatcttatgaccaggtggattttggaacttcggaggatggctatgcactgacatccaagaagagctatccatttggacggttttcttctagttcccttgatgctgaagggggaaagatgatcagttcgatgcacgaaccagtgctgcataatgtttctataggtcgaacaacttctgatatgagcatggatcatgctattcaaagtttggagtcatctacaggagctgaagttcatttaactaggagtagggaaccaaagaataacattaactcagttgtggaagctgctcgctcttggacaaactacactgaaaaaactgatgcctctttagatggtgaaactgctaccagtactcctcggttagatgtcagccggtttgtaacttctgatgggcataatactgttggctcaaccactgaagaaagtgttcaagagggtgatatgattgtgaatcttagttctataaagaccagccttcaaatggacaacggtctgagcgtaccacaacttctctatcagataagcaatgacactgaagtttcaagctcagaaaagcgggaagcactacaacaattggtcgatgcttccctcgataacaacagctccatttgggcaaagatttcaaatgaggcaaaccaatgcttaaatgttctattggcaaaatacaaccctttcacatgtcttgctattactgtacctttattggtcagtgatgatgagaagatgcttgttgtgtgtatcaactgcttgacaaagcttgttggacgcctttctcaagaggaattgattgttcaattgcctacatttctgccagcattatttgatgcttttaacaaccaaagtccagatgtccgaaagactgttgtgttctgtctggtggatatctacatcatgcttgggaaagcatttgctccatacttggaagggcttagcagcacgcagctccgcctagtaaccatctacgctaaccggatttcacaggcgaggtccggcaagccaatcgattctaaccaatgaggttgtaacattgttattatttgtggtctatatgagcatttctccggtagggtggttttcttgtcatttgtttgtgtatgtgtatagtataaacaagcgcctcccatctgttaagagctcctggtttttgccctgtgtgattatgcattccctctttacgccttttcctctcttttccccctttggtagcttgtggagagtgctaatgagtgtggcttcatttgtactacttggtacatactctgtacaaagaaaggaaagtgtagtttcgtggagaacagttatgcaagtgatttttttgacgccattttccttggcgggatgacagtttgccggcctgtttgtggtgaaatatggcaaaactgttatgtattctcttcttcagctcgatcacttctcttcgtattacgtctgttagaagagtgaaagtagacgaaagagtgaattgctc

SEQ ID NO: 24647 - DNA, 1557 bp, Zea Mays
cgcaaacacgcacgcacaccgtacccctcagctcgcgccaccggccaccgcacacagaacgcgtgctccgtccgtcctccctctgcctcgcgcgcgcagggttagcgtgagctgatcgagcaacgagagctagctagctagaggacacgacacgatggccttgcaggtcaccggcggcgtgggctgctgctgccctccgggcagtgcccggcggttgccgcaagcggcggcgctgtgtcgcccgccccgcgcggtagtgtccggcgcaaccagggtggtggaggaggacgagggcaaggtgaggctgggcggctcaggcgtcgcggtcaccaagctcggcatcggcgcgtggtcctggggcgacaccacctactggaacgactccgagtgggatgacaggagactgagggaagcacaggacgcgttcgatgcgagcatcgataacgggatgaccttcttcgatactgcagaagtttacgctgatgggagcagtcaattctgaaactttactaggaggattcatcaaggaaaggcaacagaaggaccagatcgaggtgtccgttgcaacaaagttcgctgcccttccttggagatttggaaggggtagcgttctttcggcgctgaagaaatcgctagaccgtctaggcctagcgtctgtcgagctctatcaactccactggccagggatttgggggaacgaaggatatcttgatggtctcgcggatgcttatgagcaaggcctagtcaaggctgttggagtctcaaactacaatgagaagcgccttcgggatgcacatgctcgcctgaagaagcggggggttccacttgctgcaaaccaggtgaactacagcctcatatatagaacccctgagttgaatggcgtgaaagcagcatgtgatgagctcggcatcaccttgattgcttattccccgatagcgcaaggtgttctgacaggtaagtacactccagaaaacccccctactggtcctcgagcaaacacatacacccctgagttcctcgccaagctccaaccacttatgaacaggattaaagagatcggagcaagctatggcaagagtccaacccaggtgtctctgaactggctgacctgccaggggaacgtggtgccaatccccggagccaagaatgccagccaggccaaggagttcgccggtgcactcggctggagcctgacgggggacgaggtggaagagctacggactctggcacgcgagatcaagggcatcaggatgcccatcgaggagtcgtagatactctgtatttcaccaacccatgtcgtagcaggcgctgacggagaagacgacgcaaggatctagaaataaaccaggttgtgtaagtagaatagcttccaacgaatctcaggcctaagcattgtaagtatgcaatattcatttgccgaaaccagggctgtacctctgctgcctgttctctgctgaaaaaaaagttaggatggaaagatagagactattgtgccgcaaaacaacacaaaggaaattactgaaaatgaaagaaaagttacaacctgtccatttgatt

SEQ ID NO: 24648 - DNA, 1540 bp, Zea Mays
cgcaaacacgcacgcacaccgtacccctcagctcgcgccaccggccaccgcacacagaacgcgtgctccgtccgtcctccctctgcctcgcgcgcgcagggttagcgtgagctgatcgagcaacgagagctagctagctagaggacacgacacgatggccttgcaggtcaccggcggcgtgggctgctgctgccctccgggcagtgcccggcggttgccgcaagcggcggcgctgtgtcgcccgccccgcgcggtagtgtccggcgcaaccagggtggtggaggaggacgagggcaaggtgaggctgggcggctcaggcgtcgcggtcaccaagctcggcatcggcgcgtggtcctggggcgacaccacctactggaacgactccgagtgggatgacaggagactgagggaagcacaggacgcgttcgatgcgagcatcgataacgggatgaccttcttcgatactgcagaagtttacggtacagcactgatgggagcagtcaattctgaaactttactaggaggattcatcaaggaaaggcaacagaaggaccagatcgaggtgtccgttgcaacaaagttcgctgcccttccttggagatttggaaggggtagcgttctttcggcgctgaagaaatcgctagaccgtctaggcctagcgtctgtcgagctctatcaactccactggttggttcttccgctctctatgcaggatatcttgatggtctcgcggatgcttatgagcaaggcctagtcaaggctgttggagtctcaaactacaatgagaagcgccttcgggatgcacatgctcgcctgaagaagcggggggttccacttgctgcaaaccaggtgaactacagcctcatatatagaacccctgagttgaatggcgtgaaagcagcatgtgatgagctcggcatcaccttgattgcttattccccgatagcgcaaggtgttctgacaggtaagtacactccagaaaacccccctactggtcctcgagcaaacacatacacccctgagttcctcgccaagctccaaccacttatgaacaggattaaagagatcggagcaagctatggcaagagtccaacccaggggaacgtggtgccaatccccggagccaagaatgccagccaggccaaggagttcgccggtgcactcggctggagcctgacgggggacgaggtggaagagctacggactctggcacgcgagatcaagggcatcaggatgcccatcgaggagtcgtagatactctgtatttcaccaacccatgtcgtagcaggcgctgacggagaagacgacgcaaggatctagaaataaaccaggttgtgtaagtagaatagcttccaacgaatctcaggcctaagcattgtaagtatgcaatattcatttgccgaaaccagggctgtacctctgctgcctgttctctgctgaaaaaaaagttaggatggaaagatagagactattgtgccgcaaaacaacacaaaggaaattactgaaaatgaaagaaaagttacaacctgtccatttgatt

SEQ ID NO: 24649 - DNA, 611 bp, Zea Mays
aaaagtttcacatgtgatcaatcccaaccggtgtgacagttattgcctatgggtcgcaccctttggggaccctgtgtactgtactatatatatatataactatctctgcaataaagaaacggtcccagtcatttgtctctctctgttgctttctccatttgtcactgagcactgcaatagatcacaacagttacaaccgcaaaatgctaggttggctgatgggctagtagagagcggacagctatgaggacgacaaaattcgtggacaagataaatgggctagaacgtccaattcaaacggatagaccgatagagagaaaataagtcggtaagaactgacaacactttggcccaataccaagaaagaatacccatgttcttttaaccttgtgaaagaaaatataaggtcatgtttggaatttggatgcaaaaaccatttgagtattgaataaatgttttttttgaaaattttggtttaatgttgttgcttgtttggatattacaaaccttgtagtttgtattgttgctttgggttccatgttagcttttgtacaacgtgttttgattgattgagtagcaaaatttgtcaaaaaccaatggcgtatgtgtat

SEQ ID NO: 24650 - DNA, 1155 bp, Zea Mays
attttttaatcctaccaaatagatagcaccccacctgacatgaggttacatgacatgttctcaccaatcactgctttcattacccaataaatctgccaatggatctatcagcgcccagatttcctaccaaatcggatgcctaccatcgatgagagacatgtgagccaaatcggaaggcaactgttggcttgtcttactgttgagttgatggttcagaattattcctcgaaatagtggattagtggttgtgattagtgtgccttggaggcagaatggtgccatcatttactaccaaaatgagcagggaaagtaagaggattgcaacagatgaatgtaggaattctgaacttgtgtgggtgggggctcaccaggctcagactcggacctgaggtagatgcggcagcaagcgacgaaggcggcattgatctcgtcgtcggttattttccacgtcggggaatcccttgaccccaacagcggtggcctccttggggtagcactccatgccgagcttcacgaaggcgacatcgctgatcatggcgtgcagcgtggcggcggcctcggcgaaccacgacataagctgcgacgggaggcgacgagaggcatgaaccatgacatgagctgtgatgtgaggttcatcacgtcgtctcctctggccccttggcgctgcgtctcatccgctgaggcaacaatccacgtgggtggtcgaggccgtcaacggttcctagatcccatcgcggtgcaacctctagtgagggcgtcgaatccaatgagggcttcggtgagggtgcgagatctagcgagggctcagacaccaaatctgatgagagggccacacgagctctagccaccaatttaggagtagaagaccggcgtgggaggcccggagtgaggggagggcaaagattcggggtgaggatgagagcgcgcgcggtgggggtggggggcaaggcacctgctgcggcgggcatggagcagggcattgcggtggcgttagcctagtgtcatctctaattggcacatgcgtgagcggggcatcatctctggtgggcatcgtgcgcgagcggggcatcatctccggtgggcatcgtgcggcgacatgggagttgggcacgagggagaaggggagggggtcgggcacgaggaggctaggagggg

SEQ ID NO: 24651 - DNA, 1487 bp, Zea Mays
ctcgatcttagaacgagaaacttaaaggaaaaaaagaagtcatgatgaagagtacagatttataagagcgcgcaggagctaacgtggttgagtgtgcatgcctcattgggcttcccaagtttaaggatttctataagctcaacgggaaaccggtttacatcctggtggagtcccgcaaataggacgcagtaaaatggtcagacaaaaaaagctttctagcttcccgtccaaagaagctcacagcttcactcatttgcacgcgcaagcaaggtggtatgggggcaccgagaaactccgcagtaatctgtgttgaggccacggccagatgatgctatgtactcctatcttcatggagagggtgatggactgggtgaaacgtagtcactgtacttttgtagcacgtcatgtctagtgtttcttagtagccatggctgaagagagtttgtagcttattcccggcttcctgcagccaggaacatcagtgttagccagagaagctaggaaaaaggatcttatgttgctgctcagttttctaccagaatcgtcttcctttttttcccctttgcagaatcaactctttggtaaactttactaagctcgttttgcctaaacggccgttcaatcatgaagaaagagcaatcatacgtaatgccagcgtaaggaggacatgtcttttttccaatatattactatattcaagctcccagaatcaactctttgataaaatttgcatctaccttggtgcttgtacaccagactagcctaacaaagtgtcgcccctgcacttgcagatggttcccaaaccctatgccgtcgaaccacacttatctactatgtctacgactaatagttagatgacactatggtttctatatattagttgattatacattactatagtttttatatatcatatttgtaaacatttcccatgagtcaatgataggtggagtctatgatatatatataaagttgtaatcttttaatgatatagatccaattatttctttattcaaacacgattttttaattttcaaattattatcatctaccttttatataacacaaagtagcaagagctgtagtggttaaggcgtggggcttagatccttgcatcctgtgtttggatcccacttgtctcattttttttttataattccgggcggctggataagcgccaggtgggagcgacacaaaaaccactgatggcgatgtctaacgttggtctggcacccatctacttaattcttctgtatctgtatgagtcgtgatcatgtgttagattttgcttaagatcctatgtacatttgctatatgtttatgtaccatatgcttatgctaagatcagttttgacacttgcatgtttatcaacgacacgtggaaatggtggaagcctgtcacagaagttcctagcaccctgatccagtgatccctgcattgttccatgaatatcctcctctcacttggagcctgaagggattgaaat

SEQ ID NO: 24652 - DNA, 1713 bp, Zea Mays
gtcggctcggccccgtcctcggacgccgagatgtggtcacgctttccttgcattgaagctagaggattcatctttgggccagccattgcgctagccataggagcaaagttcataccactacgtaaacctaagaagcttccaggtgaggtattttctgaaagttatgtacttgagtatgggatggattgtttggagatgcatgttggagctattgaacccggggagcgcgtagtggttgtcgatgatttggttgcaactggtggaactctttctgctgcaataagacttctcgagcgcgcaggagctaacgtggttgagtgtgcatgcctcattgggcttcccaagtttaaggatttctataagctcaacgggaaaccggtttacatcctggtggagtcccgcaaataggacgcagtaaaatggtcagacaaaaaaagctttctagcttcccgtccaaagaagctcacagcttcactcatttgcacgcgcaagcaaggtggtatgggggcaccgagaaactccgcagtaatctgtgttgaggccacggccagatgatgctatgtactcctatcttcatggagagggtgatggactgggtgaaacgtagtcactgtacttttgtagcacgtcatgtctagtgtttcttagtagccatggctgaagagagtttgtagcttattcccggcttcctgcagccaggaacatcagtgttagccagagaagctaggaaaaaggatcttatgttgctgctcagttttctaccagaatcgtcttcctttttttcccctttgcagaatcaactctttggtaaactttactaagctcgttttgcctaaacggccgttcaatcatgaagaaagagcaatcatacgtaatgccagcgtaaggaggacatgtcttttttccaatatattactatattcaagctcccagaatcaactctttgataaaatttgcatctaccttggtgcttgtacaccagactagcctaacaaagtgtcgcccctgcacttgcagatggttcccaaaccctatgccgtcgaaccacacttatctactatgtctacgactaatagttagatgacactatggtttctatatattagttgattatacattactatagtttttatatatcatatttgtaaacatttcccatgagtcaatgataggtggagtctatgatatatatataaagttgtaatcttttaatgatatagatccaattatttctttattcaaacacgattttttaattttcaaattattatcatctaccttttatataacacaaagtagcaagagctgtagtggttaaggcgtggggcttagatccttgcatcctgtgtttggatcccacttgtctcattttttttttataattccgggcggctggataagcgccaggtgggagcgacacaaaaaccactgatggcgatgtctaacgttggtctggcacccatctacttaattcttctgtatctgtatgagtcgtgatcatgtgttagattttgcttaagatcctatgtacatttgctatatgtttatgtaccatatgcttatgctaagatcagttttgacacttgcatgtttatcaacgacacgtggaaatggtggaagcctgtcacagaagttcctagcaccctgatccagtgatccctgcattgttccatgaatatcctcctctcacttggagcctgaagggattgaaat

SEQ ID NO: 24653 - DNA, 2559 bp, Zea Mays
gctgtgacttcatgaggacaggtcgaggaccgtctgctcactagtcactacgtctacgcattgaagctagaggattcatctttgggccagccattgcgctagccataggagcaaagttcataccactacgtaaacctaagaagcttccaggtgaggtattttctgaaagttatgtacttgagtatgggatggattgtttggagatgcatgttggagctattgaacccggggagcgcgtagtggttgtcgatgatttggttgcaactggtggaactctttctgctgcaataagacttctcgagcgcgcaggagctaacgtggttgagtgtgcatgcctcattgggcttcccaagtttaagttagctaaaggaaattgaggaagtattccatctcggtctgagggaggaaagacgcaatagaacaaggccagtgtaaaaaaaaactagtctgcctgtaactattcctgtacatgtgactgcagatttttaataaatgaaatggtatcatctagccgatatcttttcctcctacgagtaaaaccgagagcaacctcagcgtgtgtttgaaaacaaagtattttaaaaaccatggtgttttgaggtaaagtatctcaaaccatggtattggtatgcatgtgcaagaagctagttattcaccaaaactttgggttggagcaaagtttcaaatacttcaaaaatacatgctcagagttttttacaagtaggcaaacaaccactgtattctccaataacatgattttatcttaaaacaataaaactccaaaaacattttgcttcttaacaccctccttaaggtaaaaaaacttgtggatatcttttgtatgtaacttcagtgacagataggtgcatgtggttagggtaaattattttttgttataagaattatatgcctagtgtgcaatggtgagagctcaccgggacgtggggttcaaagcagcctcttcacatttgcggatgaaggatttctataagctcaacgggaaaccggtttacatcctggtggagtcccgcaaataggacgcagtaaaatggtcagacaagtaaatgctctcaagctccttttatacttgaaacttctctcaacattcatttcgaacatatcatgaaattacaaagctatgcatgttcgcagaatcgagctttgcacattgagtcaaatttgatttcctggtgaaacaggagcagtagcagcggtagcgtccagccttaaagcatgcatggctactgacactaatttctgcctcgtgaccatttcagaaaaagctttctagcttcccgtccaaagaagctcacagcttcactcatttgcacgcgcaagcaaggtggtatgggggcaccgagaaactccgcagtaatctgtgttgaggccacggccagatgatgctatgtactcctatcttcatggagagggtgatggactgggtgaaacgtagtcactgtacttttgtagcacgtcatgtctagtgtttcttagtagccatggctgaagagagtttgtagcttattcccggcttcctgcagccaggaacatcagtgttagccagagaagctaggaaaaaggatcttatgttgctgctcagttttctaccagaatcgtcttcctttttttcccctttgcagaatcaactctttggtaaactttactaagctcgttttgcctaaacggccgttcaatcatgaagaaagagcaatcatacgtaatgccagcgtaaggaggacatgtcttttttccaatatattactatattcaagctcccagaatcaactctttgataaaatttgcatctaccttggtgcttgtacaccagactagcctaacaaagtgtcgcccctgcacttgcagatggttcccaaaccctatgccgtcgaaccacacttatctactatgtctacgactaatagttagatgacactatggtttctatatattagttgattatacattactatagtttttatatatcatatttgtaaacatttcccatgagtcaatgataggtggagtctatgatatatatataaagttgtaatcttttaatgatatagatccaattatttctttattcaaacacgattttttaattttcaaattattatcatctaccttttatataacacaaagtagcaagagctgtagtggttaaggcgtggggcttagatccttgcatcctgtgtttggatcccacttgtctcattttttttttataattccgggcggctggataagcgccaggtgggagcgacacaaaaaccactgatggcgatgtctaacgttggtctggcacccatctacttaattcttctgtatctgtatgagtcgtgatcatgtgttagattttgcttaagatcctatgtacatttgctatatgtttatgtaccatatgcttatgctaagatcagttttgacacttgcatgtttatcaacgacacgtggaaatggtggaagcctgtcacagaagttcctagcaccctgatccagtgatccctgcattgttccatgaatatcctcctctcacttggagcctgaagggattgaaat

SEQ ID NO: 24654 - DNA, 2664 bp, Zea Mays
gctgtgacttcatgaggacaggtcgaggaccgtctgctcactagtcactacgtctacgcattgaagctagaggattcatctttgggccagccattgcgctagccataggagcaaagttcataccactacgtaaacctaagaagcttccaggtgaggtattttctgaaagttatgtacttgagtatgggatggattgtttggagatgcatgttggagctattgaacccggggagcgcgtagtggttgtcgatgatttggttgcaactggtggaactctttctgctgcaataagacttctcgagcgcgcaggagctaacgtggttgagtgtgcatgcctcattgggcttcccaagtttaagttagctaaaggaaattgaggaagtattccatctcggtctgagggaggaaagacgcaatagaacaaggccagtgtaaaaaaaaactagtctgcctgtaactattcctgtacatgtgactgcagatttttaataaatgaaatggtatcatctagccgatatcttttcctcctacgagtaaaaccgagagcaacctcagcgtgtgtttgaaaacaaagtattttaaaaaccatggtgttttgaggtaaagtatctcaaaccatggtattggtatgcatgtgcaagaagctagttattcaccaaaactttgggttggagcaaagtttcaaatacttcaaaaatacatgctcagagttttttacaagtaggcaaacaaccactgtattctccaataacatgattttatcttaaaacaataaaactccaaaaacattttgcttcttaacaccctccttaaggtaaaaaaacttgtggatatcttttgtatgtaacttcagtgacagataggtgcatgtggttagggtaaattattttttgttataagaattatatgcctagtgtgcaatggtgagagctcaccgggacgtggggttcaaagcagcctcttcacatttgcggatgaaggtttgcctcagtttatttcttctccaaatgtcatttgggttttttctttcctaaatcacacatatggaagcgtctggcactggttatgtccttttacgtaggtgataagaatagcctaccttaatttataactttaaataccacgcgaccatgtattttttcctatggatgagatagctgataaccattagccacaacaaaagggatatggctaggttgaactctttggaatctagcatatgtagcaggacttgatatttccagatatgatgatagagagagggttgggaaactacgctagtgccatagtccactcaagtctgcctattcagatttctataagctcaacgggaaaccggtttacatcctggtggagtcccgcaaataggacgcagtaaaatgaaaaagctttctagcttcccgtccaaagaagctcacagcttcactcatttgcacgcgcaagcaaggtggtatgggggcaccgagaaactccgcagtaatctgtgttgaggccacggccagatgatgctatgtactcctatcttcatggagagggtgatggactgggtgaaacgtagtcactgtacttttgtagcacgtcatgtctagtgtttcttagtagccatggctgaagagagtttgtagcttattcccggcttcctgcagccaggaacatcagtgttagccagagaagctaggaaaaaggatcttatgttgctgctcagttttctaccagaatcgtcttcctttttttcccctttgcagaatcaactctttggtaaactttactaagctcgttttgcctaaacggccgttcaatcatgaagaaagagcaatcatacgtaatgccagcgtaaggaggacatgtcttttttccaatatattactatattcaagctcccagaatcaactctttgataaaatttgcatctaccttggtgcttgtacaccagactagcctaacaaagtgtcgcccctgcacttgcagatggttcccaaaccctatgccgtcgaaccacacttatctactatgtctacgactaatagttagatgacactatggtttctatatattagttgattatacattactatagtttttatatatcatatttgtaaacatttcccatgagtcaatgataggtggagtctatgatatatatataaagttgtaatcttttaatgatatagatccaattatttctttattcaaacacgattttttaattttcaaattattatcatctaccttttatataacacaaagtagcaagagctgtagtggttaaggcgtggggcttagatccttgcatcctgtgtttggatcccacttgtctcattttttttttataattccgggcggctggataagcgccaggtgggagcgacacaaaaaccactgatggcgatgtctaacgttggtctggcacccatctacttaattcttctgtatctgtatgagtcgtgatcatgtgttagattttgcttaagatcctatgtacatttgctatatgtttatgtaccatatgcttatgctaagatcagttttgacacttgcatgtttatcaacgacacgtggaaatggtggaagcctgtcacagaagttcctagcaccctgatccagtgatccctgcattgttccatgaatatcctcctctcacttggagcctgaagggattgaaat

SEQ ID NO: 24655 - DNA, 1938 bp, Zea Mays
gctgtgacttcatgaggacaggtcgaggaccgtctgctcactagtcactacgtctacgcattgaagctagaggattcatctttgggccagccattgcgctagccataggagcaaagttcataccactacgtaaacctaagaagcttccaggtgaggtattttctgaaagttatgtacttgagtatgggatggattgtttggagatgcatgttggagctattgaacccggggagcgcgtagtggttgtcgatgatttggttgcaactggtggaactctttctgctgcaataagacttctcgagcgcgcaggagctaacgtggttgagtgtgcatgcctcattgggcttcccaagtttaaggatttctataagctcaacgggaaaccggtttacatcctggtggagtcccgcaaataggacgcagtaaaatggtcagacaagtaaatgctctcaagctccttttatacttgaaacttctctcaacattcatttcgaacatatcatgaaattacaaagctatgcatgttcgcagaatcgagctttgcacattgagtcaaatttgatttcctggtgaaacaggagcagtagcagcggtagcgtccagccttaaagcatgcatggctactgacactaatttctgcctcgtgaccatttcagaaaaagctttctagcttcccgtccaaagaagctcacagcttcactcatttgcacgcgcaagcaaggtggtatgggggcaccgagaaactccgcagtaatctgtgttgaggccacggccagatgatgctatgtactcctatcttcatggagagggtgatggactgggtgaaacgtagtcactgtacttttgtagcacgtcatgtctagtgtttcttagtagccatggctgaagagagtttgtagcttattcccggcttcctgcagccaggaacatcagtgttagccagagaagctaggaaaaaggatcttatgttgctgctcagttttctaccagaatcgtcttcctttttttcccctttgcagaatcaactctttggtaaactttactaagctcgttttgcctaaacggccgttcaatcatgaagaaagagcaatcatacgtaatgccagcgtaaggaggacatgtcttttttccaatatattactatattcaagctcccagaatcaactctttgataaaatttgcatctaccttggtgcttgtacaccagactagcctaacaaagtgtcgcccctgcacttgcagatggttcccaaaccctatgccgtcgaaccacacttatctactatgtctacgactaatagttagatgacactatggtttctatatattagttgattatacattactatagtttttatatatcatatttgtaaacatttcccatgagtcaatgataggtggagtctatgatatatatataaagttgtaatcttttaatgatatagatccaattatttctttattcaaacacgattttttaattttcaaattattatcatctaccttttatataacacaaagtagcaagagctgtagtggttaaggcgtggggcttagatccttgcatcctgtgtttggatcccacttgtctcattttttttttataattccgggcggctggataagcgccaggtgggagcgacacaaaaaccactgatggcgatgtctaacgttggtctggcacccatctacttaattcttctgtatctgtatgagtcgtgatcatgtgttagattttgcttaagatcctatgtacatttgctatatgtttatgtaccatatgcttatgctaagatcagttttgacacttgcatgtttatcaacgacacgtggaaatggtggaagcctgtcacagaagttcctagcaccctgatccagtgatccctgcattgttccatgaatatcctcctctcacttggagcctgaagggattgaaat

SEQ ID NO: 24656 - DNA, 1663 bp, Zea Mays
ctgataccattctagcagtacggcctcaccatctgacgttctgggccctgggtcataaattcaggggtccaatgccgccgagctcagctgtgacttcatgaggacaggtcgaggaccgtctgctcactagtcactacgtctacgcattgaagctagaggattcatctttgggccagccattgcgctagccataggagcaaagttcataccactacgtaaacctaagaagcttccaggtgaggtattttctgaaagttatgtacttgagtatgggatggattgtttggagatgcatgttggagctattgaacccggggagcgcgtagtggttgtcgatgatttggttgcaactggtggaactctttctgctgcaataagacttctcgagcgcgcaggagctaacgtggttgagtgtgcatgcctcattgggcttcccaagtttaaggatttctataagctcaacgggaaaccggtttacatcctggtggagtcccgcaaataggacgcagtaaaatgaaaaagctttctagcttcccgtccaaagaagctcacagcttcactcatttgcacgcgcaagcaaggtggtatgggggcaccgagaaactccgcagtaatctgtgttgaggccacggccagatgatgctatgtactcctatcttcatggagagggtgatggactgggtgaaacgtagtcactgtacttttgtagcacgtcatgtctagtgtttcttagtagccatggctgaagagagtttgtagcttattcccggcttcctgcagccaggaacatcagtgttagccagagaagctaggaaaaaggatcttatgttgctgctcagttttctaccagaatcgtcttcctttttttcccctttgcagaatcaactctttggtaaactttactaagctcgttttgcctaaacggccgttcaatcatgaagaaagagcaatcatacgtaatgccagcatggttcccaaaccctatgccgtcgaaccacacttatctactatgtctacgactaatagttagatgacactatggtttctatatattagttgattatacattactatagtttttatatatcatatttgtaaacatttcccatgagtcaatgataggtggagtctatgatatatatataaagttgtaatcttttaatgatatagatccaattatttctttattcaaacacgattttttaattttcaaattattatcatctaccttttatataacacaaagtagcaagagctgtagtggttaaggcgtggggcttagatccttgcatcctgtgtttggatcccacttgtctcattttttttttataattccgggcggctggataagcgccaggtgggagcgacacaaaaaccactgatggcgatgtctaacgttggtctggcacccatctacttaattcttctgtatctgtatgagtcgtgatcatgtgttagattttgcttaagatcctatgtacatttgctatatgtttatgtaccatatgcttatgctaagatcagttttgacacttgcatgtttatcaacgacacgtggaaatggtggaagcctgtcacagaagttcctagcaccctgatccagtgatccctgcattgttccatgaatatcctcctctcacttggagcctgaagggattgaaat

SEQ ID NO: 24657 - DNA, 3333 bp, Zea Mays
ggtttccaatccaaggatggagcaccccccagcccagctgccgctcaaagcgacaggtggagatcggagggaggaagaagaactgagctgcggatcgagggaagggaacaagcaagcagccagagccaggtcgtggggagccggcggcagtgatcttcttgcgtcgaaggcgaggccggagcgtcggtttgagcgctcgtgcgatatgggggagcaggagaacaacaagatcggcggcagcggcaacgacaacgccatggcggtggacgaagcgggcgcgggcgcggccgcgaacaaggggaagagcctcggcgccgcggacccgcgcctgcaggccatttccgacgccatccgcgtcgtcccccacttccccaagccagggatcatgttcaacgacatcacggagctgctgctgcggccgggcgtgttcagggacgccgtggacatgttcgtcgagcgctaccgcggcatgggcatcgcggccgtcgcaggcattgaagctagaggattcatctttgggccagccattgcgctagccataggagcaaagttcataccactacgtaaacctaagaagcttccaggtgaggtattttctgaaagttatgtacttgagtatgggatggattgtttggagatgcatgttggagctattgaacccggggagcgcgtagtggttgtcgatgatttggttgcaactggtggaactctttctgctgcaataagacttctcgagcgcgcaggagctaacgtggttgagtgtgcatgcctcattgggcttcccaagtttaaggtaccaaaatctaagttcgttcaaaaaagctaccaaatgtatatttcttttttctcaaggtgcaccaatatgctccttacatgcacttcagttagctaaaggaaattgaggaagtattccatctcggtctgagggaggaaagacgcaatagaacaaggccagtgtaaaaaaaaactagtctgcctgtaactattcctgtacatgtgactgcagatttttaataaatgaaatggtatcatctagccgatatcttttcctcctacgagtaaaaccgagagcaacctcagcgtgtgtttgaaaacaaagtattttaaaaaccatggtgttttgaggtaaagtatctcaaaccatggtattggtatgcatgtgcaagaagctagttattcaccaaaactttgggttggagcaaagtttcaaatacttcaaaaatacatgctcagagttttttacaagtaggcaaacaaccactgtattctccaataacatgattttatcttaaaacaataaaactccaaaaacattttgcttcttaacaccctccttaaggtaaaaaaacttgtggatatcttttgtatgtaacttcagtgacagataggtgcatgtggttagggtaaattattttttgttataagaattatatgcctagtgtgcaatggtgagagctcaccgggacgtggggttcaaagcagcctcttcacatttgcggatgaaggtttgcctcagtttatttcttctccaaatgtcatttgggttttttctttcctaaatcacacatatggaagcgtctggcactggttatgtccttttacgtaggtgataagaatagcctaccttaatttataactttaaataccacgcgaccatgtattttttcctatggatgagatagctgataaccattagccacaacaaaagggatatggctaggttgaactctttggaatctagcatatgtagcaggacttgatatttccagatatgatgatagagagagggttgggaaactacgctagtgccatagtccactcaagtctgcctattcagtaaggatattttagatgcgaggatgactatttttttttaatccaaccttttcttatgaaagagaggcatatcaaggagtgtatatactattccctcatatctactgaggttccattttttttttcaatgtgcaggatttctataagctcaacgggaaaccggtttacatcctggtggagtcccgcaaataggacgcagtaaaatggtcagacaaaaaaagctttctagcttcccgtccaaagaagctcacagcttcactcatttgcacgcgcaagcaaggtggtatgggggcaccgagaaactccgcagtaatctgtgttgaggccacggccagatgatgctatgtactcctatcttcatggagagggtgatggactgggtgaaacgtagtcactgtacttttgtagcacgtcatgtctagtgtttcttagtagccatggctgaagagagtttgtagcttattcccggcttcctgcagccaggaacatcagtgttagccagagaagctaggaaaaaggatcttatgttgctgctcagttttctaccagaatcgtcttcctttttttcccctttgcagaatcaactctttggtaaactttactaagctcgttttgcctaaacggccgttcaatcatgaagaaagagcaatcatacgtaatgccagcgtaaggaggacatgtcttttttccaatatattactatattcaagctcccagaatcaactctttgataaaatttgcatctaccttggtgcttgtacaccagactagcctaacaaagtgtcgcccctgcacttgcagatggttcccaaaccctatgccgtcgaaccacacttatctactatgtctacgactaatagttagatgacactatggtttctatatattagttgattatacattactatagtttttatatatcatatttgtaaacatttcccatgagtcaatgataggtggagtctatgatatatatataaagttgtaatcttttaatgatatagatccaattatttctttattcaaacacgattttttaattttcaaattattatcatctaccttttatataacacaaagtagcaagagctgtagtggttaaggcgtggggcttagatccttgcatcctgtgtttggatcccacttgtctcattttttttttataattccgggcggctggataagcgccaggtgggagcgacacaaaaaccactgatggcgatgtctaacgttggtctggcacccatctacttaattcttctgtatctgtatgagtcgtgatcatgtgttagattttgcttaagatcctatgtacatttgctatatgtttatgtaccatatgcttatgctaagatcagttttgacacttgcatgtttatcaacgacacgtggaaatggtggaagcctgtcacagaagttcctagcaccctgatccagtgatccctgcattgttccatgaatatcctcctctcacttggagcctgaagggattgaaat

SEQ ID NO: 24658 - DNA, 2593 bp, Zea Mays
atggacgaccaagtccacaccgaggatactcgcactgccctatggggacagtcgagcctggtcaaggtaacactatggcatcagaaagtccgaataatggcctgtatagcgaaagggatgggacaacgcccataccgaaagctgatcagcagcatgatggggagtgacgcaagaatcgagaggggtccgtcgggggaggtttggccactgggcactgaccaagaaagagtgatgactgatgagcaccccccagcccagctgccgctcaaagcgacaggtggagatcggagggaggaagaagaactgagctgcggatcgagggaagggaacaagcaagcagccagagccaggtcgtggggagccggcggcagtgatcttcttgcgtcgaaggcgaggccggagcgtcggtttgagcgctcgtgcgatatgggggagcaggagaacaacaagatcggcggcagcggcaacgacaacgccatggcggtggacgaagcgggcgcgggcgcggccgcgaacaaggggaagagcctcggcgccgcggacccgcgcctgcaggccatttccgacgccatccgcgtcgtcccccacttccccaagccagggatcatgttcaacgacatcacggagctgctgctgcggccgggcgtgttcagggacgccgtggacatgttcgtcgagcgctaccgcggcatgggcatcgcggccgtcgcaggcattgaagctagaggattcatctttgggccagccattgcgctagccataggagcaaagttcataccactacgtaaacctaagaagcttccaggtgaggtattttctgaaagttatgtacttgagtatgggatggattgtttggagatgcatgttggagctattgaacccggggagcgcgtagtggttgtcgatgatttggttgcaactggtggaactctttctgctgcaataagacttctcgagcgcgcaggagctaacgtggttgagtgtgcatgcctcattgggcttcccaagtttaaggatttctataagctcaacgggaaaccggtttacatcctggtggagtcccgcaaataggacgcagtaaaatggtcagacaagtaaatgctctcaagctccttttatacttgaaacttctctcaacattcatttcgaacatatcatgaaattacaaagctatgcatgttcgcagaatcgagctttgcacattgagtcaaatttgatttcctggtgaaacaggagcagtagcagcggtagcgtccagccttaaagcatgcatggctactgacactaatttctgcctcgtgaccatttcagaaaaagctttctagcttcccgtccaaagaagctcacagcttcactcatttgcacgcgcaagcaaggtggtatgggggcaccgagaaactccgcagtaatctgtgttgaggccacggccagatgatgctatgtactcctatcttcatggagagggtgatggactgggtgaaacgtagtcactgtacttttgtagcacgtcatgtctagtgtttcttagtagccatggctgaagagagtttgtagcttattcccggcttcctgcagccaggaacatcagtgttagccagagaagctaggaaaaaggatcttatgttgctgctcagttttctaccagaatcgtcttcctttttttcccctttgcagaatcaactctttggtaaactttactaagctcgttttgcctaaacggccgttcaatcatgaagaaagagcaatcatacgtaatgccagcgtaaggaggacatgtcttttttccaatatattactatattcaagctcccagaatcaactctttgataaaatttgcatctaccttggtgcttgtacaccagactagcctaacaaagtgtcgcccctgcacttgcagatggttcccaaaccctatgccgtcgaaccacacttatctactatgtctacgactaatagttagatgacactatggtttctatatattagttgattatacattactatagtttttatatatcatatttgtaaacatttcccatgagtcaatgataggtggagtctatgatatatatataaagttgtaatcttttaatgatatagatccaattatttctttattcaaacacgattttttaattttcaaattattatcatctaccttttatataacacaaagtagcaagagctgtagtggttaaggcgtggggcttagatccttgcatcctgtgtttggatcccacttgtctcattttttttttataattccgggcggctggataagcgccaggtgggagcgacacaaaaaccactgatggcgatgtctaacgttggtctggcacccatctacttaattcttctgtatctgtatgagtcgtgatcatgtgttagattttgcttaagatcctatgtacatttgctatatgtttatgtaccatatgcttatgctaagatcagttttgacacttgcatgtttatcaacgacacgtggaaatggtggaagcctgtcacagaagttcctagcaccctgatccagtgatccctgcattgttccatgaatatcctcctctcacttggagcctgaagggattgaaat

SEQ ID NO: 24659 - DNA, 2367 bp, Zea Mays
atggacgaccaagtccacaccgaggatactcgcactgccctatggggacagtcgagcctggtcaaggtaacactatggcatcagaaagtccgaataatggcctgtatagcgaaagggatgggacaacgcccataccgaaagctgatcagcagcatgatggggagtgacgcaagaatcgagaggggtccgtcgggggaggtttggccactgggcactgaccaagaaagagtgatgactgatgagcaccccccagcccagctgccgctcaaagcgacaggtggagatcggagggaggaagaagaactgagctgcggatcgagggaagggaacaagcaagcagccagagccaggtcgtggggagccggcggcagtgatcttcttgcgtcgaaggcgaggccggagcgtcggtttgagcgctcgtgcgatatgggggagcaggagaacaacaagatcggcggcagcggcaacgacaacgccatggcggtggacgaagcgggcgcgggcgcggccgcgaacaaggggaagagcctcggcgccgcggacccgcgcctgcaggccatttccgacgccatccgcgtcgtcccccacttccccaagccagggatcatgttcaacgacatcacggagctgctgctgcggccgggcgtgttcagggacgccgtggacatgttcgtcgagcgctaccgcggcatgggcatcgcggccgtcgcaggcattgaagctagaggattcatctttgggccagccattgcgctagccataggagcaaagttcataccactacgtaaacctaagaagcttccaggtgaggtattttctgaaagttatgtacttgagtatgggatggattgtttggagatgcatgttggagctattgaacccggggagcgcgtagtggttgtcgatgatttggttgcaactggtggaactctttctgctgcaataagacttctcgagcgcgcaggagctaacgtggttgagtgtgcatgcctcattgggcttcccaagtttaaggatttctataagctcaacgggaaaccggtttacatcctggtggagtcccgcaaataggacgcagtaaaatgaaaaagctttctagcttcccgtccaaagaagctcacagcttcactcatttgcacgcgcaagcaaggtggtatgggggcaccgagaaactccgcagtaatctgtgttgaggccacggccagatgatgctatgtactcctatcttcatggagagggtgatggactgggtgaaacgtagtcactgtacttttgtagcacgtcatgtctagtgtttcttagtagccatggctgaagagagtttgtagcttattcccggcttcctgcagccaggaacatcagtgttagccagagaagctaggaaaaaggatcttatgttgctgctcagttttctaccagaatcgtcttcctttttttcccctttgcagaatcaactctttggtaaactttactaagctcgttttgcctaaacggccgttcaatcatgaagaaagagcaatcatacgtaatgccagcgtaaggaggacatgtcttttttccaatatattactatattcaagctcccagaatcaactctttgataaaatttgcatctaccttggtgcttgtacaccagactagcctaacaaagtgtcgcccctgcacttgcagatggttcccaaaccctatgccgtcgaaccacacttatctactatgtctacgactaatagttagatgacactatggtttctatatattagttgattatacattactatagtttttatatatcatatttgtaaacatttcccatgagtcaatgataggtggagtctatgatatatatataaagttgtaatcttttaatgatatagatccaattatttctttattcaaacacgattttttaattttcaaattattatcatctaccttttatataacacaaagtagcaagagctgtagtggttaaggcgtggggcttagatccttgcatcctgtgtttggatcccacttgtctcattttttttttataattccgggcggctggataagcgccaggtgggagcgacacaaaaaccactgatggcgatgtctaacgttggtctggcacccatctacttaattcttctgtatctgtatgagtcgtgatcatgtgttagattttgcttaagatcctatgtacatttgctatatgtttatgtaccatatgcttatgctaagatcagttttgacacttgcatgtttatcaacgacacgtggaaatggtggaagcctgtcacagaagttcctagcaccctgatccagtgatccctgcattgttccatgaatatcctcctctcacttggagcctgaagggattgaaat

SEQ ID NO: 24660 - DNA, 2584 bp, Zea Mays
atggacgaccaagtccacaccgaggatactcgcactgccctatggggacagtcgagcctggtcaaggtaacactatggcatcagaaagtccgaataatggcctgtatagcgaaagggatgggacaacgcccataccgaaagctgatcagcagcatgatggggagtgacgcaagaatcgagaggggtccgtcgggggaggtttggccactgggcactgaccaagaaagagtgatgactgatgagtgagtgagggtgagcgaggatgctgaactgggctcgccttctttaacactgcgaaatggtggtcccggcggccggtttccaatccaaggatggagtattaacacccctctctctctcactgtcacagacacatccccttggtgctacggccaccccgcgcgctgtacctggtcttggcttgccgtgtttatttatatatatatgtaggcaccccccagcccagctgccgctcaaagcgacaggtggagatcggagggaggaagaagaactgagctgcggatcgagggaagggaacaagcaagcagccagagccaggtcgtggggagccggcggcagtgatcttcttgcgtcgaaggcgaggccggagcgtcggtttgagcgctcgtgcgatatgggggagcaggagaacaacaagatcggcggcagcggcaacgacaacgccatggcggtggacgaagcgggcgcgggcgcggccgcgaacaaggggaagagcctcggcgccgcggacccgcgcctgcaggccatttccgacgccatccgcgtcgtcccccacttccccaagccagggatcatgttcaacgacatcacggagctgctgctgcggccgggcgtgttcagggacgccgtggacatgttcgtcgagcgctaccgcggcatgggcatcgcggccgtcgcaggcattgaagctagaggattcatctttgggccagccattgcgctagccataggagcaaagttcataccactacgtaaacctaagaagcttccaggtgaggtattttctgaaagttatgtacttgagtatgggatggattgtttggagatgcatgttggagctattgaacccggggagcgcgtagtggttgtcgatgatttggttgcaactggtggaactctttctgctgcaataagacttctcgagcgcgcaggagctaacgtggttgagtgtgcatgcctcattgggcttcccaagtttaaggatttctataagctcaacgggaaaccggtttacatcctggtggagtcccgcaaataggacgcagtaaaatggtcagacaaaaaaagctttctagcttcccgtccaaagaagctcacagcttcactcatttgcacgcgcaagcaaggtggtatgggggcaccgagaaactccgcagtaatctgtgttgaggccacggccagatgatgctatgtactcctatcttcatggagagggtgatggactgggtgaaacgtagtcactgtacttttgtagcacgtcatgtctagtgtttcttagtagccatggctgaagagagtttgtagcttattcccggcttcctgcagccaggaacatcagtgttagccagagaagctaggaaaaaggatcttatgttgctgctcagttttctaccagaatcgtcttcctttttttcccctttgcagaatcaactctttggtaaactttactaagctcgttttgcctaaacggccgttcaatcatgaagaaagagcaatcatacgtaatgccagcgtaaggaggacatgtcttttttccaatatattactatattcaagctcccagaatcaactctttgataaaatttgcatctaccttggtgcttgtacaccagactagcctaacaaagtgtcgcccctgcacttgcagatggttcccaaaccctatgccgtcgaaccacacttatctactatgtctacgactaatagttagatgacactatggtttctatatattagttgattatacattactatagtttttatatatcatatttgtaaacatttcccatgagtcaatgataggtggagtctatgatatatatataaagttgtaatcttttaatgatatagatccaattatttctttattcaaacacgattttttaattttcaaattattatcatctaccttttatataacacaaagtagcaagagctgtagtggttaaggcgtggggcttagatccttgcatcctgtgtttggatcccacttgtctcattttttttttataattccgggcggctggataagcgccaggtgggagcgacacaaaaaccactgatggcgatgtctaacgttggtctggcacccatctacttaattcttctgtatctgtatgagtcgtgatcatgtgttagattttgcttaagatcctatgtacatttgctatatgtttatgtaccatatgcttatgctaagatcagttttgacacttgcatgtttatcaacgacacgtggaaatggtggaagcctgtcacagaagttcctagcaccctgatccagtgatccctgcattgttccatgaatatcctcctctcacttggagcctgaagggattgaaat

SEQ ID NO: 24661 - DNA, 1646 bp, Zea Mays
caggtacacttcacatacatagttaagcatcagtcaatttagttgttttcaatccaattcatgcactcgtgctgctcaaaactgcagtaaggaggtgaaccaatatgcttagtgcacttctttgaagctgaaaagaattccttttgcaactaagtctttttaggattgggcgatagaggttcagttccttatggttcattccaaattggaactaaatctctaaaatctgtagagcaaaccacccaatccaagtaggttgtaggccataataacttgcgaccagatctctaattaatcaaacatttttgtcatgatgcagttccacatgtgaaataacaccatggatatgtaacaatgtaactctcttcagtgaaaaataagtttctgtaacacatttatgttctccagttctttttagtgatgaagtgatatgcacccagataacaagatttttttgtcattcccataaaaaacatgatgcatttttttctcaattctttgtttgatgctattcctcttttgcctttagagaagcccataatacacagggatgtgaagtcatcaaacattctactgacagaagctttcatggccaaagtggctgactttggatttgcaagaactggtcctactgagccagaccagtcacagattgagactgatgtgagaggaacagcaggctatttagatccagagtatatggggacaagccatcttacgatcaagagtgatgtgttctcttatggtattttgctcctagaaatcctttcgggacgtcgtcctattgagagaacgaggggtccagcagaaaggattacagtgagatgggccttcaataagtaccgcagaggcaatgttaggggcatactggacccaatgttaactgaagcagtgaacgaggatatactgaacaaaatcttcgatgtggcgttccagtgtgtcgctcctacccgcgaagacagaccctccatgaaagaagttgtggagaggctgtggaagataagaagggatcatacaaaaatacagaggatagcagaattgactctctgaatccttaaggctctgttcgttttttacagattggaggcccgaaacggttcctgaccggattgtttctctaatttatataagttttgataagttggaatgaatcctggtccaatactagacaaacgaacgggccctaaaccatctggtcctggttgctgtttttgcttgggagaacatgggtcagttcctagtgaagaccaaagaccgccacataaaaataattcaaattttgtggttgtgaacaactgggattctttaagagatgtggggaacaatgccctgcgattgatggtttccctgtagccattactgttaatcagcataagctgttcagtcatcgtcctcgagaagtacagtgtagcttcggtgtacggcatccttgtactttggaaaacagttagatatgaaggaaacctctgactactaatttcttctggatataactagtgaaggaaactaaaaattattattcctcactcgtgtaatcttgcaaagactttttggtttatgaaatgtaaatgacaatggtaatgatttatgcttgagtaccaacgataataagtttgaatatatcaatattactttttagtgtgata

SEQ ID NO: 24662 - DNA, 2579 bp, Zea Mays
cttccggtcgtcggtcttggcctcttccgcgaccgcgtcgctacttcctcctaccgctggaggcacacggtttccacgccagccagcaaatgggtgcccaccgcaaagatcaaatcaaatcaaaagggaatttctgaaaaggagagaggaacacccttcctcgccatttccgtccaaagtgtttccccgaggagtcgcgcgtgcctgccgggttgcgtaggcgctggggcggcgggacgggagcatcgcaggccgcggtggaccctggcgctcgagtttcttctctgcggtgaccaactgaccagagggacagccttgtggcaatcatatataggacagtttcgtatctataataatgtgctcatataaagaaatcaagtacaaatgaagaagcacatctctgcccattatttgatgactgaagacaggttgcactatggtagctgctacaactgcgggaatgtttcttgtgtgttttgagtccctctgtccctgttttgggtcaaaaagtaaggatgggagcgaagaccatgttcttgcagaatattccaattccttgaattcttctgaaatgaggtcgatttctgatagaattgctgcaagtccgcttcgagtacctgcaagtccatctagattttcactgtcttcgccaccaagttactttggaaaggtctacagagcggcgctgttagatggacgtgttgtagctattaaaagggcaaagaaggtaacttatttttgcccaggcaactattctagcaactttcctagctacaatgatctagttttagcccgcatggtgccagtttgggtgagctatgaatgttctacttgtgttgaggctatttgtaccgtgaccttatcttttactatttcctctgtatatacatacaattactcatctgcattagtgcacagttgcatgcaatgcattttggggaatcaagattgaggtactgtcaaatcaaggtttaggtatgctgtagacctgttacttgatccatatttatagaccgatagatgggtgttgtatgatgaactatgaactcatattccattttttactccatgagtcaatgttaatgttatgtgctggtttttatttctccatgtgtttcttcataaacttccctttgcattggcagttttcttgtagaccatactttgtagtatgaactatgattcggatatggttccatttggcaggaaaattttctctctttacgtgctgaattcagcaacgaagtcgcattactaaaaagtattgaacataaaaacttggtccagttgcttggttacattgacaaagccaatgaacggattctcataacagagtacatatcaaatggaactcttagggagcatttggatggtcaacatggcctagttttgggatttaatcagcggctcgaaattgctatagatgttgcccatggattgacttatctgcatctctatgcagagaagcccataatacacagggatgtgaagtcatcaaacattctactgacagaagctttcatggccaaagtggctgactttggatttgcaagaactggtcctactgagccagaccagtcacagattgagactgatgtgagaggaacagcaggctatttagatccagagtatatggggacaagccatcttacgatcaagagtgatgtgttctcttatggtattttgctcctagaaatcctttcgggacgtcgtcctattgagagaacgaggggtccagcagaaaggattacagtgagatgggccttcaataagtaccgcagaggcaatgttaggggcatactggacccaatgttaactgaagcagtgaacgaggatatactgaacaaaatcttcgatgtggcgttccagtgtgtcgctcctacccgcgaagacagaccctccatgaaagaagttgtggagaggctgtggaagataagaagggatcatacaaaaatacagaggatagcagaattgactctctgaatccttaaggctctgttcgttttttacagattggaggcccgaaacggttcctgaccggattgtttctctaatttatataagttttgataagttggaatgaatcctggtccaatactagacaaacgaacgggccctaaaccatctggtcctggttgctgtttttgcttgggagaacatgggtcagttcctagtgaagaccaaagaccgccacataaaaataattcaaattttgtggttgtgaacaactgggattctttaagagatgtggggaacaatgccctgcgattgatggtttccctgtagccattactgttaatcagcataagctgttcagtcatcgtcctcgagaagtacagtgtagcttcggtgtacggcatccttgtactttggaaaacagttagatatgaaggaaacctctgactactaatttcttctggatataactagtgaaggaaactaaaaattattattcctcactcgtgtaatcttgcaaagactttttggtttatgaaatgtaaatgacaatggtaatgatttatgcttgagtaccaacgataataagtttgaatatatcaatattactttttagtgtgata

SEQ ID NO: 24663 - DNA, 1672 bp, Zea Mays
cttccggtcgtcggtcttggcctcttccgcgaccgcgtcgctacttcctcctaccgctggaggcacacggtttccacgccagccagcaaatgggtgcccaccgcaaagatcaaatcaaatcaaaagggaatttctgaaaaggagagaggaacacccttcctcgccatttccgtccaaagtgtttccccgaggagtcgcgcgtgcctgccgggttgcgtaggcgctggggcggcgggacgggagcatcgcaggccgcggtggaccctggcgctcgagtttcttctctgcggtgaccaactgaccagaaaattttctctctttacgtgctgaattcagcaacgaagtcgcattactaaaaagtattgaacataaaaacttggtccagttgcttggttacattgacaaagccaatgaacggattctcataacagagtacatatcaaatggaactcttagggagcatttggatggtcaacatggcctagttttgggatttaatcagcggctcgaaattgctatagatgttgcccatggattgacttatctgcatctctatgcagcccataatacacagggatgtgaagtcatcaaacattctactgacagaagctttcatggccaaagtggctgactttggatttgcaagaactggtcctactgagccagaccagtcacagattgagactgatgtgagaggaacagcaggctatttagatccagagtatatggggacaagccatcttacgatcaagagtgatgtgttctcttatggtattttgctcctagaaatcctttcgggacgtcgtcctattgagagaacgaggggtccagcagaaaggattacagtgagatgggccttcaataagtaccgcagaggcaatgttaggggcatactggacccaatgttaactgaagcagtgaacgaggatatactgaacaaaatcttcgatgtggcgttccagtgtgtcgctcctacccgcgaagacagaccctccatgaaagaagttgtggagaggctgtggaagataagaagggatcatacaaaaatacagaggatagcagaattgactctctgaatccttaaggctctgttcgttttttacagattggaggcccgaaacggttcctgaccggattgtttctctaatttatataagttttgataagttggaatgaatcctggtccaatactagacaaacgaacgggccctaaaccatctggtcctggttgctgtttttgcttgggagaacatgggtcagttcctagtgaagaccaaagaccgccacataaaaataattcaaattttgtggttgtgaacaactgggattctttaagagatgtggggaacaatgccctgcgattgatggtttccctgtagccattactgttaatcagcataagctgttcagtcatcgtcctcgagaagtacagtgtagcttcggtgtacggcatccttgtactttggaaaacagttagatatgaaggaaacctctgactactaatttcttctggatataactagtgaaggaaactaaaaattattattcctcactcgtgtaatcttgcaaagactttttggtttatgaaatgtaaatgacaatggtaatgatttatgcttgagtaccaacgataataagtttgaatatatcaatattactttttagtgtgata

SEQ ID NO: 24664 - DNA, 1847 bp, Zea Mays
cttccggtcgtcggtcttggcctcttccgcgaccgcgtcgctacttcctcctaccgctggaggcacacggtttccacgccagccagcaaatgggtgcccaccgcaaagatcaaatcaaatcaaaagggaatttctgaaaaggagagaggaacacccttcctcgccatttccgtccaaagtgtttccccgaggagtcgcgcgtgcctgccgggttgcgtaggcgctggggcggcgggacgggagcatcgcaggccgcggtggaccctggcgctcgagtttcttctctgcggtgaccaactgaccatgaattcttctgaaatgaggtcgatttctgatagaattgctgcaagtccgcttcgagtacctgcaagtccatctagattttcactgtcttcgccaccaagttactttggaaaggtctacagagcggcgctgttagatggacgtgttgtagctattaaaagggcaaagaaggaaaattttctctctttacgtgctgaattcagcaacgaagtcgcattactaaaaagtattgaacataaaaacttggtccagttgcttggttacattgacaaagccaatgaacggattctcataacagagtacatatcaaatggaactcttagggagcatttggatggtcaacatggcctagttttgggatttaatcagcggctcgaaattgctatagatgttgcccatggattgacttatctgcatctctatgcagagaagcccataatacacagggatgtgaagtcatcaaacattctactgacagaagctttcatggccaaagtggctgactttggatttgcaagaactggtcctactgagccagaccagtcacagattgagactgatgtgagaggaacagcaggctatttagatccagagtatatggggacaagccatcttacgatcaagagtgatgtgttctcttatggtattttgctcctagaaatcctttcgggacgtcgtcctattgagagaacgaggggtccagcagaaaggattacagtgagatgggccttcaataagtaccgcagaggcaatgttaggggcatactggacccaatgttaactgaagcagtgaacgaggatatactgaacaaaatcttcgatgtggcgttccagtgtgtcgctcctacccgcgaagacagaccctccatgaaagaagttgtggagaggctgtggaagataagaagggatcatacaaaaatacagaggatagcagaattgactctctgaatccttaaggctctgttcgttttttacagattggaggcccgaaacggttcctgaccggattgtttctctaatttatataagttttgataagttggaatgaatcctggtccaatactagacaaacgaacgggccctaaaccatctggtcctggttgctgtttttgcttgggagaacatgggtcagttcctagtgaagaccaaagaccgccacataaaaataattcaaattttgtggttgtgaacaactgggattctttaagagatgtggggaacaatgccctgcgattgatggtttccctgtagccattactgttaatcagcataagctgttcagtcatcgtcctcgagaagtacagtgtagcttcggtgtacggcatccttgtactttggaaaacagttagatatgaaggaaacctctgactactaatttcttctggatataactagtgaaggaaactaaaaattattattcctcactcgtgtaatcttgcaaagactttttggtttatgaaatgtaaatgacaatggtaatgatttatgcttgagtaccaacgataataagtttgaatatatcaatattactttttagtgtgata

SEQ ID NO: 24665 - DNA, 1677 bp, Zea Mays
cttccggtcgtcggtcttggcctcttccgcgaccgcgtcgctacttcctcctaccgctggaggcacacggtttccacgccagccagcaaatgggtgcccaccgcaaagatcaaatcaaatcaaaagggaatttctgaaaaggagagaggaacacccttcctcgccatttccgtccaaagtgtttccccgaggagtcgcgcgtgcctgccgggttgcgtaggcgctggggcggcgggacgggagcatcgcaggccgcggtggaccctggcgctcgagtttcttctctgcggtgaccaactgaccagaaaattttctctctttacgtgctgaattcagcaacgaagtcgcattactaaaaagtattgaacataaaaacttggtccagttgcttggttacattgacaaagccaatgaacggattctcataacagagtacatatcaaatggaactcttagggagcatttggatggtcaacatggcctagttttgggatttaatcagcggctcgaaattgctatagatgttgcccatggattgacttatctgcatctctatgcagagaagcccataatacacagggatgtgaagtcatcaaacattctactgacagaagctttcatggccaaagtggctgactttggatttgcaagaactggtcctactgagccagaccagtcacagattgagactgatgtgagaggaacagcaggctatttagatccagagtatatggggacaagccatcttacgatcaagagtgatgtgttctcttatggtattttgctcctagaaatcctttcgggacgtcgtcctattgagagaacgaggggtccagcagaaaggattacagtgagatgggccttcaataagtaccgcagaggcaatgttaggggcatactggacccaatgttaactgaagcagtgaacgaggatatactgaacaaaatcttcgatgtggcgttccagtgtgtcgctcctacccgcgaagacagaccctccatgaaagaagttgtggagaggctgtggaagataagaagggatcatacaaaaatacagaggatagcagaattgactctctgaatccttaaggctctgttcgttttttacagattggaggcccgaaacggttcctgaccggattgtttctctaatttatataagttttgataagttggaatgaatcctggtccaatactagacaaacgaacgggccctaaaccatctggtcctggttgctgtttttgcttgggagaacatgggtcagttcctagtgaagaccaaagaccgccacataaaaataattcaaattttgtggttgtgaacaactgggattctttaagagatgtggggaacaatgccctgcgattgatggtttccctgtagccattactgttaatcagcataagctgttcagtcatcgtcctcgagaagtacagtgtagcttcggtgtacggcatccttgtactttggaaaacagttagatatgaaggaaacctctgactactaatttcttctggatataactagtgaaggaaactaaaaattattattcctcactcgtgtaatcttgcaaagactttttggtttatgaaatgtaaatgacaatggtaatgatttatgcttgagtaccaacgataataagtttgaatatatcaatattactttttagtgtgata

SEQ ID NO: 24666 - DNA, 1930 bp, Zea Mays
cttccggtcgtcggtcttggcctcttccgcgaccgcgtcgctacttcctcctaccgctggaggcacacggtttccacgccagccagcaaatgggtgcccaccgcaaagatcaaatcaaatcaaaagggaatttctgaaaaggagagaggaacacccttcctcgccatttccgtccaaagtgtttccccgaggagtcgcgcgtgcctgccgggttgcgtaggcgctggggcggcgggacgggagcatcgcaggccgcggtggaccctggcgctcgagtttcttctctgcggtgaccaactgaccagagggacagccttgtggcaatcatatataggacagtttcgtatctataataatgtgctcatataaagaaatcaagtacaaatgaagaagcacatctctgcccattatttgatgactgaagacaggttgcactatggtagctgctacaactgcgggaatgtttcttgtgtgttttgagtccctctgtccctgttttgggtcaaaaagtaaggatgggagcgaagaccatgttcttgcagaatattccaattcctgaaaattttctctctttacgtgctgaattcagcaacgaagtcgcattactaaaaagtattgaacataaaaacttggtccagttgcttggttacattgacaaagccaatgaacggattctcataacagagtacatatcaaatggaactcttagggagcatttggatggtcaacatggcctagttttgggatttaatcagcggctcgaaattgctatagatgttgcccatggattgacttatctgcatctctatgcagagaagcccataatacacagggatgtgaagtcatcaaacattctactgacagaagctttcatggccaaagtggctgactttggatttgcaagaactggtcctactgagccagaccagtcacagattgagactgatgtgagaggaacagcaggctatttagatccagagtatatggggacaagccatcttacgatcaagagtgatgtgttctcttatggtattttgctcctagaaatcctttcgggacgtcgtcctattgagagaacgaggggtccagcagaaaggattacagtgagatgggccttcaataagtaccgcagaggcaatgttaggggcatactggacccaatgttaactgaagcagtgaacgaggatatactgaacaaaatcttcgatgtggcgttccagtgtgtcgctcctacccgcgaagacagaccctccatgaaagaagttgtggagaggctgtggaagataagaagggatcatacaaaaatacagaggatagcagaattgactctctgaatccttaaggctctgttcgttttttacagattggaggcccgaaacggttcctgaccggattgtttctctaatttatataagttttgataagttggaatgaatcctggtccaatactagacaaacgaacgggccctaaaccatctggtcctggttgctgtttttgcttgggagaacatgggtcagttcctagtgaagaccaaagaccgccacataaaaataattcaaattttgtggttgtgaacaactgggattctttaagagatgtggggaacaatgccctgcgattgatggtttccctgtagccattactgttaatcagcataagctgttcagtcatcgtcctcgagaagtacagtgtagcttcggtgtacggcatccttgtactttggaaaacagttagatatgaaggaaacctctgactactaatttcttctggatataactagtgaaggaaactaaaaattattattcctcactcgtgtaatcttgcaaagactttttggtttatgaaatgtaaatgacaatggtaatgatttatgcttgagtaccaacgataataagtttgaatatatcaatattactttttagtgtgata

SEQ ID NO: 24667 - DNA, 2175 bp, Zea Mays
cttccggtcgtcggtcttggcctcttccgcgaccgcgtcgctacttcctcctaccgctggaggcacacggtttccacgccagccagcaaatgggtgcccaccgcaaagatcaaatcaaatcaaaagggaatttctgaaaaggagagaggaacacccttcctcgccatttccgtccaaagtgtttccccgaggagtcgcgcgtgcctgccgggttgcgtaggcgctggggcggcgggacgggagcatcgcaggccgcggtggaccctggcgctcgagtttcttctctgcggtgaccaactgaccaccttgtggcaatcatatataggacagtttcgtatctataataatgtgctcatataaagaaatcaagtacaaatgaagaagcacatctctgcccattatttgatgactgaagacaggttgcactatggtagctgctacaactgcgggaatgtttcttgtgtgttttgagtccctctgtccctgttttgggtcaaaaagtaaggatgggagcgaagaccatgttcttgcagaatattccaattccttgaattcttctgaaatgaggtcgatttctgatagaattgctgcaagtccgcttcgagtacctgcaagtccatctagattttcactgtcttcgccaccaagtagaaacgagcctttaaacatcagtcttgaacatgttgttaaactgacacataactttgcgccgaccttgatgattggcgaaggttactttggaaaggtctacagagcggcgctgttagatggacgtgttgtagctattaaaagggcaaagaaggaaaattttctctctttacgtgctgaattcagcaacgaagtcgcattactaaaaagtattgaacataaaaacttggtccagttgcttggttacattgacaaagccaatgaacggattctcataacagagtacatatcaaatggaactcttagggagcatttggatggtcaacatggcctagttttgggatttaatcagcggctcgaaattgctatagatgttgcccatggattgacttatctgcatctctatgcagagaagcccataatacacagggatgtgaagtcatcaaacattctactgacagaagctttcatggccaaagtggctgactttggatttgcaagaactggtcctactgagccagaccagtcacagattgagactgatgtgagaggaacagcaggctatttagatccagagtatatggggacaagccatcttacgatcaagagtgatgtgttctcttatggtattttgctcctagaaatcctttcgggacgtcgtcctattgagagaacgaggggtccagcagaaaggattacagtgagatgggccttcaataagtaccgcagaggcaatgttaggggcatactggacccaatgttaactgaagcagtgaacgaggatatactgaacaaaatcttcgatgtggcgttccagtgtgtcgctcctacccgcgaagacagaccctccatgaaagaagttgtggagaggctgtggaagataagaagggatcatacaaaaatacagaggatagcagaattgactctctgaatccttaaggctctgttcgttttttacagattggaggcccgaaacggttcctgaccggattgtttctctaatttatataagttttgataagttggaatgaatcctggtccaatactagacaaacgaacgggccctaaaccatctggtcctggttgctgtttttgcttgggagaacatgggtcagttcctagtgaagaccaaagaccgccacataaaaataattcaaattttgtggttgtgaacaactgggattctttaagagatgtggggaacaatgccctgcgattgatggtttccctgtagccattactgttaatcagcataagctgttcagtcatcgtcctcgagaagtacagtgtagcttcggtgtacggcatccttgtactttggaaaacagttagatatgaaggaaacctctgactactaatttcttctggatataactagtgaaggaaactaaaaattattattcctcactcgtgtaatcttgcaaagactttttggtttatgaaatgtaaatgacaatggtaatgatttatgcttgagtaccaacgataataagtttgaatatatcaatattactttttagtgtgata

SEQ ID NO: 24668 - DNA, 2227 bp, Zea Mays
cttccggtcgtcggtcttggcctcttccgcgaccgcgtcgctacttcctcctaccgctggaggcacacggtttccacgccagccagcaaatgggtgcccaccgcaaagatcaaatcaaatcaaaagggaatttctgaaaaggagagaggaacacccttcctcgccatttccgtccaaagtgtttccccgaggagtcgcgcgtgcctgccgggttgcgtaggcgctggggcggcgggacgggagcatcgcaggccgcggtggaccctggcgctcgagtttcttctctgcggtgaccaactgaccagttactttggaaaggtctacagagcggcgctgttagatggacgtgttgtagctattaaaagggcaaagaaggtaacttatttttgcccaggcaactattctagcaactttcctagctacaatgatctagttttagcccgcatggtgccagtttgggtgagctatgaatgttctacttgtgttgaggctatttgtaccgtgaccttatcttttactatttcctctgtatatacatacaattactcatctgcattagtgcacagttgcatgcaatgcattttggggaatcaagattgaggtactgtcaaatcaaggtttaggtatgctgtagacctgttacttgatccatatttatagaccgatagatgggtgttgtatgatgaactatgaactcatattccattttttactccatgagtcaatgttaatgttatgtgctggtttttatttctccatgtgtttcttcataaacttccctttgcattggcagttttcttgtagaccatactttgtagtatgaactatgattcggatatggttccatttggcaggaaaattttctctctttacgtgctgaattcagcaacgaagtcgcattactaaaaagtattgaacataaaaacttggtccagttgcttggttacattgacaaagccaatgaacggattctcataacagagtacatatcaaatggaactcttagggagcatttggatggtcaacatggcctagttttgggatttaatcagcggctcgaaattgctatagatgttgcccatggattgacttatctgcatctctatgcagagaagcccataatacacagggatgtgaagtcatcaaacattctactgacagaagctttcatggccaaagtggctgactttggatttgcaagaactggtcctactgagccagaccagtcacagattgagactgatgtgagaggaacagcaggctatttagatccagagtatatggggacaagccatcttacgatcaagagtgatgtgttctcttatggtattttgctcctagaaatcctttcgggacgtcgtcctattgagagaacgaggggtccagcagaaaggattacagtgagatgggccttcaataagtaccgcagaggcaatgttaggggcatactggacccaatgttaactgaagcagtgaacgaggatatactgaacaaaatcttcgatgtggcgttccagtgtgtcgctcctacccgcgaagacagaccctccatgaaagaagttgtggagaggctgtggaagataagaagggatcatacaaaaatacagaggatagcagaattgactctctgaatccttaaggctctgttcgttttttacagattggaggcccgaaacggttcctgaccggattgtttctctaatttatataagttttgataagttggaatgaatcctggtccaatactagacaaacgaacgggccctaaaccatctggtcctggttgctgtttttgcttgggagaacatgggtcagttcctagtgaagaccaaagaccgccacataaaaataattcaaattttgtggttgtgaacaactgggattctttaagagatgtggggaacaatgccctgcgattgatggtttccctgtagccattactgttaatcagcataagctgttcagtcatcgtcctcgagaagtacagtgtagcttcggtgtacggcatccttgtactttggaaaacagttagatatgaaggaaacctctgactactaatttcttctggatataactagtgaaggaaactaaaaattattattcctcactcgtgtaatcttgcaaagactttttggtttatgaaatgtaaatgacaatggtaatgatttatgcttgagtaccaacgataataagtttgaatatatcaatattactttttagtgtgata

SEQ ID NO: 24669 - DNA, 2873 bp, Zea Mays
cttccggtcgtcggtcttggcctcttccgcgaccgcgtcgctacttcctcctaccgctggaggcacacggtttccacgccagccagcaaatgggtgcccaccgcaaagatcaaatcaaatcaaaagggaatttctgaaaaggagagaggaacacccttcctcgccatttccgtccaaagtgtttccccgaggagtcgcgcgtgcctgccgggttgcgtaggcgctggggcggcgggacgggagcatcgcaggccgcggtggaccctggcgctcgagtttcttctctgcggtgaccaactgaccagattcgcacggtttcggtggcgggcttgacctctaaagactgaagcagtgaagctacagtgttgccacttgccactggcctttttgaaatgcctgaagctatagttttgctttaatctgcaacagacaccgtgacaccgggcctggcactgatgtcatttgaggcaccttggatcctcatgtgcttccctttcttgtaccttgttctggtgctatgggtgcatgatcaaactacctgctagtctcttctattccagtttgatctttcgctttctgtcctgtttgcctacctatgtttaatcacttggtttcggtagagttcaaagtaattgtttgaattagactgattagtatagagtacagacgtacaaaatctacagaaactagactactagttttttgaatctgtacagcacctctagttgtattataataaacgcacgatcatttactgccaggcaatttactaaggggcaatggaactcctagggcaaaattgtatgtgtgttcacaatcgaattcttcatattttaccttcttcaaacgactattttgtgaattcttgatgatagaacgaagcaattgtcatgtcatgttgtactaccactatctaattttgtttctcagtcaaagttgctaaaccgaatgctttattgtttttttttctgttttgattgaacctacgagaaggagggacagccttgtggcaatcatatataggacagtttcgtatctataataatgtgctcatataaagaaatcaagtacaaatgaagaagcacatctctgcccattatttgatgactgaagacaggttgcactatggtagctgctacaactgcgggaatgtttcttgtgtgttttgagtccctctgtccctgttttgggtcaaaaagtaaggatgggagcgaagaccatgttcttgcagaatattccaattccttgaattcttctgaaatgaggtcgatttctgatagaattgctgcaagtccgcttcgagtacctgcaagtccatctagattttcactgtcttcgccaccaagtagaaacgagcctttaaacatcagtcttgaacatgttgttaaactgacacataactttgcgccgaccttgatgattggcgaaggttactttggaaaggtctacagagcggcgctgttagatggacgtgttgtagctattaaaagggcaaagaaggaaaattttctctctttacgtgctgaattcagcaacgaagtcgcattactaaaaagtattgaacataaaaacttggtccagttgcttggttacattgacaaagccaatgaacggattctcataacagagtacatatcaaatggaactcttagggagcatttggatggtcaacatggcctagttttgggatttaatcagcggctcgaaattgctatagatgttgcccatggattgacttatctgcatctctatgcagagaagcccataatacacagggatgtgaagtcatcaaacattctactgacagaagctttcatggccaaagtggctgactttggatttgcaagaactggtcctactgagccagaccagtcacagattgagactgatgtgagaggaacagcaggctatttagatccagagtatatggggacaagccatcttacgatcaagagtgatgtgttctcttatggtattttgctcctagaaatcctttcgggacgtcgtcctattgagagaacgaggggtccagcagaaaggattacagtgagatgggccttcaataagtaccgcagaggcaatgttaggggcatactggacccaatgttaactgaagcagtgaacgaggatatactgaacaaaatcttcgatgtggcgttccagtgtgtcgctcctacccgcgaagacagaccctccatgaaagaagttgtggagaggctgtggaagataagaagggatcatacaaaaatacagaggatagcagaattgactctctgaatccttaaggctctgttcgttttttacagattggaggcccgaaacggttcctgaccggattgtttctctaatttatataagttttgataagttggaatgaatcctggtccaatactagacaaacgaacgggccctaaaccatctggtcctggttgctgtttttgcttgggagaacatgggtcagttcctagtgaagaccaaagaccgccacataaaaataattcaaattttgtggttgtgaacaactgggattctttaagagatgtggggaacaatgccctgcgattgatggtttccctgtagccattactgttaatcagcataagctgttcagtcatcgtcctcgagaagtacagtgtagcttcggtgtacggcatccttgtactttggaaaacagttagatatgaaggaaacctctgactactaatttcttctggatataactagtgaaggaaactaaaaattattattcctcactcgtgtaatcttgcaaagactttttggtttatgaaatgtaaatgacaatggtaatgatttatgcttgagtaccaacgataataagtttgaatatatcaatattactttttagtgtgata

SEQ ID NO: 24670 - DNA, 1915 bp, Zea Mays
ctgactccacagtccacaccaccaccacacccaggcttccacttgccgccgcgcccgcgcctccccctcattttctccccctccactgctttgcgcctacgcatcgccgccccgcctctagtcctctgtcctcctcttcctactgtaaaccacctcgtccctatccgcggcaaccgttcaccgcgccgcgaggcctgctgatccgaccgaccttccaccgtcatggctcccctgcgccgcgcgtctcgcctccttcgatcagccgtctgccggctgaggtctccagcgccggctcgggccttctccagcgccgcggcgaccgagacgggtgccgtgatcgccgccgctgccgtggcggtggccagctccgggctcgggctgtggctgaaaccgccgtcgcttgccgactccggcgaggcgcccggcgaccagatctcggtcgcctgtgccggcgccacggaggcgcgggaggagaaggggtggttcctgttcgcagactcatttcgtagaagggtcttcttcaactacgagaagaggatacggcttctcagtcctcctgagaagagtccacggtagttcgtgaaggaagattaaggggggagcggagccctggagaattgcactgtgctccatcagagttctttatgcagttcgacacaaataatgatggcctcatctcctttgctgagtacattttttttgtgacattgctcagcattcatgagtcaaatttcactgtggccttcaaaatgttcgacattgaccacagtggggtgatagacagagaagagtttaagaaaataatggcactgatgcggtcctttaacagacaagggtcgactcataaggatggtttacgtattggacttaaagttggcaagcctgtggaaaatggtggggtggtcgagtacttctttgggagtgatgggaatgaacctctacactttgacaagttttctaaaattttgaaggaattgcatgatgagattattcaactggagttcagtcattatgatgtcaaatcgtctaaaacaataccagcaaaggattttgcattgtccatggttgcttctgctgacatgaaccatatcaacaagctgcttgatagagttgatagtttggtcaaggagccagatctgaaggacatacgcatcacctttgaggagtttaaggcatttgctgatttgcgacgaagattggagccactgtcgatggctatctttgcttacggtaaattgaatgggttattgacgaaggaggatctaaaacgtgcagcgcaacatgtttgcggggtcgacttaacagatagagtagtagacatcattttccatgtgttcgacacaaatcaggatgggaacttgagcccagaagagttcttaagagcgttacaaagaagagaaactgatattcgtgaaccaacaataccaggtccattggggttcttgtcttgctggttcagtggtaggaagtgttcttcactaaaacatgtggttatctgattgagcccctatttgatcctcacggcgcagaaggtaatcaccaagcagtgcattgctgatcgttacaacggacttcactgtatgtcgtcttggtggccgaagcttgactagcagtaacagctctaattgtaaatcgtgtcttctgtagccctaggactgagtgatatacatcgttattctcacgtgtaaattaaaccccatatggccatatggcttcaatatatgaaacattgtcatttagctttatttttagttgaaaacgtgactcacttttgccggaaccgtagcgttagagtgccaaacagaccaaccaggtagcaggcaacaatcagccactaacgtcaagacaaaagatttgtagtttttctttcttttttgcgagctgtgtgaatctctcttataaaaccaaatctcac

SEQ ID NO: 24671 - DNA, 2087 bp, Zea Mays
ctgactccacagtccacaccaccaccacacccaggcttccacttgccgccgcgcccgcgcctccccctcattttctccccctccactgctttgcgcctacgcatcgccgccccgcctctagtcctctgtcctcctcttcctactgtaaaccacctcgtccctatccgcggcaaccgttcaccgcgccgcgaggcctgctgatccgaccgaccttccaccgtcatggctcccctgcgccgcgcgtctcgcctccttcgatcagccgtctgccggctgaggtctccagcgccggctcgggccttctccagcgccgcggcgaccgagacgggtgccgtgatcgccgccgctgccgtggcggtggccagctccgggctcgggctgtggctgaaaccgccgtcgcttgccgactccggcgaggcgcccggcgaccagatctcggtcgcctgtgccggcgccacggaggcgcgggaggagaaggggtggttcctgttcgcagactcatttcgtagaagggtcttcttcaactacgagaagaggatacggcttctcagtcctcctgagaagatttttgagtactttgcgtctgtgaggaatcgagaaggggaagtttacatgttgcctgctgacttgatgagagcagtagtccctgtttttcctccatcagagtccacggtagttcgtgaaggaagattaaggggggagcggagccctggagaattgcactgtgctccatcagagttctttatgcagttcgacacaaataatgatggcctcatctcctttgctgagtacattttttttgtgacattgctcagcattcatgagtcaaatttcactgtggccttcaaaatgttcgacattgaccacagtggttaatttatctcgccaagaaaaaagacctgctcgttatgagcatgttcaatcatctgacttgtttgttgatgggtgatagacagagaagagtttaagaaaataatggcactgatgcggtcctttaacagacaagggtcgactcataaggatggtttacgtattggacttaaagttggcaagcctgtggaaaatggtggggtggtcgagtacttctttgggagtgatgggaatgaacctctacactttgacaagttttctaaaattttgaaggaattgcatgatgagattattcaactggagttcagtcattatgatgtcaaatcgtctaaaacaataccagcaaaggattttgcattgtccatggttgcttctgctgacatgaaccatatcaacaagctgcttgatagagttgatagtttggtcaaggagccagatctgaaggacatacgcatcacctttgaggagtttaaggcatttgctgatttgcgacgaagattggagccactgtcgatggctatctttgcttacggtaaattgaatgggttattgacgaaggaggatctaaaacgtgcagcgcaacatgtttgcggggtcgacttaacagatagagtagtagacatcattttccatgtgttcgacacaaatcaggatgggaacttgagcccagaagagttcttaagagcgttacaaagaagagaaactgatattcgtgaaccaacaataccaggtccattggggttcttgtcttgctggttcagtggtaggaagtgttcttcactaaaacatgtggttatctgattgagcccctatttgatcctcacggcgcagaaggtaatcaccaagcagtgcattgctgatcgttacaacggacttcactgtatgtcgtcttggtggccgaagcttgactagcagtaacagctctaattgtaaatcgtgtcttctgtagccctaggactgagtgatatacatcgttattctcacgtgtaaattaaaccccatatggccatatggcttcaatatatgaaacattgtcatttagctttatttttagttgaaaacgtgactcacttttgccggaaccgtagcgttagagtgccaaacagaccaaccaggtagcaggcaacaatcagccactaacgtcaagacaaaagatttgtagtttttctttcttttttgcgagctgtgtgaatctctcttataaaaccaaatctcac

SEQ ID NO: 24672 - DNA, 1819 bp, Zea Mays
ctgactccacagtccacaccaccaccacacccaggcttccacttgccgccgcgcccgcgcctccccctcattttctccccctccactgctttgcgcctacgcatcgccgccccgcctctagtcctctgtcctcctcttcctactgtaaaccacctcgtccctatccgcggcaaccgttcaccgcgccgcgaggcctgctgatccgaccgaccttccaccgtcatggctcccctgcgccgcgcgtctcgcctccttcgatcagccgtctgccggctgaggtctccagcgccggctcgggccttctccagcgccgcggcgaccgagacgggtgccgtgatcgccgccgctgccgtggcggtggccagctccgggctcgggctgtggctgaaaccgccgtcgcttgccgactccggcgaggcgcccggcgaccagatctcggtcgcctgtgccggcgccacggaggcgcgggaggagaaggggtggttcctgttcgcagactcatttcgtagaagggtcttcttcaactacgagaagaggatacggcttctcagtcctcctgagaagatttttgagtactttgcgtctgtgaggaatcgagaaggggaagtttacatgttgcctgctgacttgatgagagcagtagtccctgtttttcctccatcagagtccacggtagttcgtgaaggaagattaaggggggagcggagccctggagaattgcactgtgctccatcagagttctttatgcagttcgacacaaataatgatggcctcatctcctttgctgagtacattttttttgtgacattgctcagcattcatgagtcaaatttcactgtggccttcaaaatgttcgacattgaccacagtggattattcaactggagttcagtcattatgatgtcaaatcgtctaaaacaataccagcaaaggattttgcattgtccatggttgcttctgctgacatgaaccatatcaacaagctgcttgatagagttgatagtttggtcaaggagccagatctgaaggacatacgcatcacctttgaggagtttaaggcatttgctgatttgcgacgaagattggagccactgtcgatggctatctttgcttacggtaaattgaatgggttattgacgaaggaggatctaaaacgtgcagcgcaacatgtaagattttcttaccaggtttgcggggtcgacttaacagatagagtagtagacatcattttccatgtgttcgacacaaatcaggatgggaacttgagcccagaagagttcttaagagcgttacaaagaagagaaactgatattcgtgaaccaacaataccaggtccattggggttcttgtcttgctggttcagtggtaggaagtgttcttcactaaaacatgtggttatctgattgagcccctatttgatcctcacggcgcagaaggtaatcaccaagcagtgcattgctgatcgttacaacggacttcactgtatgtcgtcttggtggccgaagcttgactagcagtaacagctctaattgtaaatcgtgtcttctgtagccctaggactgagtgatatacatcgttattctcacgtgtaaattaaaccccatatggccatatggcttcaatatatgaaacattgtcatttagctttatttttagttgaaaacgtgactcacttttgccggaaccgtagcgttagagtgccaaacagaccaaccaggtagcaggcaacaatcagccactaacgtcaagacaaaagatttgtagtttttctttcttttttgcgagctgtgtgaatctctcttataaaaccaaatctcac

SEQ ID NO: 24673 - DNA, 2094 bp, Zea Mays
ctgactccacagtccacaccaccaccacacccaggcttccacttgccgccgcgcccgcgcctccccctcattttctccccctccactgctttgcgcctacgcatcgccgccccgcctctagtcctctgtcctcctcttcctactgtaaaccacctcgtccctatccgcggcaaccgttcaccgcgccgcgaggcctgctgatccgaccgaccttccaccgtcatggctcccctgcgccgcgcgtctcgcctccttcgatcagccgtctgccggctgaggtctccagcgccggctcgggccttctccagcgccgcggcgaccgagacgggtgccgtgatcgccgccgctgccgtggcggtggccagctccgggctcgggctgtggctgaaaccgccgtcgcttgccgactccggcgaggcgcccggcgaccagatctcggtcgcctgtgccggcgccacggaggcgcgggaggagaaggggtggttcctgttcgcagactcatttcgtagaagggtcttcttcaactacgagaagaggatacggcttctcagtcctcctgagaagatttttgagtactttgcgtctgtgaggaatcgagaaggggaagtttacatgttgcctgctgacttgatgagagcagtagtccctgtttttcctccatcagagtccacggtagttcgtgaaggaagattaaggggggagcggagccctggagaattgcactgtgctccatcagagttctttatgcagttcgacacaaataatgatggcctcatctcctttgctgagtacattttttttgtgacattgctcagcattcatgagtcaaatttcactgtggccttcaaaatgttcgacattgaccacattaatttatctcgccaagaaaaaagacctgctcgttatgagcatgttcaatcatctgacttgtttgttgatggtaaaagaaggggtgatagacagagaagagtttaagaaaataatggcactgatgcggtcctttaacagacaagggtcgactcataaggatggtttacgtattggacttaaagttggcaagcctgtggaaaatggtggggtggtcgagtacttctttgggagtgatgggaatgaacctctacactttgacaagttttctaaaattttgaaggaattgcatgatgagattattcaactggagttcagtcattatgatgtcaaatcgtctaaaacaataccagcaaaggattttgcattgtccatggttgcttctgctgacatgaaccatatcaacaagctgcttgatagagttgatagtttggtcaaggagccagatctgaaggacatacgcatcacctttgaggagtttaaggcatttgctgatttgcgacgaagattggagccactgtcgatggctatctttgcttacggtaaattgaatgggttattgacgaaggaggatctaaaacgtgcagcgcaacatgtttgcggggtcgacttaacagatagagtagtagacatcattttccatgtgttcgacacaaatcaggatgggaacttgagcccagaagagttcttaagagcgttacaaagaagagaaactgatattcgtgaaccaacaataccaggtccattggggttcttgtcttgctggttcagtggtaggaagtgttcttcactaaaacatgtggttatctgattgagcccctatttgatcctcacggcgcagaaggtaatcaccaagcagtgcattgctgatcgttacaacggacttcactgtatgtcgtcttggtggccgaagcttgactagcagtaacagctctaattgtaaatcgtgtcttctgtagccctaggactgagtgatatacatcgttattctcacgtgtaaattaaaccccatatggccatatggcttcaatatatgaaacattgtcatttagctttatttttagttgaaaacgtgactcacttttgccggaaccgtagcgttagagtgccaaacagaccaaccaggtagcaggcaacaatcagccactaacgtcaagacaaaagatttgtagtttttctttcttttttgcgagctgtgtgaatctctcttataaaaccaaatctcac

SEQ ID NO: 24674 - DNA, 1931 bp, Zea Mays
ctgactccacagtccacaccaccaccacacccaggcttccacttgccgccgcgcccgcgcctccccctcattttctccccctccactgctttgcgcctacgcatcgccgccccgcctctagtcctctgtcctcctcttcctactgtaaaccacctcgtccctatccgcggcaaccgttcaccgcgccgcgaggcctgctgatccgaccgaccttccaccgtcatggctcccctgcgccgcgcgtctcgcctccttcgatcagccgtctgccggctgaggtctccagcgccggctcgggccttctccagcgccgcggcgaccgagacgggtgccgtgatcgccgccgctgccgtggcggtggccagctccgggctcgggctgtggctgaaaccgccgtcgcttgccgactccggcgaggcgcccggcgaccagatctcggtcgcctgtgccggcgccacggaggcgcgggaggagaaggggtggttcctgttcgcagactcatttcgtagaagggtcttcttcaactacgagaagaggatacggcttctcagtcctcctgagaagatttttgagtactttgcgtctgtgaggaatcgagaaggggaagtttacatgttgcctgctgacttgatgagagcagtagtccctgtttttcctccatcagagtccacggtagttcgtgaaggaagattaaggggggagcggagccctggagaattgcactgtgctccatcagagttctttatgcagttcgacacaaataatgatggcctcatctcctttgctgaggtgatagacagagaagagtttaagaaaataatggcactgatgcggtcctttaacagacaagggtcgactcataaggatggtttacgtattggacttaaagttggcaagcctgtggaaaatggtggggtggtcgagtacttctttgggagtgatgggaatgaacctctacactttgacaagttttctaaaattttgaaggaattgcatgatgagattattcaactggagttcagtcattatgatgtcaaatcgtctaaaacaataccagcaaaggattttgcattgtccatggttgcttctgctgacatgaaccatatcaacaagctgcttgatagagttgatagtttggtcaaggagccagatctgaaggacatacgcatcacctttgaggagtttaaggcatttgctgatttgcgacgaagattggagccactgtcgatggctatctttgcttacggtaaattgaatgggttattgacgaaggaggatctaaaacgtgcagcgcaacatgtttgcggggtcgacttaacagatagagtagtagacatcattttccatgtgttcgacacaaatcaggatgggaacttgagcccagaagagttcttaagagcgttacaaagaagagaaactgatattcgtgaaccaacaataccaggtccattggggttcttgtcttgctggttcagtggtaggaagtgttcttcactaaaacatgtggttatctgattgagcccctatttgatcctcacggcgcagaaggtaatcaccaagcagtgcattgctgatcgttacaacggacttcactgtatgtcgtcttggtggccgaagcttgactagcagtaacagctctaattgtaaatcgtgtcttctgtagccctaggactgagtgatatacatcgttattctcacgtgtaaattaaaccccatatggccatatggcttcaatatatgaaacattgtcatttagctttatttttagttgaaaacgtgactcacttttgccggaaccgtagcgttagagtgccaaacagaccaaccaggtagcaggcaacaatcagccactaacgtcaagacaaaagatttgtagtttttctttcttttttgcgagctgtgtgaatctctcttataaaaccaaatctcac

SEQ ID NO: 24675 - DNA, 1806 bp, Zea Mays
ctgactccacagtccacaccaccaccacacccaggcttccacttgccgccgcgcccgcgcctccccctcattttctccccctccactgctttgcgcctacgcatcgccgccccgcctctagtcctctgtcctcctcttcctactgtaaaccacctcgtccctatccgcggcaaccgttcaccgcgccgcgaggcctgctgatccgaccgaccttccaccgtcatggctcccctgcgccgcgcgtctcgcctccttcgatcagccgtctgccggctgaggtctccagcgccggctcgggccttctccagcgccgcggcgaccgagacgggtgccgtgatcgccgccgctgccgtggcggtggccagctccgggctcgggctgtggctgaaaccgccgtcgcttgccgactccggcgaggcgcccggcgaccagatctcggtcgcctgtgccggcgccacggaggcgcgggaggagaaggggtggttcctgttcgcaggtacattttttttgtgacattgctcagcattcatgagtcaaatttcactgtggccttcaaaatgttcgacattgaccacagtggttaatttatctcgccaagaaaaaagacctgctcgttatgagcatgttcaatcatctgacttgtttgttgatggtaaaagaaggggtgatagacagagaagagtttaagaaaataatggcactgatgcggtcctttaacagacaagggtcgactcataaggatggtttacgtattggacttaaagttggcaagcctgtggaaaatggtggggtggtcgagtacttctttgggagtgatgggaatgaacctctacactttgacaagttttctaaaattttgaaggaattgcatgatgagattattcaactggagttcagtcattatgatgtcaaatcgtctaaaacaataccagcaaaggattttgcattgtccatggttgcttctgctgacatgaaccatatcaacaagctgcttgatagagttgatagtttggtcaaggagccagatctgaaggacatacgcatcacctttgaggagtttaaggcatttgctgatttgcgacgaagattggagccactgtcgatggctatctttgcttacggtaaattgaatgggttattgacgaaggaggatctaaaacgtgcagcgcaacatgtttgcggggtcgacttaacagatagagtagtagacatcattttccatgtgttcgacacaaatcaggatgggaacttgagcccagaagagttcttaagagcgttacaaagaagagaaactgatattcgtgaaccaacaataccaggtccattggggttcttgtcttgctggttcagtggtaggaagtgttcttcactaaaacatgtggttatctgattgagcccctatttgatcctcacggcgcagaaggtaatcaccaagcagtgcattgctgatcgttacaacggacttcactgtatgtcgtcttggtggccgaagcttgactagcagtaacagctctaattgtaaatcgtgtcttctgtagccctaggactgagtgatatacatcgttattctcacgtgtaaattaaaccccatatggccatatggcttcaatatatgaaacattgtcatttagctttatttttagttgaaaacgtgactcacttttgccggaaccgtagcgttagagtgccaaacagaccaaccaggtagcaggcaacaatcagccactaacgtcaagacaaaagatttgtagtttttctttcttttttgcgagctgtgtgaatctctcttataaaaccaaatctcac

SEQ ID NO: 24676 - DNA, 1884 bp, Zea Mays
ctgactccacagtccacaccaccaccacacccaggcttccacttgccgccgcgcccgcgcctccccctcattttctccccctccactgctttgcgcctacgcatcgccgccccgcctctagtcctctgtcctcctcttcctactgtaaaccacctcgtccctatccgcggcaaccgttcaccgcgccgcgaggcctgctgatccgaccgaccttccaccgtcatggctcccctgcgccgcgcgtctcgcctccttcgatcagccgtctgccggctgaggtctccagcgccggctcgggccttctccagcgccgcggcgaccgagacgggtgccgtgatcgccgccgctgccgtggcggtggccagctccgggctcgggctgtggctgaaaccgccgtcgcttgccgactccggcgaggcgcccggcgaccagatctcggtcgcctgtgccggcgccacggaggcgcgggaggagaaggggtggttcctgttcgcagactcatttcgtagaagggtcttcttcaactacgagaagaggatacggcttctcagtcctcctgagaagatttttgagtactttgcgtctgtgaggaatcgagaaggggaagtttacatgttgcctgctgacttgatgagagcagtagtccctgtttttcctccatcagagtccacggtagttcgtgaaggaagattaaggggggagcggagccctggagaattgcactgtgctccatcagagttctttatgcagttcgacacaaataatgatggcctcatctcctttgctgagtacattttttttgtgacattgctcagcattcatgagtcaaatttcactgtggccttcaaaatgttcgacattgaccacagtggttaatttatctcgccaagaaaaaagacctgctcgttatgagcatgttcaatcatctgacttgtttgttgatggtaaaagaaggattattcaactggagttcagtcattatgatgtcaaatcgtctaaaacaataccagcaaaggattttgcattgtccatggttgcttctgctgacatgaaccatatcaacaagctgcttgatagagttgatagtttggtcaaggagccagatctgaaggacatacgcatcacctttgaggagtttaaggcatttgctgatttgcgacgaagattggagccactgtcgatggctatctttgcttacggtaaattgaatgggttattgacgaaggaggatctaaaacgtgcagcgcaacatgtttgcggggtcgacttaacagatagagtagtagacatcattttccatgtgttcgacacaaatcaggatgggaacttgagcccagaagagttcttaagagcgttacaaagaagagaaactgatattcgtgaaccaacaataccaggtccattggggttcttgtcttgctggttcagtggtaggaagtgttcttcactaaaacatgtggttatctgattgagcccctatttgatcctcacggcgcagaaggtaatcaccaagcagtgcattgctgatcgttacaacggacttcactgtatgtcgtcttggtggccgaagcttgactagcagtaacagctctaattgtaaatcgtgtcttctgtagccctaggactgagtgatatacatcgttattctcacgtgtaaattaaaccccatatggccatatggcttcaatatatgaaacattgtcatttagctttatttttagttgaaaacgtgactcacttttgccggaaccgtagcgttagagtgccaaacagaccaaccaggtagcaggcaacaatcagccactaacgtcaagacaaaagatttgtagtttttctttcttttttgcgagctgtgtgaatctctcttataaaaccaaatctcac

SEQ ID NO: 24677 - DNA, 2041 bp, Zea Mays
ctgactccacagtccacaccaccaccacacccaggcttccacttgccgccgcgcccgcgcctccccctcattttctccccctccactgctttgcgcctacgcatcgccgccccgcctctagtcctctgtcctcctcttcctactgtaaaccacctcgtccctatccgcggcaaccgttcaccgcgccgcgaggcctgctgatccgaccgaccttccaccgtcatggctcccctgcgccgcgcgtctcgcctccttcgatcagccgtctgccggctgaggtctccagcgccggctcgggccttctccagcgccgcggcgaccgagacgggtgccgtgatcgccgccgctgccgtggcggtggccagctccgggctcgggctgtggctgaaaccgccgtcgcttgccgactccggcgaggcgcccggcgaccagatctcggtcgcctgtgccggcgccacggaggcgcgggaggagaaggggtggttcctgttcgcagactcatttcgtagaagggtcttcttcaactacgagaagaggatacggcttctcagtcctcctgagaagatttttgagtactttgcgtctgtgaggaatcgagaaggggaagtttacatgttgcctgctgacttgatgagagcagtagtccctgtttttcctccatcagagtccacggtagttcgtgaaggaagattaaggggggagcggagccctggagaattgcactgtgctccatcagagttctttatgcagttcgacacaaataatgatggcctcatctcctttgctgagtacattttttttgtgacattgctcagcattcatgagtcaaatttcactgtggccttcaaaatgttcgacattgaccacagtggttaatttatctcgccaagaaaaaagacctgctcgttatgagcatgttcaatcatctgacttgtttgttgatggtaaaagaaggacaagggtcgactcataaggatggtttacgtattggacttaaagttggcaagcctgtggaaaatggtggggtggtcgagtacttctttgggagtgatgggaatgaacctctacactttgacaagttttctaaaattttgaaggaattgcatgatgagattattcaactggagttcagtcattatgatgtcaaatcgtctaaaacaataccagcaaaggattttgcattgtccatggttgcttctgctgacatgaaccatatcaacaagctgcttgatagagttgatagtttggtcaaggagccagatctgaaggacatacgcatcacctttgaggagtttaaggcatttgctgatttgcgacgaagattggagccactgtcgatggctatctttgcttacggtaaattgaatgggttattgacgaaggaggatctaaaacgtgcagcgcaacatgtttgcggggtcgacttaacagatagagtagtagacatcattttccatgtgttcgacacaaatcaggatgggaacttgagcccagaagagttcttaagagcgttacaaagaagagaaactgatattcgtgaaccaacaataccaggtccattggggttcttgtcttgctggttcagtggtaggaagtgttcttcactaaaacatgtggttatctgattgagcccctatttgatcctcacggcgcagaaggtaatcaccaagcagtgcattgctgatcgttacaacggacttcactgtatgtcgtcttggtggccgaagcttgactagcagtaacagctctaattgtaaatcgtgtcttctgtagccctaggactgagtgatatacatcgttattctcacgtgtaaattaaaccccatatggccatatggcttcaatatatgaaacattgtcatttagctttatttttagttgaaaacgtgactcacttttgccggaaccgtagcgttagagtgccaaacagaccaaccaggtagcaggcaacaatcagccactaacgtcaagacaaaagatttgtagtttttctttcttttttgcgagctgtgtgaatctctcttataaaaccaaatctcac

SEQ ID NO: 24678 - DNA, 2331 bp, Zea Mays
ctgactccacagtccacaccaccaccacacccaggcttccacttgccgccgcgcccgcgcctccccctcattttctccccctccactgctttgcgcctacgcatcgccgccccgcctctagtcctctgtcctcctcttcctactgtaaaccacctcgtccctatccgcggcaaccgttcaccgcgccgcgaggcctgctgatccgaccgaccttccaccgtcatggctcccctgcgccgcgcgtctcgcctccttcgatcagccgtctgccggctgaggtctccagcgccggctcgggccttctccagcgccgcggcgaccgagacgggtgccgtgatcgccgccgctgccgtggcggtggccagctccgggctcgggctgtggctgaaaccgccgtcgcttgccgactccggcgaggcgcccggcgaccagatctcggtcgcctgtgccggcgccacggaggcgcgggaggagaaggggtggttcctgttcgcagactcatttcgtagaagggtcttcttcaactacgagaagaggatacggcttctcagtcctcctgagaagatttttgagtactttgcgtctgtgaggaatcgagaaggggaagtttacatgttgcctgctgacttgatgagagcagtagtccctgtttttcctccatcagagtccacggtagttcgtgaaggaagattaaggggggagcggagccctggagaattgcactgtgctccatcagagttctttatgcagttcgacacaaataatgatggcctcatctcctttgctgagtacattttttttgtgacattgctcagcattcatgagtcaaatttcactgtggccttcaaaatgttcgacattgaccacagtgggtgagttcttatcctaccgttgctctaagtcttcagaataggttccccgaccctgctgaaacacatctgttgaccagaattttctcaacctgtacacttctatttggttttgataaacgattaaaataaatttgatgttttgagaggaaatttagttcttcaagtcctgtttgcttcagtttgaaatttcttttcctgtgtaaacatatgttgtttagtaatgctgataaaggtatgtcgttctgtactcatgcataaacaagaggacagttaatatggtcttgtttgtgttgtattgttgtttacctgtgatcattgcatgcagttaatttatctcgccaagaaaaaagacctgctcgttatgagcatgttcaatcatctgacttgtttgttgatggtaaaagaaggggtgatagacagagaagagtttaagaaaataatggcactgatgcggtcctttaacagacaagggtcgactcataaggatggtttacgtattggacttaaagttggcaagcctgtggaaaatgattattcaactggagttcagtcattatgatgtcaaatcgtctaaaacaataccagcaaaggattttgcattgtccatggttgcttctgctgacatgaaccatatcaacaagctgcttgatagagttgatagtttggtcaaggagccagatctgaaggacatacgcatcacctttgaggagtttaaggcatttgctgatttgcgacgaagattggagccactgtcgatggctatctttgcttacggtaaattgaatgggttattgacgaaggaggatctaaaacgtgcagcgcaacatgtttgcggggtcgacttaacagatagagtagtagacatcattttccatgtgttcgacacaaatcaggatgggaacttgagcccagaagagttcttaagagcgttacaaagaagagaaactgatattcgtgaaccaacaataccaggtccattggggttcttgtcttgctggttcagtggtaggaagtgttcttcactaaaacatgtggttatctgattgagcccctatttgatcctcacggcgcagaaggtaatcaccaagcagtgcattgctgatcgttacaacggacttcactgtatgtcgtcttggtggccgaagcttgactagcagtaacagctctaattgtaaatcgtgtcttctgtagccctaggactgagtgatatacatcgttattctcacgtgtaaattaaaccccatatggccatatggcttcaatatatgaaacattgtcatttagctttatttttagttgaaaacgtgactcacttttgccggaaccgtagcgttagagtgccaaacagaccaaccaggtagcaggcaacaatcagccactaacgtcaagacaaaagatttgtagtttttctttcttttttgcgagctgtgtgaatctctcttataaaaccaaatctcac

SEQ ID NO: 24679 - DNA, 2017 bp, Zea Mays
cactgactccacagtccacaccaccaccacacccaggcttccacttgccgccgcgcccgcgcctccccctcattttctccccctccactgctttgcgcctacgcatcgccgccccgcctctagtcctctgtcctcctcttcctactgtaaaccacctcgtccctatccgcggcaaccgttcaccgcgccgcgaggcctgctgatccgaccgaccttccaccgtcatggctcccctgcgccgcgcgtctcgcctccttcgatcagccgtctgccggctgaggtctccagcgccggctcgggccttctccagcgccgcggcgaccgagacgggtgccgtgatcgccgccgctgccgtggcggtggccagctccgggctcgggctgtggctgaaaccgccgtcgcttgccgactccggcgaggcgcccggcgaccagatctcggtcgcctgtgccggcgccacggaggcgcgggaggagaaggggtggttcctgttcgcagactcatttcgtagaagggtcttcttcaactacgagaagaggatacggcttctcagtcctcctgagaagatttttgagtactttgcgtctgtgaggaatcgagaaggggaagtttacatgttgcctgctgacttgatgagagcagtagtccctgtttttcctccatcagagtccacggtagttcgtgaaggaagattaaggggggagcggagccctggagaattgcactgtgctccatcagagttctttatgcagttcgacacaaataatgatggcctcatctcctttgctgagtacattttttttgtgacattgctcagcattcatgagtcaaatttcactgtggccttcaaaatgttcgacattgaccacagtggggtgatagacagagaagagtttaagaaaataatggcactgatgcggtcctttaacagacaagggtcgactcataaggatggtttacgtattggacttaaagttggcaagcctgtggaaaatggtggggtggtcgagtacttctttgggagtgatgggaatgaacctctacactttgacaagttttctaaaattttgaaggaattgcatgatgagattattcaactggagttcagtcattatgatgtcaaatcgtctaaaacaataccagcaaaggattttgcattgtccatggttgcttctgctgacatgaaccatatcaacaagctgcttgatagagttgatagtttggtcaaggagccagatctgaaggacatacgcatcacctttgaggagtttaaggcatttgctgatttgcgacgaagattggagccactgtcgatggctatctttgcttacggtaaattgaatgggttattgacgaaggaggatctaaaacgtgcagcgcaacatgtttgcggggtcgacttaacagatagagtagtagacatcattttccatgtgttcgacacaaatcaggatgggaacttgagcccagaagagttcttaagagcgttacaaagaagagaaactgatattcgtgaaccaacaataccaggtccattggggttcttgtcttgctggttcagtggtaggaagtgttcttcactaaaacatgtggttatctgattgagcccctatttgatcctcacggcgcagaaggtaatcaccaagcagtgcattgctgatcgttacaacggacttcactgtatgtcgtcttggtggccgaagcttgactagcagtaacagctctaattgtaaatcgtgtcttctgtagccctaggactgagtgatatacatcgttattctcacgtgtaaattaaaccccatatggccatatggcttcaatatatgaaacattgtcatttagctttatttttagttgaaaacgtgactcacttttgccggaaccgtagcgttagagtgccaaacagaccaaccaggtagcaggcaacaatcagccactaacgtcaagacaaaagatttgtagtttttctttcttttttgcgagctgtgtgaatctctcttataaaaccaaatctcac

SEQ ID NO: 24680 - DNA, 2329 bp, Zea Mays
tccacactgactccacagtccacaccaccaccacacccaggcttccacttgccgccgcgcccgcgcctccccctcattttctccccctccactgctttgcgcctacgcatcgccgccccgcctctagtcctctgtcctcctcttcctactgtaaaccacctcgtccctatccgcggcaaccgttcaccgcgccgcgaggcctgctgatccgaccgaccttccaccgtcatggctcccctgcgccgcgcgtctcgcctccttcgatcagccgtctgccggctgaggtctccagcgccggctcgggccttctccagcgccgcggcgaccgagacgggtgccgtgatcgccgccgctgccgtggcggtggccagctccgggctcgggctgtggctgaaaccgccgtcgcttgccgactccggcgaggcgcccggcgaccagatctcggtcgcctgtgccggcgccacggaggcgcgggaggagaaggggtggttcctgttcgcagactcatttcgtagaagggtcttcttcaactacgagaagaggatacggcttctcagtcctcctgagaagagtccacggtagttcgtgaaggaagattaaggggggagcggagccctggagaattgcactgtgctccatcagagttctttatgcagttcgacacaaataatgatggcctcatctcctttgctgagtacattttttttgtgacattgctcagcattcatgagtcaaatttcactgtggccttcaaaatgttcgacattgaccacagtgggtgagttcttatcctaccgttgctctaagtcttcagaataggttccccgaccctgctgaaacacatctgttgaccagaattttctcaacctgtacacttctatttggttttgataaacgattaaaataaatttgatgttttgagaggaaatttagttcttcaagtcctgtttgcttcagtttgaaatttcttttcctgtgtaaacatatgttgtttagtaatgctgataaaggtatgtcgttctgtactcatgcataaacaagaggacagttaatatggtcttgtttgtgttgtattgttgtttacctgtgatcattgcatgcagttaatttatctcgccaagaaaaaagacctgctcgttatgagcatgttcaatcatctgacttgtttgttgatggtaaaagaaggggtgatagacagagaagagtttaagaaaataatggcactgatgcggtcctttaacagacaagggtcgactcataaggatggtttacgtattggacttaaagttggcaagcctgtggaaaatggtggggtggtcgagtacttctttgggagtgatgggaatgaacctctacactttgacaagttttctaaaattttgaaggaattgcatgatgagattattcaactggagttcagtcattatgatgtcaaatcgtctaaaacaataccagcaaaggattttgcattgtccatggttgcttctgctgacatgaaccatatcaacaagctgcttgatagagttgatagtttggtcaaggagccagatctgaaggacatacgcatcacctttgaggagtttaaggcatttgctgatttgcgacgaagattggagccactgtcgatggctatctttgcttacggtaaattgaatgggttattgacgaaggaggatctaaaacgtgcagcgcaacatgtttgcggggtcgacttaacagatagagtagtagacatcattttccatgtgttcgacacaaatcaggatgggaacttgagcccagaagagttcttaagagcgttacaaagaagagaaactgatattcgtgaaccaacaataccaggtccattggggttcttgtcttgctggttcagtggtaggaagtgttcttcactaaaacatgtggttatctgattgagcccctatttgatcctcacggcgcagaaggtaatcaccaagcagtgcattgctgatcgttacaacggacttcactgtatgtcgtcttggtggccgaagcttgactagcagtaacagctctaattgtaaatcgtgtcttctgtagccctaggactgagtgatatacatcgttattctcacgtgtaaattaaaccccatatggccatatggcttcaatatatgaaacattgtcatttagctttatttttagttgaaaacgtgactcacttttgccggaaccgtagcgttagagtgccaaacagaccaaccaggtagcaggcaacaatcagccactaacgtcaagacaaaagatttgtagtttttctttcttttttgcgagctgtgtgaatctctcttataaaaccaaatctcac

SEQ ID NO: 24681 - DNA, 2393 bp, Zea Mays
caagtcgcaaaaggcgtccccgccacagcggcgacgcgtccctcggtcggtcggtccacactgactccacagtccacaccaccaccacacccaggcttccacttgccgccgcgcccgcgcctccccctcattttctccccctccactgctttgcgcctacgcatcgccgccccgcctctagtcctctgtcctcctcttcctactgtaaaccacctcgtccctatccgcggcaaccgttcaccgcgccgcgaggcctgctgatccgaccgaccttccaccgtcatggctcccctgcgccgcgcgtctcgcctccttcgatcagccgtctgccggctgaggtctccagcgccggctcgggccttctccagcgccgcggcgaccgagacgggtgccgtgatcgccgccgctgccgtggcggtggccagctccgggctcgggctgtggctgaaaccgccgtcgcttgccgactccggcgaggcgcccggcgaccagatctcggtcgcctgtgccggcgccacggaggcgcgggaggagaaggggtggttcctgttcgcagactcatttcgtagaagggtcttcttcaactacgagaagaggatacggcttctcagtcctcctgagaagatttttgagtactttgcgtctgtgaggaatcgagaaggggaagtttacatgttgcctgctgacttgatgagagcagtagtccctgtttttcctccatcagagtccacggtagttcgtgaaggaagattaaggggggagcggagccctggagaattgcactgtgctccatcagagttctttatgcagttcgacacaaataatgatggcctcatctcctttgctgagtacattttttttgtgacattgctcagcattcatgagtcaaatttcactgtggccttcaaaatgttcgacattgaccacagtggttaatttatctcgccaagaaaaaagacctgctcgttatgagcatgttcaatcatctgacttgtttgttgatggtaaaagaagggtatgaacaaattttgtccaccttcttcattgtaaatttgttgttctcatctaggacatgccgcttttcagggtgatagacagagaagagtttaagaaaataatggcactgatgcggtcctttaacagacaagggtcgactcataaggatggtttacgtattggacttaaagttggcaagcctgtggaaaatggtggggtggtcgagtacttctttgggagtgatgggaatgaacctctacactttgacaagttttctaaaattttgaaggaattgcatgatgagtggtgagaagccttcccattgaggcaaaggtctaggctcgacgcagtctctctgaaaaaatagagggattattcaactggagttcagtcattatgatgtcaaatcgtctaaaacaataccagcaaaggattttgcattgtccatggttgcttctgctgacatgaaccatatcaacaagctgcttgatagagttgatagtttggtcaaggagccagatctgaaggacatacgcatcacctttgaggagtttaaggcatttgctgatttgcgacgaagattggagccactgtcgatggctatctttgcttacggtaaattgaatgggttattgacgaaggaggatctaaaacgtgcagcgcaacatgtaagattttcttaccaggtttggcatgcttatttatgttattttgcttctaactgatgtctagctatgtaatttttcattttggtttgtgttgtaggtttgcggggtcgacttaacagatagagtagtagacatcattttccatgtgttcgacacaaatcaggatgggaacttgagcccagaagagttcttaagagcgttacaaagaagagaaactgatattcgtgaaccaacaataccaggtccattggggttcttgtcttgctggttcagtggtaggaagtgttcttcactaaaacatgtggttatctgattgagcccctatttgatcctcacggcgcagaaggtaatcaccaagcagtgcattgctgatcgttacaacggacttcactgtatgtcgtcttggtggccgaagcttgactagcagtaacagctctaattgtaaatcgtgtcttctgtagccctaggactgagtgatatacatcgttattctcacgtgtaaattaaaccccatatggccatatggcttcaatatatgaaacattgtcatttagctttatttttagttgaaaacgtgactcacttttgccggaaccgtagcgttagagtgccaaacagaccaaccaggtagcaggcaacaatcagccactaacgtcaagacaaaagatttgtagtttttctttcttttttgcgagctgtgtgaatctctcttataaaaccaaatctcac

SEQ ID NO: 24682 - DNA, 2501 bp, Zea Mays
gtcaccgtctcgcaccgacaagtcgcaaaaggcgtccccgccacagcggcgacgcgtccctcggtcggtcggtccacactgactccacagtccacaccaccaccacacccaggcttccacttgccgccgcgcccgcgcctccccctcattttctccccctccactgctttgcgcctacgcatcgccgccccgcctctagtcctctgtcctcctcttcctactgtaaaccacctcgtccctatccgcggcaaccgttcaccgcgccgcgaggcctgctgatccgaccgaccttccaccgtcatggctcccctgcgccgcgcgtctcgcctccttcgatcagccgtctgccggctgaggtctccagcgccggctcgggccttctccagcgccgcggcgaccgagacgggtgccgtgatcgccgccgctgccgtggcggtggccagctccgggctcgggctgtggctgaaaccgccgtcgcttgccgactccggcgaggcgcccggcgaccagatctcggtcgcctgtgccggcgccacggaggcgcgggaggagaaggggtggttcctgttcgcagactcatttcgtagaagggtcttcttcaactacgagaagaggatacggcttctcagtcctcctgagaagatttttgagtactttgcgtctgtgaggaatcgagaaggggaagtttacatgttgcctgctgacttgatgagagcagtagtccctgtttttcctccatcagagtccacggtagttcgtgaaggaagattaaggggggagcggagccctggagaattgcactgtgctccatcagagttctttatgcagttcgacacaaataatgatggcctcatctcctttgctgagtacattttttttgtgacattgctcagcattcatgagtcaaatttcactgtggccttcaaaatgttcgacattgaccacagtgggtgagttcttatcctaccgttgctctaagtcttcagaataggttccccgaccctgctgaaacacatctgttgaccagaattttctcaacctgtacacttctatttggttttgataaacgattaaaataaatttgatgttttgagaggaaatttagttcttcaagtcctgtttgcttcagtttgaaatttcttttcctgtgtaaacatatgttgtttagtaatgctgataaaggtatgtcgttctgtactcatgcataaacaagaggacagttaatatggtcttgtttgtgttgtattgttgtttacctgtgatcattgcatgcagttaatttatctcgccaagaaaaaagacctgctcgttatgagcatgttcaatcatctgacttgtttgttgatggtaaaagaaggggtgatagacagagaagagtttaagaaaataatggcactgatgcggtcctttaacagacaagggtcgactcataaggatggtttacgtattggacttaaagttggcaagcctgtggaaaatggtggggtggtcgagtacttctttgggagtgatgggaatgaacctctacactttgacaagttttctaaaattttgaaggaattgcatgatgagattattcaactggagttcagtcattatgatgtcaaatcgtctaaaacaataccagcaaaggattttgcattgtccatggttgcttctgctgacatgaaccatatcaacaagctgcttgatagagttgatagtttggtcaaggagccagatctgaaggacatacgcatcacctttgaggagtttaaggcatttgctgatttgcgacgaagattggagccactgtcgatggctatctttgcttacggtaaattgaatgggttattgacgaaggaggatctaaaacgtgcagcgcaacatgtttgcggggtcgacttaacagatagagtagtagacatcattttccatgtgttcgacacaaatcaggatgggaacttgagcccagaagagttcttaagagcgttacaaagaagagaaactgatattcgtgaaccaacaataccaggtccattggggttcttgtcttgctggttcagtggtaggaagtgttcttcactaaaacatgtggttatctgattgagcccctatttgatcctcacggcgcagaaggtaatcaccaagcagtgcattgctgatcgttacaacggacttcactgtatgtcgtcttggtggccgaagcttgactagcagtaacagctctaattgtaaatcgtgtcttctgtagccctaggactgagtgatatacatcgttattctcacgtgtaaattaaaccccatatggccatatggcttcaatatatgaaacattgtcatttagctttatttttagttgaaaacgtgactcacttttgccggaaccgtagcgttagagtgccaaacagaccaaccaggtagcaggcaacaatcagccactaacgtcaagacaaaagatttgtagtttttctttcttttttgcgagctgtgtgaatctctcttataaaaccaaatctcac

SEQ ID NO: 24683 - DNA, 1946 bp, Zea Mays
tctggtttaattaatgacactgggagcactacatttgtaacattgtacacgtgcaccggggcgtctggtcaccgtctcgcaccgacaagtcgcaaaaggcgtccccgccacagcggcgacgcgtccctcggtcggtcggtccacactgactccacagtccacaccaccaccacacccaggcttccacttgccgccgcgcccgcgcctccccctcattttctccccctccactgctttgcgcctacgcatcgccgccccgcctctagtcctctgtcctcctcttcctactgtaaaccacctcgtccctatccgcggcaaccgttcaccgcgccgcgaggcctgctgatccgaccgaccttccaccgtcatggctcccctgcgccgcgcgtctcgcctccttcgatcagccgtctgccggctgaggtctccagcgccggctcgggccttctccagcgccgcggcgaccgagacgggtgccgtgatcgccgccgctgccgtggcggtggccagctccgggctcgggctgtggctgaaaccgccgtcgcttgccgactccggcgaggcgcccggcgaccagatctcggtcgcctgtgccggcgccacggaggcgcgggaggagaaggggtggttcctgttcgcagactcatttcgtagaagggtcttcttcaactacgagaagaggatacggcttctcagtcctcctgagaagatttttgagtactttgcgtctgtgaggaatcgagaaggggaagtttacatgttgcctgctgacttgatgagagcagtagtccctgtttttcctccatcagagtccacggtagttcgtgaaggaagattaaggggggagcggagccctggagaattgcactgtgctccatcagagttctttatgcagttcgacacaaataatgatggcctcatctcctttgctgagtacattttttttgtgacattgctcagcattcatgagtcaaatttcactgtggccttcaaaatgttcgacattgaccacagtggattattcaactggagttcagtcattatgatgtcaaatcgtctaaaacaataccagcaaaggattttgcattgtccatggttgcttctgctgacatgaaccatatcaacaagctgcttgatagagttgatagtttggtcaaggagccagatctgaaggacatacgcatcacctttgaggagtttaaggcatttgctgatttgcgacgaagattggagccactgtcgatggctatctttgcttacggtaaattgaatgggttattgacgaaggaggatctaaaacgtgcagcgcaacatgtttgcggggtcgacttaacagatagagtagtagacatcattttccatgtgttcgacacaaatcaggatgggaacttgagcccagaagagttcttaagagcgttacaaagaagagaaactgatattcgtgaaccaacaataccaggtccattggggttcttgtcttgctggttcagtggtaggaagtgttcttcactaaaacatgtggttatctgattgagcccctatttgatcctcacggcgcagaaggtaatcaccaagcagtgcattgctgatcgttacaacggacttcactgtatgtcgtcttggtggccgaagcttgactagcagtaacagctctaattgtaaatcgtgtcttctgtagccctaggactgagtgatatacatcgttattctcacgtgtaaattaaaccccatatggccatatggcttcaatatatgaaacattgtcatttagctttatttttagttgaaaacgtgactcacttttgccggaaccgtagcgttagagtgccaaacagaccaaccaggtagcaggcaacaatcagccactaacgtcaagacaaaagatttgtagtttttctttcttttttgcgagctgtgtgaatctctcttataaaaccaaatctcac

SEQ ID NO: 24684 - DNA, 2250 bp, Zea Mays
tgaaaattctggtttaattaatgacactgggagcactacatttgtaacattgtacacgtgcaccggggcgtctggtcaccgtctcgcaccgacaagtcgcaaaaggcgtccccgccacagcggcgacgcgtccctcggtcggtcggtccacactgactccacagtccacaccaccaccacacccaggcttccacttgccgccgcgcccgcgcctccccctcattttctccccctccactgctttgcgcctacgcatcgccgccccgcctctagtcctctgtcctcctcttcctactgtaaaccacctcgtccctatccgcggcaaccgttcaccgcgccgcgaggcctgctgatccgaccgaccttccaccgtcatggctcccctgcgccgcgcgtctcgcctccttcgatcagccgtctgccggctgaggtctccagcgccggctcgggccttctccagcgccgcggcgaccgagacgggtgccgtgatcgccgccgctgccgtggcggtggccagctccgggctcgggctgtggctgaaaccgccgtcgcttgccgactccggcgaggcgcccggcgaccagatctcggtcgcctgtgccggcgccacggaggcgcgggaggagaaggggtggttcctgttcgcagactcatttcgtagaagggtcttcttcaactacgagaagaggatacggcttctcagtcctcctgagaagatttttgagtactttgcgtctgtgaggaatcgagaaggggaagtttacatgttgcctgctgacttgatgagagcagtagtccctgtttttcctccatcagagtccacggtagttcgtgaaggaagattaaggggggagcggagccctggagaattgcactgtgctccatcagagttctttatgcagttcgacacaaataatgatggcctcatctcctttgctgagtacattttttttgtgacattgctcagcattcatgagtcaaatttcactgtggccttcaaaatgttcgacattgaccacagtggttaatttatctcgccaagaaaaaagacctgctcgttatgagcatgttcaatcatctgacttgtttgttgatggtaaaagaaggggtgatagacagagaagagtttaagaaaataatggcactgatgcggtcctttaacagacaagggtcgactcataaggatggtttacgtattggacttaaagttggcaagcctgtggaaaatggtggggtggtcgagtacttctttgggagtgatgggaatgaacctctacactttgacaagttttctaaaattttgaaggaattgcatgatgagattattcaactggagttcagtcattatgatgtcaaatcgtctaaaacaataccagcaaaggattttgcattgtccatggttgcttctgctgacatgaaccatatcaacaagctgcttgatagagttgatagtttggtcaaggagccagatctgaaggacatacgcatcacctttgaggagtttaaggcatttgctgatttgcgacgaagattggagccactgtcgatggctatctttgcttacggtaaattgaatgggttattgacgaaggaggatctaaaacgtgcagcgcaacatgtttgcggggtcgacttaacagatagagtagtagacatcattttccatgtgttcgacacaaatcaggatgggaacttgagcccagaagagttcttaagagcgttacaaagaagagaaactgatattcgtgaaccaacaataccaggtccattggggttcttgtcttgctggttcagtggtaggaagtgttcttcactaaaacatgtggttatctgattgagcccctatttgatcctcacggcgcagaaggtaatcaccaagcagtgcattgctgatcgttacaacggacttcactgtatgtcgtcttggtggccgaagcttgactagcagtaacagctctaattgtaaatcgtgtcttctgtagccctaggactgagtgatatacatcgttattctcacgtgtaaattaaaccccatatggccatatggcttcaatatatgaaacattgtcatttagctttatttttagttgaaaacgtgactcacttttgccggaaccgtagcgttagagtgccaaacagaccaaccaggtagcaggcaacaatcagccactaacgtcaagacaaaagatttgtagtttttctttcttttttgcgagctgtgtgaatctctcttataaaaccaaatctcac

SEQ ID NO: 24685 - DNA, 763 bp, Zea Mays
aaagcattggcaccaatatgtttggtcaaggatgctccctcgtcctttctggatgatgtgcacacaaataatcatggtgctcttcttgctggctacatctatgacaaggaggcagcaaggcagcacccaggtgtactggagccttccgactgctatgggcctgactgtttcagattgactttctatgtctgcgccgtcgtgtgttgctgcggtaccctgttgggcgtgttcttcatatcgaggataaagccggtctaccagatgctctacgcaagtggatcgttcagacatcctcggagccaacagcagctccactgatgttgcatatacactacagtcatatgctaagaaatagtcctattgagttttgggaatgaaatcataatgttctggagtaaatcatctgctggatgccatgttccggtgctgtatcgcattaacggtgcttgatttgcccctgtttgtatcagagttttattctgatttcatttgtccctgctctgtaaggtcgccagcctagtagatataatatagcgggtcatcaatatatactggtaaaccagctgcctatttatatggcagctcgtgtgcatcagcaagtttgaggacgtcataaagcgaatgtatcttctttattctgttgttcctatacaatgggtttcctccattgagacgctgctgcttctttattctgttactaggtatgtacccgtgcgttgcaacggtacacagattaatttagtcgagccttatgacaccgtac

SEQ ID NO: 24686 - DNA, 1684 bp, Zea Mays
caatcatttgtgtggaagggatttggtttcagtggccgaccacactataaattctgacatgtgtgcttcaaggctgtctctagcagttgtggatagctttatgtattggcacgaacagcagtgcatggttgggcactgctgctcttgttaccaacatgaggaatttccctctcagccgaggcactgttgctggtctcatcaagggttatgttgctgttagtgctgctgtctacactgaaacgtttaatggaatgctaggcaattcacccacaaatcttttgatgttgcttgccttggggatcccaacagcatgtattgtggtgatgtattttgttaggccttgcactccatcactggatgaggacaactcaacagaacacagccatttcatgtacacacaaatctcaagtgtggttctcggaatataccttatggttgctacaatacttggtgatactttaaaactaagtcaggctgtcacctatctattgtttggcataatgatacttttgctccttgctccacttgcaataccaataaagatgacactttatccaaacaaacaaacaaaggaaaaggccagcacccttgctccatcttattcaactgatagtctgtctggtgcggatccagagaactcacaaccacttttgggcagtgcctcaacaacacttgctacaggtaccaatgaatctgatgacagtactgatttggatcttctattggctgagggtgagggagcagtgaatttgaagaagaaaagggggccaagaaggggggatgatttcacattccttgaagccctagtaaaggcggacttctggctactgtttgttgtttacttttgtggagttggcacaggggtcactgttctcaataacctggcgcagattggaatgtctgttggtgctaatgacacaactattttgttgtgcctctttggcttctgcaactttgctggtcgtatccttggtggatctgtctctgaatatttcgtaagctcttcttgctggctacatctatgacaaggaggcagcaaggcagcacccaggtgtactggagccttccgactgctatgggcctgactgtttcagattgactttctatgtctgcgccgtcgtgtgttgctgcggtaccctgttgggcgtgttcttcatatcgaggataaagccggtctaccagatgctctacgcaagtggatcgttcagacatcctcggagccaacagcagctccactgatgttgcatatacactacagtcatatgctaagaaatagtcctattgagttttgggaatgaaatcataatgttctggagtaaatcatctgctggatgccatgttccggtgctgtatcgcattaacggtgcttgatttgcccctgtttgtatcagagttttattctgatttcatttgtccctgctctgtaaggtcgccagcctagtagatataatatagcgggtcatcaatatatactggtaaaccagctgcctatttatatggcagctcgtgtgcatcagcaagtttgaggacgtcataaagcgaatgtatcttctttattctgttgttcctatacaatgggtttcctccattgagacgctgctgcttctttattctgttactaggtatgtacccgtgcgttgcaacggtacacagattaatttagtcgagccttatgacaccgtac

SEQ ID NO: 24687 - DNA, 2613 bp, Zea Mays
ctcggtgccacggggaatggatcaacgagctaagctggggcttaattcttagctagctcttcaaccttctattttcgagtttgattaaaaacgaaatctattcagtttttttttactatttcggtaccaaatgtagtttaaactaaaggagccgtgttcattgaacaaatccgtggtgttagcctgtcataaagtagggagatattttacacttttgtgtttcaagtaaatgaaaccattgtgtccacacgtgcatgttttttaattcatgtttgacagtaagacccgcacatatttcatgttttcaagttggctgaagcgaaatgatatgaaggttttctttgctgcagtcgtttacattttattagaatgctggttttggtctataagttgcttattcattcatgctttggccaatcatttgtgtggaagggatttggtttcagtggccgaccacactataaattctgacatgtgtgcttcaaggctgtctctagcagccgagaagattgatgccttcactcctattctccgacttaaaaatatgccgaattcacttggggggcagaacaacaggaagcatttaatcttattagaaaatatttgtcttcggctcccgtgttaaaagcaccacaagctggagtaccattcaggttatacattgcaaccgaagatatagttattggagctgttctgacacaagagaccaaaggaaaggagcatgtggtaacctacctaagtcagagactggtggatgctgaaacaagttgtggatagctttatgtattggcacgaacagcagtgcatggttgggcactgctgctcttgttaccaacatgaggaatttccctctcagccgaggcactgttgctggtctcatcaagggttatgttgctgttagtgctgctgtctacactgaaacgtttaatggaatgctaggcaattcacccacaaatcttttgatgttgcttgccttggggatcccaacagcatgtattgtggtgatgtattttgttaggccttgcactccatcactggatgaggacaactcaacagaacacagccatttcatgtacacacaaatctcaagtgtggttctcggaatataccttatggttgctacaatacttggtgatactttaaaactaagtcaggctgtcacctatctattgtttggcataatgatacttttgctccttgctccacttgcaataccaataaagatgacactttatccaaacaaacaaacaaaggaaaaggccagcacccttgctccatcttattcaactgatagtctgtctggtgcggatccagagaactcacaaccacttttgggcagtgcctcaacaacacttgctacaggtaccaatgaatctgatgacagtactgatttggatcttctattggctgagggtgagggagcagtgaatttgaagaagaaaagggggccaagaaggggggatgatttcacattccttgaagccctagtaaaggcggacttctggctactgtttgttgtttacttttgtggagttggcacaggggtcactgttctcaataacctggcgcagattggaatgtctgttggtgctaatgacacaactattttgttgtgcctctttggcttctgcaactttgctggtcgtatccttggtggatctgtctctgaatatttcgtaaggtcaaggatgctccctcgtcctttctggatgatgtgcacacaaataatcatggtggtaacgttcctgctcttcgcgactggtcttcatagcttgatttatgtttcaactactctcctggggatatgctacggggtccaatttgctgtcatgataccaacggtctcggagctttttgggctaagggacttcgggctaatgtacaacttcatgctgttagtgaatccactcggtgcattctttttctcagctcttcttgctggctacatctatgacaaggaggcagcaaggcagcacccaggtgtactggagccttccgactgctatgggcctgactgtttcagattgactttctatgtctgcgccgtcgtgtgttgctgcggtaccctgttgggcgtgttcttcatatcgaggataaagccggtctaccagatgctctacgcaagtggatcgttcagacatcctcggagccaacagcagctccactgatgttgcatatacactacagtcatatgctaagaaatagtcctattgagttttgggaatgaaatcataatgttctggagtaaatcatctgctggatgccatgttccggtgctgtatcgcattaacggtgcttgatttgcccctgtttgtatcagagttttattctgatttcatttgtccctgctctgtaaggtcgccagcctagtagatataatatagcgggtcatcaatatatactggtaaaccagctgcctatttatatggcagctcgtgtgcatcagcaagtttgaggacgtcataaagcgaatgtatcttctttattctgttgttcctatacaatgggtttcctccattgagacgctgctgcttctttattctgttactaggtatgtacccgtgcgttgcaacggtacacagattaatttagtcgagccttatgacaccgtac

SEQ ID NO: 24688 - DNA, 2355 bp, Zea Mays
gggacacggactagtcaactgttactactccaccaaaacgtccaaacgccggccacgagagcagagcgaaatcccccgaacgaaccgagtactcgagtggcgctcgttcgccccgcaggtccgccgcccgccggggttatattccactgatgctgtgacgcatcgagtccagacaccaggcaaatgcggcgaaggcactgaagaagccacaccgccgccgctgtagcctgtaggctgtcgccacgacccacgcccgcgcgcgcgctgctgccgtgctgcggtctgctgccactgccacgcacctgacctgtcagcagcctccggaggaggcccggcccggggcagtgcggcggcatggctggtggtggtggagggccggggccggggcgggtgaaggcggggagccgcccgccgtgggtcgggctggcggcggcggtgtgggtgcaggtggctgcggggagcgcctacgtgttcccgctctactcgcacgccgtcaaggaggcgctcggctacaaccagcaggcgctcaccatgctcggcgtcggcaacgacgtcggcgagaacgtggggctcgtcccggggttgctcgccaaccgcctcccgccctggctcatcctcgtcatcggctctgcgtgcgccttcttcggcttcggcacgctctggctcgccgtgaccaagaccgtcgccatgccttattgggtgttgtggatagctttatgtattggcacgaacagcagtgcatggttgggcactgctgctcttgttaccaacatgaggaatttccctctcagccgaggcactgttgctggtctcatcaagggttatgttgctgttagtgctgctgtctacactgaaacgtttaatggaatgctaggcaattcacccacaaatcttttgatgttgcttgccttggggatcccaacagcatgtattgtggtgatgtattttgttaggccttgcactccatcactggatgaggacaactcaacagaacacagccatttcatgtacacacaaatctcaagtgtggttctcggaatataccttatggttgctacaatacttggtgatactttaaaactaagtcaggctgtcacctatctattgtttggcataatgatacttttgctccttgctccacttgcaataccaataaagatgacactttatccaaacaaacaaacaaaggaaaaggccagcacccttgctccatcttattcaactgatagtctgtctggtgcggatccagagaactcacaaccacttttgggcagtgcctcaacaacacttgctacaggtaccaatgaatctgatgacagtactgatttggatcttctattggctgagggtgagggagcagtgaatttgaagaagaaaagggggccaagaaggggggatgatttcacattccttgaagccctagtaaaggcggacttctggctactgtttgttgtttacttttgtggagttggcacaggggtcactgttctcaataacctggcgcagattggaatgtctgttggtgctaatgacacaactattttgttgtgcctctttggcttctgcaactttgctggtcgtatccttggtggatctgtctctgaatatttcgtaaggtcaaggatgctccctcgtcctttctggatgatgtgcacacaaataatcatggtgctcttcttgctggctacatctatgacaaggaggcagcaaggcagcacccaggtgtactggagccttccgactgctatgggcctgactgtttcagattgactttctatgtctgcgccgtcgtgtgttgctgcggtaccctgttgggcgtgttcttcatatcgaggataaagccggtctaccagatgctctacgcaagtggatcgttcagacatcctcggagccaacagcagctccactgatgttgcatatacactacagtcatatgctaagaaatagtcctattgagttttgggaatgaaatcataatgttctggagtaaatcatctgctggatgccatgttccggtgctgtatcgcattaacggtgcttgatttgcccctgtttgtatcagagttttattctgatttcatttgtccctgctctgtaaggtcgccagcctagtagatataatatagcgggtcatcaatatatactggtaaaccagctgcctatttatatggcagctcgtgtgcatcagcaagtttgaggacgtcataaagcgaatgtatcttctttattctgttgttcctatacaatgggtttcctccattgagacgctgctgcttctttattctgttactaggtatgtacccgtgcgttgcaacggtacacagattaatttagtcgagccttatgacaccgtac

SEQ ID NO: 24689 - DNA, 1180 bp, Zea Mays
gtttcagtggccgaccacactataaattctgacatgtgtgcttcaaggctgtctctagcagttgtggatagctttatgtattggcacgaacagcagtgcatggttgggcactgctgctcttgttaccaacatgaggaatttccctctcagccgaggcactgttgctggtctcatcaagggttatgttgctgttagtgctgctgtctacactgaaacgtttaatggaatgctaggcaattcacccacaaatcttttgatgttgcttgccttggggatcccaacagcatgtattgtggtgatgtattttgttaggccttgcactccatcactggatgaggacaactcaacagaacacagccatttcatgtacacacaaatctcaagtgtggttctcggaatataccttatggttgctacaatacttggtgatactttaaaactaagtcaggctgtcacctatctattgtttggcataatgatacttttgctccttgctccacttgcaataccaataaagatgacactttatccaaacaaacaaacaaaggaaaaggccagcacccttgctccatcttattcaactgatagtctgtctggtgcggatccagagaactcacaaccacttttgggcagtgcctcaacaacacttgctacaggtaccaatgaatctgatgacagtactgatttggatcttctattggctgagggtgagggagcagtgaatttgaagaagaaaagggggccaagaaggggggatgatttcacattccttgaagccctagtaaaggcggacttctggctactgtttgttgtttacttttgtggagttggcacaggggtcactgttctcaataacctggcgcagattggaatgtctgttggtgctaatgacacaactattttgttgtgcctctttggcttctgcaactttgctggtcgtatccttggtggatctgtctctgaatatttcgtaaggtaagctacatttaacttattcgcaacaacttaacctgtacaatttccctacaatgcatcacttactatattccagcttatttaagctgaaagctgaaagtagtaaagctgattgctttctacagtactgtgatatattgatattactaaacatcaaacaagcattattgaacattgcggttaattcccaatgccattgatctct

SEQ ID NO: 24690 - DNA, 3948 bp, Zea Mays
ccgacctgccgggcatcgcctattcgcctgttcctccaccagcgagacactcagatctgcctttcccgacccggagccagccaggtgagccgaggcaggggggacgcgccactggccatggagcccgggttgagcatcgagtccggttctgccatccgcgtcgcggtgctccccgtgggcggcccgattccgccgccgcgcctgcgcgagtacgcggccctggtggcgcgccacgcgcgcgtcgacctcgcctcgctccgcacctactacgcggagcaccagaagagccccttccagcaccagccctgggagaccggatgcctccgcctcaagttcgtgctcggcggctgcgtgccttcaccctgggaggacttccagtcctcgcgcaaggtgctcgccgtgatcggcatctgtcacctgccgtcctcgcccgacctcgaccacgtggcggcagacttcatagacgctgcgcggtcgtacccgtcggcgctcgccaaccgctgcttcgccttctgccccacggacgcacagctgtcagcgaagaagagggacgatattattatgttccctccttctgatcagcaatcgctggaacttcatatgcttacaatgatccaagatctcgctgcttctttgttgatggagtttgagaagtgggtcttgcgtgcagaatccacaggaaccattttgaagacccctttggattcacaatccagtcttggctcagaggaggttcataggtaattaaggctaaaaaaagaaggcttggtcgtgcacagaagataataggagattattgcctcttggctggatcacctgtggatgctaatgcacattacaccaccgctatagagcttgcaagattgaccggtgatgttttctggcatgctggagcccttgagggtagtgtctgcgcattagtggtggataggatgggccaaagtgaccctattttggaggatgaagtcaaatatcgctattacaccattatccagctatacagaagagccactttacaagataatgctcaaagagtttcacctgtgagctttgagcttgaagctgccttgaagttggcaagatacttgtgcaggcgagaacttgccaaggaggtctcagatttgttaatgggagctgctgatggtgccaaggctcttattgatgccagtgatcggctcatactatatattgaaattgcaagactttttggtacacttggttataagcgcaaggcggcctttttttcaagacaagttgcacagttgtaccttcagcaagacaatgcatatgctgctatgagtgctatgcaggttctaactatgactacaaatgcataccatgtccaaagccgaaagactatgaaaatgaatcatgatccgtccaaggaacctcgtgctggcaatactgattctggaaaggtgcaccctcagtctatagtgtcattgtttgagtcacaatggagtacccttcaaatggtggttctaagagaaatattgatatcgtcgatccgggcggcagatccactctcatcatggagcgctgcagctcgtcttcttcgatcattttacccactcatcacaccagctggtcagagtggcctagcaagctcacttgcaaacgctgctgacaagcttccaacaggcacacgctgtgccgatccatgtcttccttttatcaggttgcattctttcccgcttcacccttctcaaagggatatagtaaaacggaatccacataaaaaggagtggtgggctggtgcaggtccttcaggacctttcatttatactcctttcagcaaagcaggagcttctgggacttccaagcaagagcttagttggattgtgggggagccggttcaagtcatggttgagttagcaaacccttgcagcttcgacatagttgtggagagcatctatctctctgtccattctgggaattttgatgcctttccagttagcgttagtcttccacctaacacttcaaaattagttttattatctggtattccaacaaaagtcggacaaatatcaattcctgggtgcattgttcattgctttggtgttattacagaacacctattcaaagaggtcgattgtttgctccttggagctgcacaagggcttgtcctttctgatcctttcagatgctgtggctctagcaagttcaagagtgtcaactttcctagcatttctgttgttcctcctctgccattgttaattgccaatgttgtgggtggagatggttctattcttctttatgaaggagaaattcgtgatgttctgataacactgacaaatgccggaaccgtgccagttgaagaagcaaatgttgcattgtcagggaagaatcaggattctgttatttcgattgctcatagcacatggaaatctgcgctccctattaaaccgggtggagaagtgacatttgcagtgactctaagagcctggcatctcagctcagcagatttggaagcagatggcagtagatctcctgtaaattcaaggagaatagcaagagaaggaaccaatccattcttggatattcactatgctggtcctgctgcgaatcttgagaatggagatgtttctcttctacctggaagacgcctagttgttcccttgaatatctgtgttgtgcagggcatgcgtcttgtaagagcacgcctgttgtccatggaaatacctgctcgatttactgaaacacacttaaaacctgtcagtggcaaagacataaacttattgaaggttgatccctataaaggaagctgggggctccgccttctggaacttgagcttttcaatcctactgatgtcgttttttatgttgatgttgctgtgcatttggatgacacggatgtggaccaagaagtaatttcagacggggatgctgcttgtcacaaaactagaattgatcgggactactctgccagagttctcatacctcttgagaacttcaaattgcctgttcttgatgcttccttctttgtaaaggcaagtagtagtgatgaacctcttggatccagggccgccgccatagcagaaaggaatgccaaggcagagctaaatgcgtctatcaacaacttgatttcaaaaataaaagtgaaatggcactctgggagaaatagctcaggtgagctgaatattaaagatgctatccagacggcactacaagcatctataatggacatactgttgccagatcccctgatgtttagctttaagcttgttacgaatggaactgtggtcaatgtcgattctccaaaggattctggcaatgttctgaggtgcaaagatcctatatctgctcatgaaatgacccatatggaagttcagattcgcaacaacacaaaggaaattatccggatgaaccttagcatttcatgcaaagatgttgctggagagaattgcttcgatgaaaatagtgctactgtcctctgggctggtgttcttagcgatatacacctggaagttccaccgttgcaagaggtggtacatcctttctccatgtatttccttgtaccgggtgactactcgctccaagctgcttctgttataatcgatgccacagacgttcttcgtgctcgtgcaaaggcggagtcaccagatgaacctatactgtgtcgcggatccccattccatatccgggtagtcggtacagcataggcagttcttctgagttactcctagtctagaggcctcattttactgtgacaattgtaggtgtggaaaatcttgtacaagagtgatccctggcgccctgcccctcatgcgatatgttttttgtcctttttgttggcttctttgtaagtcatgtcatgtacagtgtacaagcatagtgagtattgtttcaagcacagaaattgtatgtcgatgattccacaatcttaatttctggttagcttatatgattttacttaacattttttacattgttcattgttggactgag

SEQ ID NO: 24691 - DNA, 3828 bp, Zea Mays
ccgacctgccgggcatcgcctattcgcctgttcctccaccagcgagacactcagatctgcctttcccgacccggagccagccaggtgagccgaggcaggggggacgcgccactggccatggagcccgggttgagcatcgagtccggttctgccatccgcgtcgcggtgctccccgtgggcggcccgattccgccgccgcgcctgcgcgagtacgcggccctggtggcgcgccacgcgcgcgtcgacctcgcctcgctccgcacctactacgcggagcaccagaagagccccttccagcaccagccctgggagaccggatgcctccgcctcaagttcgtgctcggcggctgcgtgccttcaccctgggaggacttccagtcctcgcgcaaggtgctcgccgtgatcggcatctgtcacctgccgtcctcgcccgacctcgaccacgtggcggcagacttcatagacgctgcgcggtcgtacccgtcggcgctcgccaaccgctgcttcgccttctgccccacggacgcacagctgtcagcgaagaagagggacgatattattatgttccctccttctgatcagcaatcgctggaacttcatatgcttacaatgatccaagatctcgctgcttctttgttgatggagtttgagaagtgggtcttgcgtgcagaatccacaggaaccattttgaagacccctttggattcacaatccagtcttggctcagaggaggtaattaaggctaaaaaaagaaggcttggtcgtgcacagaagataataggagattattgcctcttggctggatcacctgtggatgctaatgcacattacaccaccgctatagagcttgcaagattgaccggtgatgttttctggcatgctggagcccttgagggtagtgtctgcgcattagtggtggataggatgggccaaagtgaccctattttggaggatgaagtcaaatatcgctattacaccattatccagctatacagaagagccactttacaagataatgctcaaagagtttcacctgtgagctttgagcttgaagctgccttgaagttggcaagatacttgtgcaggcgagaacttgccaaggaggtctcagatttgttaatgggagctgctgatggtgccaaggctcttattgatgccagtgatcggctcatactatatattgaaattgcaagactttttggtacacttggttataagcgcaaggcggcctttttttcaagacaagttgcacagttgtaccttcagcaagacaatgcatatgctgctatgagtgctatgcaggttctaactatgactacaaatgcataccatgtccaaagccgaaagactatgaaaatgaatcatgatccgtccaaggaacctcgtgctggcaatactgattctggaaaggtgcaccctcagtctatagtgtcattgtttgagtcacaatggagtacccttcaaatggtggttctaagagaaatattgatatcgtcgatccgggcggcagatccactctcatcatggagcgctgcagctcgtcttcttcgatcattttacccactcatcacaccagctggtcagagtggcctagcaagctcacttgcaaacgctgctgacaagcttccaacaggcacacgctgtgccgatccatgtcttccttttatcaggttgcattctttcccgcttcacccttctcaaagggatatagtaaaacggaatccacataaaaaggagtggtgggctggtgcaggtccttcaggacctttcatttatactcctttcagcaaagcaggagcttctgggacttccaagcaagagcttagttggattgtgggggagccggttcaagtcatggttgagttagcaaacccttgcagcttcgacatagttgtggagagcatctatctctctgtccattctgggaattttgatgcctttccagttagcaacacctattcaaagaggtcgattgtttgctccttggagctgcacaagggcttgtcctttctgatcctttcagatgctgtggctctagcaagttcaagagtgtcaactttcctagcatttctgttgttcctcctctgccattgttaattgccaatgttgtgggtggagatggttctattcttctttatgaaggagaaattcgtgatgttctgataacactgacaaatgccggaaccgtgccagttgaagaagcaaatgttgcattgtcagggaagaatcaggattctgttatttcgattgctcatagcacatggaaatctgcgctccctattaaaccgggtggagaagtgacatttgcagtgactctaagagcctggcatctcagctcagcagatttggaagcagatggcagtagatctcctgtaaattcaaggagaatagcaagagaaggaaccaatccattcttggatattcactatgctggtcctgctgcgaatcttgagaatggagatgtttctcttctacctggaagacgcctagttgttcccttgaatatctgtgttgtgcagggcatgcgtcttgtaagagcacgcctgttgtccatggaaatacctgctcgatttactgaaacacacttaaaacctgtcagtggcaaagacataaacttattgaaggttgatccctataaaggaagctgggggctccgccttctggaacttgagcttttcaatcctactgatgtcgttttttatgttgatgttgctgtgcatttggatgacacggatgtggaccaagaagtaatttcagacggggatgctgcttgtcacaaaactagaattgatcgggactactctgccagagttctcatacctcttgagaacttcaaattgcctgttcttgatgcttccttctttgtaaaggcaagtagtagtgatgaacctcttggatccagggccgccgccatagcagaaaggaatgccaaggcagagctaaatgcgtctatcaacaacttgatttcaaaaataaaagtgaaatggcactctgggagaaatagctcaggtgagctgaatattaaagatgctatccagacggcactacaagcatctataatggacatactgttgccagatcccctgatgtttagctttaagcttgttacgaatggaactgtggtcaatgtcgattctccaaaggattctggcaatgttctgaggtgcaaagatcctatatctgctcatgaaatgacccatatggaagttcagattcgcaacaacacaaaggaaattatccggatgaaccttagcatttcatgcaaagatgttgctggagagaattgcttcgatgaaaatagtgctactgtcctctgggctggtgttcttagcgatatacacctggaagttccaccgttgcaagaggtggtacatcctttctccatgtatttccttgtaccgggtgactactcgctccaagctgcttctgttataatcgatgccacagacgttcttcgtgctcgtgcaaaggcggagtcaccagatgaacctatactgtgtcgcggatccccattccatatccgggtagtcggtacagcataggcagttcttctgagttactcctagtctagaggcctcattttactgtgacaattgtaggtgtggaaaatcttgtacaagagtgatccctggcgccctgcccctcatgcgatatgttttttgtcctttttgttggcttctttgtaagtcatgtcatgtacagtgtacaagcatagtgagtattgtttcaagcacagaaattgtatgtcgatgattccacaatcttaatttctggttagcttatatgattttacttaacattttttacattgttcattgttggactgag

SEQ ID NO: 24692 - DNA, 3171 bp, Zea Mays
gaccataggtaattaaggctaaaaaaagaaggcttggtcgtgcacagaagataataggagattattgcctcttggctggatcacctgtggatgctaatgcacattacaccaccgctatagagcttgcaagattgaccggtgatgttttctggcatgctggagcccttgagggtagtgtctgcgcattagtggtggataggatgggccaaagtgaccctattttggaggatgaagtcaaatatcgctattacaccattatccagctatacagaagagccactttacaagataatgctcaaagagtttcacctgtgagctttgagcttgaagctgccttgaagttggcaagatacttgtgcaggcgagaacttgccaaggaggtctcagatttgttaatgggagctgctgatggtgccaaggctcttattgatgccagtgatcggctcatactatatattgaaattgcaagactttttggtacacttggttataagcgcaaggcggcctttttttcaagacaagttgcacagttgtaccttcagcaagacaatgcatatgctgctatgagtgctatgcaggttctaactatgactacaaatgcataccatgtccaaagccgaaagactatgaaaatgaatcatgatccgtccaagtctatagtgtcattgtttgagtcacaatggagtacccttcaaatggtggttctaagagaaatattgatatcgtcgatccgggcggcagatccactctcatcatggagcgctgcagctcgtcttcttcgatcattttacccactcatcacaccagctggtcagagtggcctagcaagctcacttgcaaacgctgctgacaagcttccaacaggcacacgctgtgccgatccatgtcttccttttatcaggttgcattctttcccgcttcacccttctcaaagggatatagtaaaacggaatccacataaaaaggagtggtgggctggtgcaggtccttcaggacctttcatttatactcctttcagcaaagcaggagcttctgggacttccaagcaagagcttagttggattgtgggggagccggttcaagtcatggttgagttagcaaacccttgcagcttcgacatagttgtggagagcatctatctctctgtccattctgggaattttgatgcctttccagttagcgttagtcttccacctaacacttcaaaattagttttattatctggtattccaacaaaagtcggacaaatatcaattcctgggtgcattgttcattgctttggtgttattacagaacacctattcaaagaggtcgattgtttgctccttggagctgcacaagggcttgtcctttctgatcctttcagatgctgtggctctagcaagttcaagagtgtcaactttcctagcatttctgttgttcctcctctgccattgttaattgccaatgttgtgggtggagatggttctattcttctttatgaaggagaaattcgtgatgttctgataacactgacaaatgccggaaccgtgccagttgaagaagcaaatgttgcattgtcagggaagaatcaggattctgttatttcgattgctcatagcacatggaaatctgcgctccctattaaaccgggtggagaagtgacatttgcagtgactctaagagcctggcatctcagctcagcagatttggaagcagatggcagtagatctcctgtaaattcaaggagaatagcaagagaaggaaccaatccattcttggatattcactatgctggtcctgctgcgaatcttgagaatggagatgtttctcttctacctggaagacgcctagttgttcccttgaatatctgtgttgtgcagggcatgcgtcttgtaagagcacgcctgttgtccatggaaatacctgctcgatttactgaaacacacttaaaacctgtcagtggcaaagacataaacttattgaaggttgatccctataaaggaagctgggggctccgccttctggaacttgagcttttcaatcctactgatgtcgttttttatgttgatgttgctgtgcatttggatgacacggatgtggaccaagaagtaatttcagacggggatgctgcttgtcacaaaactagaattgatcgggactactctgccagagttctcatacctcttgagaacttcaaattgcctgttcttgatgcttccttctttgtaaaggcaagtagtagtgatgaacctcttggatccagggccgccgccatagcagaaaggaatgccaaggcagagctaaatgcgtctatcaacaacttgatttcaaaaataaaagtgaaatggcactctgggagaaatagctcaggtgagctgaatattaaagatgctatccagacggcactacaagcatctataatggacatactgttgccagatcccctgatgtttagctttaagcttgttacgaatggaactgtggtcaatgtcgattctccaaaggattctggcaatgttctgaggtgcaaagatcctatatctgctcatgaaatgacccatatggaagttcagattcgcaacaacacaaaggaaattatccggatgaaccttagcatttcatgcaaagatgttgctggagagaattgcttcgatgaaaatagtgctactgtcctctgggctggtgttcttagcgatatacacctggaagttccaccgttgcaagaggtggtacatcctttctccatgtatttccttgtaccgggtgactactcgctccaagctgcttctgttataatcgatgccacagacgttcttcgtgctcgtgcaaaggcggagtcaccagatgaacctatactgtgtcgcggatccccattccatatccgggtagtcggtacagcataggcagttcttctgagttactcctagtctagaggcctcattttactgtgacaattgtaggtgtggaaaatcttgtacaagagtgatccctggcgccctgcccctcatgcgatatgttttttgtcctttttgttggcttctttgtaagtcatgtcatgtacagtgtacaagcatagtgagtattgtttcaagcacagaaattgtatgtcgatgattccacaatcttaatttctggttagcttatatgattttacttaacattttttacattgttcattgttggactgag

SEQ ID NO: 24693 - DNA, 1549 bp, Zea Mays
atgatggtatccagcctttcactaaccatcagatattcagatgtctatgctagaatcacgcaaatgaaaggttcaagccattctccagggatcgatgtccaccagaccaccaccgatggagacacaatcctgatgacatgcatggtagtgcggaaacggcggcaggccgggatagatctgccgaccgtgccaccgtattgtgcctttccttgctctttcctcacctcctcctccactctgcctcttgctgagctcatcttatccctgacacacgcggcgccgtttgtggatcggctctcgagcctaacagtaagcctggaaaggaaagaagagacagagtacggtaggggaagaactgagtagtggtactagtaataaatagatctggtcagaaacaccttggagggaactacggatcctccgtccggtagattcctgctcctgacgatgccgcgcgctgccatattccagaggggggggggggggggggggggtgattcatgaatggtacagtaaattaaatccttgccggaaagggagttaaaaaaatgtggtggtacttcccctaatggcatagggctcctcggaaaagatgagcggaggggcgtcgtacgaggccgagggagggaagctagctagcccaagaagaaacgacgagaaaagtacagcgccatcaagaagggaaaaaaacctagtagtagagtaaacccccggtcgttccattccatcaaccatcaaatcaaacagcgccatgaatgtaggtgtagaaagacggccggccggaaaacgcccccaaaaaagatgagatcgaaattctactgcgaacgaattaagaagagacgggtcatgcagggaggatataagggctagcctagccacagtgggcggcgccggccggcggtgagcgagagccgcgccctgccgtgagggtgtgccagcggatgacagagagagcagtgagcacgcggccgcgacggcacatccgcgccggtgccgtcacaccggccgtgtgctcactctcttctgtcaccgcgcgcgcgcccgccggaccggcagccatccgggccgccgccgccactgctgccgcttactcactccccagacgacgccacagagcaacctgggtgctttggccgctaatctaggcgaggcgactggcggtgggttgcattgcattgaggaggagcgcgtaccggcggtcccgctttatagcggggaggtgggcccgcgcgcgcaccagcccaggcgtggcaggctggacgctcgcgctccggctgatccgatccatacaggtcgaccgaaggcttttagggttcgcgcgcgcgctgctctctgctctgctccggtgctccccatcgatcgggtggtgagtggtggatgcggcggcgaacgtgggcggctgctgccgtggccatgaaccctctgcccatgcatgagaggtgtgggagctttggcatggcaacggtgagtggaggaatatgaggaggctggaggcaggcagctagctagctaggcttgcgaggtggggttgctcgctccaggagataag

SEQ ID NO: 24694 - DNA, 1158 bp, Zea Mays
caaagaagtggtctacaatgcacaactaaactcaatccctgttatgctgcatttcatgatgaagagtggggagttcctgttcatgacgacaagtatgcagaaatggctgctactttttcccctcgtaacagaatcaactttaaataatcaagtgcttcatataaattgcaggaagttatttgagctgctagtgctgtcaggagcattagctgaactgacatggccagcaattctgaataagagagacatattcagggaagttttcatggattttgacccagtattggtttcaaagttaagtgagaagaagattattgcgcctggaagtcctagctgctccttgttatctgaacagaaattgcgtggtgttattgaaaatgcacgtcaaatactcaagatcatagaggaatttggatcatttgataaatactgttggagcttcgtgaaccacaaacctatattgagccgattcaggtactcccgtcaagtgcctgtcaaaacatcgaaagcagatgccataagcaaagacttggttcgaaggggtttccgcagtgtcggcccaacagtcgtatataccttcatgcaagtctctggcatgactaacgaccaccttatctcctgctaccgttttgctgaatgcgcggcctcctctgctggcgctgctaaactttctgatggaagcctagcaaattcaagtgatagcagccatggcacggcagagcagaagatgaacgggacgaatgggctggattcaggtcttgaactctccaggactatcgatgagctcagcatttcatagcggggtaggagcggtgctgaagcgatatggtgttagtttgtgtattttatgtgctgtagtataggtgtgattcggcgacctttttctgtagtttttccactcgtcaatgtaggctagaaaaatttttagtcttcggtgtgtcaggacccttgaacgacagcagggtaccgatgtactaccttcgtccggagataattgtctatctcgtattttgaggtgcttccttcgtcccgagataattgtttatctcgtattctgagaagttaaatattttaaatttcgactattttatttaaaaataataatattaacatttgtgtcacgtcacaacaccttggtttcccaaggtacaaaaaaaa

SEQ ID NO: 24695 - DNA, 2180 bp, Zea Mays
aagccaaatctactgccgaccaccacggctggcacgcggagcaccctccagtcctccactccactccactccactccactccactccacccacccaccaataccagcggcagtaaattccgagcagccgctgcccgctgccgaggctcgaggctctctcctcgctccccccacccgtctgctcctcctagggtttcctctcggctcgccggcgtgccgcatcgcctcgcctcgcccttgccgcgggttccgccgctcgggggcacccgaaccgatcctcgcgggagttgttcgtgctgattcctgctgggtcttgtggctcggactctggggcgtcgggtgggaaagattttgccgcccgtgggggtttggatcgagggctctaagccgtgtctccgcaatgccgggctggcctggcggcgattgctagggttttctggtcggatttcggcggaagagctgaggcgttgcttcgagtgcgggagctgtctgcaatccgccgcttgccttggcccgagtttggtgtttccgcagcaatgcctctccgattttagctcgccctggggttctgaagggcgaaggggctgttgggcggtttgagcttgcaaggcgttgctggttcggtccaatgtccggggctagcgcgagggggcggctgtcgccggcgtccagcggcggcggagactctgaaccgcggtccacggggggcaggacgcgctcggtgtccgctgctcgcggcaggaagccctcaccgaggcccgggagggatgtggccgcggcagcgggcgcgacagaggagaagaaacccgcagccgtgctcacattgcagccctcgctcagcgcgcccgcagggatgcgtcggcaggagctgctgctgcgctcggggctgtctcttgacgcgtcctgctcctcggacgcgtccacggactcgttctgcagccgggcatccacgggccggattgggaggccggcgtttggggctaggaagaagaaggctctctctcagactgattacaaggccctttccatgctggaaagggacggtggattgatttcccagactgatgctgctggtgtgaagaggaggtgtgcgtgggtgacagcaaataccgatccctgttatgctgcatttcatgatgaagagtggggagttcctgttcatgacgacaagaagttatttgagctgctagtgctgtcaggagcattagctgaactgacatggccagcaattctgaataagagagacatattcagggaagttttcatggattttgacccagtattggtttcaaagttaagtgagaagaagattattgcgcctggaagtcctagctgctccttgttatctgaacagaaattgcgtggtgttattgaaaatgcacgtcaaatactcaaggtttgtttgaattaaatcacaagtatcatagaggaatttggatcatttgataaatactgttggagcttcgtgaaccacaaacctatattgagccgattcaggtactcccgtcaagtgcctgtcaaaacatcgaaagcagatgccataagcaaagacttggttcgaaggggtttccgcagtgtcggcccaacagtcgtatataccttcatgcaagtctctggcatgactaacgaccaccttatctcctgctaccgttttgctgaatgcgcggcctcctctgctggcgctgctaaactttctgatggaagcctagcaaattcaagtgatagcagccatggcacggcagagcagaagatgaacgggacgaatgggctggattcaggtcttgaactctccaggactatcgatgagctcagcatttcatagcggggtaggagcggtgctgaagcgatatggtgttagtttgtgtattttatgtgctgtagtataggtgtgattcggcgacctttttctgtagtttttccactcgtcaatgtaggctagaaaaatttttagtcttcggtgtgtcaggacccttgaacgacagcagggtaccgatgtactaccttcgtccggagataattgtctatctcgtattttgaggtgcttccttcgtcccgagataattgtttatctcgtattctgagaagttaaatattttaaatttcgactattttatttaaaaataataatattaacatttgtgtcacgtcacaacaccttggtttcccaaggtacaaaaaaaa

SEQ ID NO: 24696 - DNA, 2308 bp, Zea Mays
cagaagtcaccgagactccgagaggtagcttgccaagccaaatctactgccgaccaccacggctggcacgcggagcaccctccagtcctccactccactccactccactccactccactccacccacccaccaataccagcggcagtaaattccgagcagccgctgcccgctgccgaggctcgaggctctctcctcgctccccccacccgtctgctcctcctagggtttcctctcggctcgccggcgtgccgcatcgcctcgcctcgcccttgccgcgggttccgccgctcgggggcacccgaaccgatcctcgcgggagttgttcgtgctgattcctgctgggtcttgtggctcggactctggggcgtcgggtgggaaagattttgccgcccgtgggggtttggatcgagggctctaagccgtgtctccgcaatgccgggctggcctggcggcgattgctagggttttctggtcggatttcggcggaagagctgaggcgttgcttcgagtgcgggagctgtctgcaatccgccgcttgccttggcccgagtttggtgtttccgcagcaatgcctctccgattttagctcgccctggggttctgaagggcgaaggggctgttgggcggtttgagcttgcaaggcgttgctggttcggtccaatgtccggggctagcgcgagggggcggctgtcgccggcgtccagcggcggcggagactctgaaccgcggtccacggggggcaggacgcgctcggtgtccgctgctcgcggcaggaagccctcaccgaggcccgggagggatgtggccgcggcagcgggcgcgacagaggagaagaaacccgcagccgtgctcacattgcagccctcgctcagcgcgcccgcagggatgcgtcggcaggagctgctgctgcgctcggggctgtctcttgacgcgtcctgctcctcggacgcgtccacggactcgttctgcagccgggcatccacgggccggattgggaggccggcgtttggggctaggaagaagaaggctctctctcagactgattacaaggccctttccatgctggaaagggacggtggattgatttcccagactgatgctgctggtgtgaagaggaggtgtgcgtgggtgacagcaaataccggttgtgttatctgaatctgctcctcatttatcacccaaaagtgatagttcaatctgaaatcaactttatgagcttatatatttcaagctttcaatgcatatgagactcagggcacaatatccctgttatgctgcatttcatgatgaagagtggggagttcctgttcatgacgacaagaagttatttgagctgctagtgctgtcaggagcattagctgaactgacatggccagcaattctgaataagagagacatattcagggaagttttcatggattttgacccagtattggtttcaaagttaagtgagaagaagattattgcgcctggaagtcctagctgctccttgttatctgaacagaaattgcgtggtgttattgaaaatgcacgtcaaatactcaagatcatagaggaatttggatcatttgataaatactgttggagcttcgtgaaccacaaacctatattgagccgattcaggtactcccgtcaagtgcctgtcaaaacatcgaaagcagatgccataagcaaagacttggttcgaaggggtttccgcagtgtcggcccaacagtcgtatataccttcatgcaagtctctggcatgactaacgaccaccttatctcctgctaccgttttgctgaatgcgcggcctcctctgctggcgctgctaaactttctgatggaagcctagcaaattcaagtgatagcagccatggcacggcagagcagaagatgaacgggacgaatgggctggattcaggtcttgaactctccaggactatcgatgagctcagcatttcatagcggggtaggagcggtgctgaagcgatatggtgttagtttgtgtattttatgtgctgtagtataggtgtgattcggcgacctttttctgtagtttttccactcgtcaatgtaggctagaaaaatttttagtcttcggtgtgtcaggacccttgaacgacagcagggtaccgatgtactaccttcgtccggagataattgtctatctcgtattttgaggtgcttccttcgtcccgagataattgtttatctcgtattctgagaagttaaatattttaaatttcgactattttatttaaaaataataatattaacatttgtgtcacgtcacaacaccttggtttcccaaggtacaaaaaaaa

SEQ ID NO: 24697 - DNA, 2325 bp, Zea Mays
ttcgataaaatttaaatccacggtgatccacttttttgcgctggcgaaagctgagcagcctccaccgattctctccaccccgggtccccggtgtccggggagatccatgatcccatcctttcccaccacatgctcggcgcttcccttgacacgtcactaccgtcccagaccagccgcgtacgcctgccttcgctaacgccatggaccagggccacctcaaggacagcctcctcgtcccgtcctcccgcgccgccgcgacgaatgggccccaccaccgccgcgccacgctcgcgccgggaactggcgccggaggcccatgtggcggagccggcggcgtgtccatcgacgtcaacggcctgaagcggcgtggcggcgggaggcgctcgtgggtgcgcgtggacgcggcgacgggcgccgcggaggccgtcgaggtcgccaagccggcgttgatgcggcggctggacctgcccgcgcgggacctccgcctcctcgaccccctcttcgtctacccgtccgccatcctcggccgcgagcgcgccgtcgtctgcaacctcgagcacctgcggtgcatcatcaccgccgatgaggcgctcgttctgcgcgaacccgacgccgctgggggcgccgcagcggaggaggccgtgaggaggtacgtcgacgagctgcagcgacgcctcgtcgaccgcgccgacgacctgcctttcgagttcatcgcgctggaggtcgcgctggaggccgcttgctccttcctagactcgcaggctattgaattagaggctgaagcttacccattactagatgagctgacagcaaaaattagtaccctcaacttggaacgagtccgacgcctaaagagcaagctggttgcattgacaaggagagtacagaaggtcagagatgagatagagcaactgatggatgacgatggtgatatggctgaaatgtatctcactgagaagaagataagaatggaagcatcaatgttagatgacgaggaccttcagggaattggcaatagtcataatgggtttggttcatctctatcggctccagtttcaccagtttcgacaacccctgcaactcggaggcttgagaaggaattcagttttgccagaagcaggcacagcagcttcaagagctcagatagcagccagtacaatatagaagaactggaaatgttgttggaggcctactttgttgttatcgattacaccctcagcaagttgacttcgctaaaggagtatattgatgacacagaagatttcatcaacatacaactgatccctgttatgctgcatttcatgatgaagagtggggagttcctgttcatgacgacaagaagttatttgagctgctagtgctgtcaggagcattagctgaactgacatggccagcaattctgaataagagagacatattcagggaagttttcatggattttgacccagtattggtttcaaagttaagtgagaagaagattattgcgcctggaagtcctagctgctccttgttatctgaacagaaattgcgtggtgttattgaaaatgcacgtcaaatactcaagatcatagaggaatttggatcatttgataaatactgttggagcttcgtgaaccacaaacctatattgagccgattcaggtactcccgtcaagtgcctgtcaaaacatcgaaagcagatgccataagcaaagacttggttcgaaggggtttccgcagtgtcggcccaacagtcgtatataccttcatgcaagtctctggcatgactaacgaccaccttatctcctgctaccgttttgctgaatgcgcggcctcctctgctggcgctgctaaactttctgatggaagcctagcaaattcaagtgatagcagccatggcacggcagagcagaagatgaacgggacgaatgggctggattcaggtcttgaactctccaggactatcgatgagctcagcatttcatagcggggtaggagcggtgctgaagcgatatggtgttagtttgtgtattttatgtgctgtagtataggtgtgattcggcgacctttttctgtagtttttccactcgtcaatgtaggctagaaaaatttttagtcttcggtgtgtcaggacccttgaacgacagcagggtaccgatgtactaccttcgtccggagataattgtctatctcgtattttgaggtgcttccttcgtcccgagataattgtttatctcgtattctgagaagttaaatattttaaatttcgactattttatttaaaaataataatattaacatttgtgtcacgtcacaacaccttggtttcccaaggtacaaaaaaaa

SEQ ID NO: 24698 - DNA, 2027 bp, Zea Mays
ttcgataaaatttaaatccacggtgatccacttttttgcgctggcgaaagctgagcagcctccaccgattctctccaccccgggtccccggtgtccggggagatccatgatcccatcctttcccaccacatgctcggcgcttcccttgacacgtcactaccgtcccagaccagccgcgtacgcctgccttcgctaacgccatggaccagggccacctcaaggacagcctcctcgtcccgtcctcccgcgccgccgcgacgaatgggccccaccaccgccgcgccacgctcgcgccgggaactggcgccggaggcccatgtggcggagccggcggcgtgtccatcgacgtcaacggcctgaagcggcgtggcggcgggaggcgctcgtgggtgcgcgtggacgcggcgacgggcgccgcggaggccgtcgaggtcgccaagccggcgttgatgcggcggctggacctgcccgcgcgggacctccgcctcctcgaccccctcttcgtctacccgtccgccatcctcggccgcgagcgcgccgtcgtctgcaacctcgagcacctgcggtgcatcatcaccgccgatgaggcgctcgttctgcgcgaacccgacgccgctgggggcgccgcagcggaggaggccgtgaggaggtacgtcgacgagctgcagcgacgcctcgtcgaccgcgccgacgacctgcctttcgagttcatcgcgctggaggtcgcgctggaggccgcttgctccttcctagactcgcaggctattgaattagaggctgaagcttacccattactagatgagctgacagcaaaaattagtaccctcaacttggaacgagtccgacgcctaaagagcaagctggttgcattgacaaggagagtacagaagagatgagatagagcaactgatggatgacgatggtgatatggctgaaatgtatctcactgagaagaagataagaatggaagcatcaatgttagatgacgaggaccttcagggaattggcaatagtcataatgggtttggttcatctctatcggctccagtttcaccagtttcgacaacccctgcaactcggaggcttgagaaggaattcagttttgccagaagcaggcacagcagcttcaagagctcagatagcagccagtacaatatagaagaactggaaatgttgttggaggcctactttgttgttatcgattacaccctcagcaagttgacttcgctaaaggagtatattgatgacacagaagatttcatcaacatacaactggataacgtccggaaccagctgatccaattcgagctgctcctgaccaccgccacgttcgtggtggccatcttcggggtggtctcgggggttttcggcatgaacttcgaggtccctctgttctcggttccgcacgcgttcgagtggaccctcgccataactggggtctgcggcgccgtcgtgttctgctgcttcatctggtacttcaagaagaggaggtttttccccttgtaggtgaaagcttgaagcttctcttctctcgccctgtcaccagagtccagacagcagcgtacgtatgagactgggtacggcaattgtacatgcattgttctcgaaatgcgctgtctgttcacgtgagcttttctccctttttaagctcacgccgctgatcgtgtgtagcttcaccggtctgctgtacactttgtattattgttgttgctgggtagtgggtactgcatgtgacactgttcggccccggaagaggggaaggagcccaacagatcagatcagtgctgttctcctctcccttgcggtgcgtgttgttggcttgttttccatttgctgtggtgaccagtggtacccaggagttttgcctaattgccttcacgtgataaagagagggagagcaatgccggcgcgtggttgcaggcggcagcagttgtacacctgagctgcaaccgtgaatatgcacttcgtcaccagtacggggcataaacaatttgggtctgaactgaagctgccattgctccctgcta

SEQ ID NO: 24699 - DNA, 1541 bp, Zea Mays
attctataaaacctctgcccgggggctagggtttcctcccagccgtcatcgtttcgcgtccgcctcagcccgccgcaaggagaggtaaggtaagccgctctcctctcgccccatctctccactgtccggccgttgtggtctcagcattccgaattgtatgtacttctttgttgggtagccggctcggtcggttcgtggaacagccggatctgctctgtaagcgcttgttctggagaggtctttcggcgggagtgagagtcaaggtctcttatatttcgtgtatctgttcgtatcggtagcttttgctgttaatcgtgagaaggttttgtgggagggatctctttgaccttagtacgcccatctcatcgtggtaaggatgctgtctatgatttcaaatattattgccattgttgaattggaaatggcgctggtttactaatggtcttgctatgtttctgattttggctgggttaacgcctaaacttggctttcggttaacgctagaccgagtactgttatttgttaaccggtagcatttatgtagatgacaaaaccattctatggttcactacacaatttgcattattttgtcttgtctcctttgcttcttcacctatctgacattattttctttctttgtatgtttccagttcaggagacatcttcgagaagctgaaatggctcctaaagtttcattagctgctcctgccaagaagggtgatgccaagacccaggccttgaaggttgccaaggctgtgaagtctggggcagccaagaagaagaccaagaagatccgcacgtctgtgacatttcaccgccccacgaccctgaagaaggctagggaccccaagtacccacgaatcagcactaccggaaggaacaagcttgatcagtaccaaattctcaagtacccccttaccacagaatcagcgatgaagaagattgaagataacaacactctggtcttcattgttgacctcaaggcagacaagaagaagatcaaggctgccgtcaagaagatgtatgacatccaggcaaagaaggtcaacaccttgatcaggttagcacttgccccagtgtaattttttcctgcacgatttattatgttgtgcaactaaagagttattcttatcgtgtctgtgcaggcctgatgggaagaagaaggcttacgtgaagctgactcccgactatgatgctcttgatgtggccaacaaaatcggaatcatctaagtgctgcattaggcatctgttgtttcctagttcaatctgttgtgtcctagttctatgtgaaaccagagttttgtagctatggatctcaatcgttccattaccatgtgttatgcacacttctgaatttgatatcatccaagtgaccggttgaactagtttgcgttctgcacttcattacacttggacaccgtcagtctttatgaccagtaattttgtttgtcgtaataggttggttttgcaactcgaccaaataattcgaccaaataaccgtgtatgtgttgtatccgttgttggaccttgcatgatgggag

SEQ ID NO: 24700 - DNA, 935 bp, Zea Mays
ccggcgtgcaatcttcgttcagcccactgggagtggagtgactcactcgggtccattctataaaacctctgcccgggggctagggtttcctcccagccgtcatcgtttcgcgtccgcctcagcccgccgcaaggagagttcaggagacatcttcgagaagctgaaatggctcctaaagctgctcctgccaagaagggtgatgccaagacccaggccttgaaggttgccaaggctgtgaagtctggggcagccaagaagaagaccaagaagatccgcacgtctgtgacatttcaccgccccacgaccctgaagaaggctagggaccccaagtacccacgaatcagcactaccggaaggaacaagcttgatcagtaccaaattctcaagtacccccttaccacagaatcagcgatgaagaagattgaagataacaacactctggtcttcattgttgacctcaaggcagacaagaagaagatcaaggctgccgtcaagaagatgtatgacatccaggcaaagaaggtcaacaccttgatcaggcctgatgggaagaagaaggcttacgtgaagctgactcccgactatgatgctcttgatgtggccaacaaaatcggaatcatctaagtgctgcattaggcatctgttgtttcctagttcaatctgttgtgtcctagttctatgtgaaaccagagttttgtagctatggatctcaatcgttccattaccatgtgttatgcacacttctgaatttgatatcatccaagtgaccggttgaactagtttgcgttctgcacttcattacacttggacaccgtcagtctttatgaccagtaattttgtttgtcgtaataggttggttttgcaactcgaccaaataattcgaccaaataaccgtgtatgtgttgtatccgttgttggaccttgcatgatgggag

SEQ ID NO: 24701 - DNA, 1622 bp, Zea Mays
tggaattcgacacacaacatgattatggaggccattgagtacaaagttgtcttgaagagatatgctgaggaacaacttgagccttcaccagatgatgaagagtggacaaattctgaggcaattggagagtttcttggggcatttgaggaagctacaaaagcattctcagcacatagaagtccaacatctcatttgtttttgcataatgtgctatgtatccatcaagctctaagaaatgaaaattggcaaatcaattgtgtgcttgaggatttggcactagcaatggattctaagttcgataaatactgggagaagggcaagtataatatggcacttgtcatagccactatacttgacccgtcaaagaagatggattttttggactttttttatgagaagacgtgtcaacagtttatcgacatccagataaacatgtccttggccaaacaatggttcactaaattttttggtgaatatgcaaaaattgttcaaaaagatactacagtctcacctattgttgctacaaatactagtactttgggctcaccgattcttggaaaaagaaggttggataaagaattttctcagtggtcccaaacaagaggaagacgtcttgcaaagtctgagcttgacgcatacttagaagaagaatttgtgagaacagatgaaagatttgaaattctaagttggtggaggacaaatacaaacaaatacccagtgctttcagctatggcgcgtgatttattagcaatacctttgagcactgttccttcggagtctgcttttagcgccggtggtcgcattcttgctgataatcgaagctcaatgacaccagaaacacttgaatgccttgtatgctgcaaggattggttgtatgagtacccaaatattcaagtttatccagttgtgtttggacccagctagcagcaacactcatcctacccgtggaaatggggagatttatgcgtcgtccgatgggcttctgatgctatctagatgtcccctttcattgttgctagcttcaagcttgatcacagactcttttcactgctactagtttatgtttcttgacaaaaagattattgttcattaaggatctttaacagatgttttttgttattctctcgagacctaaatgtttatcgaccaaaattgttactgtgtatgcaagtatgcaactatgtttttgtatgtcactgaaactacctataaaattgttattgtgtatcagtgtatgcagttggcttgatgtgagacaatatgctaagcccacgggttttttccatgggtttccacccaattacgggttggtttggggtcaataatgttattggatgggttgggtttaactttcttctaatatttttaggtgggtgtgggatggatattaaagttattagatttgggtatgggtgggagtaggttggatgttttgccattagcaggcctagctatgcttgcagagaaggaattgcagggacgccaacatcgacctagggctacttttggtgcctcctctgcatcacggacgcacacacctgcctcgagtcatactccctcgacacctgctgcacatgttggtaaccttcctttgcaggtacccgccaagaaacagaattcac

SEQ ID NO: 24702 - DNA, 1328 bp, Zea Mays
cgggccttagacacagaccatggtcacaccgcagactgctacacgggccgtcgttcggtgctcctcctagtcctagcctcagccagcgctcctcctagcctcggcttgccgcagcctgcatcacggatcccctcccatcacggatcgacgctccccatcacggatcccgctgggcgctgggcgctccccatcacggatcagcctgcatcacggatcccgctgggcgctggcctcggcttcacggatccactgccagcggcctagctccccatcccgtcgtggctggcgagcagaggcgtcgccggctcccctgccagcggcctagctccccatccctccctggctggcgagcagatgcgtcgtcggctcccctgccagctcccccgccatctctacgccagaggcccagagtcgtggcaagcagagcgcgattgaacgcctgtcaccagcacgactgaacgtccgccgccctacaacagcaacagaaagcatcctcctgtaactggattgtggctgctccgttgctgtttgactcagtgaagttcagcttgaaggacagagaactgacaccggtgatattacaaaacacgattgagtggagtttatccagttgtgtttggacccagctagcagcaacactcatcctacccgtggaaatggggagatttatgcgtcgtccgatgggcttctgatgctatctagatgtcccctttcattgttgctagcttcaagcttgatcacagactcttttcactgctactagtttatgtttcttgacaaaaagattattgttcattaaggatctttaacagatgttttttgttattctctcgagacctaaatgtttatcgaccaaaattgttactgtgtatgcaagtatgcaactatgtttttgtatgtcactgaaactacctataaaattgttattgtgtatcagtgtatgcagttggcttgatgtgagacaatatgctaagcccacgggttttttccatgggtttccacccaattacgggttggtttggggtcaataatgttattggatgggttgggtttaactttcttctaatatttttaggtgggtgtgggatggatattaaagttattagatttgggtatgggtgggagtaggttggatgttttgccattagcaggcctagctatgcttgcagagaaggaattgcagggacgccaacatcgacctagggctacttttggtgcctcctctgcatcacggacgcacacacctgcctcgagtcatactccctcgacacctgctgcacatgttggtaaccttcctttgcaggtacccgccaagaaacagaattcac

SEQ ID NO: 24703 - DNA, 1276 bp, Zea Mays
cgggccttagacacagaccatggtcacaccgcagactgctacacgggccgtcgttcggtgctcctcctagtcctagcctcagccagcgctcctcctagcctcggcttgccgcagcctgcatcacggatcccctcccatcacggatcgacgctccccatcacggatcccgctgggcgctgggcgctccccatcacggatcagcctgcatcacggatcccgctgggcgctggcctcggcttcacggatccactgccagcggcctagctccccatcccgtcgtggctggcgagcagaggcgtcgccggctcccctgccagcggcctagctccccatccctccctggctggcgagcagatgcgtcgtcggctcccctgccagctcccccgccatctctacgccagaggcccagagtcgtggcaagcagagcgcgattgaacgcctgtcaccagcacgactgaacgtccgccgccctacaacagcaacagtgaagttcagcttgaaggacagagaactgacaccggtgatattacaaaacacgattgagtggagtttatccagttgtgtttggacccagctagcagcaacactcatcctacccgtggaaatggggagatttatgcgtcgtccgatgggcttctgatgctatctagatgtcccctttcattgttgctagcttcaagcttgatcacagactcttttcactgctactagtttatgtttcttgacaaaaagattattgttcattaaggatctttaacagatgttttttgttattctctcgagacctaaatgtttatcgaccaaaattgttactgtgtatgcaagtatgcaactatgtttttgtatgtcactgaaactacctataaaattgttattgtgtatcagtgtatgcagttggcttgatgtgagacaatatgctaagcccacgggttttttccatgggtttccacccaattacgggttggtttggggtcaataatgttattggatgggttgggtttaactttcttctaatatttttaggtgggtgtgggatggatattaaagttattagatttgggtatgggtgggagtaggttggatgttttgccattagcaggcctagctatgcttgcagagaaggaattgcagggacgccaacatcgacctagggctacttttggtgcctcctctgcatcacggacgcacacacctgcctcgagtcatactccctcgacacctgctgcacatgttggtaaccttcctttgcaggtacccgccaagaaacagaattcac

SEQ ID NO: 24704 - DNA, 864 bp, Zea Mays
gttcggtgctcctcctagtcctagcctcagccagcgctcctcctagcctcggcttgccgcagcctgcatcacggatcccctcccatcacggatcgacgctccccatcacggatcccgctgggcgctgggcgctccccatcacggatcagcctgcatcacggatcccgctgggcgctggcctcggcttcacggatccactgccagcggcctagctccccatcccgtcgtggctggcgagcagaggcgtcgccggctcccctgccagcggcctagctccccatccctccctggctggcgagcagatgcgtcgtcggctcccctgccagctcccccgccatctctacgccagaggcccagagtcgtggcaagcagagcgcgattgaacgcctgtcaccagcacgactgaacgtccgccgccctacaacagcaacagcatcctcctgtaactggattgtggctgctccgttgctgtttgactcagtgaagttcagcttgaaggacagagaactgacaccggtgatattacaaaacacgattgagtggagatggatttaaggatatctgagggttctggtactaataccaccttggatgaccaatcgatacaatcgccgaccagaagggcaaaggtttgggagtattttctacaagagttagttgaggttgatggagtgatgaaggctgtttgcaaatactgtggggcgaagctgacaagtaaaaggaattcaggaacaaatagccttagaaaccatgttgcggatacatgtcctaaaattccagttgaggaccgcaagcaattcattgctacaatgagaaaaaggacaggagaaggttcatttgtgtttgaccctcgaaagactcgtg

SEQ ID NO: 24705 - DNA, 870 bp, Zea Mays
atcgggccttagacacagaccatggtcacaccgcagactgctacacgggccgtcgttcggtgctcctcctagtcctagcctcagccagcgctcctcctagcctcggcttgccgcagcctgcatcacggatcccctcccatcacggatcgacgctccccatcacggatcccgctgggcgctgggcgctccccatcacggatcagcctgcatcacggatcccgctgggcgctggcctcggcttcacggatccactgccagcggcctagctccccatcccgtcgtggctggcgagcagaggcgtcgccggctcccctgccagcggcctagctccccatccctccctggctggcgagcagatgcgtcgtcggctcccctgccagctcccccgccatctctacgccagaggcccagagtcgtggcaagcagagcgcgattgaacgcctgtcaccagcacgactgaacgtccgccgccctacaacagcaacagtgaagttcagcttgaaggacagagaactgacaccggtgatattacaaaacacgattgagtggagatggatttaaggatatctgagggttctggtactaataccaccttggatgaccaatcgatacaatcgccgaccagaagggcaaaggtttgggagtattttctacaagagttagttgaggttgatggagtgatgaaggctgtttgcaaatactgtggggcgaagctgacaagtaaaaggaattcaggaacaaatagccttagaaaccatgttgcggatacatgtcctaaaattccagttgaggaccgcaagcaattcattgctacaatgagaaaaaggacaggagaaggttcatttgtgtttgaccctcgaaagactcgtg

SEQ ID NO: 24706 - DNA, 1665 bp, Zea Mays
gtgacataatgctagttttggatagcaatcatgcaggaataaaggtgacttatttcaaatgtggaggcgtctcccttggtgttggcatgcaacaccatgcagcggatggcatgtctggcttgcacttcattaactcatggtctgacctctgccgtggagctcaaatttctgtcatgcccttcattgaccgcacccttcttcgtgctcgtgatccaccaactccatcttttcaacatatcgagtaccagtctgccccagctatgttgtcctccacaacccagttccttgcttccaagtcaaagccacctgccactgctgtggacattttcaagctcactcgctcagaccttggccggctgcgctcacagcttcctgcaggggaaggtgcaccccggttcagcacatatgcagtgctagcggcacatgtctggaaatgtgtctcccttgcacgcagcctacctcctgaacaacccaccaagttgtattgcgccactgatggccgacaacggctacagcctccactaccagatgggtactttggcaatgtcatcttcaccgcgacaccacttgctgaggcgggcaaggtgaccagtgagctggcagaaggagcagcagtcatccagggagcactggataggatggacaacgactactgccgctcagcgttagactacctggagcttcaaccggatctgtcagcacttgtgcgtggagcgcataccttccgctgcccgaacctagggctcaccagctgggtgcgccttcctatccatgatgctgacttcggatggggccggcctgtgttcatggggccaggtggcattgcgtatgaaggtctggcgtttgtcctcccaagtgcaaatggcgacggcagcctgtccattgctatctcgttgcaggctgagcacatggagaagttccggaagctaatcggcgaagcttaaacggtgccaactgttgaaggaggatgttattgggcgagaaggattatgctctgcccaaattctcagataaaatactgaagtttcaagtgaacccagtggctgcactttcactttgaagacttgcagaggaaattcatggtcacttcattttgtgagattaattatagagaaagggtagaaattatatgaagaaacatagtaaaaaatcattgttaggaacaaactccaatagcaggctctacttgtacgtcgcagacataagctgagactgagctgcgattgcaacagattatactcttctatcaggttgactgaagttccctcagtggccaatcttggatctttctgcaggctgatgagatgcaactgagcacacagcctgaggttgtggcggtgtggcctgatctggcttgccattgtcggacatcgtcatcggcgccggggacaccgagcagttcgtcgaggcactagtttttcaacactgctgggtggtgagcagttctattacgccatgacgccaccttgcacaaactttacgttgcgattacctctgcatagcggcggtcctaacattctaagggcccgggacaaggtttcaaatagaggcctttcaaattatttttaatgtataaatgttactaattaaacactcaaaatacatctaaaaatatttatatcaaataataagtaaataaaagaatatatattatagtattacttt

SEQ ID NO: 24707 - DNA, 2020 bp, Zea Mays
gtcctatcaccttcgccctcccgtccccgtccctgtcccaccaacccccaaggcccaactccactcatcgccactgcgccgaaacccaaagcggggaggaggagcggaaaagaaaaggaaaatgggaggagcggaagcaagtccgagcaagtcagaggatccgccggcctatctccgcctataaaatgccgtcccaccccccaccttcctagcagctgctctccaccaagagctgctggcaccaccaaaccaatcgctggatttgtccagagtatttccggtttcaccgccctagatctgacccgagacgccgcgtcttcgctgaggtgacttatttcaaatgtggaggcgtctcccttggtgttggcatgcaacaccatgcagcggatggcatgtctggcttgcacttcattaactcatggtctgacctctgccgtggagctcaaatttctgtcatgcccttcattgaccgcacccttcttcgtgctcgtgatccaccaactccatcttttcaacatatcgagtaccagtctgccccagctatgttgtcctccacaacccagttccttgcttccaagtcaaagccacctgccactgctgtggacattttcaagctcactcgctcagaccttggccggctgcgctcacagcttcctgcaggggaaggtgcaccccggttcagcacatatgcagtgctagcggcacatgtctggaaatgtgtctcccttgcacgcagcctacctcctgaacaacccaccaagttgtattgcgccactgatggccgacaacggctacagcctccactaccagatgggtactttggcaatgtcatcttcaccgcgacaccacttgctgaggcgggcaaggtgaccagtgagctggcagaaggagcagcagtcatccagggagcactggataggatggacaacgactactgccgctcagcgttagactacctggagcttcaaccggatctgtcagcacttgtgcgtggagcgcataccttccgctgcccgaacctagggctcaccagctgggtgcgccttcctatccatgatgctgacttcggatggggccggcctgtgttcatggggccaggtggcattgcgtatgaaggtctggcgtttgtcctcccaagtgcaaatggcgacggcagcctgtccattgctatctcgttgcaggctgagcacatggagaagttccggaagctaatcggcgaagcttaaacggtgccaactgttgaaggaggatgttattgggcgagaaggattatgctctgcccaaattctcagataaaatactgaagtttcaagtgaacccagtggctgcactttcactttgaagacttgcagaggaaattcatggtcacttcattttgtgagattaattatagagaaagggtagaaattatatgaagaaacatagtaaaaaatcattgttaggaacaaactccaatagcaggctctacttgtacgtcgcagacataagctgagactgagctgcgattgcaacagattatactcttctatcaggttgactgaagttccctcagtggccaatcttggatctttctgcaggtgttgtgcagatcttagccctttttctgaggcttgaaaaagaaccccaaactgagattctcaattgctgcaggctgatgagatgcaactgagcacacagcctgaggttgtggcggtgtggcctgatctggcttgccattgtcggacatcgtcatcggcgccggggacaccgagcagttcgtcgaggcactagtttttcaacactgctgggtggtgagcagttctattacgccatgacgccaccttgcacaaactttacgttgcgattacctctgcatagcggcggtcctaacattctaagggcccgggacaaggtttcaaatagaggcctttcaaattatttttaatgtataaatgttactaattaaacactcaaaatacatctaaaaatatttatatcaaataataagtaaataaaagaatatatattatagtattacttt

SEQ ID NO: 24708 - DNA, 760 bp, Zea Mays
ctacttggcaccttgggctgtattctccccgcgctggcccatctacgctcccttttcctcgcgctggcccattgccgtgccagcccaatagcacaacactgtgggcgccctgtgtctctaccacgtgggcccgggacgccagttccttcttccgctcgagctccgtaacagacgtcgctacttcgtcgctgggacttggggagcaattccacgaaccgcgctcggtcttctccctcaacggaacgcgacttcttcgccgcgcgcgctggaatccctggccatatatcctggacgcacgacctcctctccttctgcccatccatggcgctcggcacccagtgcccctgctcctcttcctggcagccgggtggagctcccccccatgggcgagcctccaaccttccctttgagctcccacaaacccaagtacagggtgcccccgcgagctccatggccgcgcgtgccaggccttcgccatctatggagctcggcgttgcccccttcgccgcgcgctgctcatcctctccaccgctcggagatccgcccgatgcctcaccagagcgtgtggatgtcgcggcgtccaccaattcgggggtcatggcgtcgtatctggggcgatttcttgccggtgatgaagctccgctgcggaccacaaatcctccgtgggcgggcctctgcacgtcgtttccgccgcacgaggacacgtgtcatctgaagagcaagttggtacctggaatctcaagacccaggcaagttgtgc

SEQ ID NO: 24709 - DNA, 1679 bp, Zea Mays
atggtgtccgtcttctactcgcaagtggcaagcgatatatcaagctccatatcgatcgagctctgtaaaccggagcggcggcaccatttcgttaccatggagaacctggcagggcagcagttcgtttatgaggtgacgagtctacgagcattgtttctgctgctgctcctctctcccttcctcttcctcatcatgcgcaacgcgcgagcaacaacactaatgttcgataccaagaggacaaggggccaccggcagcctgcagatcggcagcagagcctcccgccgtcgcctccggcagtgcctgtcctcggccacctgcacctcgtcggctctctcccgcacgtctccctccgcagcctcgccaggacgcttggcgcggacctcatgctgctccgcctgggctccacgccggtgctggtcgtgtcgtcgtccagcgccgccgaggccgtgctgcgcacgcacgaccacgtgttcgcgtcgcggccgcacgccctggtctccgaggtcgtcctgtacggtccgtccgacgtcgggttcgcgccgcacggcgactgctggcggcgggggcggaagctcatcaccacgcaccttctcagcgtcaacagggtgcagtcgttccgccacgcccgggaagaagaggaaatgattgcttgctccaggttgttcgggagaaggtgcagccgtgtaggtgaacttgaaatattccctttggaaatgttgttagataattccgccttcaaaactgatttggttggggtgatagcagcagctggagcaagtgaataaacgacacaccttaaacataaataaatgagacgaattcggtttatgtgcatgtctgagcagagaagcaagggcgggctcacgttgggctgactggggcatggggtcccactcaattttctggtttcagtggagttttatcttattcattgtagctataaaggtccattagtaagtaggtttctatttaggcccccactcaggttttgggccccactcaaacttctggctttgctcaccacttcaaagaaggggtaatgtagttgggagcatgtagacttcctatactatacaaaggatgtcagatatgatgcaggctactgtactgccagaagaagagaaatattttgccgcagtacatgcagccaatggtttcaactttcaagtccctttctgcatcccacatgtctttttctgtctcgagaaatttggtcactttgtattgactaatatttcttgtatatgagtttggttttctgcttcctcgctaagagaaaaatggagggtctaggggcatgcacatgataattaggtactatccaacaacaacatttttttctatgctttcattgtttctgaaattttcagactcacgccagaaaactggatttccactacaggtgttatcttgcaggtgtgaatcattaattggatctcttgtgaggtactttaatagatcatagaagatgcatatagtatgatagttactgttgaagaaagtattatatcagttagcttttagttggcaacatggatttgaattatcaaagtaccaactcgcagatcagaattttcgaaattatattaatactatctccacccaaaaagagagacgttctggttttattttaagtgaaatgtcttatgtttgaccaagtttacatagaagattatta

SEQ ID NO: 24710 - DNA, 2072 bp, Zea Mays
ggcaaaccccaatccccagttccccactcctggagccccgccatgccgaccggcgcagccacctcgctgctcggcctcaaccccccgcataccagctgctccagcctccgcgtccttcccccgacagccgccgccaccgcctctcccttgcgttccagatccgcatctttcgctccgccgttcctcagacgcagcagacccagcgccgccgccgccatccatgcctccacactcgcttctgattccgcattccccacctctccgactccgcccccgcgccaaaaagaagaagaacccccagggcggcggcggacgcatcgagggaagcggggacgtgcggcgcgaggccaaggccaaggcgcgcatccgcagccgccgcatgggcgagaacgccttcttccgccgcaagcgccgcgccgcggccacgggccaggccgacgccttcacggacgcggagctcgagatgatcgggatggggtacgaccgcgccgtccggttcatggacgggcccgacgacccgcggctccggcacccgcacgactggtacaagtacggccgctacgggccctacaactggcgcggcatcgtcgtcggcccgcccatccgcggccgcttctccgacgaccgcgtctcgctcatggaacaggtccacgaccacgaggagtgggaccgcatcgagcagttcgacatgtgcaaccagttcacgcaccgcctcaacgagctcagcgacggcgtcgggttccggtactactgggtgttcgtgcgccaccccaagtggcgccccgacgagaagccgtgggagcagtggacgctctcggccgaggttgccgtccaggccagcaaagacgagcggctcgacaagtggagcctcatgggcaggttcggcaacccgacgcgcgagctcatcacgcggtgcgcggcctggacgcgcccggacatcatatacgtcaagcggcctctgtaccagtcgcggtttgagccgcaggaggatttcttcagcaagcttcgcccgttggttgatcctgccacggagaacaacttcctgttcgatcttgagctggatggccaggtcgttcggacatcctactttggtggcctgtgcaagattgtgaaatccaacccaaaggcttacgtcgacgatgttgtgaatgcttactcgaggctgagtgatgcggacaagtcacgatgcctggaattcctgctcacgaaccaccccatggatctcctccatccttacaccaaggagtggaaggtgaagctagaggagctagaactgggatgtgacgctcctgatgagagtgaggatgaggttggtgatgacgatggaattgaggtggttgactgcatcgaggaaaatgaggtcgatgatgattattatgaagatgaggatgaaaccgatgcacaggaggatttgaaagcagatgaacctgaaaatgttgaggatagcgaggaatactgggatgagcagtgggagaaggctatgagaagttctgataaaatggagaagctagtaaagacgagcattgtggcgtcaaatgagtacagtaagcagcagaaggatctagagaaagaaatggagtggaaaatggccagagcaaatgcgattattacggagcaggaagctgaggtggaggaggagagcgccaggagaaggactgcgaaggatggaaatcagaacgatgcaaacacagggctcttcttgagggccgctgttcggccattcacttacagaaatcttgtcaaggaaattgttctgatgagacaccacatcattgatggggaaatagtttagtttgcatgaggctgtattctcacatcattgatggggagatagtttagtttgcatgaggctgtattcagtttttcagattagggatttgcccatttcaatttacaaatgcagagcttgcatttcgaaggtctaaggccatctcccgcagatcttgtaaaatactgttttacagtgtaatccctgttttgcagagtgtagtttgaaatagtgagtaagatagagagtgtaatatggagtctactggagatagtaagaagtccctacaattccttggttttgt

SEQ ID NO: 24711 - DNA, 596 bp, Zea Mays
gtgaaccacaggtgtcatcgtcggaggcagcggttgtgcccgacgcggcgtctggcatggcgcccatggtggcagtggtcagcaggggcctggagcgagaggcgcggctgatgcggtaccgggagaagcgcaagagcaggcggttcgagaagacgatccggtacgcgtcccgcaaggcgtacgcggagacgcggccgcgcatcaagggccggttcgccaagcgcacgcccggggctggggaggacacgctggaggagcacgaggagatgtactcctccgccgctgccgccgtggctgcgctcatggcccccggcggagccgatgcggactacggcgtcgtgcccacatattgatctatgcaattgcaacgccgacatgtacactagttagcctcgtgctctggggctgtaatttttgctgcatgcattgcatgcaaagctcttattgattgcctgtatgattaacggaagccattacaagcaaggacttcctccctccttttcaattcctatgtatattactatcatcactacgagctgctaatctgcatctttttattcttagtaattacttaaacaagatggtctttcttgagt

SEQ ID NO: 24712 - DNA, 512 bp, Zea Mays
ctcccgcgctctacccgcctgttcgccagaccgtcgtcgtctcccacgtaacgccatcgcaaggtttacacaaggacagatcaggcaacggtgctgtttcatatttccatccacaagacgaatgaacatgtctagggcttttctgaagatgcaaagtgatgaaacaaaagagaggaaggttgggaggagttagcttttccagacgcaagtagcattttgtttttcatccccgatatcgagttgccagatgccactggcgtggattagctagctgtatgtggcagtggtttgaggtttaagccgaggcttgtacatgtgtggttcagttgttgttctcagtttcagtggtagattttggatgttagttttggtttgcgctggcctcttaagataaccttcagtgtatgccgttgtcttaacataaaattttagtaggatgttgttctattttattccttgaaactcataaatagtcagtttgcaaccttgctgacaaaagcctttgggtgcac

SEQ ID NO: 24713 - DNA, 3939 bp, Zea Mays
gtctagccatccctctcaacctggtggctgtggtgggtgtcccagtcgcctttgattccttcccccgtcttcccctcagatctacgatccttatccccggttccccgtattctcctctctctcctcagccccagtcgaggagacgccgctgcggctctcgtcccatgttccaatgattgttaggtgattgagacttgagagggtctggaggctaccaactggtttggtggctcggccaagccgagcggttccacgctgttcttgccgcctggtgccggagtttctatgtcgaaggctgtgttcggagtttctgcgttgaaggcggtgttctgctgattggagaaactggtttggtgcggatgtttgatgccgtgttggttatagggaccgggaggggagttggtctccgtcgaaggaggctgctagcttgcaggctcatcgccattggcgccggacctgcctgtcgtacggtctttcctgtgccgaagtttttgctgctgtgaaaacgctttaagcgattacctttggcgacctttccatgcaaaggcttgaccttttgggttccggaactgattggtggtcgaggagtcttggagtgctggtctacctgcattatcaacagggcatttctgcagaacaaaagttgtatcctgtgcagatagccagatactgctttgctagtgtattaaattgcttcttgtgtttgaacaaagattctattcagccagaagacagtgctcttctttatatcctgtccggagctcaatacagtgctccaaatccatatcagcctgctaggagtggataaggatctttgcctcaacgagtggagcaaaaccatggatgtgcctacgcctcccaaccgtgccggctgcaacagtaacatcagcaacatcggcagccccatgcaatcttttgatgatccctttggtggtgctgccatgacgagctttgatggatactcggagctcagcagcccatcagttgctgatcacatattctccctgctgaatgatccctcgtctgtgcaacatatgtttgccttgtggtcatcttcggggtcatctccgcgtgcttctgctgtgagagaagacatgtcgtttgacacctatcctggacctatggacgtgacagcatcacttgctcaaaggatcaactcagcatcagtattcaatccaactgaagtggacagaggactaaaagactcagatgggcttgttccaaataatggttcacaacaagggagtagcatcattccgaggtcggttggcaacattcttgcagacaggatgctcatggcgctatctttgttcaggaagtcattgagcgatggtgttcttgcccaagtctggatgcctgttgagcacaatggtcgtgtcgtgttgagtacatccgagcagccctatttacttgaccaggatcttgcaggttacagagaagtttctagaaatttcttgttttcagttaaggaggagcctggtctgcacctagggcttccagggagggtcttcatatctggggtgccagagtggacctcaagtgttacgtattacagtaagccagagtatttgagaatggagcatgctcttcttcatgaaatacgagggtcacttgctatgccagtttatgatcccagcaagggttcttgttgtgcagttcttgaacttgtcacaaacaaggagaaacctgattttgatgcagagatggacattgtttgtgatgccttgcagggtgtgaacttgcagacaacaacagatcgcagcaatcagaaggtttactctgaaaatcagaaatatgcttctacagagattttggatgttctaagagctatttgccatgcacatatgcttcctttggcccttacatggatccctacatcaaacggcaccgctaatggtttttgtgtcgcaaagaatatcaggcttgattcgcaaccaggaaaatcagtacttcgtatccatgaatcagcttgttatgttaacgatgcaaagatgcagggatttcttcatgcatgtgctgaacgtcatcttgagaaagggcagggtattgcaggccgagcccttaaatctaatcttccattcttttcgcctgatataagagagtacagtatcgaagactacccgcttgcacaccatgctcgtaagtttggtctgcatgctgctgtagccatccgactgaggagtacgtacactggtaaggatgactacatactagaattctttctcccagtcaactgcaagggctgtggagagcagcagatgttattaaacagcctttccagcacaatgcaaagaatatgcaaaagcttgcgaacagtttctgaagcagagaccgatagtgttagtgctactgaaccaatgtatgagaagactaatggaagttgtttaccaactggtaactctgaaagttcctcacatgatgaccagccaatcacagaatctgcattccatgatctatcttcgggtgacaaacaaggagacagagaacctgctaagctcaaagcgagttgcagagaaaaaacgcagtacatctgaaaagaattttagtctggatgttcttcgcaaatacttttctgggagcctcagggatgctgcaatgagccttggcgtttgtccaacaactttgaaacgaatatgcagacaacatggaatttccagatggccatctcgaaagataaacaaggtcaaccgttcactgaagaagatcgagaaggtcatcaaatcggttcatggtgtggacagatccttgcagtacgatcctgccactggatctcttgttccagcaacctcccttccggataagatgcctacctcatctgcgggcgtaaaaacagtggaggaaaaatctagcccagaaccaggacaggatttctcttcgcctgatggatggcaaagagaaagtagccaacttcatgcctccagtatacctacaagggtaggtgatgaagtccaaatgctggcaatcaacaacgaaggcagcaggaactatgcttctggtatcgcaaatatcgcgcagcattcaaactccgaagacgcacacggtcctttatatcccgtcggtgctgttaattcttcgcgtaccggagaaacaggctacatcgattctccaacctccctccacatggatagcgtcgaaggccaaacaacggtgagggactcaagatctgtacagcaagcagatgtcaccatggccaccaaggagcagacccttccctccacctctggcacaaccgattcttcgagcggcagcgcctcaagtcagcctgctttcaaggggaacccaggacgtgccctcaaagttagcagcagcgatgcactgacggtgaaagctacctgtaacggcgacaccgtgcggttcaagttcctgccggcaatgggctggtaccacctgctggaagaggtagcgaagaggtttaagctggcgacaggagcgttccagctcaaatacaaggacgacgaggacgagtgggtgatcctggcgaacgacgccgacctccaggagtgcgtggacgtcctggactcgatcggctcgcgcagcgtgaagctgcagattctctttcttacaaacttgctagtcgtgaagcctcgttgtgacatggcactaccatctaggtgctcccatgagatgttaggcaaaaaccagggagagaaggttggtggtacctctagagggcggcacaacaacatgtggaggggcatcggctctaggggtgttgtagcgggatggcatagggtcgagtgggagatgcataaaaaaggaatggagatcaggagggcgcaaggaaggaggcgtgggcaacgagtgagggtgacacaacaagaagcaagggatagggatcgggagggctcaaggaagatgtgggtggtgatggtgaaggaagaaggaattgtgggcgatgaatgtttcgatgggttggatcgagggataggacaattgtag

SEQ ID NO: 24714 - DNA, 3919 bp, Zea Mays
gtcttcccctcagatctacgatccttatccccggttccccgtattctcctctctctcctcagccccagtcgaggagacgccgctgcggctctcgtcccatgttccaatgattgttaggtgattgagacttgagagggtctggaggctaccaactggtttggtggctcggccaagccgagcggttccacgctgttcttgccgcctggtgccggagtttctatgtcgaaggctgtgttcggagtttctgcgttgaaggcggtgttctgctgattggagaaactggtttggtgcggatgtttgatgccgtgttggttatagggaccgggagggtgggtgctggcatgaatttggttttctgtcgattcaattggtgcttaatttgagcctttggaggctttttgggatcagggagttggtctccgtcgaaggaggctgctagcttgcaggctcatcgccattggcgccggacctgcctgtcgtacggtctttcctgtgccgaagtttttgctgctgtgaaaacgctttaagcgattacctttggcgacctttccatgcaaaggcttgaccttttgggttccggaactgattggtggtcgaggagtcttggagtgctggtctacctgcattatcaacagggcatttctgcagaacaaaagttgtatcctgtgcagatagccagatactgctttgctagtgtattaaattgcttcttgtgtttgaacaaagattctattcagccagaagacagtgctcttctttatatcctgtccggagctcaatacagtgctccaaatccatatcagcctgctaggagtggataaggatctttgcctcaacgagtggagcaaaaccatggatgtgcctacgcctcccaaccgtgccggctgcaacagtaacatcagcaacatcggcagccccatgcaatcttttgatgatccctttggtggtgctgccatgacgagctttgatggatactcggagctcagcagcccatcagttgctgatcacatattctccctgctgaatgatccctcgtctgtgcaacatatgtttgccttgtggtcatcttcggggtcatctccgcgtgcttctgctgtgagagaagacatgtcgtttgacacctatcctggacctatggacgtgacagcatcacttgctcaaaggatcaactcagcatcagtattcaatccaactgaagtggacagaggactaaaagactcagatgggcttgttccaaataatggttcacaacaagggagtagcatcattccgaggtcggttggcaacattcttgcagacaggatgctcatggcgctatctttgttcaggaagtcattgagcgatggtgttcttgcccaagtctggatgcctgttgagcacaatggtcgtgtcgtgttgagtacatccgagcagccctatttacttgaccaggatcttgcaggttacagagaagtttctagaaatttcttgttttcagttaaggaggagcctggtctgcacctagggcttccagggagggtcttcatatctggggtgccagagtggacctcaagtgttacgtattacagtaagccagagtatttgagaatggagcatgctcttcttcatgaaatacgagggtcacttgctatgccagtttatgatcccagcaagggttcttgttgtgcagttcttgaacttgtcacaaacaaggagaaacctgattttgatgcagagatggacattggtgtgaacttgcagacaacaacagatcgcagcaatcagaaggtttactctgaaaatcagaaatatgcttctacagagattttggatgttctaagagctatttgccatgcacatatgcttcctttggcccttacatggatccctacatcaaacggcaccgctaatggtttttgtgtcgcaaagaatatcaggcttgattcgcaaccaggaaaatcagtacttcgtatccatgaatcagcttgttatgttaacgatgcaaagatgcagggatttcttcatgcatgtgctgaacgtcatcttgagaaagggcagggtattgcaggccgagcccttaaatctaatcttccattcttttcgcctgatataagagagtacagtatcgaagactacccgcttgcacaccatgctcgtaagtttggtctgcatgctgctgtagccatccgactgaggagtacgtacactggtaaggatgactacatactagaattctttctcccagtcaactgcaagggctgtggagagcagcagatgttattaaacagcctttccagcacaatgcaaagaatatgcaaaagcttgcgaacagtttctgaagcagagaccgatagtgttagtgctactgaaccaatgtatgagaagactaatggaagttgtttaccaactggtaactctgaaagttcctcacatgatgaccagccaatcacagaatctgcattccatgatctatcttcgggtgacaaacaaggagacagagaacctgctaaggcacggagtagctcaaagcgagttgcagagaaaaaacgcagtacatctgaaaagaattttagtctggatgttcttcgcaaatacttttctgggagcctcagggatgctgcaatgagccttggcgtttgtccaacaactttgaaacgaatatgcagacaacatggaatttccagatggccatctcgaaagataaacaaggtcaaccgttcactgaagaagatcgagaaggtcatcaaatcggttcatggtgtggacagatccttgcagtacgatcctgccactggatctcttgttccagcaacctcccttccggataagatgcctacctcatctgcgggcgtaaaaacagtggaggaaaaatctagcccagaaccaggacaggatttctcttcgcctgatggatggcaaagagaaagtagccaacttcatgcctccagtatacctacaagggtaggtgatgaagtccaaatgctggcaatcaacaacgaaggcagcaggaactatgcttctggtatcgcaaatatcgcgcagcattcaaactccgaagacgcacacggtcctttatatcccgtcggtgctgttaattcttcgcgtaccggagaaacaggctacatcgattctccaacctccctccacatggatagcgtcgaaggccaaacaacggtgagggactcaagatctgtacagcaagcagatgtcaccatggccaccaaggagcagacccttccctccacctctggcacaaccgattcttcgagcggcagcgcctcaagtcagcctgctttcaaggggaacccaggacgtgccctcaaagttagcagcagcgatgcactgacggtgaaagctacctgtaacggcgacaccgtgcggttcaagttcctgccggcaatgggctggtaccacctgctggaagaggtagcgaagaggtttaagctggcgacaggagcgttccagctcaaatacaaggacgacgaggacgagtgggtgatcctggcgaacgacgccgacctccaggagtgcgtggacgtcctggactcgatcggctcgcgcagcgtgaagctgcaggtgcgcgacctcccctgcctcgtcagcagctcgggcagcagcagctgctgcttgcaggtggaaggaagcgcctagctcatgacggcaggacggaagcctgggtcatggcacgttgactgttgtagtaggttttagccttctgctgtcgccgtaatggatccatgtctacgctcaatacaaaatggcgagtgcagaaaaggagaagtgtaatactcgtcgcacggctgaaacaatgccgtgaaggccttgccataatctgttgtttgttcacaaaagtcgtggcaataatctgttgccatgaatatgggaggttttaagacgcgacaccaagtttctgagcttgctgtgttccgaattttcagaa

SEQ ID NO: 24715 - DNA, 3940 bp, Zea Mays
cccgtcttcccctcagatctacgatccttatccccggttccccgtattctcctctctctcctcagccccagtcgaggagacgccgctgcggctctcgtcccatgttccaatgattgttaggtgattgagacttgagagggtctggaggctaccaactggtttggtggctcggccaagccgagcggttccacgctgttcttgccgcctggtgccggagtttctatgtcgaaggctgtgttcggagtttctgcgttgaaggcggtgttctgctgattggagaaactggtttggtgcggatgtttgatgccgtgttggttatagggaccgggagggtgggtgctggcatgaatttggttttctgtcgattcaattggtgcttaatttgagcctttggaggctttttgggatcagggagttggtctccgtcgaaggaggctgctagcttgcaggctcatcgccattggcgccggacctgcctgtcgtacggtctttcctgtgccgaagtttttgctgctgtgaaaacgctttaagcgattacctttggcgacctttccatgcaaaggcttgaccttttgggttccggaactgattggtggtcgaggagtcttggagtgctggtctacctgcattatcaacagggcatttctgcagaacaaaagttgtatcctgtgcagatagccagatactgctttgctagtgtattaaattgcttcttgtgtttgaacaaagattctattcagccagaagacagtgctcttctttatatcctgtccggagctcaatacagtgctccaaatccatatcagcctgctaggagtggataaggatctttgcctcaacgagtggagcaaaaccatggatgtgcctacgcctcccaaccgtgccggctgcaacagtaacatcagcaacatcggcagccccatgcaatcttttgatgatccctttggtggtgctgccatgacgagctttgatggatactcggagctcagcagcccatcagttgctgatcacatattctccctgctgaatgatccctcgtctgtgcaacatatgtttgccttgtggtcatcttcggggtcatctccgcgtgcttctgctgtgagagaagacatgtcgtttgacacctatcctggacctatggacgtgacagcatcacttgctcaaaggatcaactcagcatcagtattcaatccaactgaagtggacagaggactaaaagactcagatgggcttgttccaaataatggttcacaacaagggagtagcatcattccgaggtcggttggcaacattcttgcagacaggatgctcatggcgctatctttgttcaggaagtcattgagcgatggtgttcttgcccaagtctggatgcctgttgagcacaatggtcgtgtcgtgttgagtacatccgagcagccctatttacttgaccaggatcttgcaggttacagagaagtttctagaaatttcttgttttcagttaaggaggagcctggtctgcacctagggcttccagggagggtcttcatatctggggtgccagagtggacctcaagtgttacgtattacagtaagccagagtatttgagaatggagcatgctcttcttcatgaaatacgagggtcacttgctatgccagtttatgatcccagcaagggttcttgttgtgcagttcttgaacttgtcacaaacaaggagaaacctgattttgatgcagagatggacattgtttgtgatgccttgcagggtgtgaacttgcagacaacaacagatcgcagcaatcagaaggtttactctgaaaatcagaaatatgcttctacagagattttggatgttctaagagctatttgccatgcacatatgcttcctttggcccttacatggatccctacatcaaacggcaccgctaatggtttttgtgtcgcaaagaatatcaggcttgattcgcaaccaggaaaatcagtacttcgtatccatgaatcagcttgttatgttaacgatgcaaagatgcagggatttcttcatgcatgtgctgaacgtcatcttgagaaagggcagggtattgcaggccgagcccttaaatctaatcttccattcttttcgcctgatataagagagtacagtatcgaagactacccgcttgcacaccatgctcgtaagtttggtctgcatgctgctgtagccatccgactgaggagtacgtacactggtaaggatgactacatactagaattctttctcccagtcaactgcaagggctgtggagagcagcagatgttattaaacagcctttccagcacaatgcaaagaatatgcaaaagcttgcgaacagtttctgaagcagagaccgatagtgttagtgctactgaaccaatgtatgagaagactaatggaagttgtttaccaactggtaactctgaaagttcctcacatgatgaccagccaatcacagaatctgcattccatgatctatcttcgggtgacaaacaaggagacagagaacctgctaaggcacggagtagctcaaagcgagttgcagagaaaaaacgcagtacatctgaaaagaattttagtctggatgttcttcgcaaatacttttctgggagcctcagggatgctgcaatgagccttggcgtttgtccaacaactttgaaacgaatatgcagacaacatggaatttccagatggccatctcgaaagataaacaaggtcaaccgttcactgaagaagatcgagaaggtcatcaaatcggttcatggtgtggacagatccttgcagtacgatcctgccactggatctcttgttccagcaacctcccttccggataagatgcctacctcatctgcgggcgtaaaaacagtggaggaaaaatctagcccagaaccaggacaggatttctcttcgcctgatggatggcaaagagaaagtagccaacttcatgcctccagtatacctacaagggtaggtgatgaagtccaaatgctggcaatcaacaacgaaggcagcaggaactatgcttctggtatcgcaaatatcgcgcagcattcaaactccgaagacgcacacggtcctttatatcccgtcggtgctgttaattcttcgcgtaccggagaaacaggctacatcgattctccaacctccctccacatggatagcgtcgaaggccaaacaacggtgagggactcaagatctgtacagcaagcagatgtcaccatggccaccaaggagcagacccttccctccacctctggcacaaccgattcttcgagcggcagcgcctcaagtcagcctgctttcaaggggaacccaggacgtgccctcaaagttagcagcagcgatgcactgacggtgaaagctacctgtaacggcgacaccgtgcggttcaagttcctgccggcaatgggctggtaccacctgctggaagaggtagcgaagaggtttaagctggcgacaggagcgttccagctcaaatacaaggacgacgaggacgagtgggtgatcctggcgaacgacgccgacctccaggagtgcgtggacgtcctggactcgatcggctcgcgcagcgtgaagctgcaggtgcgcgacctcccctgcctcgtcagcagctcgggcagcagcagctgctgcttgcaggtggaaggaagcgcctagctcatgacggcaggacggaagcctgggtcatggcacgttgactgttgtagtaggttttagccttctgctgtcgccgtaatggatccatgtctacgctcaatacaaaatggcgagtgcagaaaaggagaagtgtaatactcgtcgcacggctgaaacaatgccgtgaaggccttgccataatctgttgtttgttcacaaaagtcgtggcaataatctgttgccatgaatatgggaggttttaagacgcgacaccaagtttctgagcttgctgtgttccgaattttcagaa

SEQ ID NO: 24716 - DNA, 3577 bp, Zea Mays
atggacattggacagggtgcgacaatcttggtcagcgctggatggttgtattctccgttctccagttcgtcaccgtcagggaggaggcagttacggcggtgttgttggtcatgggcgaagggaggaggtaccgacgtgctccccttcgatttccccctggctggccgctcctccacttccgatgatcgagcgtcgcggcgctcggatctggcctgttgggcgaggcaagaggacggagcgctagttcgccctcgggctcacacgccgatgggagaccgccgcactgggagccggcactacgcctccgcccggactctctctgtcggtgctccttcatcctccccgtcccgtcaatgtggaggcaagattctattcagccagaagacagtgctcttctttatatcctgtccggagctcaatacagtgctccaaatccatatcagcctgctaggagtggataaggatctttgcctcaacgagtggagcaaaaccatggatgtgcctacgcctcccaaccgtgccggctgcaacagtaacatcagcaacatcggcagccccatgcaatcttttgatgatccctttggtggtgctgccatgacgagctttgatggatactcggagctcagcagcccatcagttgctgatcacatattctccctgctgaatgatccctcgtctgtgcaacatatgtttgccttgtggtcatcttcggggtcatctccgcgtgcttctgctgtgagagaagacatgtcgtttgacacctatcctggacctatggacgtgacagcatcacttgctcaaaggatcaactcagcatcagtattcaatccaactgaagtggacagaggactaaaagactcagatgggcttgttccaaataatggttcacaacaagggagtagcatcattccgaggtcggttggcaacattcttgcagacaggatgctcatggcgctatctttgttcaggaagtcattgagcgatggtgttcttgcccaagtctggatgcctgttgagcacaatggtcgtgtcgtgttgagtacatccgagcagccctatttacttgaccaggatcttgcaggttacagagaagtttctagaaatttcttgttttcagttaaggaggagcctggtctgcacctagggcttccagggagggtcttcatatctggggtgccagagtggacctcaagtgttacgtattacagtaagccagagtatttgagaatggagcatgctcttcttcatgaaatacgagggtcacttgctatgccagtttatgatcccagcaagggttcttgttgtgcagttcttgaacttgtcacaaacaaggagaaacctgattttgatgcagagatggacattgtttgtgatgccttgcagggtgtgaacttgcagacaacaacagatcgcagcaatcagaaggtttactctgaaaatcagaaatatgcttctacagagattttggatgttctaagagctatttgccatgcacatatgcttcctttggcccttacatggatccctacatcaaacggcaccgctaatggtttttgtgtcgcaaagaatatcaggcttgattcgcaaccaggaaaatcagtacttcgtatccatgaatcagcttgttatgttaacgatgcaaagatgcagggatttcttcatgcatgtgctgaacgtcatcttgagaaagggcagggtattgcaggccgagcccttaaatctaatcttccattcttttcgcctgatataagagagtacagtatcgaagactacccgcttgcacaccatgctcgtaagtttggtctgcatgctgctgtagccatccgactgaggagtacgtacactggtaaggatgactacatactagaattctttctcccagtcaactgcaagggctgtggagagcagcagatgttattaaacagcctttccagcacaatgcaaagaatatgcaaaagcttgcgaacagtttctgaagcagagaccgatagtgttagtgctactgaaccaatgtatgagaagactaatggaagttgtttaccaactggtaactctgaaagttcctcacatgatgaccagccaatcacagaatctgcattccatgatctatcttcgggtgacaaacaaggagacagagaacctgctaaggcacggagtagctcaaagcgagttgcagagaaaaaacgcagtacatctgaaaagaattttagtctggatgttcttcgcaaatacttttctgggagcctcagggatgctgcaatgagccttggcgtttgtccaacaactttgaaacgaatatgcagacaacatggaatttccagatggccatctcgaaagataaacaaggtcaaccgttcactgaagaagatcgagaaggtcatcaaatcggttcatggtgtggacagatccttgcagtacgatcctgccactggatctcttgttccagcaacctcccttccggataagatgcctacctcatctgcgggcgtaaaaacagtggaggaaaaatctagcccagaaccaggacaggatttctcttcgcctgatggatggcaaagagaaagtagccaacttcatgcctccagtatacctacaagggtaggtgatgaagtccaaatgctggcaatcaacaacgaaggcagcaggaactatgcttctggtatcgcaaatatcgcgcagcattcaaactccgaagacgcacacggtcctttatatcccgtcggtgctgttaattcttcgcgtaccggagaaacaggctacatcgattctccaacctccctccacatggatagcgtcgaaggccaaacaacggtgagggactcaagatctgtacagcaagcagatgtcaccatggccaccaaggagcagacccttccctccacctctggcacaaccgattcttcgagcggcagcgcctcaagtcagcctgctttcaaggggaacccaggacgtgccctcaaagttagcagcagcgatgcactgacggtgaaagctacctgtaacggcgacaccgtgcggttcaagttcctgccggcaatgggctggtaccacctgctggaagaggtagcgaagaggtttaagctggcgacaggagcgttccagctcaaatacaaggacgacgaggacgagtgggtgatcctggcgaacgacgccgacctccaggagtgcgtggacgtcctggactcgatcggctcgcgcagcgtgaagctgcaggtgcgcgacctcccctgcctcgtcagcagctcgggcagcagcagctgctgcttgcaggtggaaggaagcgcctagctcatgacggcaggacggaagcctgggtcatggcacgttgactgttgtagtaggttttagccttctgctgtcgccgtaatggatccatgtctacgctcaatacaaaatggcgagtgcagaaaaggagaagtgtaatactcgtcgcacggctgaaacaatgccgtgaaggccttgccataatctgttgtttgttcacaaaagtcgtggcaataatctgttgccatgaatatgggaggttttaagacgcgacaccaagtttctgagcttgctgtgttccgaattttcagaa

SEQ ID NO: 24717 - DNA, 1846 bp, Zea Mays
gtagcagtagcaagtagcagcatactctcctacgcgaatcgattaacgggcggcactcacccaccgtgtggcctgccaaactgtcccctaggccccggccccgcccgcgcctggccagtggccatccatcccttcccttcgcttcgacgcaccaatcttgtcccggcgcctgccaaatccagcaaggccacacagcccgaggcaggaagggcagcgcaggaacagggagcgagcagcgcacgggcaatggcggcttcttccgggacgcgctccgtgcgcctgctggtgctgctgctctgccttctcgggttctgcgtcgcgctgagccaccaggagtcggcggcggactcgtgcgccagggccaaggtcgcggtcgccagcctcgtgcccttcgactccacgtccttccgctgcaccgccgcctggaagcagcaggacttcgtcctcaggtacaagaacacggggcccagcgagtggagcttcatcctctcggcgccggacaggggctcgtacgtggcggtcggcttctcgggcaagggcgccatggtggggagcagcgccgtcgtcgggtgggcggccaacggcaggggcaccgtcaagcagtactacctcggcgggaagagccccgaggagtgcgcccccaacaggggcctcctcaagctcgtcaggaacaggaccgccgtcgcctcgcgctccggccgcctctacctcgccttccagctcagcaccgactacccgcagccgtacctgatctacgccgtcgggccggacggcagcctgccgcagtccgactcgctgcggctgccggcgcaccagaacatggcctcccgctccttcaactacacctccgggctgtcgtacaacgtcgccgggtccggcgacgccgcgttcccgccggagaggaagcacgggctgctgggcatgatggggtggggcgtgctgatgcccatcggcatgatcaccgcgcgctacttccggcagctggacccgtgctggttctacacccacatggccatccaggtggctggctacgccgtcggcatcgcgggcatcgtcctcggcttccgcctcagcgaggacgggctcaggaacgtggacgtgcacaaggcgctcggcatcgccatcttggccatggcgtctcttcaggtgatggcgatcctggcgcggccggacaagacgtccaaggtgcggcggttctggaactggtaccaccacaacatcgggcgcgcggcgatcctgctggccatcggcaacatcttcctgggcctctccatcgcgcaggagaccagcgcctacatcgtctcctacggcgtgttcgtcgccgtctgggtgctcgccgtcgccgccttcgagatgaagcgctgctacgccgacgacgactgatgagctagcgacacgtaagagtcacagttcggtcccaacagctgacggcgaagtttggtgtcgttaaactgagcgttccacggccagctgggacgtgacagacacacgagcgccgagcgcgcgcgcgcgcacacacacaccattcttgttgttccgtagctcgcagctggacagtgcattattggttcgaggagggcgtgctttggttggctaattaaaaaaaaaatgtttttttttttaggtataggatgtgaggaaggggacggtctgctgtttctaggctagctggacgctctgattcataaatttgtacattgattgcaccaaccaggatgctgtggtgtggtgcgtaccagcaccgaccacagatggaagtatcaaacccggattcgccgctgggggcgcccggcgcggcgacattccataccgtgatgcggcggtcggacgcacgcccaagtgttgt

SEQ ID NO: 24718 - DNA, 1623 bp, Zea Mays
gcgtcgttcccatcaaaatctgcacgggattctgttgtgcgagtgatactcgtgcagagtctactccgcggctccgcgcgggcgcacgcagatgggcatcagcccctccaagcgcgtggacgctgcgctgcgccgcgcgccgttgttcgccgccgcctgcgacgccgccttcgaccggtgcctcgccgacgcgcagcgccgcttcccgggcgtccgccggtaccagctcgccgacgccgccgcacaccttcactcggagctcagcgcgtccgtcccgctggtccggcgctgggtgccctcgccgccgccccgcgtccgagtcgacgccgcgctccgcgccgctgggctagaggacgaggcagagctctcgcgactccagttccgggagtttgccgtcgagctgttcagggaggccgtgctggccggagctgcggacctcctccgcgcgcccgcagccgcggccgggatcgtcgggataggcatggtggctcgagccgctcccccggtggtcgggaggatcgtcgccgtctgcgccgctagcgtggccaccgcagtttacctcagcctgggctagggtttcccccccaaattctagtgatgattagagaacctatacaaaccacttcccacagctctgctgtgttacggttgaacctggattcaacggcagttgttgcagtaatgcattttatgatcggattgagctcaaatgccattgaatcagctgtgcaatgtttcactgtcaaatcgcattcctgaaagaactaaaggatttgctgctgcatgagatatttgtatagtttatatttgatccataaacttactacattttacccttttttctctgaattgattgtgcaaatgatgtacatgtgacgatataacagaagaaagtagttccaacttgcttatcaaagtaatttgtaaagaaagtactgcgtttgctttcttgcagaattgttctaggctcttttcaaccatcagctgagcattctacaagtggagtactaatttttggattgtgtctgttattgtagcatttagtttactcagcaccgtctcccatcagatcaggtcaaccacgcactgttcttcattgttttctgtgaatctgctcttactaccatgtttcctttcagtacacctagaattttcagtgcctgtataagaaatatagttggaccttttgttcagtttgatcctgtttataggattcagagaaacagaaggataaaaggctgggaacagagttagaggattcggagaaacaagatagaataggagaaatagaatggggcagcagttcggaggtgaaatggacacgcgaaagtctagccttatcggattctccaatgggtgaagcctggacattgcacacttgggtatagcgcgtgtgtattggtatgtatgtaggaatgtccccatgccacatgtgttctgccctcttctttcactaaccgtagattttttattttcttgtcggcgcaaagcagaaacaaacagcttttcagcttagggcttgttcggttgtaccggaataggccaggattcattccagctcatcaaaatctatataaattagagaagtaatccggctaggaattaatctggggctccaatccg

SEQ ID NO: 24719 - DNA, 1924 bp, Zea Mays
gggcaattaataagcaccgcacttggcgcccccaaaaaactagtcgccgacgaagaccgatccgccagcgcgagcgctccgcctccgccacgtacgccggtccctccccgaacggcgaccgatcggggggaacaggcaggcaggctacagaggaatccttcggttccaacggccaggcaaggcgcaggggcggcacgtgaccacgcgcggtcgagacgacgattaccaccccggccagatggagcctgcatgccggccggctgccacatcgtgatcagagggccatgggcgcatggccttctgtcgccgcgttctgcggcgcccgatcgatcggaggtttactgttgcgcgagctagctgcggacgcaacgcaagcatgcatggcctcgcctataagtggatggaacggcaccggtccggtcagattgagctagctcgtcgtcccgggctacgagggggtcggataaccggagatggcgatcgatgagcggagcgtgcacggcggcgccgcactggtcctgcggctgctggtctgcgtcgtcgcggcgcgggctgtctcggccgtcgccgatggtcctctgctgaacggcaacttcgaggacccgccgaaccagtcccagatgagcgggtcggtggtgaccggggagcacgcggtctcctactggaagacgtccggccacatcgagttcatatgctccggccagaagcagggggacatggtcctgacggtgccggacggctcgcacgcgctgcggctgggcagcggcgcctccatccagcagcagatcagcctcacgaagggcctgtactactccctcacgttcagcgcgtcgcgcacctgctcccagaacgagatgctcaacgtgacggccgcccccgtgtccggctcccccgcccagaccggcgagctccccacccagacggtgtacaccagcagcggctgggactcctactcctgggccttcagggcggaggccggtctcatgtccatcacagtcacccacaactgcggagaagaggaagatcccgcgtgcggccccatcgtcgacgcctttgccatcaagacgctcagccagcctgaggccagccagaataacatgctgaggaacggggacttcgaggagggcccgtacatcccgccggactcgcagtggggagtgctggtgccgccggtggacgaggacgacgtctccccgctgcccgggtggaatatcatggcgtacaagaagtcggtcaagtacatagactcggcgcacttcgcggtgccgcgcggcgcgcgcgccgtggagctggtgtccggcgtggagaccgcgctcctgcaggaggtgtacaccaccgtggaagggagctggtacaggctggagttctcggccggggacgccgacgggtgcgcgtcgtcgtatgatgacggctcctcgtccgggatgaaggtgaaggcgtacgcggggacggccgaaacgaccgtggacgtcgatttccgcgacgccggcggttccaagcgcgggaagatcgagttcagggccaccgccagccccaccagggtggtgttcgtcagcttgggctaccacaccaagtccgacaacagcggcacgctctgcggtcccgtcgtagacgacgtctcgcttgtccccataccgcagccgtatgctcgccgcctgcttctataaggcctaactcatgctgcgtctttttctttttctttttcttttttgtagaagtacccatgcagcttggccgcttgggtaatggagagtgtgactgtgctggtttactggcccattttggcttaccttaattttgcactactacatttattcgtttttctagctcattaatgtgcggttatttgacaaaacaaaatatgtacaccgaattaagttcttttcattaaaaatagcaccgtaatcttactattactagctag

SEQ ID NO: 24720 - DNA, 1401 bp, Zea Mays
atatggatagaaattatatgaggggctacaacccgacgagtttgcattgggtcctctgctgaacggcaacttcgaggacccgccgaaccagtcccagatgagcgggtcggtggtgaccggggagcacgcggtctcctactggaagacgtccggccacatcgagttcatatgctccggccagaagcagggggacatggtcctgacggtgccggacggctcgcacgcgctgcggctgggcagcggcgcctccatccagcagcagatcagcctcacgaagggcctgtactactccctcacgttcagcgcgtcgcgcacctgctcccagaacgagatgctcaacgtgacggccgcccccgtgtccggctcccccgcccagaccggcgagctccccacccagacggtgtacaccagcagcggctgggactcctactcctgggccttcagggcggaggccggtctcatgtccatcacagtcacccacaactgcggagaagaggaagatcccgcgtgcggccccatcgtcgacgcctttgccatcaagacgctcagccagcctgaggccagccagaataacatgctgaggaacggggacttcgaggagggcccgtacatcccgccggactcgcagtggggagtgctggtgccgccggtggacgaggacgacgtctccccgctgcccgggtggaatatcatggcgtacaagaagtcggtcaagtacatagactcggcgcacttcgcggtgccgcgcggcgcgcgcgccgtggagctggtgtccggcgtggagaccgcgctcctgcaggaggtgtacaccaccgtggaagggagctggtacaggctggagttctcggccggggacgccgacgggtgcgcgtcgtcgtatgatgacggctcctcgtccgggatgaaggtgaaggcgtacgcggggacggccgaaacgaccgtggacgtcgatttccgcgacgccggcggttccaagcgcgggaagatcgagttcagggccaccgccagccccaccagggtggtgttcgtcagcttgggctaccacaccaagtccgacaacagcggcacgctctgcggtcccgtcgtagacgacgtctcgcttgtccccataccgcagccgtatgctcgccgcctgcttctataaggcctaactcatgctgcgtctttttctttttctttttcttttttgtagaagtacccatgcagcttggccgcttgggtaatggagagtgtgactgtgctggtttactggcccattttggcttaccttaattttgcactactacatttattcgtttttctagctcattaatgtgcggttatttgacaaaacaaaatatgtacaccgaattaagttcttttcattaaaaatagcaccgtaatcttactattactagctag

SEQ ID NO: 24721 - DNA, 2256 bp, Zea Mays
aagaaagataaaaaggaattatattaataataatcaagagacgactgctgtataaatagacaaagagatgagatgtgttacctagatctctatagccatcaatagatttgtaacgtgtccgaccccacttttaggtccgctcggtcgtcgtccatgaatgcagcacagttgcatcgtacagaaattaaacggcttttgttttgatttggttaaacttcgcatctaaacaccagtgtggaaagcttggtagtacactgtactgtactaccgtctccactgatcgagaaatcgaacgagtttcgtacaatgcagacgtgcagtgcagtggtcatggtaaggcccaagcccaaccatggtgggcttcggctctcgactcaacggtgcgcgagtgaggcccgtcagtacaaagtaatttctgtcattcaacttcctctaactttctcctctttacttctctgttctctcgaatgagtatagcctattagtacaaaatcatggtgcttagaccacattctctcgaatgaattctcctcgaacagtgacaacggccattcatgaattcgcaaagaaattcatgaatgaccattctgacttcagtttggactctctgcgctctcagagtcagagccccgtttttatcagaattcagaaacgaatagttaaaacttgaaggacagggagacactatttattctgtgcccaattttgcttctgtacatgttcaggagttctttttttcttgccacaatctcaaccacaggccagctttacactcaagacgtgtggcagcatgaaagatttgcacggtcataagttcacaacttcggagacgagcgcatcggcagtcattaggctctgccttgcctgaatgtgcagtttcagtttcagcagctgagagaaagagaaggatatggtgagagggcatctcaaggaacatgcattaaactgcccccatttacttgctgacaggccacagactgctagttcacaagtcagtaaacacatagttacatagtactagtaccacatggagacgcagttcagggccgcttccatctgtgtggatcagctagcaagcagatcacacatatacggcgccgacaggtcactggtataatacaaggcggctgatacggacacgcttgcttaatgcttagcttcttgttaggagatcgaattgggtcaggcgcttggaaactgtactacacgcgcaccatgcagacacagcagtagtacttgcgcggtttcctccgggcagaccaccaccaggcacaggccggcagcaggctcctcctcacctgcgcctggtcgtgttcgccggcgcccacaggtcggccccgttgctctgggtcagctgcagtgtctggtccaccggcaccaggcacagcccgcggctccggaggctgtagtgctcgggatcctggatcacatgccgaacaggatgcacgcgtgttatatatggtctcgcgctaggtttcgatgcacgagagaattcagtgcagacgagggaggacgccggcagagagctcacctcaggcgcggcgccggcagccggaggagcacgcatgtaaggggagctgaggacctgcaaaggtcggtgccattgcccgtcgtcagagagaaacgaaggagagaagcgaactgaagatgtcacgtacgtagtgccggccaccatgcgcgcggtcactggtggaacaccgacctggagctgctggtgcaggaacctgatgtaccccgaggcctcctgcagaacggaagccgtgtctgtctgcacagcaaaagcaaagcaacgcaacgagagaagcgaaacgtgtgatcatcgcagcgcttgcaattccagttgcgcggacgacgacaaaggacggaacggcagaggcagtagtgcagggtgtacagcgaaaattaaactttgggaaaataatacaataccttcccgaacggcgacactagctgctggagcgccgcgactctctcgccgatcctgtccttcttctccttgggcgatacgggcgcggttctcgggctgttgctattcctcggcctcggcttcttcgaggacatgggcatgcttcccaactcctctggcgggctcgcgcgggcggcggcgggacgtgcgattcttctcccttttccccgcttttttttccttaacccggaggacgcgccgcgaagaggagaagaaagatgctgctgtgcgggggaagagcctgcgttggggaagaattgaaggaagagacgaggctttaggcaagcagg

SEQ ID NO: 24722 - DNA, 2686 bp, Zea Mays
aagaaagataaaaaggaattatattaataataatcaagagacgactgctgtataaatagacaaagagatgagatgtgttacctagatctctatagccatcaatagatttgtaacgtgtccgaccccacttttaggtccgctcggtcgtcgtccatgaatgcagcacagttgcatcgtacagaaattaaacggcttttgttttgatttggttaaacttcgcatctaaacaccagtgtggaaagcttggtagtacactgtactgtactaccgtctccactgatcgagaaatcgaacgagtttcgtacaatgcagacgtgcagtgcagtggtcatggtaaggcccaagcccaaccatggtgggcttcggctctcgactcaacggtgcgcgagtgaggcccgtcagtacaaagtaatttctgtcattcaacttcctctaactttctcctctttacttctctgttctctcgaatgagtatagcctattagtacaaaatcatggtgcttagaccacattctctcgaatgaattctcctcgaacagtgacaacggccattcatgaattcgcaaagaaattcatgaatgaccattctgacttcagtttggactctctgcgctctcagagtcagagccccgtttttatcagaattcagaaacgaatagttaaaacttgaaggacagggagacactatttattctgtgcccaattttgcttctgtacatgttcaggagttctttttttcttgccacaatctcaaccacaggccagctttacactcaagacgtgtggcagcatgaaagatttgcacggtcataagttcacaacttcggagacgagcgcatcggcagtcattaggctctgccttgcctgaatgtgcagtttcagtttcagcagctgagagaaagagaaggatatggtgagagggcatctcaaggaacatgcattaaactgcccccatttacttgctgacaggccacagactgctagttcacaagtcagtaaacacatagttacatagtactagtaccacatggagacgcagttcagggccgcttccatctgtgtggatcagctagcaagcagatcacacatatacggcgccgacaggtcactggtataatacaaggcggctgatacggacacgcttgcttaatgcttagcttcttgttaggagatcgaattgggtcaggcgcttggaaactgtactacacgcgcaccatgcagacacagcagtagtacttgcgcggtttcctccgggcagaccaccaccaggcacaggccggcagcaggctcctcctcacctgcgcctggtcgtgttcgccggcgcccacaggtcggccccgttgctctgggtcagctgcagtgtctggtccaccggcaccaggcacagcccgcggctccggaggctgtagtgctcgggatcctggatcacatgccgaacaggatgcacgcgtgttatatatggtctcgcgctaggtttcgatgcacgagagaattcagtgcagacgagggaggacgccggcagagagctcacctcaggcgcggcgccggcagccggaggagcacgcatgtaaggggagctgaggacctggagctgctggtgcaggaacctgatgtaccccgaggcctcctgcagaacggaagccgtgtctgtctgcacagcaaaagcaaagcaacgcaacgagagaagcgaaacgtgtgatcatcgcagcgcttgcaattccagttgcgcggacgacgacaaaggacggaacggcagaggcagtagtgcagggtgtacagcgaaaattaaactttgggaaaataatacaataccttcccgaacggcgacactagctgctggagcgccgcgactctctcgccgatcctgtccttcttctccttgggcgatacgggcgcggttctcgggctgttgctattcctcggcctcggcttcttcgaggacatgggcatgcttcccaactcctctggcgggctcgcggcggcggcggcggcgacggcggctttggcactgaagtagccgtcggtgtggctccttttgctgtggttggccaccacctcggccatcatcatcttgtccaccctcgccggctcgatcggcttaccagctccgtccttgccccgcgcgtgtttcgctgctggaatccgggaggaaagcgtagcggtaagggcagaggcagaccgcagaagagaggagcctcagcctcctcctgcttggtagggtaaaagctgacttttactacagcctgtagcccgttggttcagacgtcggtttcatgggaaaatcgctgctgtcgtcgcgctccatgcatccaaaagcccggtcttgtgcgagctagctagtgtgacagcgttaaagtacttggtactatactaataacacgaatatttttttttaaaaaaaaaaagatcgacgcgacgagacgaggtcaaggatttcagtgactttagcaacctttttttttttcctgaacaggaggaacttacagtacttgtggaaaactaatggtttaaatcatcagtatgcacacgaaatgaaaaaggatctgtggcttcaccaccgtacctttggacgcgagtgcagccgtgcagggaaggtggcagccgcactaggagattctgcgcatcagaactgtcctgctagctaccgctggccccctctctcccctcactccagtgaaggccagcg

SEQ ID NO: 24723 - DNA, 2030 bp, Zea Mays
  misc_feature (2029)..(2030): n is a, c, g, or t
ttctcgcgccgcaacgcgacgcaatgccccacccgcacggtcgcgccgcgcagcgcaggaacccccaccacgcggtcggcgtcggcgtcggcggcggtgctcccgcctccccgccgtcggcgtagctcccgcgcgcttcggccctgggcgccggtgtggtttctccatcacgctctctcgcgcttcctacctgcgtgcgccctgctgcccggtgatggccagccgtctcttcgtgctccgtcggcacacgaggtggtggcagcggcaggcgccacggcctcgctcgctttgcccgccgtctcacggtggggactcggcgtcttcccatgggacgctggagctgctcgcgcgtctgcgcagctcaccatcgttttcaaccgagatgctaggttcttcaggttgttgcagagttgtagcattcaagcctgccattgtatccatacgagtccatcagtcaatagcggaaatcaggctactgcagagcctcaacaacagaatccaggagtgcctgtaccggttgatggttctagtgaactaaaacccaagaggacaaagctgaaaggaaggagggcagtgacaaattttttgaaatccttgagatggaaaaagaaaaaggagtttcaaagaatgactgcagaggagaagattttgtacaaactgaagctagctcgaaagaaggaagagcggcttgttgtggcactgaagaaaattgaaccagaggatccatcagaacctacacatgatcccgaggtgcttacacctgaagagcacttctatttcctcaagatgggccaaaaatgtaaaaattatgtgcctgttggaagacgtggaatttaccagggagtgatcttgaacatgcacttgcattggaaaaagcatcaaactctccaggtaattgtgaagacatttacaccagaggaggtcaaggaaattgccatcgagttagccacactaagtggtgggattgtgcttgacattcaagatgggaacacaattattatgtacagagggaaaaactatgcacagccaccaccagagatcatgtctccaaaagtttccctctctagaaaaaaggcactggataaatccaaatatatggaaaagctcagagctcttaggcggtacattcccagacttgagcaggagcttgaagatcttcatgcacagatgaagttagctggagagcatcaaggacaaaatgcagggaaacatgttgcttcaatttcacataatacaaacagtatgccagtgagaaaagaaccttgtggttcaattcgcaacaaaacagtatctgatctcctatcagaaactgtagagggatccaagaggttagaggatgaaagttctgcgattgaagacgactcagcttcagagtctctgtcatttacagagtctgaggatctctctgacatttttgagacagaatcagaggagcaggaagaggacaacaaggatcgccccttatatctcgataggctggataagtttccctcaggaaaaaatgataatgaaccagatgattttgaggagcatctgcggaggatcgcttcactttcagataagactgattcaccttcaaaagaactgaaagtgtcagagctcgatgagattgataaaatctttctgagagcaagttcgttgttgaagaaaaggtgacgcaaaagttcagctgatgcaagaacgatctcactggctgaaagcatggccctgccttttataattacatatgtgtccaacccaagatcaggaacgatgaagtagtcctcgtcgtcgtcgtcaggcacctccatccgtgacttcttgaacaggcgcgccccgttcgccttgtagaacccggcgttactcactggctgcggcgaggcgaagaactccgccatggcagttttagctggcgaatgggcgtggaacaggtcgatgtcctcgaaccactccagctccttgagcccaagagacgagtctttctgcaacagcaaacacaaaacagatggaaaaggaaaactgagataagaataagaacgtgaaaagcttnn

SEQ ID NO: 24724 - DNA, 1521 bp, Zea Mays
  misc_feature (1520)..(1521): n is a, c, g, or t
ttctcgcgccgcaacgcgacgcaatgccccacccgcacggtcgcgccgcgcagcgcaggaacccccaccacgcggtcggcgtcggcgtcggcggcggtgctcccgcctccccgccgtcggcgtagctcccgcgcgcttcggccctgggcgccggtgtggtttctccatcacgctctctcgcgcttcctacctgcgtgcgccctgctgcccggtgatggccagccgtctcttcgtgctccgtcggcacacgaggtggtggcagcggcaggcgccacggcctcgctcgctttgcccgccgtctcacggtggggactcggcgtcttcccatgggacgctggagctgctcgcgcgtctgcgcagctcaccatcgttttcaaccgagatgctaggttcttcaggttgttgcagagttgtagcattcaagcctgccattgtatccatacgagtccatcagtcaatagcggaaatcaggctactgcagagcctcaacaacagaatccaggagtgcctgtaccggttgatggttctagtgaactaaaacccaagaggacaaagctgaaaggaaggagggcagtgacaaattttttgaaatccttgagatggaaaaagaaaaaggagtttcaaagaatgactgcagaggagaagattttgtacaaactgaagctagctcgaaagaaggaagagcggcttgttgtggcactgaagaaaattgaaccagaggatccatcagaacctacacatgatcccgaggtgcttacacctgaagagcacttctatttcctcaagatgggccaaaaatgtaaaaattatgtgcctgttggaagacgtggaatttaccagggagtgatcttgaacatgcacttgcattggaaaaagcatcaaactctccaggtaattgtgaagacatttacaccagaggaggtcaaggaaattgccatcgagttagccacactaagtggtgggattgtgcttgacattcaagatgggaacacaattattatgtacagagggaaaaactatgcacagccaccaccagagatcatgtctccaaaagtttccctctctagaaaaaaggtgacgcaaaagttcagctgatgcaagaacgatctcactggtacgccagctgaagaacatttttaccaagtgaattcatctcatacatcaaactgacctcatttatcaggctgaaagcatggccctgccttttataattacatatgtgtccaacccaagatcaggaacgatgaagtagtcctcgtcgtcgtcgtcaggcacctccatccgtgacttcttgaacaggcgcgccccgttcgccttgtagaacccggcgttactcactggctgcggcgaggcgaagaactccgccatggcagttttagctggcgaatgggcgtggaacaggtcgatgtcctcgaaccactccagctccttgagcccaagagacgagtctttctgcaacagcaaacacaaaacagatggaaaaggaaaactgagataagaataagaacgtgaaaagcttnn

SEQ ID NO: 24725 - DNA, 2001 bp, Zea Mays
  misc_feature (2000)..(2001): n is a, c, g, or t
ttctcgcgccgcaacgcgacgcaatgccccacccgcacggtcgcgccgcgcagcgcaggaacccccaccacgcggtcggcgtcggcgtcggcggcggtgctcccgcctccccgccgtcggcgtagctcccgcgcgcttcggccctgggcgccggtgtggtttctccatcacgctctctcgcgcttcctacctgcgtgcgccctgctgcccggtgatggccagccgtctcttcgtgctccgtcggcacacgaggtggtggcagcggcaggcgccacggcctcgctcgctttgcccgccgtctcacggtggggactcggcgtcttcccatgggacgctggagctgctcgcgcgtctgcgcagctcaccatcgttgttgcagagttgtagcattcaagcctgccattgtatccatacgagtccatcagtcaatagcggaaatcaggctactgcagagcctcaacaacagaatccaggagtgcctgtaccggttgatggttctagtgaactaaaacccaagaggacaaagctgaaaggaaggagggcagtgacaaattttttgaaatccttgagatggaaaaagaaaaaggagtttcaaagaatgactgcagaggagaagattttgtacaaactgaagctagctcgaaagaaggaagagcggcttgttgtggcactgaagaaaattgaaccagaggatccatcagaacctacacatgatcccgaggtgcttacacctgaagagcacttctatttcctcaagatgggccaaaaatgtaaaaattatgtgcctgttggaagacgtggaatttaccagggagtgatcttgaacatgcacttgcattggaaaaagcatcaaactctccaggtaattgtgaagacatttacaccagaggaggtcaaggaaattgccatcgagttagccacactaagtggtgggattgtgcttgacattcaagatgggaacacaattattatgtacagagggaaaaactatgcacagccaccaccagagatcatgtctccaaaagtttccctctctagaaaaaaggcactggataaatccaaatatatggaaaagctcagagctcttaggcggtacattcccagacttgagcaggagcttgaagatcttcatgcacagatgaagttagctggagagcatcaaggacaaaatgcagggaaacatgttgcttcaatttcacataatacaaacagtatgccagtgagaaaagaaccttgtggttcaattcgcaacaaaacagtatctgatctcctatcagaaactgtagagggatccaagaggttagaggatgaaagttctgcgattgaagacgactcagcttcagagtctctgtcatttacagagtctgaggatctctctgacatttttgagacagaatcagaggagcaggaagaggacaacaaggatcgccccttatatctcgataggctggataagtttccctcaggaaaaaatgataatgaaccagatgattttgaggagcatctgcggaggatcgcttcactttcagataagactgattcaccttcaaaagaactgaaagtgtcagagctcgatgagattgataaaatctttctgagagcaagttcgttgttgaagaaaaggtgacgcaaaagttcagctgatgcaagaacgatctcactggctgaaagcatggccctgccttttataattacatatgtgtccaacccaagatcaggaacgatgaagtagtcctcgtcgtcgtcgtcaggcacctccatccgtgacttcttgaacaggcgcgccccgttcgccttgtagaacccggcgttactcactggctgcggcgaggcgaagaactccgccatggcagttttagctggcgaatgggcgtggaacaggtcgatgtcctcgaaccactccagctccttgagcccaagagacgagtctttctgcaacagcaaacacaaaacagatggaaaaggaaaactgagataagaataagaacgtgaaaagcttnn

SEQ ID NO: 24726 - DNA, 1985 bp, Zea Mays
  misc_feature (1984)..(1985): n is a, c, g, or t
ttctcgcgccgcaacgcgacgcaatgccccacccgcacggtcgcgccgcgcagcgcaggaacccccaccacgcggtcggcgtcggcgtcggcggcggtgctcccgcctccccgccgtcggcgtagctcccgcgcgcttcggccctgggcgccggtgtggtttctccatcacgctctctcgcgcttcctacctgcgtgcgccctgctgcccggtgatggccagccgtctcttcgtgctccgtcggcacacgaggtggtggcagcggcaggcgccacggcctcgctcgctttgcccgccgtctcacggtggggactcggcgtcttcccatgggacgctggagctgctcgcgcgtctgcgcagctcaccatcgttttcaaccgagatgctaggttcttcaggttgttgcagagttgtagcattcaagcctgccattgtatccatacgagtccatcagtcaatagcggaaatcaggctactgcagagcctcaacaacagaatccaggagtgcctgtaccggttgatggttctagtgaactaaaacccaagaggacaaagctgaaaggaaggagggcagtgacaaattttttgaaatccttgagatggaaaaagaaaaaggagtttcaaagaatgactgcagaggagaagattttgtacaaactgaagctagctcgaaagaaggaagagcggcttgttgtggcactgaagaaaattgaaccagaggatccatcagaacctacacatgatcccgaggtgcttacacctgaagagcacttctatttcctcaagatgggccaaaaatgtaaaaattatgtgcctgttggaagacgtggaatttaccagggagtgatcttgaacatgcacttgcattggaaaaagcatcaaactctccaggtaattgtgaagacatttacaccagaggaggtcaaggaaattgccatcgagttagccacactaagtggtgggattgtgcttgacattcaagatgggaacacaattattatgtacagagggaaaaactatgcacagccaccaccagagatcatgtctccaaaagtttccctctctagaaaaaaggcactggataaatccaaatatatggaaaagctcagagctcttaggcggtacattcccagacttgagcaggagcttgaagatcttcatgcacagatgaagttagctggagagcatcaaggacaaaatgcagggaaacatgttgcttcaatttcacataatacaaacagtatgccagtgagaaaagaaccttgtggttcaattcgcaacaaaacagtatctgatctcctatcagaaactgtagagggatccaagaggttagaggatgaaagttctgcgattgaagacgactcagcttcagagtctctgtcatttacagagtctgaggatctctctgacatttttgagacagaatcagaggagcaggaagaggacaacaaggatcgccccttatatctcgataggctggataagtttccctcaggaaaaaatgataatgaaccagatgattttgaggagcatctgcggaggatcgcttcactttcagataagactgattcaccttcaaaagaactgaaagtgtcagagctcgatgagattgataaaatctttctgagagcaagttcgttgttgaagaaaaggtgacgcaaaagttcagctgatgcaagaacgatctcactgccaagatcaggaacgatgaagtagtcctcgtcgtcgtcgtcaggcacctccatccgtgacttcttgaacaggcgcgccccgttcgccttgtagaacccggcgttactcactggctgcggcgaggcgaagaactccgccatggcagttttagctggcgaatgggcgtggaacaggtcgatgtcctcgaaccactccagctccttgagcccaagagacgagtctttctgcaacagcaaacacaaaacagatggaaaaggaaaactgagataagaataagaacgtgaaaagcttnn

SEQ ID NO: 24727 - DNA, 2321 bp, Zea Mays
  misc_feature (2320)..(2321): n is a, c, g, or t
ttctcgcgccgcaacgcgacgcaatgccccacccgcacggtcgcgccgcgcagcgcaggaacccccaccacgcggtcggcgtcggcgtcggcggcggtgctcccgcctccccgccgtcggcgtagctcccgcgcgcttcggccctgggcgccggtgtggtttctccatcacgctctctcgcgcttcctacctgcgtgcgccctgctgcccggtgatggccagccgtctcttcgtgctccgtcggcacacgaggtggtggcagcggcaggcgccacggcctcgctcgctttgcccgccgtctcacggtggggactcggcgtcttcccatgggacgctggagctgctcgcgcgtctgcgcagctcaccatcttatactttccacaaggttttcaaccgagatgctaggttcttcaggttgttgcagagttgtagcattcaagcctgccattgtatccatacgagtccatcagtcaatagcggaaatcaggctactgcagagcctcaacaacagaatccaggagtgcctgtaccggttgatggttctagtgaactaaaacccaagaggacaaagctgaaaggaaggagggcagtgacaaattttttgaaatccttgagatggaaaaagaaaaaggagtttcaaagaatgactgcagaggagaagattttgtacaaactgaagctagctcgaaagaaggaagagcggcttgttgtggcactgaagaaaattgaaccagaggatccatcagaacctacacatgatcccgaggtgcttacacctgaagagcacttctatttcctcaagatgggccaaaaatgtaaaaattatgtgcctgttggaagacgtggaatttaccagggagtgatcttgaacatgcacttgcattggaaaaagcatcaaactctccaggtaattgtgaagacatttacaccagaggaggtcaaggaaattgccatcgagttagccacactaagtggtgggattgtgcttgacattcaagatgggaacacaattattatgtacagagggaaaaactatgcacagccaccaccagagatcatgtctccaaaagtttccctctctagaaaaaagtagaatttttcaactaggcactggataaatccaaatatatggaaaagctcagagctcttaggcggtacattcccagacttgagcaggagcttgaagatcttcatgcacagatgaagttagctggagagcatcaaggacaaaatgcagggaaacatgttgcttcaatttcacataatacaaacagtatgccagtgagaaaagaaccttgtggttcaattcgcaacaaaacagtatctgatctcctatcagaaactgtagagggatccaagaggttagaggatgaaagttctgcgattgaagacgactcagcttcagagtctctgtcatttacagagtctgaggatctctctgacatttttgagacagaatcagaggagcaggaagaggacaacaaggatcgccccttatatctcgataggctggataagtttccctcaggaaaaaatgataatgaaccagatgattttgaggagcatctgcggaggatcgcttcactttcagataagactgattcaccttcaaaagaactgaaagtgtcagagctcgatgagattgataaaatctttctgagagcaagttcgttgttgaagaaaaggtgacgcaaaagttcagctgatgcaagaacgatctcactggtacgccagctgaagaacatttttaccaagtgaattcatctcatacatcaaactgacctcatttatcaggctgaaagcatggccctgccttttataattacatatgtgtccaacgtaagtgtcagtgcatcccatgatggcatacatacatattttgcgtacatacacatcacatgactggataattacatatgtccaacgtaagcgtcagtgcaccccatgatggcatacatacatattttgcatacatacacacatcacatgactggagaatcatgcagagatctctcatctcattctcagccaagatcaggaacgatgaagtagtcctcgtcgtcgtcgtcaggcacctccatccgtgacttcttgaacaggcgcgccccgttcgccttgtagaacccggcgttactcactggctgcggcgaggcgaagaactccgccatggcagttttagctggcgaatgggcgtggaacaggtcgatgtcctcgaaccactccagctccttgagcccaagagacgagtctttctgcaacagcaaacacaaaacagatggaaaaggaaaactgagataagaataagaacgtgaaaagcttnn

SEQ ID NO: 24728 - DNA, 2001 bp, Zea Mays
  misc_feature (2000)..(2001): n is a, c, g, or t
ttctcgcgccgcaacgcgacgcaatgccccacccgcacggtcgcgccgcgcagcgcaggaacccccaccacgcggtcggcgtcggcgtcggcggcggtgctcccgcctccccgccgtcggcgtagctcccgcgcgcttcggccctgggcgccggtgtggtttctccatcacgctctctcgcgcttcctacctgcgtgcgccctgctgcccggtgatggccagccgtctcttcgtgctccgtcggcacacgaggtggtggcagcggcaggcgccacggcctcgctcgctttgcccgccgtctcacggtggggactcggcgtcttcccatgggacgctggagctgctcgcgcgtctgcgcagctcaccatcttatactttccacaaggttttcaaccgagatgctaggttcttcaggttgttgcagagttgtagcattcaagcctgccattgtatccatacgagtccatcagtcaatagcggaaatcaggctactgcagagcctcaacaacagaatccaggagtgcctgtaccggttgatggttctagtgaactaaaacccaagaggacaaagctgaaaggaaggagggcagtgacaaattttttgaaatccttgagatggaaaaagaaaaaggagtttcaaagaatgactgcagaggagaagattttgtacaaactgaagctagctcgaaagaaggaagagcggcttgttgtggcactgaagaaaattgaaccagaggatccatcagaacctacacatgatcccgaggtgcttacacctgaagagcacttctatttcctcaagatgggccaaaaatgtaaaaattatgtgcctgttggaagacgtggaatttaccagggagtgatcttgaacatgcacttgcattggaaaaagcatcaaactctccaggtaattgtgaagacatttacaccagaggaggtcaaggaaattgccatcgagttagccacactaagtggtgggattgtgcttgacattcaagatgggaacacaattattatgtacagagggaaaaactatgcacagccaccaccagagatcatgtctccaaaagtttccctctctagaaaaaaggcactggataaatccaaatatatggaaaagctcagagctcttaggcggtacattcccagacttgagcaggagcttgaagatcttcatgcacagatgaagttagctggagagcatcaaggacaaaatgcagggaaacatgttgcttcaatttcacataatacaaacagtatgccagtgagaaaagaaccttgtggttcaattcgcaacaaaacagtatctgatctcctatcagaaactgtagagggatccaagaggttagaggatgaaagttctgcgattgaagacgactcagcttcagagtctctgtcatttacagagtctgaggatctctctgacatttttgagacagaatcagaggagcaggaagaggacaacaaggatcgccccttatatctcgataggctggataagtttccctcaggaaaaaatgataatgaaccagatgattttgaggagcatctgcggaggatcgcttcactttcagataagactgattcaccttcaaaagaactgaaagtgtcagagctcgatgagattgataaaatctttctgagagcaagttcgttgttgaagaaaaggtgacgcaaaagttcagctgatgcaagaacgatctcactgccaagatcaggaacgatgaagtagtcctcgtcgtcgtcgtcaggcacctccatccgtgacttcttgaacaggcgcgccccgttcgccttgtagaacccggcgttactcactggctgcggcgaggcgaagaactccgccatggcagttttagctggcgaatgggcgtggaacaggtcgatgtcctcgaaccactccagctccttgagcccaagagacgagtctttctgcaacagcaaacacaaaacagatggaaaaggaaaactgagataagaataagaacgtgaaaagcttnn

SEQ ID NO: 24729 - DNA, 2581 bp, Zea Mays
  misc_feature (2580)..(2581): n is a, c, g, or t
cacagttgaagcctctgccggaggaagcccacgcggagcgttccgatccacactggcctgggctgctaggctaggctaggctaggccaagccagacacggcccgcatctatgcttttttttacacggcccacacggccgagagcccgtggcgccgtctcgtcccgatcacgcagctatagtatagcttccccgctgcgctccagcagaattctcgcgccgcaacgcgacgcaatgccccacccgcacggtcgcgccgcgcagcgcaggaacccccaccacgcggtcggcgtcggcgtcggcggcggtgctcccgcctccccgccgtcggcgtagctcccgcgcgcttcggccctgggcgccggtgtggtttctccatcacgctctctcgcgcttcctacctgcgtgcgccctgctgcccggtgatggccagccgtctcttcgtgctccgtcggcacacgaggtggtggcagcggcaggcgccacggcctcgctcgctttgcccgccgtctcacggtggggactcggcgtcttcccatgggacgctggagctgctcgcgcgtctgcgcagctcaccatcgtaagagtcagacaaaacccactgatcctcctccccctccccctcattactactattaagtggtcgatgcagattttgtgacctcatgcctagactttgctttcggtcgctcctgtgccgttggtctgtgataaaacggtaaaagcctccacggggcatagtgtgggcatcaagtgtttgctgaaatgccggaggggaaccttcgaacacagtttattgctttcagccacgtttctacgtttgtggtctatagtttatctgtctctgcgcacccataccgacgagcgcattctgatcctcagcggtgcaccagttcattattgaagcacgtctgcagttttttttttttgcacgttctgattctgttatagttatactttccacaaggttttcaaccgagatgctaggttcttcaggttgttgcagagttgtagcattcaagcctgccattgtatccatacgagtccatcagtcaatagcggaaatcaggctactgcagagcctcaacaacagaatccaggagtgcctgtaccggttgatggttctagtgaactaaaacccaagaggacaaagctgaaaggaaggagggcagtgacaaattttttgaaatccttgagatggaaaaagaaaaaggagtttcaaagaatgactgcagaggagaagattttgtacaaactgaagctagctcgaaagaaggaagagcggcttgttgtggcactgaagaaaattgaaccagaggatccatcagaacctacacatgatcccgaggtgcttacacctgaagagcacttctatttcctcaagatgggccaaaaatgtaaaaattatgtgcctgttggaagacgtggaatttaccagggagtgatcttgaacatgcacttgcattggaaaaagcatcaaactctccaggtaattgtgaagacatttacaccagaggaggtcaaggaaattgccatcgagttagccacactaagtggtgggattgtgcttgacattcaagatgggaacacaattattatgtacagagggaaaaactatgcacagccaccaccagagatcatgtctccaaaagtttccctctctagaaaaaaggcactggataaatccaaatatatggaaaagctcagagctcttaggcggtacattcccagacttgagcaggagcttgaagatcttcatgcacagatgaagttagctggagagcatcaaggacaaaatgcagggaaacatgttgcttcaatttcacataatacaaacagtatgccagtgagaaaagaaccttgtggttcaattcgcaacaaaacagtatctgatctcctatcagaaactgtagagggatccaagaggttagaggatgaaagttctgcgattgaagacgactcagcttcagagtctctgtcatttacagagtctgaggatctctctgacatttttgagacagaatcagaggagcaggaagaggacaacaaggatcgccccttatatctcgataggctggataagtttccctcaggaaaaaatgataatgaaccagatgattttgaggagcatctgcggaggatcgcttcactttcagataagactgattcaccttcaaaagaactgaaagtgtcagagctcgatgagattgataaaatctttctgagagcaagttcgttgttgaagaaaaggtgacgcaaaagttcagctgatgcaagaacgatctcactgccaagatcaggaacgatgaagtagtcctcgtcgtcgtcgtcaggcacctccatccgtgacttcttgaacaggcgcgccccgttcgccttgtagaacccggcgttactcactggctgcggcgaggcgaagaactccgccatggcagttttagctggcgaatgggcgtggaacaggtcgatgtcctcgaaccactccagctccttgagcccaagagacgagtctttctgcaacagcaaacacaaaacagatggaaaaggaaaactgagataagaataagaacgtgaaaagcttnn

SEQ ID NO: 24730 - DNA, 2531 bp, Zea Mays
  misc_feature (2530)..(2531): n is a, c, g, or t
cacagttgaagcctctgccggaggaagcccacgcggagcgttccgatccacactggcctgggctgctaggctaggctaggctaggccaagccagacacggcccgcatctatgcttttttttacacggcccacacggccgagagcccgtggcgccgtctcgtcccgatcacgcagctatagtatagcttccccgctgcgctccagcagaattctcgcgccgcaacgcgacgcaatgccccacccgcacggtcgcgccgcgcagcgcaggaacccccaccacgcggtcggcgtcggcgtcggcggcggtgctcccgcctccccgccgtcggcgtagctcccgcgcgcttcggccctgggcgccggtgtggtttctccatcacgctctctcgcgcttcctacctgcgtgcgccctgctgcccggtgatggccagccgtctcttcgtgctccgtcggcacacgaggtggtggcagcggcaggcgccacggcctcgctcgctttgcccgccgtctcacggtggggactcggcgtcttcccatgggacgctggagctgctcgcgcgtctgcgcagctcaccatcgtaagagtcagacaaaacccactgatcctcctccccctccccctcattactactattaagtggtcgatgcagattttgtgacctcatgcctagactttgctttcggtcgctcctgtgccgttggtctgtgataaaacggtaaaagcctccacggggcatagtgtgggcatcaagtgtttgctgaaatgccggaggggaaccttcgaacacagtttattgctttcagccacgtttctacgtttgtggtctatagtttatctgtctctgcgcacccataccgacgagcgcattctgatcctcagcggtgcaccagttcattattgaagcacgtctgcagttttttttttttgcacgttctgattctgttatagttatactttccacaaggttttcaaccgagatgctaggttcttcaggttgttgcagagttgtagcattcaagcctgccattgtatccatacgagtccatcagtcaatagcggaaatcaggctactgcagagcctcaacaacagaatccaggagtgcctgtaccggttgatggttctagtgaactaaaacccaagaggacaaagctgaaaggaaggagggcagtgacaaattttttgaaatccttgagatggaaaaagaaaaaggagtttcaaagaatgactgcagaggagaagattttgtacaaactgaagctagctcgaaagaaggaagagcggcttgttgtggcactgaagaaaattgaaccagaggatccatcagaacctacacatgatcccgaggtgcttacacctgaagagcacttctatttcctcaagatgggccaaaaatgtaaaaattatgtgcctgttggaagacgtggaatttaccagggagtgatcttgaacatgcacttgcattggaaaaagcatcaaactctccaggtaattgtgaagacatttacaccagaggaggtcaaggaaattgccatcgagttagccacactaagtggtgggattgtgcttgacattcaagatgggaacacaattattatgtacagagggaaaaactatgcacagccaccaccagagatcatgtctccaaaagtttccctctctagaaaaaaggcactggataaatccaaatatatggaaaagctcagagctcttaggcggtacattcccagacttgagcaggagcttgaagatcttcatgcacagatgaagttagctggagagcatcaaggacaaaatgcagggaaacatgttgcttcaatttcacataatacaaacagtatgccagtgagaaaagaaccttgtggttcaattcgcaacaaaacagtatctgatctcctatcagaaactgtagagggatccaagagaatcagaggagcaggaagaggacaacaaggatcgccccttatatctcgataggctggataagtttccctcaggaaaaaatgataatgaaccagatgattttgaggagcatctgcggaggatcgcttcactttcagataagactgattcaccttcaaaagaactgaaagtgtcagagctcgatgagattgataaaatctttctgagagcaagttcgttgttgaagaaaaggtgacgcaaaagttcagctgatgcaagaacgatctcactggctgaaagcatggccctgccttttataattacatatgtgtccaacccaagatcaggaacgatgaagtagtcctcgtcgtcgtcgtcaggcacctccatccgtgacttcttgaacaggcgcgccccgttcgccttgtagaacccggcgttactcactggctgcggcgaggcgaagaactccgccatggcagttttagctggcgaatgggcgtggaacaggtcgatgtcctcgaaccactccagctccttgagcccaagagacgagtctttctgcaacagcaaacacaaaacagatggaaaaggaaaactgagataagaataagaacgtgaaaagcttnn

SEQ ID NO: 24731 - DNA, 1966 bp, Zea Mays
ttctcgcgccgcaacgcgacgcaatgccccacccgcacggtcgcgccgcgcagcgcaggaacccccaccacgcggtcggcgtcggcgtcggcggcggtgctcccgcctccccgccgtcggcgtagctcccgcgcgcttcggccctgggcgccggtgtggtttctccatcacgctctctcgcgcttcctacctgcgtgcgccctgctgcccggtgatggccagccgtctcttcgtgctccgtcggcacacgaggtggtggcagcggcaggcgccacggcctcgctcgctttgcccgccgtctcacggtggggactcggcgtcttcccatgggacgctggagctgctcgcgcgtctgcgcagctcaccatcagttgtagcattcaagcctgccattgtatccatacgagtccatcagtcaatagcggaaatcaggctactgcagagcctcaacaacagaatccaggagtgcctgtaccggttgatggttctagtgaactaaaacccaagaggacaaagctgaaaggaaggagggcagtgacaaattttttgaaatccttgagatggaaaaagaaaaaggagtttcaaagaatgactgcagaggagaagattttgtacaaactgaagctagctcgaaagaaggaagagcggcttgttgtggcactgaagaaaattgaaccagaggatccatcagaacctacacatgatcccgaggtgcttacacctgaagagcacttctatttcctcaagatgggccaaaaatgtaaaaattatgtgcctgttggaagacgtggaatttaccagggagtgatcttgaacatgcacttgcattggaaaaagcatcaaactctccaggtaattgtgaagacatttacaccagaggaggtcaaggaaattgccatcgagttagccacactaagtggtgggattgtgcttgacattcaagatgggaacacaattattatgtacagagggaaaaactatgcacagccaccaccagagatcatgtctccaaaagtttccctctctagaaaaaaggcactggataaatccaaatatatggaaaagctcagagctcttaggcggtacattcccagacttgagcaggagcttgaagatcttcatgcacagatgaagttagctggagagcatcaaggacaaaatgcagggaaacatgttgcttcaatttcacataatacaaacagtatgccagtgagaaaagaaccttgtggttcaattcgcaacaaaacagtatctgatctcctatcagaaactgtagagggatccaagaggttagaggatgaaagttctgcgattgaagacgactcagcttcagagtctctgtcatttacagagtctgaggatctctctgacatttttgagacagaatcagaggagcaggaagaggacaacaaggatcgccccttatatctcgataggctggataagtttccctcaggaaaaaatgataatgaaccagatgattttgaggagcatctgcggaggatcgcttcactttcagataagactgattcaccttcaaaagaactgaaagtgtcagagctcgatgagattgataaaatctttctgagagcaagttcgttgttgaagaaaaggtgaacctttgggatttgtatatgacaatcgtcatatttatatgcactgcgaaaagtattttgtgcagttttaatggcatcttcagaaaaaaagtttatgatcgtctagtgatagggccaaccctcaaagtttgtggtcaccattgttttacggtgattataatataactggaattctgtggggttgtttgaatttgttgactgataacttcgatgtgtcatacagcagattcttgttgtttcatgcttttgttgcagtttctgatgttagttgtagccatcctttgtaaaattgtaagtgctattttttttctaaaaccttgaacatatgcgactacccactcgtacaaaac

SEQ ID NO: 24732 - DNA, 2601 bp, Zea Mays
cacagttgaagcctctgccggaggaagcccacgcggagcgttccgatccacactggcctgggctgctaggctaggctaggctaggccaagccagacacggcccgcatctatgcttttttttacacggcccacacggccgagagcccgtggcgccgtctcgtcccgatcacgcagctatagtatagcttccccgctgcgctccagcagaattctcgcgccgcaacgcgacgcaatgccccacccgcacggtcgcgccgcgcagcgcaggaacccccaccacgcggtcggcgtcggcgtcggcggcggtgctcccgcctccccgccgtcggcgtagctcccgcgcgcttcggccctgggcgccggtgtggtttctccatcacgctctctcgcgcttcctacctgcgtgcgccctgctgcccggtgatggccagccgtctcttcgtgctccgtcggcacacgaggtggtggcagcggcaggcgccacggcctcgctcgctttgcccgccgtctcacggtggggactcggcgtcttcccatgggacgctggagctgctcgcgcgtctgcgcagctcaccatcgtaagagtcagacaaaacccactgatcctcctccccctccccctcattactactattaagtggtcgatgcagattttgtgacctcatgcctagactttgctttcggtcgctcctgtgccgttggtctgtgataaaacggtaaaagcctccacggggcatagtgtgggcatcaagtgtttgctgaaatgccggaggggaaccttcgaacacagtttattgctttcagccacgtttctacgtttgtggtctatagtttatctgtctctgcgcacccataccgacgagcgcattctgatcctcagcggtgcaccagttcattattgaagcacgtctgcagttttttttttttgcacgttctgattctgttatagttatactttccacaaggttttcaaccgagatgctaggttcttcaggttgttgcagagttgtagcattcaagcctgccattgtatccatacgagtccatcagtcaatagcggaaatcaggctactgcagagcctcaacaacagaatccaggagtgcctgtaccggttgatggttctagtgaactaaaacccaagaggacaaagctgaaaggaaggagggcagtgacaaattttttgaaatccttgagatggaaaaagaaaaaggagtttcaaagaatgactgcagaggagaagattttgtacaaactgaagctagctcgaaagaaggaagagcggcttgttgtggcactgaagaaaattgaaccagaggatccatcagaacctacacatgatcccgaggtgcttacacctgaagagcacttctatttcctcaagatgggccaaaaatgtaaaaattatgtgcctgttggaagacgtggaatttaccagggagtgatcttgaacatgcacttgcattggaaaaagcatcaaactctccaggtaattgtgaagacatttacaccagaggaggtcaaggaaattgccatcgagttagccacactaagtggtgggattgtgcttgacattcaagatgggaacacaattattatgtacagagggaaaaactatgcacagccaccaccagagatcatgtctccaaaagtttccctctctagaaaaaaggcactggataaatccaaatatatggaaaagctcagagctcttaggcggtacattcccagacttgagcaggagcttgaagatcttcatgcacagatgaagttagctggagagcatcaaggacaaaatgcagggaaacatgttgcttcaatttcacataatacaaacagtatgccagtgagaaaagaaccttgtggttcaattcgcaacaaaacagtatctgatctcctatcagaaactgtagagggatccaagaggttagaggatgaaagttctgcgattgaagacgactcagcttcagagtctctgtcatttacagagtctgaggatctctctgacatttttgagacagaatcagaggagcaggaagaggacaacaaggatcgccccttatatctcgataggctggataagtttccctcaggaaaaaatgataatgaaccagatgattttgaggagcatctgcggaggatcgcttcactttcagataagactgattcaccttcaaaagaactgaaagtgtcagagctcgatgagattgataaaatctttctgagagcaagttcgttgttgaagaaaaggtgaacctttgggatttgtatatgacaatcgtcatatttatatgcactgcgaaaagtattttgtgcagttttaatggcatcttcagaaaaaaagtttatgatcgtctagtgatagggccaaccctcaaagtttgtggtcaccattgttttacggtgattataatataactggaattctgtggggttgtttgaatttgttgactgataacttcgatgtgtcatacagcagattcttgttgtttcatgcttttgttgcagtttctgatgttagttgtagccatcctttgtaaaattgtaagtgctattttttttctaaaaccttgaacatatgcgactacccactcgtacaaaac

SEQ ID NO: 24733 - DNA, 4203 bp, Zea Mays
atggggcacagctctagaaagaaaaagaagcgcggcgcggccggccgcaaggcagccaaggaccacgccgcgcagctcgaaggagacgagaccgccctcgacgaggagctcacggccctggcttcaattttaggggaggacttcaaagtaacatcagaatcacctcatacacgatgccttattcggatgacatgggctttgaagatctaaatatttcagctattcttattgtgatatgttttcctggttacccccacaagtgtccaaagttgcggatcctgcctgaaaaaaacttgtctaaagaagatacagatcggctcctttcgcttcttattgaccaggcaaacatttattcccgagaaggacgtgttatgattttcaatttgtttgaggctgcgcaagagtttctatctgagattgctccagctcgtgtttcagtgagcactgcttctttcttgggtttgagctcaactactgatgacaatgtggaagttggctttgacagtgatccttacctgggaatctcttacatatataactccttcgatctatatagtcagttatatgatgatacttattggagtcgacaaggttcagatctgacaacagatagtggcaggaaaaatattgtatctcaagttcaatccaatgttagaagcaagaggaagaccatcattgaaaaatcccacatctcagctgataaggtcaataatgctaaagagtcatctggtgataaagctgaacagcaacatgccacaaagcatggtgccatacgggaggcagctccaactttacatgttgtggatgaggaaactgaaatttacggcaaaagtttgtctgctagcaatacaggaaatacatcagatactcctgaaaggggttttagcagtctaaatgaacctgaggacactgaccttgcagatgaatcttggaatgaacaagattgtgattcggacttcagctcttcaaatgcactaccttatgtttcatacatgttagatgatgcttcacgaaacaagaaaagggatttagttctggtacatctgcttcggatagcctgtgcgtcgaaggattctctttcaagtgctttgccaacaatatcagcagagttgtgcaacataggggttctttccgaatgggctaaggatttaatttctgattctcctgctgtttttggagaaactttcagtcatgtttttgggcaacaaatgatctcttcagagtgttctctattttggagacctgataattcatcatctaagccaaattctcgttatttgaatgattttgaggagctccgttcacttggtcaggggggctttggtcgtgttgcattatgcaaaaacaagctagatgggcgccaatatgctgttaaaaagatacgtctgaaggatagaagtcctcaattgaatgagaagattttaaggtactcagagaggtagccacactttcaagattgcaacatcaacatgttgtccgttattaccaggcatggattgaaactgaatacggtcatcataatattttgaatgctggcgggtcctgcactgctgagagctctatctttagttatgatgaagtcagcctatcggatgcaggtggtgggaataagcaggaatccacgtacttgtacattcaaatggagtattgtcctaggactttgcggcaggattttgagacatacatctcgtcttttgatgttgaccatgcctggcacctgtttcgacaaattgtggaaggtctagctcatgtccatagtcaaggaatcctacacagagacctgacacccagcaacatattttttgatgtccgcaatgatattaaaattggagattttggtttagccaaatttctgaagctggagcagctagatcatgaccaatatcttcctactgaagcactgggtgtatcaatggatggaacaggtcaagttggtacatatttttatactgcaccagaggtagagcagaaatggccacagattaatgaaaaggttgacatgtacagtttgggagtaatattttttgagctttggcatccatttgccacagcgatggaaaggcatcttgttctttccgatcttaagcagaagggagacccgccattgtcatgggaatcaaaatttcctcgtcagtcagtcctgttaagaagcttgctgtcaccaagcccgtctaaccgtccatctgctgtcgaggtcttgcaaaatgaactgcctcctcggatggaagatgagtggctaaatgatgtacttagaatgatacggacaccagaagacacatatgtttatgaccgggttatatctacaatatttaatgaggacaggttcgccaaaatgcaaggccaacatgatagcagcaaaaagtccactggtaacattgataacagtgaacttttggataccatcgttgaggttgccaaggaggttttcaagcggcattgtgctaaaaggttccaaatatcacctttgcatactttggagtggaattttaccaaaaacaggggaaacacagtgaaaatcttaactcaaggaggagagatgctagaactttgctatgaactgcgaacaccatttgttatgtcaattgcttctaatcagacatcatcattcaaacgttatgaaatatcatgggttcatagaagagccgttggccattcaactccttatcgttttcttcagggtgattttgacattattggcggtacttcaccgattccagaggctgaaatcatcaaggtggctttggacctggggacccgcttttatgattccaagacgctagtcatacgtctgaatcacggtaaacttgctgaagcaatttgctcttgggcaggggtttctcaggatcaaagacaaaatgttgctgagtttctgtcttcaactattgttcagtattggccaaatgaagctgaccgcaagtcacagtggagtttgattagggggcaacttttacaggatcttcgtctttctgaagaagttgttgagaagctacataaagcagatcagcggttttgtggctctgcagatctagtacttgctagattaagagggaccctgttttatgatgaatctgcttgcaaggctcttgatgatctatccgcgcttctgagatgtttgagagtatggtcggtagaacaaccaattactactattgatgtactcatgcctccgtcagaatgttactatacaaatttgtttttccaggtatactcaaaagaaggtaatcatggaccgggtttccatgaaaagttgctggcagttggtggacgatatgattggttggtggaacaagcttgggatgagacatctaaatctaaacccccaggtgctgttggtgtgagcattgcacttgagaaatttcttcctaacaatccttcatctgatctgggattgcgaaggttactgtccagggttgaacctagcatcagtgtacttgtctgttcaaggggtggtggcggtctgttgactgaacgcatggaacttgtcgcagagctttggaaagctaacataatggctcagtttgttcctcaggaagatccaagtcttcaagaacagtatgaatatgccagtgaacatgatattaaatgccttgcaattatgactgaatcaggcctgtcacaaacagaccttgtgaaggtccggcatcttgattttaaaaaggagaaggatgttgaaagagagggactaataaagttcctgtctgatgcaatgtgttcacaatacaaaaatcctacgatctggagctgaccaacggccctcccaagtgcttagtgtatttgttttcaggttctagcagagcatcaaaaaatgtgtctttcgaacttccgggtgaaagcaatgtttgctgttcgaacatgtgaaggcaatcatgcgtgttggcttccgtgcatacggtgaggcagctgttggctctctgcaggttgttgccaaacgttacgccctggtctttactgaagatgggcgccgacgtgcggtgattggccaattggtataatcctggacctcttgattgttctcctgaggaccaatgccatgcaacaaggttgcttcagacacaaggtggcgtgtagttggtgcaattctgcagttttggggctgttggtattatatggatctgaaggtactctttcgagggacttattggtgtcggttctgggggcttctccaaaggcgtgaagaaggacatcgtaaggatcaaagttgcc

SEQ ID NO: 24734 - DNA, 4210 bp, Zea Mays
cttcccgtttgtccttccggcgggcgagggtgacgcccgccacaccgcgagctccagctgctctaatcgatggggcacagctctagaaagaaaaagaagcgcggcgcggccggccgcaaggcagccaaggaccacgccgcgcagctcgaaggagacgagaccgccctcgacgaggagctcacggccctggcttcaattttaggggaggacttcaaagtaacatcagaatcacctcatacacgatgtaatatatgtattaggccttattcggatgacatgggctttgaagatctaaatatttcagctattcttattgtgatatgttttcctggttacccccacaagtgtccaaagttgcggatcctgcctgaaaaaaacttgtctaaagaagatacagatcggctcctttcgcttcttattgaccaggcaaacatttattcccgagaaggacgtgttatgattttcaatttgtttgaggctgcgcaagagtttctatctgagattgctccagctcgtgtttcagtgagcactgcttctttcttgggtttgagctcaactactgatgacaatgtggaagttggctttgacagtgatccttacctgggaatctcttacatatataactccttcgatctatatagtcagttatatgatgatacttattggagtcgacaaggttcagatctgacaacagatagtggcaggaaaaatattgtatctcaagttcaatccaatgttagaagcaagaggaagaccatcattgaaaaatcccacatctcagctgataaggtcaataatgctaaagagtcatctggtgataaagctgaacagcaacatgccacaaagcatggtgccatacgggaggcagctccaactttacatgttgtggatgaggaaactgaaatttacggcaaaagtttgtctgctagcaatacaggaaatacatcagatactcctgaaaggggttttagcagtctaaatgaacctgaggacactgaccttgcagatgaatcttggaatgaacaagattgtgattcggacttcagctcttcaaatgcactaccttatgtttcatacatgttagatgatgcttcacgaaacaagaaaagggatttagttctggtacatctgcttcggatagcctgtgcgtcgaaggattctctttcaagtgctttgccaacaatatcagcagagttgtgcaacataggggttctttccgaatgggctaaggatttaatttctgattctcctgctgtttttggagaaactttcagtcatgtttttgggcaacaaatgatctcttcagagtgttctctattttggagacctgataattcatcatctaagccaaattctcgttatttgaatgattttgaggagctccgttcacttggggggctttggtcgtgttgcattatgcaaaaacaagctagatgggcgccaatatgctgttaaaaagatacgtctgaaggatagaagtcctcaattgaatgagaagattttaaggtactcagagaggtagccacactttcaagattgcaacatcaacatgttgtccgttattaccaggcatggattgaaactgaatacggtcatcataatattttgaatgctggcgggtcctgcactgctgagagctctatctttagttatgatgaagtcagcctatcggatgcaggtggtgggaataagcaggaatccacgtacttgtacattcaaatggagtattgtcctaggactttgcggcaggattttgagacatacatctcgtcttttgatgttgaccatgcctggcacctgtttcgacaaattgtggaaggtctagctcatgtccatagtcaaggaatcctacacagagacctgacacccagcaacatattttttgatgtccgcaatgatattaaaattggagattttggtttagccaaatttctgaagctggagcagctagatcatgaccaatatcttcctactgaagcactgggtgtatcaatggatggaacaggtcaagttggtacatatttttatactgcaccagaggtagagcagaaatggccacagattaatgaaaaggttgacatgtacagtttgggagtaatattttttgagctttggcatccatttgccacagcgatggaaaggcatcttgttctttccgatcttaagcagaagggagacccgccattgtcatgggaatcaaaatttcctcgtcagtcagtcctgttaagaagcttgctgtcaccaagcccgtctaaccgtccatctgctgtcgaggtcttgcaaaatgaactgcctcctcggatggaagatgagtggctaaatgatgtacttagaatgatacggacaccagaagacacatatgtttatgaccgggttatatctacaatatttaatgaggacaggttcgccaaaatgcaaggccaacatgatagcagcaaaaagtccactggtaacattgataacagtgaacttttggataccatcgttgaggttgccaaggaggttttcaagcggcattgtgctaaaaggttccaaatatcacctttgcatactttggagtggaattttaccaaaaacaggacggaggatgtagtactttgcaattttgcaggggaaacacagtgaaaatcttaactcaaggaggagagatgctagaactttgctatgaactgcgaacaccatttgttatgtcaattgcttctaatcagacatcatcattcaaacgttatgaaatatcatgggttcatagaagagccgttggccattcaactccttatcgttttcttcagggtgattttgacattattggcggtacttcaccgattccagaggctgaaatcatcaaggtggctttggacctggggacccgcttttatgattccaagacgctagtcatacgtctgaatcacggtaaacttgctgaagcaatttgctcttgggcaggggtttctcaggatcaaagacaaaatgttgctgagtttctgtcttcaactattgttcagtattggccaaatgaagctgaccgcaagtcacagtggagtttgattagggggcaacttttacaggatcttcgtctttctgaagaagttgttgagaagctacataaagcagatcagcggttttgtggctctgcagatctagtacttgctagattaagagggaccctgttttatgatgaatctgcttgcaaggctcttgatgatctatccgcgcttctgagatgtttgagagtatggtcggtagaacaaccaattactactattgatgtactcatgcctccgtcagaatgttactatacaaatttgtttttccagaaatctaaacccccaggtgctgttggtgtgagcattgcacttgagaaatttcttcctaacaatccttcatctgatctgggattgcgaaggttactgtccagggttgaacctagcatcagtgtacttgtctgttcaaggggtggtggcggtctgttgactgaacgcatggaacttgtcgcagagctttggaaagctaacataatggctcagtttgttcctcaggaagatccaagtcttcaagaacagtatgaatatgccagtgaacatgatattaaatgccttgcaattatgactgaatcaggcctgtcacaaacagaccttgtgaaggtccggcatcttgattttaaaaaggagaaggatgttgaaagagagggactaataaagttcctgtctgatgcaatgtgttcacaatacaaaaatcctacgatctggagctgaccaacggccctcccaagtgcttagtgtatttgttttcaggttctagcagagcatcaaaaaatgtgtctttcgaacttccgggtgaaagcaatgtttgctgttcgaacatgtgaaggcaatcatgcgtgttggcttccgtgcatacggtgaggcagctgttggctctctgcaggttgttgccaaacgttacgccctggtctttactgaagatgggcgccgacgtgcggtgattggccaattggtataatcctggacctcttgattgttctcctgaggaccaatgccatgcaacaaggttgcttcagacacaaggtggcgtgtagttggtgcaattctgcagttttggggctgttggtattatatggatctgaaggtactctttcgagggacttattggtgtcggttctgggggcttctccaaaggcgtgaagaaggacatcgtaaggatcaaagttgcc

SEQ ID NO: 24735 - DNA, 4329 bp, Zea Mays
gccagcgcagatctcccttcccgtttgtccttccggcgggcgagggtgacgcccgccacaccgcgagctccagctgctctaatcgatggggcacagctctagaaagaaaaagaagcgcggcgcggccggccgcaaggcagccaaggaccacgccgcgcagctcgaaggagacgagaccgccctcgacgaggagctcacggccctggcttcaattttaggggaggacttcaaagtaacatcagaatcacctcatacacgatgtaatatatgtattaggccttattcggatgacatgggctttgaagatctaaatatttcagctattcttattgtgatatgttttcctggttacccccacaagtgtccaaagttgcggatcctgcctgaaaaaaacttgtctaaagaagatacagatcggctcctttcgcttcttattgaccaggcaaacatttattcccgagaaggacgtgttatgattttcaatttgtttgaggctgcgcaagagtttctatctgagattgctccagctcgtgtttcagtgagcactgcttctttcttgggtttgagctcaactactgatgacaatgtggaagttggctttgacagtgatccttacctgggaatctcttacatatataactccttcgatctatatagtcagttatatgatgatacttattggagtcgacaaggttcagatctgacaacagatagtggcaggaaaaatattgtatctcaagttcaatccaatgttagaagcaagaggaagaccatcattgaaaaatcccacatctcagctgataaggtcaataatgctaaagagtcatctggtgataaagctgaacagcaacatgccacaaagcatggtgccatacgggaggcagctccaactttacatgttgtggatgaggaaactgaaatttacggcaaaagtttgtctgctagcaatacaggaaatacatcagatactcctgaaaggggttttagcagtctaaatgaacctgaggacactgaccttgcagatgaatcttggaatgaacaagattgtgattcggacttcagctcttcaaatgcactaccttatgtttcatacatgttagatgatgcttcacgaaacaagaaaagggatttagttctggtacatctgcttcggatagcctgtgcgtcgaaggattctctttcaagtgctttgccaacaatatcagcagagttgtgcaacataggggttctttccgaatgggctaaggatttaatttctgattctcctgctgtttttggagaaactttcagtcatgtttttgggcaacaaatgatctcttcagagtgttctctattttggagacctgataattcatcatctaagccaaattctcgttatttgaatgattttgaggagctccgttcacttggtcaggggggctttggtcgtgttgcattatgcaaaaacaagctagatgggcgccaatatgctgttaaaaagatacgtctgaaggatagaagtcctcaattgaatgagaagattttaaggtactcagagaggtagccacactttcaagattgcaacatcaacatgttgtccgttattaccaggcatggattgaaactgaatacggtcatcataatattttgaatgctggcgggtcctgcactgctgagagctctatctttagttatgatgaagtcagcctatcggatgcaggtggtgggaataagcaggaatccacgtacttgtacattcaaatggagtattgtcctaggactttgcggcaggattttgagacatacatctcgtcttttgatgttgaccatgcctggcacctgtttcgacaaattgtggaaggtctagctcatgtccatagtcaaggaatcctacacagagacctgacacccagcaacatattttttgatgtccgcaatgatattaaaattggagattttggtttagccaaatttctgaagctggagcagctagatcatgaccaatatcttcctactgaagcactgggtgtatcaatggatggaacaggtcaagttggtacatatttttatactgcaccagaggtagagcagaaatggccacagattaatgaaaaggttgacatgtacagtttgggagtaatattttttgagctttggcatccatttgccacagcgatggaaaggcatcttgttctttccgatcttaagcagaagggagacccgccattgtcatgggaatcaaaatttcctcgtcagtcagtcctgttaagaagcttgctgtcaccaagcccgtctaaccgtccatctgctgtcgaggtcttgcaaaatgaactgcctcctcggatggaagatgagtggctaaatgatgtacttagaatgatacggacaccagaagacacatatgtttatgaccgggttatatctacaatatttaatgaggacaggttcgccaaaatgcaaggccaacatgatagcagcaaaaagtccactggtaacattgataacagtgaacttttggataccatcgttgaggttgccaaggaggttttcaagcggcattgtgctaaaaggttccaaatatcacctttgcatactttggagtggaattttaccaaaaacaggggaaacacagtgaaaatcttaactcaaggaggagagatgctagaactttgctatgaactgcgaacaccatttgttatgtcaattgcttctaatcagacatcatcattcaaacgttatgaaatatcatgggttcatagaagagccgttggccattcaactccttatcgttttcttcagggtgattttgacattattggcggtacttcaccgattccagaggctgaaatcatcaaggtggctttggacctggggacccgcttttatgattccaagacgctagtcatacgtctgaatcacggtaaacttgctgaagcaatttgctcttgggcaggggtttctcaggatcaaagacaaaatgttgctgagtttctgtcttcaactattgttcagtattggccaaatgaagctgaccgcaagtcacagtggagtttgattagggggcaacttttacaggatcttcgtctttctgaagaagttgttgagaagctacataaagcagatcagcggttttgtggctctgcagatctagtacttgctagattaagagggaccctgttttatgatgaatctgcttgcaaggctcttgatgatctatccgcgcttctgagatgtttgagagtatggtcggtagaacaaccaattactactattgatgtactcatgcctccgtcagaatgttactatacaaatttgtttttccaggtatactcaaaagaaggtaatcatggaccgggtttccatgaaaagttgctggcagttggtggacgatatgattggttggtggaacaagcttgggatgagacatctaaatctaaacccccaggtgctgttggtgtgagcattgcacttgagaaatttcttcctaacaatccttcatctgatctgggattgcgaaggttactgtccagggttgaacctagcatcagtgtacttgtctgttcaaggggtggtggcggtctgttgactgaacgcatggaacttgtcgcagagctttggaaagctaacataatggctcagtttgttcctcaggaagatccaagtcttcaagaacagtatgaatatgccagtgaacatgatattaaatgccttgcaattatgactgaatcaggcctgtcacaaacagaccttgtgaaggtccggcatcttgattttaaaaaggagaaggatgttgaaagagagggactaataaagttcctgtctgatgcaatgtgttcacaatacaaaaatcctacgatctggagctgaccaacggccctcccaagtgcttagtgtatttgttttcaggttctagcagagcatcaaaaaatgaatgagcctggtttgtggttaacagtgtctttcgaacttccgggtgaaagcaatgtttgctgttcgaacatgtgaaggcaatcatgcgtgttggcttccgtgcatacggtgaggcagctgttggctctctgcaggttgttgccaaacgttacgccctggtctttactgaagatgggcgccgacgtgcggtgattggccaattggtataatcctggacctcttgattgttctcctgaggaccaatgccatgcaacaaggttgcttcagacacaaggtggcgtgtagttggtgcaattctgcagttttggggctgttggtattatatggatctgaaggtactctttcgagggacttattggtgtcggttctgggggcttctccaaaggcgtgaagaaggacatcgtaaggatcaaagttgcc

SEQ ID NO: 24736 - DNA, 4291 bp, Zea Mays
ccacgccagacgccagcgcagatctcccttcccgtttgtccttccggcgggcgagggtgacgcccgccacaccgcgagctccagctgctctaatcgatggggcacagctctagaaagaaaaagaagcgcggcgcggccggccgcaaggcagccaaggaccacgccgcgcagctcgaaggagacgagaccgccctcgacgaggagctcacggccctggcttcaattttaggggaggacttcaaagtaacatcagaatcacctcatacacgatgtaatatatgtattaggccttattcggatgacatgggctttgaagatctaaatatttcagctattcttattgtgatatgttttcctggttacccccacaagtgtccaaagttgcggatcctgcctgaaaaaaacttgtctaaagaagatacagatcggctcctttcgcttcttattgaccaggcaaacatttattcccgagaaggacgtgttatgattttcaatttgtttgaggctgcgcaagagtttctatctgagattgctccagctcgtgtttcagtgagcactgcttctttcttgggtttgagctcaactactgatgacaatgtggaagttggctttgacagtgatccttacctgggaatctcttacatatataactccttcgatctatatagtcagttatatgatgatacttattggagtcgacaaggttcagatctgacaacagatagtggcaggaaaaatattgtatctcaagttcaatccaatgttagaagcaagaggaagaccatcattgaaaaatcccacatctcagctgataaggtcaataatgctaaagagtcatctggtgataaagctgaacagcaacatgccacaaagcatggtgccatacgggaggcagctccaactttacatgttgtggatgaggaaactgaaatttacggcaaaagtttgtctgctagcaatacaggaaatacatcagatactcctgaaaggggttttagcagtctaaatgaacctgaggacactgaccttgcagatgaatcttggaatgaacaagattgtgattcggacttcagctcttcaaatgcactaccttatgtttcatacatgttagatgatgcttcacgaaacaagaaaagggatttagttctggtacatctgcttcggatagcctgtgcgtcgaaggattctctttcaagtgctttgccaacaatatcagcagagttgtgcaacataggggttctttccgaatgggctaaggatttaatttctgattctcctgctgtttttggagaaactttcagtcatgtttttgggcaacaaatgatctcttcagagtgttctctattttggagacctgataattcatcatctaagccaaattctcgttatttgaatgattttgaggagctccgttcacttggtcaggggggctttggtcgtgttgcattatgcaaaaacaagctagatgggcgccaatatgctgttaaaaagatacgtctgaaggatagaagtcctcaattgaatgagaagattttaagagaggtagccacactttcaagattgcaacatcaacatgttgtccgttattaccaggcatggattgaaactgaatacggtcatcataatattttgaatgctggcgggtcctgcactgctgagagctctatctttagttatgatgaagtcagcctatcggatgcaggtggtgggaataagcaggaatccacgtacttgtacattcaaatggagtattgtcctaggactttgcggcaggattttgagacatacatctcgtcttttgatgttgaccatgcctggcacctgtttcgacaaattgtggaaggtctagctcatgtccatagtcaaggaatcctacacagagacctgacacccagcaacatattttttgatgtccgcaatgatattaaaattggagattttggtttagccaaatttctgaagctggagcagctagatcatgaccaatatcttcctactgaagcactgggtgtatcaatggatggaacaggtcaagttggtacatatttttatactgcaccagaggtagagcagaaatggccacagattaatgaaaaggttgacatgtacagtttgggagtaatattttttgagctttggcatccatttgccacagcgatggaaaggcatcttgttctttccgatcttaagcagaagggagacccgccattgtcatgggaatcaaaatttcctcgtcagtcagtcctgttaagaagcttgctgtcaccaagcccgtctaaccgtccatctgctgtcgaggtcttgcaaaatgaactgcctcctcggatggaagatgagtggctaaatgatgtacttagaatgatacggacaccagaagacacatatgtttatgaccgggttatatctacaatatttaatgaggacaggttcgccaaaatgcaaggccaacatgatagcagcaaaaagtccactggtaacattgataacagtgaacttttggataccatcgttgaggttgccaaggaggttttcaagcggcattgtgctaaaaggttccaaatatcacctttgcatactttggagtggaattttaccaaaaacaggggaaacacagtgaaaatcttaactcaaggaggagagatgctagaactttgctatgaactgcgaacaccatttgttatgtcaattgcttctaatcagacatcatcattcaaacgttatgaaatatcatgggttcatagaagagccgttggccattcaactccttatcgttttcttcagggtgattttgacattattggcggtacttcaccgattccagaggctgaaatcatcaaggtggctttggacctggggacccgcttttatgattccaagacgctagtcatacgtctgaatcacggtaaacttgctgaagcaatttgctcttgggcaggggtttctcaggatcaaagacaaaatgttgctgagtttctgtcttcaactattgttcagtattggccaaatgaagctgaccgcaagtcacagtggagtttgattagggggcaacttttacaggatcttcgtctttctgaagaagttgttgagaagctacataaagcagatcagcggttttgtggctctgcagatctagtacttgctagattaagagggaccctgttttatgatgaatctgcttgcaaggctcttgatgatctatccgcgcttctgagatgtttgagagtatggtcggtagaacaaccaattactactattgatgtactcatgcctccgtcagaatgttactatacaaatttgtttttccaggtatactcaaaagaaggtaatcatggaccgggtttccatgaaaagttgctggcagttggtggacgatatgattggttggtggaacaagcttgggatgagacatctgtgctgttggtgtgagcattgcacttgagaaatttcttcctaacaatccttcatctgatctgggattgcgaaggttactgtccagggttgaacctagcatcagtgtacttgtctgttcaaggggtggtggcggtctgttgactgaacgcatggaacttgtcgcagagctttggaaagctaacataatggctcagtttgttcctcaggaagatccaagtcttcaagaacagtatgaatatgccagtgaacatgatattaaatgccttgcaattatgactgaatcaggcctgtcacaaacagaccttgtgaaggtccggcatcttgattttaaaaaggagaaggatgttgaaagagagggactaataaagttcctgtctgatgcaatgtgttcacaatacaaaaatcctacgatctggagctgaccaacggccctcccaagtgcttagtgtatttgttttcaggttctagcagagcatcaaaaaatgtgtctttcgaacttccgggtgaaagcaatgtttgctgttcgaacatgtgaaggcaatcatgcgtgttggcttccgtgcatacggtgaggcagctgttggctctctgcaggttgttgccaaacgttacgccctggtctttactgaagatgggcgccgacgtgcggtgattggccaattggtataatcctggacctcttgattgttctcctgaggaccaatgccatgcaacaaggttgcttcagacacaaggtggcgtgtagttggtgcaattctgcagttttggggctgttggtattatatggatctgaaggtactctttcgagggacttattggtgtcggttctgggggcttctccaaaggcgtgaagaaggacatcgtaaggatcaaagttgcc

SEQ ID NO: 24737 - DNA, 4216 bp, Zea Mays
ctctgcccgacgccatcgccacgccagacgccagcgcagatctcccttcccgtttgtccttccggcgggcgagggtgacgcccgccacaccgcgagctccagctgctctaatcgatggggcacagctctagaaagaaaaagaagcgcggcgcggccggccgcaaggcagccaaggaccacgccgcgcagctcgaaggagacgagaccgccctcgacgaggagctcacggccctggcttcaattttaggggaggacttcaaagtaacatcagaatcacctcatacacgatgtaatatatgtattaggccttattcggatgacatgggctttgaagatctaaatatttcagctattcttattgtgatatgttttcctggttacccccacaagtgtccaaagttgcggatcctgcctgaaaaaaacttgtctaaagaagatacagatcggctcctttcgcttcttattgaccaggcaaacatttattcccgagaaggacgtgttatgattttcaatttgtttgaggctgcgcaagagtttctatctgagattgctccagctcgtgtttcagtgagcactgcttctttcttgggtttgagctcaactactgatgacaatgtggaagttggctttgacagtgatccttacctgggaatctcttacatatataactccttcgatctatatagtcagttatatgatgatacttattggagtcgacaaggttcagatctgacaacagatagtggcaggaaaaatattgtatctcaagttcaatccaatgttagaagcaagaggaagaccatcattgaaaaatcccacatctcagctgataaggtcaataatgctaaagagtcatctggtgataaagctgaacagcaacatgccacaaagcatggtgccatacgggaggcagctccaactttacatgttgtggatgaggaaactgaaatttacggcaaaagtttgtctgctagcaatacaggaaatacatcagatactcctgaaaggggttttagcagtctaaatgaacctgaggacactgaccttgcagatgaatcttggaatgaacaagattgtgattcggacttcagctcttcaaatgcactaccttatgtttcatacatgttagatgatgcttcacgaaacaagaaaagggatttagttctggtacatctgcttcggatagcctgtgcgtcgaaggattctctttcaagtgctttgccaacaatatcagcagagttgtgcaacataggggttctttccgaatgggctaaggatttaatttctgattctcctgctgtttttggagaaactttcagtcatgtttttgggcaacaaatgatctcttcagagtgttctctattttggagacctgataattcatcatctaagccaaattctcgttatttgaatgattttgaggagctccgttcacttggtcaggggggctttggtcgtgttgcattatgcaaaaacaagctagatgggcgccaatatgctgttaaaaagatacgtctgaaggatagaagtcctcaattgaatgagaagattttaagagaggtagccacactttcaagattgcaacatcaacatgttgtccgttattaccaggcatggattgaaactgaatacggtcatcataatattttgaatgctggcgggtcctgcactgctgagagctctatctttagttatgatgaagtcagcctatcggatgcaggtggtgggaataagcaggaatccacgtacttgtacattcaaatggagtattgtcctaggactttgcggcaggattttgagacatacatctcgtcttttgatgttgaccatgcctggcacctgtttcgacaaattgtggaaggtctagctcatgtccatagtcaaggaatcctacacagagacctgacacccagcaacatattttttgatgtccgcaatgatattaaaattggagattttggtttagccaaatttctgaagctggagcagctagatcatgaccaatatcttcctactgaagcactgggtgtatcaatggatggaacaggtcaagttggtacatatttttatactgcaccagaggtagagcagaaatggccacagattaatgaaaaggttgacatgtacagtttgggagtaatattttttgagctttggcatccatttgccacagcgatggaaaggcatcttgttctttccgatcttaagcagaagggagacccgccattgtcatgggaatcaaaatttcctcgtcagtcagtcctgttaagaagcttgctgtcaccaagcccgtctaaccgtccatctgctgtcgaggtcttgcaaaatgaactgcctcctcggatggaagatgagtggctaaatgatgtacttagaatgatacggacaccagaagacacatatgtttatgaccgggttatatctacaatatttaatgaggacaggttcgccaaaatgcaaggccaacatgatagcagcaaaaagtccactggtaacattgataacagtgaacttttggataccatcgttgaggttgccaaggaggttttcaagcggcattgtgctaaaaggttccaaatatcacctttgcatactttggagtggaattttaccaaaaacaggggaaacacagtgaaaatcttaactcaaggaggagagatgctagaactttgctatgaactgcgaacaccatttgttatgtcaattgcttctaatcagacatcatcattcaaacgttatgaaatatcatgggttcatagaagagccgttggccattcaactccttatcgttttcttcagggtgattttgacattattggcggtacttcaccgattccagaggctgaaatcatcaaggtggctttggacctggggacccgcttttatgattccaagacgctagtcatacgtctgaatcacggtaaacttgctgaagcaatttgctcttgggcaggggtttctcaggatcaaagacaaaatgttgctgagtttctgtcttcaactattgttcagtattggccaaatgaagctgaccgcaagtcacagtggagtttgattagggggcaacttttacaggatcttcgtctttctgaagaagttgttgagaagctacataaagcagatcagcggttttgtggctctgcagatctagtacttgctagattaagagggaccctgttttatgatgaatctgcttgcaaggctcttgatgatctatccgcgcttctgagatgtttgagagtatggtcggtagaacaaccaattactactattgatgtactcatgcctccgtcagaatgttactatacaaatttgtttttccaggtatactcaaaagaaggtaatcatggaccgggtttccatgaaaagttgctggcagttggtggacgatatgattggttggtggaacaagcttgggatgagacatctaaatctaaacccccaggtgctgttggtgtgagcattgcacttgagaaatttcttcctaacaatccttcatctgatctgggattgcgaaggttactgtccagggttgaacctagcatcagtgtacttgtctgttcaaggggtggtggcggtctgttgactgaacgcatggaacttgtcgcagagctttggaaagctaacataatggctcagtttgttcctcaggaagatccaagtcttcaagaacagtatgaatatgccagtgaacatgatattaaatgccttgcaattatgactgaatcaggcctgtcacaaacagaccttgtgaaggtccggcatcttgattttaaaaaggagaaggatgttgaaagagagggactaataaagttcctgtctgatgcaatgtgttcacaatacaaaaatcctacgatctggagctgaccaacggccctcccaagtgcttagtgtatttgttttcaggttctagcagagcatcaaaaaatggttgttgccaaacgttacgccctggtctttactgaagatgggcgccgacgtgcggtgattggccaattggtataatcctggacctcttgattgttctcctgaggaccaatgccatgcaacaaggttgcttcagacacaaggtggcgtgtagttggtgcaattctgcagttttggggctgttggtattatatggatctgaaggtactctttcgagggacttattggtgtcggttctgggggcttctccaaaggcgtgaagaaggacatcgtaaggatcaaagttgcc

SEQ ID NO: 24738 - DNA, 4338 bp, Zea Mays
caaagccgcgcctctgcggctctgcccgacgccatcgccacgccagacgccagcgcagatctcccttcccgtttgtccttccggcgggcgagggtgacgcccgccacaccgcgagctccagctgctctaatcgatggggcacagctctagaaagaaaaagaagcgcggcgcggccggccgcaaggcagccaaggaccacgccgcgcagctcgaaggagacgagaccgccctcgacgaggagctcacggccctggcttcaattttaggggaggacttcaaagtaacatcagaatcacctcatacacgatgtaatatatgtattaggccttattcggatgacatgggctttgaagatctaaatatttcagctattcttattgtgatatgttttcctggttacccccacaagtgtccaaagttgcggatcctgcctgaaaaaaacttgtctaaagaagatacagatcggctcctttcgcttcttattgaccaggcaaacatttattcccgagaaggacgtgttatgattttcaatttgtttgaggctgcgcaagagtttctatctgagattgctccagctcgtgtttcagtgagcactgcttctttcttgggtttgagctcaactactgatgacaatgtggaagttggctttgacagtgatccttacctgggaatctcttacatatataactccttcgatctatatagtcagttatatgatgatacttattggagtcgacaaggttcagatctgacaacagatagtggcaggaaaaatattgtatctcaagttcaatccaatgttagaagcaagaggaagaccatcattgaaaaatcccacatctcagctgataaggtcaataatgctaaagagtcatctggtgataaagctgaacagcaacatgccacaaagcatggtgccatacgggaggcagctccaactttacatgttgtggatgaggaaactgaaatttacggcaaaagtttgtctgctagcaatacaggaaatacatcagatactcctgaaaggggttttagcagtctaaatgaacctgaggacactgaccttgcagatgaatcttggaatgaacaagattgtgattcggacttcagctcttcaaatgcactaccttatgtttcatacatgttagatgatgcttcacgaaacaagaaaagggatttagttctggtacatctgcttcggatagcctgtgcgtcgaaggattctctttcaagtgctttgccaacaatatcagcagagttgtgcaacataggggttctttccgaatgggctaaggatttaatttctgattctcctgctgtttttggagaaactttcagtcatgtttttgggcaacaaatgatctcttcagagtgttctctattttggagacctgataattcatcatctaagccaaattctcgttatttgaatgattttgaggagctccgttcacttggtcaggggggctttggtcgtgttgcattatgcaaaaacaagctagatgggcgccaatatgctgttaaaaagatacgtctgaaggatagaagtcctcaattgaatgagaagattttaaggtactcagagaggtagccacactttcaagattgcaacatcaacatgttgtccgttattaccaggcatggattgaaactgaatacggtcatcataatattttgaatgctggcgggtcctgcactgctgagagctctatctttagttatgatgaagtcagcctatcggatgcaggtggtgggaataagcaggaatccacgtacttgtacattcaaatggagtattgtcctaggactttgcggcaggattttgagacatacatctcgtcttttgatgttgaccatgcctggcacctgtttcgacaaattgtggaaggtctagctcatgtccatagtcaaggaatcctacacagagacctgacacccagcaacatattttttgatgtccgcaatgatattaaaattggagattttggtttagccaaatttctgaagctggagcagctagatcatgaccaatatcttcctactgaagcactgggtgtatcaatggatggaacaggtcaagttggtacatatttttatactgcaccagaggtagagcagaaatggccacagattaatgaaaagtttgggagtaatattttttgagctttggcatccatttgccacagcgatggaaaggcatcttgttctttccgatcttaagcagaagggagacccgccattgtcatgggaatcaaaatttcctcgtcagtcagtcctgttaagaagcttgctgtcaccaagcccgtctaaccgtccatctgctgtcgaggtcttgcaaaatgaactgcctcctcggatggaagatgagtggctaaatgatgtacttagaatgatacggacaccagaagacacatatgtttatgaccgggttatatctacaatatttaatgaggacaggttcgccaaaatgcaaggccaacatgatagcagcaaaaagtccactggtaacattgataacagtgaacttttggataccatcgttgaggttgccaaggaggttttcaagcggcattgtgctaaaaggttccaaatatcacctttgcatactttggagtggaattttaccaaaaacaggggaaacacagtgaaaatcttaactcaaggaggagagatgctagaactttgctatgaactgcgaacaccatttgttatgtcaattgcttctaatcagacatcatcattcaaacgttatgaaatatcatgggttcatagaagagccgttggccattcaactccttatcgttttcttcagggtgattttgacattattggcggtacttcaccgattccagaggctgaaatcatcaaggtggctttggacctggggacccgcttttatgattccaagacgctagtcatacgtctgaatcacggtaaacttgctgaagcaatttgctcttgggcaggggtttctcaggatcaaagacaaaatgttgctgagtttctgtcttcaactattgttcagtattggccaaatgaagctgaccgcaagtcacagtggagtttgattagggggcaacttttacaggatcttcgtctttctgaagaagttgttgagaagctacataaagcagatcagcggttttgtggctctgcagatctagtacttgctagattaagagggaccctgttttatgatgaatctgcttgcaaggctcttgatgatctatccgcgcttctgagatgtttgagagtatggtcggtagaacaaccaattactactattgatgtactcatgcctccgtcagaatgttactatacaaatttgtttttccaggtatactcaaaagaaggtaatcatggaccgggtttccatgaaaagttgctggcagttggtggacgatatgattggttggtggaacaagcttgggatgagacatctaaatctaaacccccaggtgctgttggtgtgagcattgcacttgagaaatttcttcctaacaatccttcatctgatctgggattgcgaaggttactgtccagggttgaacctagcatcagtgtacttgtctgttcaaggggtggtggcggtctgttgactgaacgcatggaacttgtcgcagagctttggaaagctaacataatggctcagtttgttcctcaggaagatccaagtcttcaagaacagtatgaatatgccagtgaacatgatattaaatgccttgcaattatgactgaatcaggcctgtcacaaacagaccttgtgaaggtccggcatcttgattttaaaaaggagaaggatgttgaaagagagggactaataaagttcctgtctgatgcaatgtgttcacaatacaaaaatcctacgatctggagctgaccaacggccctcccaagtgcttagtgtatttgttttcaggttctagcagagcatcaaaaaatgtgtctttcgaacttccgggtgaaagcaatgtttgctgttcgaacatgtgaaggcaatcatgcgtgttggcttccgtgcatacggtgaggcagctgttggctctctgcaggttgttgccaaacgttacgccctggtctttactgaagatgggcgccgacgtgcggtgattggccaattggtataatcctggacctcttgattgttctcctgaggaccaatgccatgcaacaaggttgcttcagacacaaggtggcgtgtagttggtgcaattctgcagttttggggctgttggtattatatggatctgaaggtactctttcgagggacttattggtgtcggttctgggggcttctccaaaggcgtgaagaaggacatcgtaaggatcaaagttgcc

SEQ ID NO: 24739 - DNA, 4332 bp, Zea Mays
caaagccgcgcctctgcggctctgcccgacgccatcgccacgccagacgccagcgcagatctcccttcccgtttgtccttccggcgggcgagggtgacgcccgccacaccgcgagctccagctgctctaatcgatggggcacagctctagaaagaaaaagaagcgcggcgcggccggccgcaaggcagccaaggaccacgccgcgcagctcgaaggagacgagaccgccctcgacgaggagctcacggccctggcttcaattttaggggaggacttcaaagtaacatcagaatcacctcatacacgatgtaatatatgtattaggccttattcggatgacatgggctttgaagatctaaatatttcagctattcttattgtgatatgttttcctggttacccccacaagtgtccaaagttgcggatcctgcctgaaaaaaacttgtctaaagaagatacagatcggctcctttcgcttcttattgaccaggcaaacatttattcccgagaaggacgtgttatgattttcaatttgtttgaggctgcgcaagagtttctatctgagattgctccagctcgtgtttcagtgagcactgcttctttcttgggtttgagctcaactactgatgacaatgtggaagttggctttgacagtgatccttacctgggaatctcttacatatataactccttcgatctatatagtcagttatatgatgatacttattggagtcgacaaggttcagatctgacaacagatagtggcaggaaaaatattgtatctcaagttcaatccaatgttagaagcaagaggaagaccatcattgaaaaatcccacatctcagctgataaggtcaataatgctaaagagtcatctggtgataaagctgaacagcaacatgccacaaagcatggtgccatacgggaggcagctccaactttacatgttgtggatgaggaaactgaaatttacggcaaaagtttgtctgctagcaatacaggaaatacatcagatactcctgaaaggggttttagcagtctaaatgaacctgaggacactgaccttgcagatgaatcttggaatgaacaagattgtgattcggacttcagctcttcaaatgcactaccttatgtttcatacatgttagatgatgcttcacgaaacaagaaaagggatttagttctggtacatctgcttcggatagcctgtgcgtcgaaggattctctttcaagtgctttgccaacaatatcagcagagttgtgcaacataggggttctttccgaatgggctaaggatttaatttctgattctcctgctgtttttggagaaactttcagtcatgtttttgggcaacaaatgatctcttcagagtgttctctattttggagacctgataattcatcatctaagccaaattctcgttatttgaatgattttgaggagctccgttcacttggtcaggggggctttggtcgtgttgcattatgcaaaaacaagctagatgggcgccaatatgctgttaaaaagatacgtctgaaggatagaagtcctcaattgaatgagaagattttaagagaggtagccacactttcaagattgcaacatcaacatgttgtccgttattaccaggcatggattgaaactgaatacggtcatcataatattttgaatgctggcgggtcctgcactgctgagagctctatctttagttatgatgaagtcagcctatcggatgcaggtggtgggaataagcaggaatccacgtacttgtacattcaaatggagtattgtcctaggactttgcggcaggattttgagacatacatctcgtcttttgatgttgaccatgcctggcacctgtttcgacaaattgtggaaggtctagctcatgtccatagtcaaggaatcctacacagagacctgacacccagcaacatattttttgatgtccgcaatgatattaaaattggagattttggtttagccaaatttctgaagctggagcagctagatcatgaccaatatcttcctactgaagcactgggtgtatcaatggatggaacaggtcaagttggtacatatttttatactgcaccagaggtagagcagaaatggccacagattaatgaaaaggttgacatgtacagtttgggagtaatattttttgagctttggcatccatttgccacagcgatggaaaggcatcttgttctttccgatcttaagcagaagggagacccgccattgtcatgggaatcaaaatttcctcgtcagtcagtcctgttaagaagcttgctgtcaccaagcccgtctaaccgtccatctgctgtcgaggtcttgcaaaatgaactgcctcctcggatggaagatgagtggctaaatgatgtacttagaatgatacggacaccagaagacacatatgtttatgaccgggttatatctacaatatttaatgaggacaggttcgccaaaatgcaaggccaacatgatagcagcaaaaagtccactggtaacattgataacagtgaacttttggataccatcgttgaggttgccaaggaggttttcaagcggcattgtgctaaaaggttccaaatatcacctttgcatactttggagtggaattttaccaaaaacaggggaaacacagtgaaaatcttaactcaaggaggagagatgctagaactttgctatgaactgcgaacaccatttgttatgtcaattgcttctaatcagacatcatcattcaaacgttatgaaatatcatgggttcatagaagagccgttggccattcaactccttatcgttttcttcagggtgattttgacattattggcggtacttcaccgattccagaggctgaaatcatcaaggtggctttggacctggggacccgcttttatgattccaagacgctagtcatacgtctgaatcacggtaaacttgctgaagcaatttgctcttgggcaggggtttctcaggatcaaagacaaaatgttgctgagtttctgtcttcaactattgttcagtattggccaaatgaagctgaccgcaagtcacagtggagtttgattagggggcaacttttacaggatcttcgtctttctgaagaagttgttgagaagctacataaagcagatcagcggttttgtggctctgcagatctagtacttgctagattaagagggaccctgttttatgatgaatctgcttgcaaggctcttgatgatctatccgcgcttctgagatgtttgagagtatggtcggtagaacaaccaattactactattgatgtactcatgcctccgtcagaatgttactatacaaatttgtttttccaggtatactcaaaagaaggtaatcatggaccgggtttccatgaaaagttgctggcagttggtggacgatatgattggttggtggaacaagcttgggatgagacatctaaatctaaacccccaggtgctgttggtgtgagcattgcacttgagaaatttcttcctaacaatccttcatctgatctgggattgcgaagggttgaacctagcatcagtgtacttgtctgttcaaggggtggtggcggtctgttgactgaacgcatggaacttgtcgcagagctttggaaagctaacataatggctcagtttgttcctcaggaagatccaagtcttcaagaacagtatgaatatgccagtgaacatgatattaaatgccttgcaattatgactgaatcaggcctgtcacaaacagaccttgtgaaggtccggcatcttgattttaaaaaggagaaggatgttgaaagagagggactaataaagttcctgtctgatgcaatgtgttcacaatacaaaaatcctacgatctggagctgaccaacggccctcccaagtgcttagtgtatttgttttcaggttctagcagagcatcaaaaaatgtgtctttcgaacttccgggtgaaagcaatgtttgctgttcgaacatgtgaaggcaatcatgcgtgttggcttccgtgcatacggtgaggcagctgttggctctctgcaggttgttgccaaacgttacgccctggtctttactgaagatgggcgccgacgtgcggtgattggccaattggtataatcctggacctcttgattgttctcctgaggaccaatgccatgcaacaaggttgcttcagacacaaggtggcgtgtagttggtgcaattctgcagttttggggctgttggtattatatggatctgaaggtactctttcgagggacttattggtgtcggttctgggggcttctccaaaggcgtgaagaaggacatcgtaaggatcaaagttgcc

SEQ ID NO: 24740 - DNA, 4345 bp, Zea Mays
cacggcaaagccgcgcctctgcggctctgcccgacgccatcgccacgccagacgccagcgcagatctcccttcccgtttgtccttccggcgggcgagggtgacgcccgccacaccgcgagctccagctgctctaatcgatggggcacagctctagaaagaaaaagaagcgcggcgcggccggccgcaaggcagccaaggaccacgccgcgcagctcgaaggagacgagaccgccctcgacgaggagctcacggccctggcttcaattttaggggaggacttcaaagtaacatcagaatcacctcatacacgatgtaatatatgtattaggccttattcggatgacatgggctttgaagatctaaatatttcagctattcttattgtgatatgttttcctggttacccccacaagtgtccaaagttgcggatcctgcctgaaaaaaacttgtctaaagaagatacagatcggctcctttcgcttcttattgaccaggcaaacatttattcccgagaaggacgtgttatgattttcaatttgtttgaggctgcgcaagagtttctatctgagattgctccagctcgtgtttcagtgagcactgcttctttcttgggtttgagctcaactactgatgacaatgtggaagttggctttgacagtgatccttacctgggaatctcttacatatataactccttcgatctatatagtcagttatatgatgatacttattggagtcgacaaggttcagatctgacaacagatagtggcaggaaaaatattgtatctcaagttcaatccaatgttagaagcaagaggaagaccatcattgaaaaatcccacatctcagctgataaggtcaataatgctaaagagtcatctggtgataaagctgaacagcaacatgccacaaagcatggtgccatacgggaggcagctccaactttacatgttgtggatgaggaaactgaaatttacggcaaaagtttgtctgctagcaatacaggaaatacatcagatactcctgaaaggggttttagcagtctaaatgaacctgaggacactgaccttgcagatgaatcttggaatgaacaagattgtgattcggacttcagctcttcaaatgcactaccttatgtttcatacatgttagatgatgcttcacgaaacaagaaaagggatttagttctggtacatctgcttcggatagcctgtgcgtcgaaggattctctttcaagtgctttgccaacaatatcagcagagttgtgcaacataggggttctttccgaatgggctaaggatttaatttctgattctcctgctgtttttggagaaactttcagtcatgtttttgggcaacaaatgatctcttcagagtgttctctattttggagacctgataattcatcatctaagccaaattctcgttatttgaatgattttgaggagctccgttcacttggtcaggggggctttggtcgtgttgcattatgcaaaaacaagctagatgggcgccaatatgctgttaaaaagatacgtctgaaggatagaagtcctcaattgaatgagaagattttaaggtactcagagaggtagccacactttcaagattgcaacatcaacatgttgtccgttattaccaggcatggattgaaactgaatacggtcatcataatattttgaatgctggcgggtcctgcactgctgagagctctatctttagttatgatgaagtcagcctatcggatgcaggtggtgggaataagcaggaatccacgtacttgtacattcaaatggagtattgtcctaggactttgcggcaggattttgagacatacatctcgtcttttgatgttgaccatgcctggcacctgtttcgacaaattgtggaaggtctagctcatgtccatagtcaaggaatcctacacagagacctgacacccagcaacatattttttgatgtccgcaatgatattaaaattggagattttggtttagccaaatttctgaagctggagcagctagatcatgaccaatatcttcctactgaagcactgggtgtatcaatggatggaacaggtcaagttggtacatatttttatactgcaccagaggtagagcagaaatggccacagattaatgaaaaggttgacatgtacagtttgggagtaatattttttgagctttggcatccatttgccacagcgatggaaaggcatcttgttctttccgatcttaagcagaagggagacccgccattgtcatgggaatcaaaatttcctcgtcagtcagtcctgttaagaagcttgctgtcaccaagcccgtctaaccgtccatctgctgtcgaggtcttgcaaaatgaactgcctcctcggatggaagatgagtggctaaatgatgtacttagaatgatacggacaccagaagacacatatgtttatgaccgggttatatctacaatatttaatgaggacaggttcgccaaaatgcaaggccaacatgatagcagcaaaaagtccactggtaacattgataacagtgaacttttggataccatcgttgaggttgccaaggaggttttcaagcggcattgtgctaaaaggttccaaatatcacctttgcatactttggagtggaattttaccaaaaacaggggaaacacagtgaaaatcttaactcaaggaggagagatgctagaactttgctatgaactgcgaacaccatttgttatgtcaattgcttctaatcagacatcatcattcaaacgttatgaaatatcatgggttcatagaagagccgttggccattcaactccttatcgttttcttcagggtgattttgacattattggcggtacttcaccgattccagaggctgaaatcatcaaggtggctttggacctggggacccgcttttatgattccaagacgctagtcatacgtctgaatcacggtaaacttgctgaagcaatttgctcttgggcaggggtttctcaggatcaaagacaaaatgttgctgagtttctgtcttcaactattgttcagtattggccaaatgaagctgaccgcaagtcacagtggagtttgattagggggcaacttttacaggatcttcgtctttctgaagaagttgttgagaagctacataaagcagatcagcggttttgtggctctgcagatctagtacttgctagattaagagggaccctgttttatgatgaatctgcttgcaaggctcttgatgatctatccgcgcttctgagatgtttgagagtatggtcggtagaacaaccaattactactattgatgtactcatgcctccgtcagaatgttactatacaaatttgtttttccaggtatactcaaaagaaggtaatcatggaccgggtttccatgaaaagttgctggcagttggtggacgatatgattggttggtggaacaagcttgggatgagacatctaaatctaaacccccaggtgctgttggtgtgagcattgcacttgagaaatttcttcctaacaatccttcatctgatctgggattgcgaagggttgaacctagcatcagtgtacttgtctgttcaaggggtggtggcggtctgttgactgaacgcatggaacttgtcgcagagctttggaaagctaacataatggctcagtttgttcctcaggaagatccaagtcttcaagaacagtatgaatatgccagtgaacatgatattaaatgccttgcaattatgactgaatcaggcctgtcacaaacagaccttgtgaaggtccggcatcttgattttaaaaaggagaaggatgttgaaagagagggactaataaagttcctgtctgatgcaatgtgttcacaatacaaaaatcctacgatctggagctgaccaacggccctcccaagtgcttagtgtatttgttttcaggttctagcagagcatcaaaaaatgtgtctttcgaacttccgggtgaaagcaatgtttgctgttcgaacatgtgaaggcaatcatgcgtgttggcttccgtgcatacggtgaggcagctgttggctctctgcaggttgttgccaaacgttacgccctggtctttactgaagatgggcgccgacgtgcggtgattggccaattggtataatcctggacctcttgattgttctcctgaggaccaatgccatgcaacaaggttgcttcagacacaaggtggcgtgtagttggtgcaattctgcagttttggggctgttggtattatatggatctgaaggtactctttcgagggacttattggtgtcggttctgggggcttctccaaaggcgtgaagaaggacatcgtaaggatcaaagttgcc

SEQ ID NO: 24741 - DNA, 3943 bp, Zea Mays
atccacatcccaaagtcccacggcaaagccgcgcctctgcggctctgcccgacgccatcgccacgccagacgccagcgcagatctcccttcccgtttgtccttccggcgggcgagggtgacgcccgccacaccgcgagctccagctgctctaatcgatggggcacagctctagaaagaaaaagaagcgcggcgcggccggccgcaaggcagccaaggaccacgccgcgcagctcgaaggagacgagaccgccctcgacgaggagctcacggccctggcttcaattttaggggaggacttcaaagtaacatcagaatcacctcatacacgatgtaatatatgtattaggccttattcggatgacatgggctttgaagatctaaatatttcagctattcttattgtgatatgttttcctggttacccccacaagtgtccaaagttgcggatcctgcctgaaaaaaacttgtctaaagaagatacagatcggctcctttcgcttcttattgaccaggcaaacatttattcccgagaaggacgtgttatgattttcaatttgtttgaggctgcgcaagagtttctatctgagattgctccagctcgtgtttcagtgagcactgcttctttcttgggtttgagctcaactactgatgacaatgtggaagttggctttgacagtgatccttacctgggaatctcttacatatataactccttcgatctatatagtcagttatatgatgatacttattggagtcgacaaggttcagatctgacaacagatagtggcaggaaaaatattgtatctcaagttcaatccaatgttagaagcaagaggaagaccatcattgaaaaatcccacatctcagctgataaggtcaataatgctaaagagtcatctggtgataaagctgaacagcaacatgccacaaagcatggtgccatacgggaggcagctccaactttacatgttgtggatgaggaaactgaaatttacggcaaaagtttgtctgctagcaatacaggaaatacatcagatactcctgaaaggggttttagcagtctaaatgaacctgaggacactgaccttgcagatgaatcttggaatgaacaagattgtgattcggacttcagctcttcaaatgcactaccttatgtttcatacatgttagatgatgcttcacgaaacaagaaaagggatttagttctggtacatctgcttcggatagcctgtgcgtcgaaggattctctttcaagtgctttgccaacaatatcagcagagttgtgcaacataggggttctttccgaatgggctaaggatttaatttctgattctcctgctgtttttggagaaactttcagtcatgtttttgggcaacaaatgatctcttcagagtgttctctattttggagacctgataattcatcatctaagccaaattctcgttatttgaatgattttgaggagctccgttcacttggtcaggggggctttggtcgtgttgcattatgcaaaaacaagctagatgggcgccaatatgctgttaaaaagatacgtctgaaggatagaagtcctcaattgaatgagaagattttaaggtactcagagaggtagccacactttcaagattgcaacatcaacatgttgtccgttattaccaggcatggattgaaactgaatacggtcatcataatattttgaatgctggcgggtcctgcactgctgagagctctatctttagttatgatgaagtcagcctatcggatgcaggtggtgggaataagcaggaatccacgtacttgtacattcaaatggagtattgtcctaggactttgcggcaggattttgagacatacatctcgtcttttgatgttgaccatgcctggcacctgtttcgacaaattgtggaaggtctagctcatgtccatagtcaaggaatcctacacagagacctgacacccagcaacatattttttgatgtccgcaatgatattaaaattggagattttggtttagccaaatttctgaagctggagcagctagatcatgaccaatatcttcctactgaagcactgggtgtatcaatggatggaacaggtcaagttggtacatatttttatactgcaccagaggtagagcagaaatggccacagattaatgaaaaggttgacatgtacagtttgggagtaatattttttgagctttggcatccatttgccacagcgatggaaaggcatcttgttctttccgatcttaagcagaagggagacccgccattgtcatgggaatcaaaatttcctcgtcagtcagtcctgttaagaagcttgctgtcaccaagcccgtctaaccgtccatctgctgtcgaggtcttgcaaaatgaactgcctcctcggatggaagatgagtggctaaatgatgtacttagaatgatacggacaccagaagacacatatgtttatgaccgggttatatctacaatatttaatgaggacaggttcgccaaaatgcaaggccaacatgatagcagcaaaaagtccactggtaacattgataacagtgaacttttggataccatcgttgaggttgccaaggaggttttcaagcggcattgtgctaaaaggttccaaatatcacctttgcatactttggagtggaattttaccaaaaacaggggaaacacagtgaaaatcttaactcaaggaggagagatgctagaactttgctatgaactgcgaacaccatttgttatgtcaattgcttctaatcagacatcatcattcaaacgttatgaaatatcatgggttcatagaagagccgttggccattcaactccttatcgttttcttcagggtgattttgacattattggcggtacttcaccgattccagaggctgaaatcatcaaggtggctttggacctggggacccgcttttatgattccaagacgctagtcatacgtctgaatcacggtaaacttgctgaagcaatttgctcttgggcaggggtttctcaggatcaaagacaaaatgttgctgagtttctgtcttcaactattgttcagtattggccaaatgaagctgaccgcaagtcacagtggagtttgattagggggcaacttttacaggatcttcgtctttctgaagaagttgttgagaagctacataaagcagatcagcggttttgtggctctgcagatctagtacttgctagattaagagggaccctgttttatgatgaatctgcttgcaaggctcttgatgatctatccgcgcttctgagatgtttgagagtatggtcggtagaacaaccaattactactattgatgtactcatgcctccgtcagaatgttactatacaaatttgtttttccaggtccggcatcttgattttaaaaaggagaaggatgttgaaagagagggactaataaagttcctgtctgatgcaatgtgttcacaatacaaaaatcctacgatctggagctgaccaacggccctcccaagtgcttagtgtatttgttttcaggttctagcagagcatcaaaaaatgtgtctttcgaacttccgggtgaaagcaatgtttgctgttcgaacatgtgaaggcaatcatgcgtgttggcttccgtgcatacggtgaggcagctgttggctctctgcaggttgttgccaaacgttacgccctggtctttactgaagatgggcgccgacgtgcggtgattggccaattggtataatcctggacctcttgattgttctcctgaggaccaatgccatgcaacaaggttgcttcagacacaaggtggcgtgtagttggtgcaattctgcagttttggggctgttggtattatatggatctgaaggtactctttcgagggacttattggtgtcggttctgggggcttctccaaaggcgtgaagaaggacatcgtaaggatcaaagttgcc

SEQ ID NO: 24742 - DNA, 4412 bp, Zea Mays
cttgactcgagatgacgcgccgcggtgcccacgaggcatgagcccatccacatcccaaagtcccacggcaaagccgcgcctctgcggctctgcccgacgccatcgccacgccagacgccagcgcagatctcccttcccgtttgtccttccggcgggcgagggtgacgcccgccacaccgcgagctccagctgctctaatcgatggggcacagctctagaaagaaaaagaagcgcggcgcggccggccgcaaggcagccaaggaccacgccgcgcagctcgaaggagacgagaccgccctcgacgaggagctcacggccctggcttcaattttaggggaggacttcaaagtaacatcagaatcacctcatacacgatgtaatatatgtattaggccttattcggatgacatgggctttgaagatctaaatatttcagctattcttattgtgatatgttttcctggttacccccacaagtgtccaaagttgcggatcctgcctgaaaaaaacttgtctaaagaagatacagatcggctcctttcgcttcttattgaccaggcaaacatttattcccgagaaggacgtgttatgattttcaatttgtttgaggctgcgcaagagtttctatctgagattgctccagctcgtgtttcagtgagcactgcttctttcttgggtttgagctcaactactgatgacaatgtggaagttggctttgacagtgatccttacctgggaatctcttacatatataactccttcgatctatatagtcagttatatgatgatacttattggagtcgacaaggttcagatctgacaacagatagtggcaggaaaaatattgtatctcaagttcaatccaatgttagaagcaagaggaagaccatcattgaaaaatcccacatctcagctgataaggtcaataatgctaaagagtcatctggtgataaagctgaacagcaacatgccacaaagcatggtgccatacgggaggcagctccaactttacatgttgtggatgaggaaactgaaatttacggcaaaagtttgtctgctagcaatacaggaaatacatcagatactcctgaaaggggttttagcagtctaaatgaacctgaggacactgaccttgcagatgaatcttggaatgaacaagattgtgattcggacttcagctcttcaaatgcactaccttatgtttcatacatgttagatgatgcttcacgaaacaagaaaagggatttagttctggtacatctgcttcggatagcctgtgcgtcgaaggattctctttcaagtgctttgccaacaatatcagcagagttgtgcaacataggggttctttccgaatgggctaaggatttaatttctgattctcctgctgtttttggagaaactttcagtcatgtttttgggcaacaaatgatctcttcagagtgttctctattttggagacctgataattcatcatctaagccaaattctcgttatttgaatgattttgaggagctccgttcacttggtcaggggggctttggtcgtgttgcattatgcaaaaacaagctagatgggcgccaatatgctgttaaaaagatacgtctgaaggatagaagtcctcaattgaatgagaagattttaagagaggtagccacactttcaagattgcaacatcaacatgttgtccgttattaccaggcatggattgaaactgaatacggtcatcataatattttgaatgctggcgggtcctgcactgctgagagctctatctttagttatgatgaagtcagcctatcggatgcaggtggtgggaataagcaggaatccacgtacttgtacattcaaatggagtattgtcctaggactttgcggcaggattttgagacatacatctcgtcttttgatgttgaccatgcctggcacctgtttcgacaaattgtggaaggtctagctcatgtccatagtcaaggaatcctacacagagacctgacacccagcaacatattttttgatgtccgcaatgatattaaaattggagattttggtttagccaaatttctgaagctggagcagctagatcatgaccaatatcttcctactgaagcactgggtgtatcaatggatggaacaggtcaagttggtacatatttttatactgcaccagaggtagagcagaaatggccacagattaatgaaaaggttgacatgtacagtttgggagtaatattttttgagctttggcatccatttgccacagcgatggaaaggcatcttgttctttccgatcttaagcagaagggagacccgccattgtcatgggaatcaaaatttcctcgtcagtcagtcctgttaagaagcttgctgtcaccaagcccgtctaaccgtccatctgctgtcgaggtcttgcaaaatgaactgcctcctcggatggaagatgagtggctaaatgatgtacttagaatgatacggacaccagaagacacatatgtttatgaccgggttatatctacaatatttaatgaggacaggttcgccaaaatgcaaggccaacatgatagcagcaaaaagtccactggtaacattgataacagtgaacttttggataccatcgttgaggttgccaaggaggttttcaagcggcattgtgctaaaaggttccaaatatcacctttgcatactttggagtggaattttaccaaaaacaggggaaacacagtgaaaatcttaactcaaggaggagagatgctagaactttgctatgaactgcgaacaccatttgttatgtcaattgcttctaatcagacatcatcattcaaacgttatgaaatatcatgggttcatagaagagccgttggccattcaactccttatcgttttcttcagggtgattttgacattattggcggtacttcaccgattccagaggctgaaatcatcaaggtggctttggacctggggacccgcttttatgattccaagacgctagtcatacgtctgaatcacggtaaacttgctgaagcaatttgctcttgggcaggggtttctcaggatcaaagacaaaatgttgctgagtttctgtcttcaactattgttcagtattggccaaatgaagctgaccgcaagtcacagtggagtttgattagggggcaacttttacaggatcttcgtctttctgaagaagttgttgagaagctacataaagcagatcagcggttttgtggctctgcagatctagtacttgctagattaagagggaccctgttttatgatgaatctgcttgcaaggctcttgatgatctatccgcgcttctgagatgtttgagagtatggtcggtagaacaaccaattactactattgatgtactcatgcctccgtcagaatgttactatacaaatttgtttttccaggtatactcaaaagaaggtaatcatggaccgggtttccatgaaaagttgctggcagttggtggacgatatgattggttggtggaacaagcttgggatgagacatctaaatctaaacccccaggtgctgttggtgtgagcattgcacttgagaaatttcttcctaacaatccttcatctgatctgggattgcgaaggttactgtccagggttgaacctagcatcagtgtacttgtctgttcaaggggtggtggcggtctgttgactgaacgcatggaacttgtcgcagagctttggaaagctaacataatggctcagtttgttcctcaggaagatccaagtcttcaagaacagtatgaatatgccagtgaacatgatattaaatgccttgcaattatgactgaatcaggcctgtcacaaacagaccttgtgaaggtccggcatcttgattttaaaaaggagaaggatgttgaaagagagggactaataaagttcctgtctgatgcaatgtgttcacaatacaaaaatcctacgatctggagctgaccaacggccctcccaagtgcttagtgtatttgttttcaggttctagcagagcatcaaaaaatgtgtctttcgaacttccgggtgaaagcaatgtttgctgttcgaacatgtgaaggcaatcatgcgtgttggcttccgtgcatacggtgaggcagctgttggctctctgcaggttgttgccaaacgttacgccctggtctttactgaagatgggcgccgacgtgcggtgattggccaattggtataatcctggacctcttgattgttctcctgaggaccaatgccatgcaacaaggttgcttcagacacaaggtggcgtgtagttggtgcaattctgcagttttggggctgttggtattatatggatctgaaggtactctttcgagggacttattggtgtcggttctgggggcttctccaaaggcgtgaagaaggacatcgtaaggatcaaagttgcc

SEQ ID NO: 24743 - DNA, 4434 bp, Zea Mays
accgggcagtcgtgcttgactcgagatgacgcgccgcggtgcccacgaggcatgagcccatccacatcccaaagtcccacggcaaagccgcgcctctgcggctctgcccgacgccatcgccacgccagacgccagcgcagatctcccttcccgtttgtccttccggcgggcgagggtgacgcccgccacaccgcgagctccagctgctctaatcgatggggcacagctctagaaagaaaaagaagcgcggcgcggccggccgcaaggcagccaaggaccacgccgcgcagctcgaaggagacgagaccgccctcgacgaggagctcacggccctggcttcaattttaggggaggacttcaaagtaacatcagaatcacctcatacacgatgtaatatatgtattaggccttattcggatgacatgggctttgaagatctaaatatttcagctattcttattgtgatatgttttcctggttacccccacaagtgtccaaagttgcggatcctgcctgaaaaaaacttgtctaaagaagatacagatcggctcctttcgcttcttattgaccaggcaaacatttattcccgagaaggacgtgttatgattttcaatttgtttgaggctgcgcaagagtttctatctgagattgctccagctcgtgtttcagtgagcactgcttctttcttgggtttgagctcaactactgatgacaatgtggaagttggctttgacagtgatccttacctgggaatctcttacatatataactccttcgatctatatagtcagttatatgatgatacttattggagtcgacaaggttcagatctgacaacagatagtggcaggaaaaatattgtatctcaagttcaatccaatgttagaagcaagaggaagaccatcattgaaaaatcccacatctcagctgataaggtcaataatgctaaagagtcatctggtgataaagctgaacagcaacatgccacaaagcatggtgccatacgggaggcagctccaactttacatgttgtggatgaggaaactgaaatttacggcaaaagtttgtctgctagcaatacaggaaatacatcagatactcctgaaaggggttttagcagtctaaatgaacctgaggacactgaccttgcagatgaatcttggaatgaacaagattgtgattcggacttcagctcttcaaatgcactaccttatgtttcatacatgttagatgatgcttcacgaaacaagaaaagggatttagttctggtacatctgcttcggatagcctgtgcgtcgaaggattctctttcaagtgctttgccaacaatatcagcagagttgtgcaacataggggttctttccgaatgggctaaggatttaatttctgattctcctgctgtttttggagaaactttcagtcatgtttttgggcaacaaatgatctcttcagagtgttctctattttggagacctgataattcatcatctaagccaaattctcgttatttgaatgattttgaggagctccgttcacttggtcaggggggctttggtcgtgttgcattatgcaaaaacaagctagatgggcgccaatatgctgttaaaaagatacgtctgaaggatagaagtcctcaattgaatgagaagattttaaggtactcagagaggtagccacactttcaagattgcaacatcaacatgttgtccgttattaccaggcatggattgaaactgaatacggtcatcataatattttgaatgctggcgggtcctgcactgctgagagctctatctttagttatgatgaagtcagcctatcggatgcaggtggtgggaataagcaggaatccacgtacttgtacattcaaatggagtattgtcctaggactttgcggcaggattttgagacatacatctcgtcttttgatgttgaccatgcctggcacctgtttcgacaaattgtggaaggtctagctcatgtccatagtcaaggaatcctacacagagacctgacacccagcaacatattttttgatgtccgcaatgatattaaaattggagattttggtttagccaaatttctgaagctggagcagctagatcatgaccaatatcttcctactgaagcactgggtgtatcaatggatggaacaggtcaagttggtacatatttttatactgcaccagaggtagagcagaaatggccacagattaatgaaaaggttgacatgtacagtttgggagtaatattttttgagctttggcatccatttgccacagcgatggaaaggcatcttgttctttccgatcttaagcagaagggagacccgccattgtcatgggaatcaaaatttcctcgtcagtcagtcctgttaagaagcttgctgtcaccaagcccgtctaaccgtccatctgctgtcgaggtcttgcaaaatgaactgcctcctcggatggaagatgagtggctaaatgatgtacttagaatgatacggacaccagaagacacatatgtttatgaccgggttatatctacaatatttaatgaggacaggttcgccaaaatgcaaggccaacatgatagcagcaaaaagtccactggtaacattgataacagtgaacttttggataccatcgttgaggttgccaaggaggttttcaagcggcattgtgctaaaaggttccaaatatcacctttgcatactttggagtggaattttaccaaaaacaggggaaacacagtgaaaatcttaactcaaggaggagagatgctagaactttgctatgaactgcgaacaccatttgttatgtcaattgcttctaatcagacatcatcattcaaacgttatgaaatatcatgggttcatagaagagccgttggccattcaactccttatcgttttcttcagggtgattttgacattattggcggtacttcaccgattccagaggctgaaatcatcaaggtggctttggacctggggacccgcttttatgattccaagacgctagtcatacgtctgaatcacggtaaacttgctgaagcaatttgctcttgggcaggggtttctcaggatcaaagacaaaatgttgctgagtttctgtcttcaactattgttcagtattggccaaatgaagctgaccgcaagtcacagtggagtttgattagggggcaacttttacaggatcttcgtctttctgaagaagttgttgagaagctacataaagcagatcagcggttttgtggctctgcagatctagtacttgctagattaagagggaccctgttttatgatgaatctgcttgcaaggctcttgatgatctatccgcgcttctgagatgtttgagagtatggtcggtagaacaaccaattactactattgatgtactcatgcctccgtcagaatgttactatacaaatttgtttttccaggtatactcaaaagaaggtaatcatggaccgggtttccatgaaaagttgctggcagttggtggacgatatgattggttggtggaacaagcttgggatgagacatctaaatctaaacccccaggtgctgttggtgtgagcattgcacttgagaaatttcttcctaacaatccttcatctgatctgggattgcgaaggttactgtccagggttgaacctagcatcagtgtacttgtctgttcaaggggtggtggcggtctgttgactgaacgcatggaacttgtcgcagagctttggaaagctaacataatggctcagtttgttcctcaggaagatccaagtcttcaagaacagtatgaatatgccagtgaacatgatattaaatgccttgcaattatgactgaatcaggcctgtcacaaacagaccttgtgaaggtccggcatcttgattttaaaaaggagaaggatgttgaaagagagggactaataaagttcctgtctgatgcaatgtgttcacaatacaaaaatcctacgatctggagctgaccaacggccctcccaagtgcttagtgtatttgttttcaggttctagcagagcatcaaaaaatgtgtctttcgaacttccgggtgaaagcaatgtttgctgttcgaacatgtgaaggcaatcatgcgtgttggcttccgtgcatacggtgaggcagctgttggctctctgcaggttgttgccaaacgttacgccctggtctttactgaagatgggcgccgacgtgcggtgattggccaattggtataatcctggacctcttgattgttctcctgaggaccaatgccatgcaacaaggttgcttcagacacaaggtggcgtgtagttggtgcaattctgcagttttggggctgttggtattatatggatctgaaggtactctttcgagggacttattggtgtcggttctgggggcttctccaaaggcgtgaagaaggacatcgtaaggatcaaagttgcc

SEQ ID NO: 24744 - DNA, 4305 bp, Zea Mays
atggggcacagctctagaaagaaaaagaagcgcggcgcggccggccgcaaggcagccaaggaccacgccgcgcagctcgaaggagacgagaccgccctcgacgaggagctcacggccctggcttcaattttaggggaggacttcaaagtaacatcagaatcacctcatacacgatgtaatatatgtattaggccttattcggatgacatgggctttgaagatctaaatatttcagctattcttattgtgatatgttttcctggttacccccacaagtgtccaaagttgcggatcctgcctgaaaaaaacttgtctaaagaagatacagatcggctcctttcgcttcttattgaccaggcaaacatttattcccgagaaggacgtgttatgattttcaatttgtttgaggctgcgcaagagtttctatctgagattgctccagctcgtgtttcagtgagcactgcttctttcttgggtttgagctcaactactgatgacaatgtggaagttggctttgacagtgatccttacctgggaatctcttacatatataactccttcgatctatatagtcagttatatgatgatacttattggagtcgacaaggttcagatctgacaacagatagtggcaggaaaaatattgtatctcaagttcaatccaatgttagaagcaagaggaagaccatcattgaaaaatcccacatctcagctgataaggtcaataatgctaaagagtcatctggtgataaagctgaacagcaacatgccacaaagcatggtgccatacgggaggcagctccaactttacatgttgtggatgaggaaactgaaatttacggcaaaagtttgtctgctagcaatacaggaaatacatcagatactcctgaaaggggttttagcagtctaaatgaacctgaggacactgaccttgcagatgaatcttggaatgaacaagattgtgattcggacttcagctcttcaaatgcactaccttatgtttcatacatgttagatgatgcttcacgaaacaagaaaagggatttagttctggtacatctgcttcggatagcctgtgcgtcgaaggattctctttcaagtgctttgccaacaatatcagcagagttgtgcaacataggggttctttccgaatgggctaaggatttaatttctgattctcctgctgtttttggagaaactttcagtcatgtttttgggcaacaaatgatctcttcagagtgttctctattttggagacctgataattcatcatctaagccaaattctcgttatttgaatgattttgaggagctccgttcacttggtcaggggggctttggtcgtgttgcattatgcaaaaacaagctagatgggcgccaatatgctgttaaaaagatacgtctgaaggatagaagtcctcaattgaatgagaagattttaaggtactcagagaggtagccacactttcaagattgcaacatcaacatgttgtccgttattaccaggcatggattgaaactgaatacggtcatcataatattttgaatgctggcgggtcctgcactgctgagagctctatctttagttatgatgaagtcagcctatcggatgcaggtggtgggaataagcaggaatccacgtacttgtacattcaaatggagtattgtcctaggactttgcggcaggattttgagacatacatctcgtcttttgatgttgaccatgcctggcacctgtttcgacaaattgtggaaggtctagctcatgtccatagtcaaggaatcctacacagagacctgacacccagcaacatattttttgatgtccgcaatgatattaaaattggagattttggtttagccaaatttctgaagctggagcagctagatcatgaccaatatcttcctactgaagcactgggtgtatcaatggatggaacaggtcaagttggtacatatttttatactgcaccagaggtagagcagaaatggccacagattaatgaaaaggttgacatgtacagtttgggagtaatattttttgagctttggcatccatttgccacagcgatggaaaggcatcttgttctttccgatcttaagcagaagggagacccgccattgtcatgggaatcaaaatttcctcgtcagtcagtcctgttaagaagcttgctgtcaccaagcccgtctaaccgtccatctgctgtcgaggtcttgcaaaatgaactgcctcctcggatggaagatgagtggctaaatgatgtacttagaatgatacggacaccagaagacacatatgtttatgaccgggttatatctacaatatttaatgaggacaggttcgccaaaatgcaaggccaacatgatagcagcaaaaagtccactggtaacattgataacagtgaacttttggataccatcgttgaggttgccaaggaggttttcaagcggcattgtgctaaaaggttccaaatatcacctttgcatactttggagtggaattttaccaaaaacaggggaaacacagtgaaaatcttaactcaaggaggagagatgctagaactttgctatgaactgcgaacaccatttgttatgtcaattgcttctaatcagacatcatcattcaaacgttatgaaatatcatgggttcatagaagagccgttggccattcaactccttatcgttttcttcagggtgattttgacattattggcggtacttcaccgattccagaggctgaaatcatcaaggtggctttggacctggggacccgcttttatgattccaagacgctagtcatacgtctgaatcacggtaaacttgctgaagcaatttgctcttgggcaggggtttctcaggatcaaagacaaaatgttgctgagtattggccaaatgaagctgaccgcaagtcacagtggagtttgattagggggcaacttttacaggatcttcgtctttctgaagaagttgttgagaagctacataaagcagatcagcggttttgtggctctgcagatctagtacttgctagattaagagggaccctgttttatgatgaatctgcttgcaaggctcttgatgatctatccgcgcttctgagatgtttgagagtatggtcggtagaacaaccaattactactattgatgtactcatgcctccgtcagaatgttactatacaaatttgtttttccaggtatactcaaaagaaggtaatcatggaccgggtttccatgaaaagttgctggcagttggtggacgatatgattggttggtggaacaagcttgggatgagacatctaaatctaaacccccaggtgctgttggtgtgagcattgcacttgagaaatttcttcctaacaatccttcatctgatctgggattgcgaagggttgaacctagcatcagtgtacttgtctgttcaaggggtggtggcggtctgttgactgaacgcatggaacttgtcgcagagctttggaaagctaacataatggctcagtttgttcctcaggaagatccaagtcttcaagaacagtatgaatatgccagtgaacatgatattaaatgccttgcaattatgactgaatcaggcctgtcacaaacagaccttgtgaaggtccggcatcttgattttaaaaaggagaaggatgttgaaagagagggactaataaagttcctgtctgatgcaatgtgttcacaatacaaaaatcctacgatctggagctgaccaacggccctcccaagtgcttagtgtatttgttttcaggttctagcagagcatcaaaaaatgtgtctttcgaacttccgggtgaaagcaatgtttgctgttcgaacatgtgaaggcaatcatgcgtgttggcttccgtgcatacggtgaggcagctgttggctctctgcaggttgttgccaaacgttacgccctggtctttactgaagatgggcgccgacgtgcggtgattggccaattggtataatcctggacctcttgattgttctcctgaggaccaatgccatgcaacaaggttgcttcagacacaaggtggcgtgtagttggtgcaattctgcagttttggggctgttggtattatatggatctgaaggtgcgcggttttctactacaacagatcctccgtttttgcctgtgttctctttcttgtgcatgtgattttctttttcttttccataggactaccttgtacatagttcgtttggcgtgagccatcatgtacatgcaaaatttttacattgttgggttactgacaatgaaatgctgaattttgcaactccctgatttaggacaaaacaag

SEQ ID NO: 24745 - DNA, 4361 bp, Zea Mays
ccgcgagctccagctgctctaatcgatggggcacagctctagaaagaaaaagaagcgcggcgcggccggccgcaaggcagccaaggaccacgccgcgcagctcgaaggagacgagaccgccctcgacgaggagctcacggccctggcttcaattttaggggaggacttcaaagtaacatcagaatcacctcatacacgatgtaatatatgtattaggccttattcggatgacatgggctttgaagatctaaatatttcagctattcttattgtgatatgttttcctggttacccccacaagtgtccaaagttgcggatcctgcctgaaaaaaacttgtctaaagaagatacagatcggctcctttcgcttcttattgaccaggcaaacatttattcccgagaaggacgtgttatgattttcaatttgtttgaggctgcgcaagagtttctatctgagattgctccagctcgtgtttcagtgagcactgcttctttcttgggtttgagctcaactactgatgacaatgtggaagttggctttgacagtgatccttacctgggaatctcttacatatataactccttcgatctatatagtcagttatatgatgatacttattggagtcgacaaggttcagatctgacaacagatagtggcaggaaaaatattgtatctcaagttcaatccaatgttagaagcaagaggaagaccatcattgaaaaatcccacatctcagctgataaggtcaataatgctaaagagtcatctggtgataaagctgaacagcaacatgccacaaagcatggtgccatacgggaggcagctccaactttacatgttgtggatgaggaaactgaaatttacggcaaaagtttgtctgctagcaatacaggaaatacatcagatactcctgaaaggggttttagcagtctaaatgaacctgaggacactgaccttgcagatgaatcttggaatgaacaagattgtgattcggacttcagctcttcaaatgcactaccttatgtttcatacatgttagatgatgcttcacgaaacaagaaaagggatttagttctggtacatctgcttcggatagcctgtgcgtcgaaggattctctttcaagtgctttgccaacaatatcagcagagttgtgcaacataggggttctttccgaatgggctaaggatttaatttctgattctcctgctgtttttggagaaactttcagtcatgtttttgggcaacaaatgatctcttcagagtgttctctattttggagacctgataattcatcatctaagccaaattctcgttatttgaatgattttgaggagctccgttcacttggggggctttggtcgtgttgcattatgcaaaaacaagctagatgggcgccaatatgctgttaaaaagatacgtctgaaggatagaagtcctcaattgaatgagaagattttaaggtactcagagaggtagccacactttcaagattgcaacatcaacatgttgtccgttattaccaggcatggattgaaactgaatacggtcatcataatattttgaatgctggcgggtcctgcactgctgagagctctatctttagttatgatgaagtcagcctatcggatgcaggtggtgggaataagcaggaatccacgtacttgtacattcaaatggagtattgtcctaggactttgcggcaggattttgagacatacatctcgtcttttgatgttgaccatgcctggcacctgtttcgacaaattgtggaaggtctagctcatgtccatagtcaaggaatcctacacagagacctgacacccagcaacatattttttgatgtccgcaatgatattaaaattggagattttggtttagccaaatttctgaagctggagcagctagatcatgaccaatatcttcctactgaagcactgggtgtatcaatggatggaacaggtcaagttggtacatatttttatactgcaccagaggtagagcagaaatggccacagattaatgaaaaggttgacatgtacagtttgggagtaatattttttgagctttggcatccatttgccacagcgatggaaaggcatcttgttctttccgatcttaagcagaagggagacccgccattgtcatgggaatcaaaatttcctcgtcagtcagtcctgttaagaagcttgctgtcaccaagcccgtctaaccgtccatctgctgtcgaggtcttgcaaaatgaactgcctcctcggatggaagatgagtggctaaatgatgtacttagaatgatacggacaccagaagacacatatgtttatgaccgggttatatctacaatatttaatgaggacaggttcgccaaaatgcaaggccaacatgatagcagcaaaaagtccactggtaacattgataacagtgaacttttggataccatcgttgaggttgccaaggaggttttcaagcggcattgtgctaaaaggttccaaatatcacctttgcatactttggagtggaattttaccaaaaacaggggaaacacagtgaaaatcttaactcaaggaggagagatgctagaactttgctatgaactgcgaacaccatttgttatgtcaattgcttctaatcagacatcatcattcaaacgttatgaaatatcatgggttcatagaagagccgttggccattcaactccttatcgttttcttcagggtgattttgacattattggcggtacttcaccgattccagaggctgaaatcatcaaggtggctttggacctggggacccgcttttatgattccaagacgctagtcatacgtctgaatcacggtaaacttgctgaagcaatttgctcttgggcaggggtttctcaggatcaaagacaaaatgttgctgagtttctgtcttcaactattgttcagtattggccaaatgaagctgaccgcaagtcacagtggagtttgattagggggcaacttttacaggatcttcgtctttctgaagaagttgttgagaagctacataaagcagatcagcggttttgtggctctgcagatctagtacttgctagattaagagggaccctgttttatgatgaatctgcttgcaaggctcttgatgatctatccgcgcttctgagatgtttgagagtatggtcggtagaacaaccaattactactattgatgtactcatgcctccgtcagaatgttactatacaaatttgtttttccaggtatactcaaaagaaggtaatcatggaccgggtttccatgaaaagttgctggcagttggtggacgatatgattggttggtggaacaagcttgggatgagacatctaaatctaaacccccaggtgctgttggtgtgagcattgcacttgagaaatttcttcctaacaatccttcatctgatctgggattgcgaaggttactgtccagggttgaacctagcatcagtgtacttgtctgttcaaggggtggtggcggtctgttgactgaacgcatggaacttgtcgcagagctttggaaagctaacataatggctcagtttgttcctcaggaagatccaagtcttcaagaacagtatgaatatgccagtgaacatgatattaaatgccttgcaattatgactgaatcaggcctgtcacaaacagaccttgtgaaggtccggcatcttgattttaaaaaggagaaggatgttgaaagagagggactaataaagttcctgtctgatgcaatgtgttcacaatacaaaaatcctacgatctggagctgaccaacggccctcccaagtgcttagtgtatttgttttcaggttctagcagagcatcaaaaaatgtgtctttcgaacttccgggtgaaagcaatgtttgctgttcgaacatgtgaaggcaatcatgcgtgttggcttccgtgcatacggtgaggcagctgttggctctctgcaggttgttgccaaacgttacgccctggtctttactgaagatgggcgccgacgtgcggtgattggccaattggtataatcctggacctcttgattgttctcctgaggaccaatgccatgcaacaaggttgcttcagacacaaggtggcgtgtagttggtgcaattctgcagttttggggctgttggtattatatggatctgaaggtgcgcggttttctactacaacagatcctccgtttttgcctgtgttctctttcttgtgcatgtgattttctttttcttttccataggactaccttgtacatagttcgtttggcgtgagccatcatgtacatgcaaaatttttacattgttgggttactgacaatgaaatgctgaattttgcaactccctgatttaggacaaaacaag

SEQ ID NO: 24746 - DNA, 4418 bp, Zea Mays
agatctcccttcccgtttgtccttccggcgggcgagggtgacgcccgccacaccgcgagctccagctgctctaatcgatggggcacagctctagaaagaaaaagaagcgcggcgcggccggccgcaaggcagccaaggaccacgccgcgcagctcgaaggagacgagaccgccctcgacgaggagctcacggccctggcttcaattttaggggaggacttcaaagtaacatcagaatcacctcatacacgatgtaatatatgtattaggccttattcggatgacatgggctttgaagatctaaatatttcagctattcttattgtgatatgttttcctggttacccccacaagtgtccaaagttgcggatcctgcctgaaaaaaacttgtctaaagaagatacagatcggctcctttcgcttcttattgaccaggcaaacatttattcccgagaaggacgtgttatgattttcaatttgtttgaggctgcgcaagagtttctatctgagattgctccagctcgtgtttcagtgagcactgcttctttcttgggtttgagctcaactactgatgacaatgtggaagttggctttgacagtgatccttacctgggaatctcttacatatataactccttcgatctatatagtcagttatatgatgatacttattggagtcgacaaggttcagatctgacaacagatagtggcaggaaaaatattgtatctcaagttcaatccaatgttagaagcaagaggaagaccatcattgaaaaatcccacatctcagctgataaggtcaataatgctaaagagtcatctggtgataaagctgaacagcaacatgccacaaagcatggtgccatacgggaggcagctccaactttacatgttgtggatgaggaaactgaaatttacggcaaaagtttgtctgctagcaatacaggaaatacatcagatactcctgaaaggggttttagcagtctaaatgaacctgaggacactgaccttgcagatgaatcttggaatgaacaagattgtgattcggacttcagctcttcaaatgcactaccttatgtttcatacatgttagatgatgcttcacgaaacaagaaaagggatttagttctggtacatctgcttcggatagcctgtgcgtcgaaggattctctttcaagtgctttgccaacaatatcagcagagttgtgcaacataggggttctttccgaatgggctaaggatttaatttctgattctcctgctgtttttggagaaactttcagtcatgtttttgggcaacaaatgatctcttcagagtgttctctattttggagacctgataattcatcatctaagccaaattctcgttatttgaatgattttgaggagctccgttcacttggtcaggggggctttggtcgtgttgcattatgcaaaaacaagctagatgggcgccaatatgctgttaaaaagatacgtctgaaggatagaagtcctcaattgaatgagaagattttaaggtactcagagaggtagccacactttcaagattgcaacatcaacatgttgtccgttattaccaggcatggattgaaactgaatacggtcatcataatattttgaatgctggcgggtcctgcactgctgagagctctatctttagttatgatgaagtcagcctatcggatgcaggtggtgggaataagcaggaatccacgtacttgtacattcaaatggagtattgtcctaggactttgcggcaggattttgagacatacatctcgtcttttgatgttgaccatgcctggcacctgtttcgacaaattgtggaaggtctagctcatgtccatagtcaaggaatcctacacagagacctgacacccagcaacatattttttgatgtccgcaatgatattaaaattggagattttggtttagccaaatttctgaagctggagcagctagatcatgaccaatatcttcctactgaagcactgggtgtatcaatggatggaacaggtcaagttggtacatatttttatactgcaccagaggtagagcagaaatggccacagattaatgaaaaggttgacatgtacagtttgggagtaatattttttgagctttggcatccatttgccacagcgatggaaaggcatcttgttctttccgatcttaagcagaagggagacccgccattgtcatgggaatcaaaatttcctcgtcagtcagtcctgttaagaagcttgctgtcaccaagcccgtctaaccgtccatctgctgtcgaggtcttgcaaaatgaactgcctcctcggatggaagatgagtggctaaatgatgtacttagaatgatacggacaccagaagacacatatgtttatgaccgggttatatctacaatatttaatgaggacaggttcgccaaaatgcaaggccaacatgatagcagcaaaaagtccactggtaacattgataacagtgaacttttggataccatcgttgaggttgccaaggaggttttcaagcggcattgtgctaaaaggttccaaatatcacctttgcatactttggagtggaattttaccaaaaacaggggaaacacagtgaaaatcttaactcaaggaggagagatgctagaactttgctatgaactgcgaacaccatttgttatgtcaattgcttctaatcagacatcatcattcaaacgttatgaaatatcatgggttcatagaagagccgttggccattcaactccttatcgttttcttcagggtgattttgacattattggcggtacttcaccgattccagaggctgaaatcatcaaggtggctttggacctggggacccgcttttatgattccaagacgctagtcatacgtctgaatcacggtaaacttgctgaagcaatttgctcttgggcaggggtttctcaggatcaaagacaaaatgttgctgagtttctgtcttcaactattgttcagtattggccaaatgaagctgaccgcaagtcacagtggagtttgattagggggcaacttttacaggatcttcgtctttctgaagaagttgttgagaagctacataaagcagatcagcggttttgtggctctgcagatctagtacttgctagattaagagggaccctgttttatgatgaatctgcttgcaaggctcttgatgatctatccgcgcttctgagatgtttgagagtatggtcggtagaacaaccaattactactattgatgtactcatgcctccgtcagaatgttactatacaaatttgtttttccaggtatactcaaaagaaggtaatcatggaccgggtttccatgaaaagttgctggcagttggtggacgatatgattggttggtggaacaagcttgggatgagacatctaaatctaaacccccaggtgctgttggtgtgagcattgcacttgagaaatttcttcctaacaatccttcatctgatctgggattgcgaaggttactgtccagggttgaacctagcatcagtgtacttgtctgttcaaggggtggtggcggtctgttgactgaacgcatggaacttgtcgcagagctttggaaagctaacataatggctcagtttgttcctcaggaagatccaagtcttcaagaacagtatgaatatgccagtgaacatgatattaaatgccttgcaattatgactgaatcaggcctgtcacaaacagaccttgtgaaggtccggcatcttgattttaaaaaggagaaggatgttgaaagagagggactaataaagttcctgtctgatgcaatgtgttcacaatacaaaaatcctacgatctggagctgaccaacggccctcccaagtgcttagtgtatttgttttcaggttctagcagagcatcaaaaaatgtgtctttcgaacttccgggtgaaagcaatgtttgctgttcgaacatgtgaaggcaatcatgcgtgttggcttccgtgcatacggtgaggcagctgttggctctctgcaggttgttgccaaacgttacgccctggtctttactgaagatgggcgccgacgtgcggtgattggccaattggtataatcctggacctcttgattgttctcctgaggaccaatgccatgcaacaaggttgcttcagacacaaggtggcgtgtagttggtgcaattctgcagttttggggctgttggtattatatggatctgaaggtgcgcggttttctactacaacagatcctccgtttttgcctgtgttctctttcttgtgcatgtgattttctttttcttttccataggactaccttgtacatagttcgtttggcgtgagccatcatgtacatgcaaaatttttacattgttgggttactgacaatgaaatgctgaattttgcaactccctgatttaggacaaaacaag

SEQ ID NO: 24747 - DNA, 4409 bp, Zea Mays
cgcagatctcccttcccgtttgtccttccggcgggcgagggtgacgcccgccacaccgcgagctccagctgctctaatcgatggggcacagctctagaaagaaaaagaagcgcggcgcggccggccgcaaggcagccaaggaccacgccgcgcagctcgaaggagacgagaccgccctcgacgaggagctcacggccctggcttcaattttaggggaggacttcaaagtaacatcagaatcacctcatacacgatgtaatatatgtattaggccttattcggatgacatgggctttgaagatctaaatatttcagctattcttattgtgatatgttttcctggttacccccacaagtgtccaaagttgcggatcctgcctgaaaaaaacttgtctaaagaagatacagatcggctcctttcgcttcttattgaccaggcaaacatttattcccgagaaggacgtgttatgattttcaatttgtttgaggctgcgcaagagtttctatctgagattgctccagctcgtgtttcagtgagcactgcttctttcttgggtttgagctcaactactgatgacaatgtggaagttggctttgacagtgatccttacctgggaatctcttacatatataactccttcgatctatatagtcagttatatgatgatacttattggagtcgacaaggttcagatctgacaacagatagtggcaggaaaaatattgtatctcaagttcaatccaatgttagaagcaagaggaagaccatcattgaaaaatcccacatctcagctgataaggtcaataatgctaaagagtcatctggtgataaagctgaacagcaacatgccacaaagcatggtgccatacgggaggcagctccaactttacatgttgtggatgaggaaactgaaatttacggcaaaagtttgtctgctagcaatacaggaaatacatcagatactcctgaaaggggttttagcagtctaaatgaacctgaggacactgaccttgcagatgaatcttggaatgaacaagattgtgattcggacttcagctcttcaaatgcactaccttatgtttcatacatgttagatgatgcttcacgaaacaagaaaagggatttagttctggtacatctgcttcggatagcctgtgcgtcgaaggattctctttcaagtgctttgccaacaatatcagcagagttgtgcaacataggggttctttccgaatgggctaaggatttaatttctgattctcctgctgtttttggagaaactttcagtcatgtttttgggcaacaaatgatctcttcagagtgttctctattttggagacctgataattcatcatctaagccaaattctcgttatttgaatgattttgaggagctccgttcacttggtcaggggggctttggtcgtgttgcattatgcaaaaacaagctagatgggcgccaatatgctgttaaaaagatacgtctgaaggatagaagtcctcaattgaatgagaagattttaaggtactcagagaggtagccacactttcaagattgcaacatcaacatgttgtccgttattaccaggcatggattgaaactgaatacggtcatcataatattttgaatgctggcgggtcctgcactgctgagagctctatctttagttatgatgaagtcagcctatcggatgcaggtggtgggaataagcaggaatccacgtacttgtacattcaaatggagtattgtcctaggactttgcggcaggattttgagacatacatctcgtcttttgatgttgaccatgcctggcacctgtttcgacaaattgtggaaggtctagctcatgtccatagtcaaggaatcctacacagagacctgacacccagcaacatattttttgatgtccgcaatgatattaaaattggagattttggtttagccaaatttctgaagctggagcagctagatcatgaccaatatcttcctactgaagcactgggtgtatcaatggatggaacaggtcaagttggtacatatttttatactgcaccagaggtagagcagaaatggccacagattaatgaaaaggttgacatgtacagtttgggagtaatattttttgagctttggcatccatttgccacagcgatggaaaggcatcttgttctttccgatcttaagcagaagggagacccgccattgtcatgggaatcaaaatttcctcgtcagtcagtcctgttaagaagcttgctgtcaccaagcccgtctaaccgtccatctgctgtcgaggtcttgcaaaatgaactgcctcctcggatggaagatgagtggctaaatgatgtacttagaatgatacggacaccagaagacacatatgtttatgaccgggttatatctacaatatttaatgaggacaggttcgccaaaatgcaaggccaacatgatagcagcaaaaagtccactggtaacattgataacagtgaacttttggataccatcgttgaggttgccaaggaggttttcaagcggcattgtgctaaaaggttccaaatatcacctttgcatactttggagtggaattttaccaaaaacaggggaaacacagtgaaaatcttaactcaaggaggagagatgctagaactttgctatgaactgcgaacaccatttgttatgtcaattgcttctaatcagacatcatcattcaaacgttatgaaatatcatgggttcatagaagagccgttggccattcaactccttatcgttttcttcagggtgattttgacattattggcggtacttcaccgattccagaggctgaaatcatcaaggtggctttggacctggggacccgcttttatgattccaagacgctagtcatacgtctgaatcacggtaaacttgctgaagcaatttgctcttgggcaggggtttctcaggatcaaagacaaaatgttgctgagtttctgtcttcaactattgttcagtattggccaaatgaagctgaccgcaagtcacagtggagtttgattagggggcaacttttacaggatcttcgtctttctgaagaagttgttgagaagctacataaagcagatcagcggttttgtggctctgcagatctagtacttgctagattaagagggaccctgttttatgatgaatctgcttgcaaggctcttgatgatctatccgcgcttctgagatgtttgagagtatggtcggtagaacaaccaattactactattgatgtactcatgcctccgtcagaatgttactatacaaatttgtttttccaggtatactcaaaagaaggtaatcatggaccgggtttccatgaaaagttgctggcagttggtggacgatatgattggttggtggaacaagcttgggatgagacatctaaatctaaacccccaggtgctgttggtgtgagcattgcacttgagaaatttcttcctaacaatccttcatctgatctgggattgcgaagggttgaacctagcatcagtgtacttgtctgttcaaggggtggtggcggtctgttgactgaacgcatggaacttgtcgcagagctttggaaagctaacataatggctcagtttgttcctcaggaagatccaagtcttcaagaacagtatgaatatgccagtgaacatgatattaaatgccttgcaattatgactgaatcaggcctgtcacaaacagaccttgtgaaggtccggcatcttgattttaaaaaggagaaggatgttgaaagagagggactaataaagttcctgtctgatgcaatgtgttcacaatacaaaaatcctacgatctggagctgaccaacggccctcccaagtgcttagtgtatttgttttcaggttctagcagagcatcaaaaaatgtgtctttcgaacttccgggtgaaagcaatgtttgctgttcgaacatgtgaaggcaatcatgcgtgttggcttccgtgcatacggtgaggcagctgttggctctctgcaggttgttgccaaacgttacgccctggtctttactgaagatgggcgccgacgtgcggtgattggccaattggtataatcctggacctcttgattgttctcctgaggaccaatgccatgcaacaaggttgcttcagacacaaggtggcgtgtagttggtgcaattctgcagttttggggctgttggtattatatggatctgaaggtgcgcggttttctactacaacagatcctccgtttttgcctgtgttctctttcttgtgcatgtgattttctttttcttttccataggactaccttgtacatagttcgtttggcgtgagccatcatgtacatgcaaaatttttacattgttgggttactgacaatgaaatgctgaattttgcaactccctgatttaggacaaaacaag

SEQ ID NO: 24748 - DNA, 4377 bp, Zea Mays
cgcagatctcccttcccgtttgtccttccggcgggcgagggtgacgcccgccacaccgcgagctccagctgctctaatcgatggggcacagctctagaaagaaaaagaagcgcggcgcggccggccgcaaggcagccaaggaccacgccgcgcagctcgaaggagacgagaccgccctcgacgaggagctcacggccctggcttcaattttaggggaggacttcaaagtaacatcagaatcacctcatacacgatgtaatatatgtattaggccttattcggatgacatgggctttgaagatctaaatatttcagctattcttattgtgatatgttttcctggttacccccacaagtgtccaaagttgcggatcctgcctgaaaaaaacttgtctaaagaagatacagatcggctcctttcgcttcttattgaccaggcaaacatttattcccgagaaggacgtgttatgattttcaatttgtttgaggctgcgcaagagtttctatctgagattgctccagctcgtgtttcagtgagcactgcttctttcttgggtttgagctcaactactgatgacaatgtggaagttggctttgacagtgatccttacctgggaatctcttacatatataactccttcgatctatatagtcagttatatgatgatacttattggagtcgacaaggttcagatctgacaacagatagtggcaggaaaaatattgtatctcaagttcaatccaatgttagaagcaagaggaagaccatcattgaaaaatcccacatctcagctgataaggtcaataatgctaaagagtcatctggtgataaagctgaacagcaacatgccacaaagcatggtgccatacgggaggcagctccaactttacatgttgtggatgaggaaactgaaatttacggcaaaagtttgtctgctagcaatacaggaaatacatcagatactcctgaaaggggttttagcagtctaaatgaacctgaggacactgaccttgcagatgaatcttggaatgaacaagattgtgattcggacttcagctcttcaaatgcactaccttatgtttcatacatgttagatgatgcttcacgaaacaagaaaagggatttagttctggtacatctgcttcggatagcctgtgcgtcgaaggattctctttcaagtgctttgccaacaatatcagcagagttgtgcaacataggggttctttccgaatgggctaaggatttaatttctgattctcctgctgtttttggagaaactttcagtcatgtttttgggcaacaaatgatctcttcagagtgttctctattttggagacctgataattcatcatctaagccaaattctcgttatttgaatgattttgaggagctccgttcacttggtcaggggggctttggtcgtgttgcattatgcaaaaacaagctagatgggcgccaatatgctgttaaaaagatacgtctgaaggatagaagtcctcaattgaatgagaagattttaagagaggtagccacactttcaagattgcaacatcaacatgttgtccgttattaccaggcatggattgaaactgaatacggtcatcataatattttgaatgctggcgggtcctgcactgctgagagctctatctttagttatgatgaagtcagcctatcggatgcaggtggtgggaataagcaggaatccacgtacttgtacattcaaatggagtattgtcctaggactttgcggcaggattttgagacatacatctcgtcttttgatgttgaccatgcctggcacctgtttcgacaaattgtggaaggtctagctcatgtccatagtcaaggaatcctacacagagacctgacacccagcaacatattttttgatgtccgcaatgatattaaaattggagattttggtttagccaaatttctgaagctggagcagctagatcatgaccaatatcttcctactgaagcactgggtgtatcaatggatggaacaggtcaagttggtacatatttttatactgcaccagaggtagagcagaaatggccacagattaatgaaaaggttgacatgtacagtttgggagtaatattttttgagctttggcatccatttgccacagcgatggaaaggcatcttgttctttccgatcttaagcagaagggagacccgccattgtcatgggaatcaaaatttcctcgtcagtcagtcctgttaagaagcttgctgtcaccaagcccgtctaaccgtccatctgctgtcgaggtcttgcaaaatgaactgcctcctcggatggaagatgagtggctaaatgatgtacttagaatgatacggacaccagaagacacatatgtttatgaccgggttatatctacaatatttaatgaggacaggttcgccaaaatgcaaggccaacatgatagcagcaaaaagtccactggtaacattgataacagtgaacttttggataccatcgttgaggttgccaaggaggttttcaagcggcattgtgctaaaaggttccaaatatcacctttgcatactttggagtggaattttaccaaaaacaggggaaacacagtgaaaatcttaactcaaggaggagagatgctagaactttgctatgaactgcgaacaccatttgttatgtcaattgcttctaatcagacatcatcattcaaacgttatgaaatatcatgggttcatagaagagccgttggccattcaactccttatcgttttcttcagggtgattttgacattattggcggtacttcaccgattccagaggctgaaatcatcaaggtggctttggacctggggacccgcttttatgattccaagacgctagtcatacgtctgaatcacggtaaacttgctgaagcaatttgctcttgggcaggggtttctcaggatcaaagacaaaatgttgctgagtattggccaaatgaagctgaccgcaagtcacagtggagtttgattagggggcaacttttacaggatcttcgtctttctgaagaagttgttgagaagctacataaagcagatcagcggttttgtggctctgcagatctagtacttgctagattaagagggaccctgttttatgatgaatctgcttgcaaggctcttgatgatctatccgcgcttctgagatgtttgagagtatggtcggtagaacaaccaattactactattgatgtactcatgcctccgtcagaatgttactatacaaatttgtttttccaggtatactcaaaagaaggtaatcatggaccgggtttccatgaaaagttgctggcagttggtggacgatatgattggttggtggaacaagcttgggatgagacatctaaatctaaacccccaggtgctgttggtgtgagcattgcacttgagaaatttcttcctaacaatccttcatctgatctgggattgcgaagggttgaacctagcatcagtgtacttgtctgttcaaggggtggtggcggtctgttgactgaacgcatggaacttgtcgcagagctttggaaagctaacataatggctcagtttgttcctcaggaagatccaagtcttcaagaacagtatgaatatgccagtgaacatgatattaaatgccttgcaattatgactgaatcaggcctgtcacaaacagaccttgtgaaggtccggcatcttgattttaaaaaggagaaggatgttgaaagagagggactaataaagttcctgtctgatgcaatgtgttcacaatacaaaaatcctacgatctggagctgaccaacggccctcccaagtgcttagtgtatttgttttcaggttctagcagagcatcaaaaaatgtgtctttcgaacttccgggtgaaagcaatgtttgctgttcgaacatgtgaaggcaatcatgcgtgttggcttccgtgcatacggtgaggcagctgttggctctctgcaggttgttgccaaacgttacgccctggtctttactgaagatgggcgccgacgtgcggtgattggccaattggtataatcctggacctcttgattgttctcctgaggaccaatgccatgcaacaaggttgcttcagacacaaggtggcgtgtagttggtgcaattctgcagttttggggctgttggtattatatggatctgaaggtgcgcggttttctactacaacagatcctccgtttttgcctgtgttctctttcttgtgcatgtgattttctttttcttttccataggactaccttgtacatagttcgtttggcgtgagccatcatgtacatgcaaaatttttacattgttgggttactgacaatgaaatgctgaattttgcaactccctgatttaggacaaaacaag

SEQ ID NO: 24749 - DNA, 4398 bp, Zea Mays
gccagcgcagatctcccttcccgtttgtccttccggcgggcgagggtgacgcccgccacaccgcgagctccagctgctctaatcgatggggcacagctctagaaagaaaaagaagcgcggcgcggccggccgcaaggcagccaaggaccacgccgcgcagctcgaaggagacgagaccgccctcgacgaggagctcacggccctggcttcaattttaggggaggacttcaaagtaacatcagaatcacctcatacacgatgtaatatatgtattaggccttattcggatgacatgggctttgaagatctaaatatttcagctattcttattgtgatatgttttcctggttacccccacaagtgtccaaagttgcggatcctgcctgaaaaaaacttgtctaaagaagatacagatcggctcctttcgcttcttattgaccaggcaaacatttattcccgagaaggacgtgttatgattttcaatttgtttgaggctgcgcaagagtttctatctgagattgctccagctcgtgtttcagtgagcactgcttctttcttgggtttgagctcaactactgatgacaatgtggaagttggctttgacagtgatccttacctgggaatctcttacatatataactccttcgatctatatagtcagttatatgatgatacttattggagtcgacaaggttcagatctgacaacagatagtggcaggaaaaatattgtatctcaagttcaatccaatgttagaagcaagaggaagaccatcattgaaaaatcccacatctcagctgataaggtcaataatgctaaagagtcatctggtgataaagctgaacagcaacatgccacaaagcatggtgccatacgggaggcagctccaactttacatgttgtggatgaggaaactgaaatttacggcaaaagtttgtctgctagcaatacaggaaatacatcagatactcctgaaaggggttttagcagtctaaatgaacctgagatgaatcttggaatgaacaagattgtgattcggacttcagctcttcaaatgcactaccttatgtttcatacatgttagatgatgcttcacgaaacaagaaaagggatttagttctggtacatctgcttcggatagcctgtgcgtcgaaggattctctttcaagtgctttgccaacaatatcagcagagttgtgcaacataggggttctttccgaatgggctaaggatttaatttctgattctcctgctgtttttggagaaactttcagtcatgtttttgggcaacaaatgatctcttcagagtgttctctattttggagacctgataattcatcatctaagccaaattctcgttatttgaatgattttgaggagctccgttcacttggtcaggggggctttggtcgtgttgcattatgcaaaaacaagctagatgggcgccaatatgctgttaaaaagatacgtctgaaggatagaagtcctcaattgaatgagaagattttaaggtactcagagaggtagccacactttcaagattgcaacatcaacatgttgtccgttattaccaggcatggattgaaactgaatacggtcatcataatattttgaatgctggcgggtcctgcactgctgagagctctatctttagttatgatgaagtcagcctatcggatgcaggtggtgggaataagcaggaatccacgtacttgtacattcaaatggagtattgtcctaggactttgcggcaggattttgagacatacatctcgtcttttgatgttgaccatgcctggcacctgtttcgacaaattgtggaaggtctagctcatgtccatagtcaaggaatcctacacagagacctgacacccagcaacatattttttgatgtccgcaatgatattaaaattggagattttggtttagccaaatttctgaagctggagcagctagatcatgaccaatatcttcctactgaagcactgggtgtatcaatggatggaacaggtcaagttggtacatatttttatactgcaccagaggtagagcagaaatggccacagattaatgaaaaggttgacatgtacagtttgggagtaatattttttgagctttggcatccatttgccacagcgatggaaaggcatcttgttctttccgatcttaagcagaagggagacccgccattgtcatgggaatcaaaatttcctcgtcagtcagtcctgttaagaagcttgctgtcaccaagcccgtctaaccgtccatctgctgtcgaggtcttgcaaaatgaactgcctcctcggatggaagatgagtggctaaatgatgtacttagaatgatacggacaccagaagacacatatgtttatgaccgggttatatctacaatatttaatgaggacaggttcgccaaaatgcaaggccaacatgatagcagcaaaaagtccactggtaacattgataacagtgaacttttggataccatcgttgaggttgccaaggaggttttcaagcggcattgtgctaaaaggttccaaatatcacctttgcatactttggagtggaattttaccaaaaacaggggaaacacagtgaaaatcttaactcaaggaggagagatgctagaactttgctatgaactgcgaacaccatttgttatgtcaattgcttctaatcagacatcatcattcaaacgttatgaaatatcatgggttcatagaagagccgttggccattcaactccttatcgttttcttcagggtgattttgacattattggcggtacttcaccgattccagaggctgaaatcatcaaggtggctttggacctggggacccgcttttatgattccaagacgctagtcatacgtctgaatcacggtaaacttgctgaagcaatttgctcttgggcaggggtttctcaggatcaaagacaaaatgttgctgagtttctgtcttcaactattgttcagtattggccaaatgaagctgaccgcaagtcacagtggagtttgattagggggcaacttttacaggatcttcgtctttctgaagaagttgttgagaagctacataaagcagatcagcggttttgtggctctgcagatctagtacttgctagattaagagggaccctgttttatgatgaatctgcttgcaaggctcttgatgatctatccgcgcttctgagatgtttgagagtatggtcggtagaacaaccaattactactattgatgtactcatgcctccgtcagaatgttactatacaaatttgtttttccaggtatactcaaaagaaggtaatcatggaccgggtttccatgaaaagttgctggcagttggtggacgatatgattggttggtggaacaagcttgggatgagacatctaaatctaaacccccaggtgctgttggtgtgagcattgcacttgagaaatttcttcctaacaatccttcatctgatctgggattgcgaagggttgaacctagcatcagtgtacttgtctgttcaaggggtggtggcggtctgttgactgaacgcatggaacttgtcgcagagctttggaaagctaacataatggctcagtttgttcctcaggaagatccaagtcttcaagaacagtatgaatatgccagtgaacatgatattaaatgccttgcaattatgactgaatcaggcctgtcacaaacagaccttgtgaaggtccggcatcttgattttaaaaaggagaaggatgttgaaagagagggactaataaagttcctgtctgatgcaatgtgttcacaatacaaaaatcctacgatctggagctgaccaacggccctcccaagtgcttagtgtatttgttttcaggttctagcagagcatcaaaaaatgtgtctttcgaacttccgggtgaaagcaatgtttgctgttcgaacatgtgaaggcaatcatgcgtgttggcttccgtgcatacggtgaggcagctgttggctctctgcaggttgttgccaaacgttacgccctggtctttactgaagatgggcgccgacgtgcggtgattggccaattggtataatcctggacctcttgattgttctcctgaggaccaatgccatgcaacaaggttgcttcagacacaaggtggcgtgtagttggtgcaattctgcagttttggggctgttggtattatatggatctgaaggtgcgcggttttctactacaacagatcctccgtttttgcctgtgttctctttcttgtgcatgtgattttctttttcttttccataggactaccttgtacatagttcgtttggcgtgagccatcatgtacatgcaaaatttttacattgttgggttactgacaatgaaatgctgaattttgcaactccctgatttaggacaaaacaag

SEQ ID NO: 24750 - DNA, 4429 bp, Zea Mays
ccacgccagacgccagcgcagatctcccttcccgtttgtccttccggcgggcgagggtgacgcccgccacaccgcgagctccagctgctctaatcgatggggcacagctctagaaagaaaaagaagcgcggcgcggccggccgcaaggcagccaaggaccacgccgcgcagctcgaaggagacgagaccgccctcgacgaggagctcacggccctggcttcaattttaggggaggacttcaaagtaacatcagaatcacctcatacacgatgtaatatatgtattaggccttattcggatgacatgggctttgaagatctaaatatttcagctattcttattgtgatatgttttcctggttacccccacaagtgtccaaagttgcggatcctgcctgaaaaaaacttgtctaaagaagatacagatcggctcctttcgcttcttattgaccaggcaaacatttattcccgagaaggacgtgttatgattttcaatttgtttgaggctgcgcaagagtttctatctgagattgctccagctcgtgtttcagtgagcactgcttctttcttgggtttgagctcaactactgatgacaatgtggaagttggctttgacagtgatccttacctgggaatctcttacatatataactccttcgatctatatagtcagttatatgatgatacttattggagtcgacaaggttcagatctgacaacagatagtggcaggaaaaatattgtatctcaagttcaatccaatgttagaagcaagaggaagaccatcattgaaaaatcccacatctcagctgataaggtcaataatgctaaagagtcatctggtgataaagctgaacagcaacatgccacaaagcatggtgccatacgggaggcagctccaactttacatgttgtggatgaggaaactgaaatttacggcaaaagtttgtctgctagcaatacaggaaatacatcagatactcctgaaaggggttttagcagtctaaatgaacctgaggacactgaccttgcagatgaatcttggaatgaacaagattgtgattcggacttcagctcttcaaatgcactaccttatgtttcatacatgttagatgatgcttcacgaaacaagaaaagggatttagttctggtacatctgcttcggatagcctgtgcgtcgaaggattctctttcaagtgctttgccaacaatatcagcagagttgtgcaacataggggttctttccgaatgggctaaggatttaatttctgattctcctgctgtttttggagaaactttcagtcatgtttttgggcaacaaatgatctcttcagagtgttctctattttggagacctgataattcatcatctaagccaaattctcgttatttgaatgattttgaggagctccgttcacttggtcaggggggctttggtcgtgttgcattatgcaaaaacaagctagatgggcgccaatatgctgttaaaaagatacgtctgaaggatagaagtcctcaattgaatgagaagattttaagagaggtagccacactttcaagattgcaacatcaacatgttgtccgttattaccaggcatggattgaaactgaatacggtcatcataatattttgaatgctggcgggtcctgcactgctgagagctctatctttagttatgatgaagtcagcctatcggatgcaggtggtgggaataagcaggaatccacgtacttgtacattcaaatggagtattgtcctaggactttgcggcaggattttgagacatacatctcgtcttttgatgttgaccatgcctggcacctgtttcgacaaattgtggaaggtctagctcatgtccatagtcaaggaatcctacacagagacctgacacccagcaacatattttttgatgtccgcaatgatattaaaattggagattttggtttagccaaatttctgaagctggagcagctagatcatgaccaatatcttcctactgaagcactgggtgtatcaatggatggaacaggtcaagttggtacatatttttatactgcaccagaggtagagcagaaatggccacagattaatgaaaaggttgacatgtacagtttgggagtaatattttttgagctttggcatccatttgccacagcgatggaaaggcatcttgttctttccgatcttaagcagaagggagacccgccattgtcatgggaatcaaaatttcctcgtcagtcagtcctgttaagaagcttgctgtcaccaagcccgtctaaccgtccatctgctgtcgaggtcttgcaaaatgaactgcctcctcggatggaagatgagtggctaaatgatgtacttagaatgatacggacaccagaagacacatatgtttatgaccgggttatatctacaatatttaatgaggacaggttcgccaaaatgcaaggccaacatgatagcagcaaaaagtccactggtaacattgataacagtgaacttttggataccatcgttgaggttgccaaggaggttttcaagcggcattgtgctaaaaggttccaaatatcacctttgcatactttggagtggaattttaccaaaaacaggggaaacacagtgaaaatcttaactcaaggaggagagatgctagaactttgctatgaactgcgaacaccatttgttatgtcaattgcttctaatcagacatcatcattcaaacgttatgaaatatcatgggttcatagaagagccgttggccattcaactccttatcgttttcttcagggtgattttgacattattggcggtacttcaccgattccagaggctgaaatcatcaaggtggctttggacctggggacccgcttttatgattccaagacgctagtcatacgtctgaatcacggtaaacttgctgaagcaatttgctcttgggcaggggtttctcaggatcaaagacaaaatgttgctgagtttctgtcttcaactattgttcagtattggccaaatgaagctgaccgcaagtcacagtggagtttgattagggggcaacttttacaggatcttcgtctttctgaagaagttgttgagaagctacataaagcagatcagcggttttgtggctctgcagatctagtacttgctagattaagagggaccctgttttatgatgaatctgcttgcaaggctcttgatgatctatccgcgcttctgagatgtttgagagtatggtcggtagaacaaccaattactactattgatgtactcatgcctccgtcagaatgttactatacaaatttgtttttccaggtatactcaaaagaaggtaatcatggaccgggtttccatgaaaagttgctggcagttggtggacgatatgattggttggtggaacaagcttgggatgagacatctaaatctaaacccccaggtgctgttggtgtgagcattgcacttgagaaatttcttcctaacaatccttcatctgatctgggattgcgaaggttactgtccagggttgaacctagcatcagtgtacttgtctgttcaaggggtggtggcggtctgttgactgaacgcatggaacttgtcgcagagctttggaaagctaacataatggctcagtttgttcctcaggaagatccaagtcttcaagaacagtatgaatatgccagtgaacatgatattaaatgccttgcaattatgactgaatcaggcctgtcacaaacagaccttgtgaaggtccggcatcttgattttaaaaaggagaaggatgttgaaagagagggactaataaagttcctgtctgatgcaatgtgttcacaatacaaaaatcctacgatctggagctgaccaacggccctcccaagtgcttagtgtatttgttttcaggttctagcagagcatcaaaaaatgtgtctttcgaacttccgggtgaaagcaatgtttgctgttcgaacatgtgaaggcaatcatgcgtgttggcttccgtgcatacggtgaggcagctgttggctctctgcaggttgttgccaaacgttacgccctggtctttactgaagatgggcgccgacgtgcggtgattggccaattggtataatcctggacctcttgattgttctcctgaggaccaatgccatgcaacaaggttgcttcagacacaaggtggcgtgtagttggtgcaattctgcagttttggggctgttggtattatatggatctgaaggtgcgcggttttctactacaacagatcctccgtttttgcctgtgttctctttcttgtgcatgtgattttctttttcttttccataggactaccttgtacatagttcgtttggcgtgagccatcatgtacatgcaaaatttttacattgttgggttactgacaatgaaatgctgaattttgcaactccctgatttaggacaaaacaag

SEQ ID NO: 24751 - DNA, 757 bp, Zea Mays
gcagtgagcaggagggtggagaaggtggagagggactacttgtcgtacgacgagccaagaacgtgttctcgggcgaggcatgcaacgaccttggtggcgagttctgcgatgcgtcgtaccatgtcgacgtctttagggagctagcgcacacctgaagcctgatcctaattcccatccatgtttgtccagaaccaagttgatctcacaacgatcgggtgttcacaatggaggcctacgacctactcgatggcgacgcgtgcaacgcgcagatatactcggtggcatcggcagtgagcaggagggtggagaaggtggagagggactacttgtcgtacgatgagccaagaacggtgttctcgggcgaggtatgcaacgaccttggtggcgagttctgcgatgtgtcgtaccatgccgacgtctttagggagctagcgcagacctgaagcctgatcctaattcccatccatgtttgtccagaaccaagttgatctcacagtcgggtagatgttcacacattgtatctacgtgtagccaagcaagaccaagggtgtatgtaatgtatataggcatgtcttgggttggctcagctgccaaggtatgtagtataaaccaagatgaaatggtactggtgttattccctgttttacgatgttagaagatggaacacaaagctatgcaagtactatgctatgcccgatctgttccctgcacttgcaagccaatggatgaatggagtgtgtgctgcttaagctgacct

SEQ ID NO: 24752 - DNA, 766 bp, Zea Mays
gcagtgagcaggagggtggagaaggtggagagggactacttgtcgtacgacgagccaagaacgtgttctcgggcgaggcatgcaacgaccttggtggcgagttctgcgatgcgtcgtaccatgtcgacgtctttagggagctagcgcacacctgaagcctgatcctaattcccatccatagttcgaatcggtaacacacacgtgtgtgttgctgatgctgcagggtgttcacaatggaggcctacgacctactcgatggcgacgcgtgcaacgcgcagatatactcggtggcatcggcagtgagcaggagggtggagaaggtggagagggactacttgtcgtacgatgagccaagaacggtgttctcgggcgaggtatgcaacgaccttggtggcgagttctgcgatgtgtcgtaccatgccgacgtctttagggagctagcgcagacctgaagcctgatcctaattcccatccatgtttgtccagaaccaagttgatctcacagtcgggtagatgttcacacattgtatctacgtgtagccaagcaagaccaagggtgtatgtaatgtatataggcatgtcttgggttggctcagctgccaaggtatgtagtataaaccaagatgaaatggtactggtgttattccctgttttacgatgttagaagatggaacacaaagctatgcaagtactatgctatgcccgatctgttccctgcacttgcaagccaatggatgaatggagtgtgtgctgcttaagctgacct

SEQ ID NO: 24753 - DNA, 554 bp, Zea Mays
atcaacgatcgggtgttcacaatggaggcctacgacctactcgatggcgacgcgtgcaacgcgcagatatactcggtggcatcggcagtgagcaggagggtggagaaggtggagagggactacttgtcgtacgatgagccaagaacggtgttctcgggcgaggtatgcaacgaccttggtggcgagttctgcgatgtgtcgtaccatgccgacgtctttagggagctagcgcagacctgaagcctgatcctaattcccatccatgtttgtccagaaccaagttgatctcacagtcgggtagatgttcacacattgtatctacgtgtagccaagcaagaccaagggtgtatgtaatgtatataggcatgtcttgggttggctcagctgccaaggtatgtagtataaaccaagatgaaatggtactggtgttattccctgttttacgatgttagaagatggaacacaaagctatgcaagtactatgctatgcccgatctgttccctgcacttgcaagccaatggatgaatggagtgtgtgctgcttaagctgacct

SEQ ID NO: 24754 - DNA, 806 bp, Zea Mays
atcaacgatcgggtgttcacaatggaggcctacgacctactcgatggcgacgcgtgcaacgcgcagatatactcggtggcatcggcagtgagcaggagggtggagaaggtggagagggactacttgtcgtacgacgagccaagaacgtgttctcgggcgaggcatgcaacgaccttggtggcgagttctgcgatgcgtcgtaccatgtcgacgtctttagggagctagcgcacacctgaagcctgatcctaattcccatccatggtgttcacaatggaggcctacgacctactcgatggcgacgcgtgcaacgcgcagatatactcggtggcatcggcagtgagcaggagggtggagaaggtggagagggactacttgtcgtacgatgagccaagaacggtgttctcgggcgaggtatgcaacgaccttggtggcgagttctgcgatgtgtcgtaccatgccgacgtctttagggagctagcgcagacctgaagcctgatcctaattcccatccatgtttgtccagaaccaagttgatctcacagtcgggtagatgttcacacattgtatctacgtgtagccaagcaagaccaagggtgtatgtaatgtatataggcatgtcttgggttggctcagctgccaaggtatgtagtataaaccaagatgaaatggtactggtgttattccctgttttacgatgttagaagatggaacacaaagctatgcaagtactatgctatgcccgatctgttccctgcacttgcaagccaatggatgaatggagtgtgtgctgcttaagctgacct

SEQ ID NO: 24755 - DNA, 1515 bp, Zea Mays
ctgctcaccaccaagttcccaccggggactttcccagtaaaggttgcaatccctgttgtgccaacagtgagggtggttatcactttcaccaagtttgtccccctcatcgagcctgaggagttcttcaccccaatgtcgagccccagcctcttagcgagctcagggtcgggaagcatcatggcgaagcctaacacccaaaagagctcctacctgaagtgggtctcgaagaactcaagaccagaggccgtgaacctgtcacaagtcgcggacaacggcgaccctttcttgtccatccaatatattctaagcattacatgatctgtaatggatgcgcttgttgtggtgcgctgagtgccagtgtagctcgggtgctgcacaagatggtcagtgacatcatgtgtggcttcatccttatgatgtacacgaagaaacaatggtcaagggaccccactctggctctgcagtatataacggaagctcaccacacaagatcgataacccttttagatcatactgtaccaagctgtcgctccacttcaatagaacacttgatcacatacaggaagtttagatcagaaaatgcaggctgccgctactcccgtcaggttctcagatgtgttcccatcaagggccggtcgtggagaagagcacggtggtggttagtgtccctgttgttgtcatggttgagactgctgagatcgactacaactcgagcttctcggtgttcacaatggaggcctacgacctactcgatggcgacgcgtgcaacgcgcagatatactcggtggcatcggcagtgagcaggagggtggagaaggtggagagggactacttgtcgtacgacgagccaagaacgtgttctcgggcgaggcatgcaacgaccttggtggcgagttctgcgatgcgtcgtaccatgtcgacgtctttagggagctagcgcacacctgaagcctgatcctaattcccatccatggtgttcacaatggaggcctacgacctactcgatggcgacgcgtgcaacgcgcagatatactcggtggcatcggcagtgagcaggagggtggagaaggtggagagggactacttgtcgtacgatgagccaagaacggtgttctcgggcgaggtatgcaacgaccttggtggcgagttctgcgatgtgtcgtaccatgccgacgtctttagggagctagcgcagacctgaagcctgatcctaattcccatccatgtttgtccagaaccaagttgatctcacagtcgggtagatgttcacacattgtatctacgtgtagccaagcaagaccaagggtgtatgtaatgtatataggcatgtcttgggttggctcagctgccaaggtatgtagtataaaccaagatgaaatggtactggtgttattccctgttttacgatgttagaagatggaacacaaagctatgcaagtactatgctatgcccgatctgttccctgcacttgcaagccaatggatgaatggagtgtgtgctgcttaagctgacct

SEQ ID NO: 24756 - DNA, 1456 bp, Zea Mays
ctgctcaccaccaagttcccaccggggactttcccagtaaaggttgcaatccctgttgtgccaacagtgagggtggttatcactttcaccaagtttgtccccctcatcgagcctgaggagttcttcaccccaatgtcgagccccagcctcttagcgagctcagggtcgggaagcatcatggcgaagcctaacacccaaaagagctcctacctgaagtgggtctcgaagaactcaagaccagaggccgtgaacctgtcacaagtcgcggacaacggcgaccctttcttgtccatccaatatattctaagcattacatgatctgtaatggatgcgcttgttgtggtgcgctgagtgccagtgtagctcgggtgctgcacaagatggtcagtgacatcatgtgtggcttcatccttatgatgtacacgaaggttggactctttggccctattactagctccattgatgttactaaattcatagtaagtgcttttgtatcctttgtgttcaagtctctatgcctaggtagcaaaaggatctagtgaggacatctatttcatgaatgtcatgcttacagaatattacacttatatttccactattgactaatgaagttatttttagaaacaatggtcaagggaccccactctggctctgcagtatataacggaagctcaccacacaagatcgataacccttttagatcatactgtaccaagctgtcgctccacttcaatagaacacttgatcacatacaggaagtttagatcagaaaatgcaggctgccgctactcccgtcaggttctcagatgtgttcccatcaagggccggtcgtggagaagagcacggtggtggttagtgtccctgttgttgtcatggttgagactgctgagatcgactacaactcgagcttctcggtgttcacaatggaggcctacgacctactcgatggcgacgcgtgcaacgcgcagatatactcggtggcatcggcagtgagcaggagggtggagaaggtggagagggactacttgtcgtacgatgagccaagaacggtgttctcgggcgaggtatgcaacgaccttggtggcgagttctgcgatgtgtcgtaccatgccgacgtctttagggagctagcgcagacctgaagcctgatcctaattcccatccatgtttgtccagaaccaagttgatctcacagtcgggtagatgttcacacattgtatctacgtgtagccaagcaagaccaagggtgtatgtaatgtatataggcatgtcttgggttggctcagctgccaaggtatgtagtataaaccaagatgaaatggtactggtgttattccctgttttacgatgttagaagatggaacacaaagctatgcaagtactatgctatgcccgatctgttccctgcacttgcaagccaatggatgaatggagtgtgtgctgcttaagctgacct

SEQ ID NO: 24757 - DNA, 1305 bp, Zea Mays
ctgctcaccaccaagttcccaccggggactttcccagtaaaggttgcaatccctgttgtgccaacagtgagggtggttatcactttcaccaagtttgtccccctcatcgagcctgaggagttcttcaccccaatgtcgagccccagcctcttagcgagctcagggtcgggaagcatcatggcgaagcctaacacccaaaagagctcctacctgaagtgggtctcgaagaactcaagaccagaggccgtgaacctgtcacaagtcgcggacaacggcgaccctttcttgtccatccaatatattctaagcattacatgatctgtaatggatgcgcttgttgtggtgcgctgagtgccagtgtagctcgggtgctgcacaagatggtcagtgacatcatgtgtggcttcatccttatgatgtacacgaagaaacaatggtcaagggaccccactctggctctgcagtatataacggaagctcaccacacaagatcgataacccttttagatcatactgtaccaagctgtcgctccacttcaatagaacacttgatcacatacaggaagtttagatcagaaaatgcaggctgccgctactcccgtcaggttctcagatgtgttcccatcaagggccggtcgtggagaagagcacggtggtggttagtgtccctgttgttgtcatggttgagactgctgagatcgactacaactcgagcttctcttcgaatcggtaacacacacgtgtgtgttgctgatgctgcagggtgttcacaatggaggcctacgacctactcgatggcgacgcgtgcaacgcgcagatatactcggtggcatcggcagtgagcaggagggtggagaaggtggagagggactacttgtcgtacgatgagccaagaacggtgttctcgggcgaggtatgcaacgaccttggtggcgagttctgcgatgtgtcgtaccatgccgacgtctttagggagctagcgcagacctgaagcctgatcctaattcccatccatgtttgtccagaaccaagttgatctcacagtcgggtagatgttcacacattgtatctacgtgtagccaagcaagaccaagggtgtatgtaatgtatataggcatgtcttgggttggctcagctgccaaggtatgtagtataaaccaagatgaaatggtactggtgttattccctgttttacgatgttagaagatggaacacaaagctatgcaagtactatgctatgcccgatctgttccctgcacttgcaagccaatggatgaatggagtgtgtgctgcttaagctgacct

SEQ ID NO: 24758 - DNA, 1621 bp, Zea Mays
gaattccttccgttgcctggcgaaccgcgtgcgcgtcgtgcgtcggctccgcgtgctgctcaccaccaagttcccaccggggactttcccagtaaaggttgcaatccctgttgtgccaacagtgagggtggttatcactttcaccaagtttgtccccctcatcgagcctgaggagttcttcaccccaatgtcgagccccagcctcttagcgagctcagggtcgggaagcatcatggcgaagcctaacacccaaaagagctcctacctgaagtgggtctcgaagaactcaagaccagaggccgtgaacctgtcacaagtcgcggacaacggcgaccctttcttgtccatccaatatattctaagcattacatgatctgtaatggatgcgcttgttgtggtgcgctgagtgccagtgtagctcgggtgctgcacaagatggtcagtgacatcatgtgtggcttcatccttatgatgtacacgaaggttggactctttggccctattactagctccattgatgttactaaattcataaaacaatggtcaagggaccccactctggctctgcagtatataacggaagctcaccacacaagatcgataacccttttagatcatactgtaccaagctgtcgctccacttcaatagaacacttgatcacatacaggaagtttagatcagaaaatgcaggctgccgctactcccgtcaggttctcagatgtgttcccatcaagggccggtcgtggagaagagcacggtggtggttagtgtccctgttgttgtcatggttgagactgctgagatcgactacaactcgagcttctcggtgttcacaatggaggcctacgacctactcgatggcgacgcgtgcaacgcgcagatatactcggtggcatcggcagtgagcaggagggtggagaaggtggagagggactacttgtcgtacgacgagccaagaacgtgttctcgggcgaggcatgcaacgaccttggtggcgagttctgcgatgcgtcgtaccatgtcgacgtctttagggagctagcgcacacctgaagcctgatcctaattcccatccatggtgttcacaatggaggcctacgacctactcgatggcgacgcgtgcaacgcgcagatatactcggtggcatcggcagtgagcaggagggtggagaaggtggagagggactacttgtcgtacgatgagccaagaacggtgttctcgggcgaggtatgcaacgaccttggtggcgagttctgcgatgtgtcgtaccatgccgacgtctttagggagctagcgcagacctgaagcctgatcctaattcccatccatgtttgtccagaaccaagttgatctcacagtcgggtagatgttcacacattgtatctacgtgtagccaagcaagaccaagggtgtatgtaatgtatataggcatgtcttgggttggctcagctgccaaggtatgtagtataaaccaagatgaaatggtactggtgttattccctgttttacgatgttagaagatggaacacaaagctatgcaagtactatgctatgcccgatctgttccctgcacttgcaagccaatggatgaatggagtgtgtgctgcttaagctgacct

SEQ ID NO: 24759 - DNA, 2940 bp, Zea Mays
aacagtttgacccaagcccctccggcactccacacgtttcagaccagacaacggcgaagaaggcagaagaaagaagacgactcgaccgtcggcggaaacagaaaaggagccacgccggcgcggcgcgcatccagaaagcgctcgggattcgcacacacacatgcccacgcgcggcgcggcgcggtatattccaccagaaccagatcaccaccttcccggggcaatccggtaactgtatacagttgcaagatgcacgatgggaaagaaggaaaaaaatccgacgcttgtcacaggataggagtgagtaaaaatcaatgaccatagcagcagaagcggcgaaacttccaccccaccttcacctccttgcttatatatactcgccccgccgccccggggccggctcccacctcgctccagtctagacggcggtttgactttccgaccggggaatcggcgctgcgtttgatttgaggaggcgacacgagacgggacgggagggatctcttcgctggagcgttgcccgattcgtcgcggttctcggacaagggagggagggcacacctcgggctccgatcgaagagctttgttaacattagagattaaaaggtagcgccgtagcaaaatgaaggcaccatcactactggttcagtgtttccctggcttgcttcccagcaaggccactagttgcgtgccaattgtatctgagaaggatctgcagctaccatcaccagctgttgaaataatcccctcaaagagtgttcatccatacaaatatgctggagagaaggttgatgtgcaaggtcttaatattttcaagggtaaagtcagtgtagcagatatgatagttatctcgccttctgaagtagcatcatcaaaatatgatggaactctgaaatactgggagagttccattacccttgtcgacattcttaaaaatgagatccgtgatgggcagttgagcttcaggggcaagcgggttctagagcttggatgtggatatggcctctctgggatttttgcctgcttgaagggtgcatccacagttcactttcaggacataaatgcagaaacgatacggtgcagaacaatacccaatgttcttgcaaatcttgagcaggctcaggaccgacagaacagaccatcagagagccctgttacaccatctaggcagctcttggctcctaatgtacatttctatgctggagagtgggatgaactcccaacaattctctcagttgtgcagccacctgcagcaccaacaaacctcagcttctctgaggatgattttatggatggctgcagtagccatgatggaagcagtgtagttggtcatgactactgccccaggagatctaggaagctttctggtagccgtgcatgggagagagctagtgagaccgaccaggcagatagtggctatgatgtgatcttgatttctgatgtcccctacgcagctaactctctgaagaagctctatgcgcttatttcaaagtgcctacgtcctccttatggagtcctgtacgtggcttccaagaagaacttggttggttccaatggtggcgccaggcagcttcgagctctcatggaagaggaaggtgtccttggtggccacttcttgactgaggttgcaatccctgttgtgccaacagtgagggtggttatcactttcaccaagtttgtccccctcatcgagcctgaggagttcttcaccccaatgtcgagccccagcctcttagcgagctcagggtcgggaagcatcatggcgaagcctaacacccaaaagagctcctacctgaagtgggtctcgaagaactcaagaccagaggccgtgaacctgtcacaagtcgcggacaacggcgaccctttcttgtccatccaatatattctaagcattacatgatctgtaatggatgcgcttgttgtggtgcgctgagtgccagtgtagctcgggtgctgcacaagatggtcagtgacatcatgtgtggcttcatccttatgatgtacacgaaggttggactctttggccctattactagctccattgatgttactaaattcataaaacaatggtcaagggaccccactctggctctgcagtatataacggaagctcaccacacaagatcgataacccttttagatcatactgtaccaagctgtcgctccacttcaatagaacacttgatcacatacaggaagtttagatcagaaaatgcaggctgccgctactcccgtcaggttctcagatgtgttcccatcaagggccggtcgtggagaagagcacggtggtggttagtgtccctgttgttgtcatggttgagactgctgagatcgactacaactcgagcttctcagttcgaatcggtaacacacacgtgtgtgttgctgatgctgcagggtgttcacaatggaggcctacgacctactcgatggcgacgcgtgcaacgcgcagatatactcggtggcatcggcagtgagcaggagggtggagaaggtggagagggactacttgtcgtacgatgagccaagaacggtgttctcgggcgaggtatgcaacgaccttggtggcgagttctgcgatgtgtcgtaccatgccgacgtctttagggagctagcgcagacctgaagcctgatcctaattcccatccatgtttgtccagaaccaagttgatctcacagtcgggtagatgttcacacattgtatctacgtgtagccaagcaagaccaagggtgtatgtaatgtatataggcatgtcttgggttggctcagctgccaaggtatgtagtataaaccaagatgaaatggtactggtgttattccctgttttacgatgttagaagatggaacacaaagctatgcaagtactatgctatgcccgatctgttccctgcacttgcaagccaatggatgaatggagtgtgtgctgcttaagctgacct

SEQ ID NO: 24760 - DNA, 3290 bp, Zea Mays
aacagtttgacccaagcccctccggcactccacacgtttcagaccagacaacggcgaagaaggcagaagaaagaagacgactcgaccgtcggcggaaacagaaaaggagccacgccggcgcggcgcgcatccagaaagcgctcgggattcgcacacacacatgcccacgcgcggcgcggcgcggtatattccaccagaaccagatcaccaccttcccggggcaatccggtaactgtatacagttgcaagatgcacgatgggaaagaaggaaaaaaatccgacgcttgtcacaggataggagtgagtaaaaatcaatgaccatagcagcagaagcggcgaaacttccaccccaccttcacctccttgcttatatatactcgccccgccgccccggggccggctcccacctcgctccagtctagacggcggtttgactttccgaccggggaatcggcgctgcgtttgatttgaggaggcgacacgagacgggacgggagggatctcttcgctggagcgttgcccgattcgtcgcggttctcggacaagggagggagggcacacctcgggctccgatcgaagagctttgttaacattagagattaaaaggtagcgccgtagcaaaatgaaggcaccatcactactggttcagtgtttccctggcttgcttcccagcaaggccactagttgcgtgccaattgtatctgagaaggatctgcagctaccatcaccagctgttgaaataatcccctcaaagagtgttcatccatacaaatatgctggagagaaggttgatgtgcaaggtcttaatattttcaagggtaaagtcagtgtagcagatatgatagttatctcgccttctgaagtagcatcatcaaaatatgatggaactctgaaatactgggagagttccattacccttgtcgacattcttaaaaatgagatccgtgatgggcagttgagcttcaggggcaagcgggttctagagcttggatgtggatatggcctctctgggatttttgcctgcttgaagggtgcatccacagttcactttcaggacataaatgcagaaacgatacggtgcagaacaatacccaatgttcttgcaaatcttgagcaggctcaggaccgacagaacagaccatcagagagccctgttacaccatctaggcagctcttggctcctaatgtacatttctatgctggagagtgggatgaactcccaacaattctctcagttgtgcagccacctgcagcaccaacaaacctcagcttctctgaggatgattttatggatggctgcagtagccatgatggaagcagtgtagttggtcatgactactgccccaggagatctaggaagctttctggtagccgtgcatgggagagagctagtgagaccgaccaggcagatagtggctatgatgtgatcttgatttctgatgtcccctacgcagctaactctctgaagaagctctatgcgcttatttcaaagtgcctacgtcctccttatggagtcctgtacgtggcttccaagaagaacttggttggttccaatggtggcgccaggcagcttcgagctctcatggaagaggaaggtgtccttggtggccacttcttgactgaggttgcaatccctgttgtgccaacagtgagggtggttatcactttcaccaagtttgtccccctcatcgagcctgaggagttcttcaccccaatgtcgagccccagcctcttagcgagctcagggtcgggaagcatcatggcgaagcctaacacccaaaagagctcctacctgaagtgggtctcgaagaactcaagaccagaggccgtgaacctgtcacaagtcgcggacaacggcgaccctttcttgtccatccaatatattctaagcattacatgatctgtaatggatgcgcttgttgtggtgcgctgagtgccagtgtagctcgggtgctgcacaagatggtcagtgacatcatgtgtggcttcatccttatgatgtacacgaaggttggactctttggccctattactagctccattgatgttactaaattcatagtaagtgcttttgtatcctttgtgttcaagtctctatgcctaggtagcaaaaggatctagtgaggacatctatttcatgaatgtcatgcttacagaatattacacttatatttccactattgactaatgaagttatttttagaaacaatggtcaagggaccccactctggctctgcagtatataacggaagctcaccacacaagatcgataacccttttagatcatactgtaccaagctgtcgctccacttcaatagaacacttgatcacatacaggaagtttagatcagaaaatgcaggctgccgctactcccgtcaggttctcagatgtgttcccatcaagggccggtcgtggagaagagcacggtggtggttagtgtccctgttgttgtcatggttgagactgctgagatcgactacaactcgagcttctcggtgttcacaatggaggcctacgacctactcgatggcgacgcgtgcaacgcgcagatatactcggtggcatcggcagtgagcaggagggtggagaaggtggagagggactacttgtcgtacgacgagccaagaacgtgttctcgggcgaggcatgcaacgaccttggtggcgagttctgcgatgcgtcgtaccatgtcgacgtctttagggagctagcgcacacctgaagcctgatcctaattcccatccatggtgttcacaatggaggcctacgacctactcgatggcgacgcgtgcaacgcgcagatatactcggtggcatcggcagtgagcaggagggtggagaaggtggagagggactacttgtcgtacgatgagccaagaacggtgttctcgggcgaggtatgcaacgaccttggtggcgagttctgcgatgtgtcgtaccatgccgacgtctttagggagctagcgcagacctgaagcctgatcctaattcccatccatgtttgtccagaaccaagttgatctcacagtcgggtagatgttcacacattgtatctacgtgtagccaagcaagaccaagggtgtatgtaatgtatataggcatgtcttgggttggctcagctgccaaggtatgtagtataaaccaagatgaaatggtactggtgttattccctgttttacgatgttagaagatggaacacaaagctatgcaagtactatgctatgcccgatctgttccctgcacttgcaagccaatggatgaatggagtgtgtgctgcttaagctgacct

SEQ ID NO: 24761 - DNA, 6403 bp, Zea Mays
gtcatcagtaaggtaaaagtgatctaggtctcccgcgccgccgccgccgccgcctaagctgcttccacctccgctttctgtgcagaggactcctcgccggagaatagccggcggcggctcgagacgaaactacggtgctcgtctcccgccgcccgccgcccttcactccccagcatacctagtccctactctaatccgtacagagcaacgcatcaagtgatggcgaagccggaggagaagctgcgctgcaccaaggaacccttcatcgaggacgtcggcacccggaggataaagagcatccggttcagcgtgctctcgggcagcgagattcgcaagtcagcggaggtacaggtctggaacaaccggatctatgaccgcgacatgacgccggttcccaatgggttgctcgacccgcgaatgggaatcccgactaagagaggcaaatgcaatacctgccatggtgaatttagtgactgtccaggtcatttcggctacttgaagctcgcgcttccagtttttaacgtgggcttctttaactgtattctggacgtgttgaagtgcatctgcaagagctgtagtagagttcttcttatcgagaaagaccgcagggagtttctaaagaagatgagaaatcccagggcagatgcactacagaaaagtgctacaatgaaaaaagtgagggacaaatgcaaactatcctgctgcccccgttgtgattacagaaatggtgtagttaaaaaaggcagagcgggcttgatagtagttcatgattgtagcaaagttttggatggacatacagaagaattgaagaatgcactacaaaataagaaagaaaaggtgtctgctagttcagttctagtgttagaccctgcaactgttctatctctattcagaagaatgattgatgaggattgtgaattactaaaccttggtgataggccagagaaacttattgtgacagagattgcagtgccacctgttcctatacggccttctgttgttgttggtaatagtagaacaagcaacgaagacagcattacagttattttgaagagcattgttaatacaaactccatccttaaggagacccttcatactgggggtccattcaccaagtgctttgattgctggcaataccttcaacttcaagttgttgaatatgtgaatagtgatgccccttctcttcctgagtcacaacatcggggccttgttcaacgactcaaagggaagactggacgatttcgtggcaatttgtccggaaaacgtactgagtacacaggaagaaccgtcatatctcctgatccaaatttgaaaataacagaggtggctattcctgtgttgatggctcgagtcttgacttatcctgaaagggtttcaaactataacattgagaagctgagacaatgtatacgaaatggaccattcaaatatccaggggctaattttgttacacaacctgatggcatgaagcagagcttaaagtatggtgatagaaggattactgctcgggatttaaagtgtggatgtatagttgaaagacatttagaagatggagatgttgtcctctttaatagacagccgagcctgcatagaatgtcaattatgtgtcacagggcaaggataatgccatggagaacactcagatttaatgagtctgtttgcaacccttacaatgctgattttgacggagatgaaatgaatttgcatgtccctcagacagaggaagctcgcactgaagcgcttatgctcatgggggttcagaataatttatgtactcctaagaatggtgagatactggttgcttccacgcaagacttcttgacctcatctttcctagttacaagaaaagatactttctatgatagatcttcctttactcttttgtgctcataccttggtgatggaatggagaacattgatttgccaacaccagccttgattaaacctgttgagctttggactggtaaacaactatttagtgtgttagtccgacctaatgcgcacacaaaggtgtttctgaatcttgctgttcaagaaaaaatttattcaaagaaaaagggaaaaaaagaggggggagaggaggtaaaggaaacaatgtgtggaagggaaacaatgtgtcccaatgatggttatgtttatttccgaaatagtgaactgttatctggacaagtagggaaggccactttaggtaatgggaacaaggatggcctttactctgttcttttaagagattataattctcatgctgcagcaagctgtatgaatcgtttggcaaaatttagtgcaagatttatagggaaccatggtttttccattggtgtggacgatgtccaaccaggagaacatctaaatcggcaaaagaaaaaggaaatagacggagggtacaaaaaatgccatgatcttatttctttgtttgcgaaaggcgcgctcgcattgcatcctggttgcaacgcagcccaaacgctggagcataacatcactggtgtgttaaatgaaatcagatcaattgctggaaatgtgtgcatggatacgcttcactggaggaacagcccattgattatgtctcagtgtggttccaaaggttctccaatcaatatcagtcagatggttgcatgtgttggacagcaatcagttggagggcgtcgtgccccagatggttttctaaacagaactcttcctcactttcctataaattcaaagacccctgcagctaaaggttttgttgctaattcattctatactggtttgactgctactgagtttttcttccacacaatgggtggacgagaaggtcttgttgacacggcggtcaaaacagcagaaactggatatatgtcccgcagattgatgaaaggcttggaagatctctcagttttctatgatcagacagttcgaaatgctagcggtggtatagttcaatttttgtatggagatgatggcatggatcctgcaaagatggaaggaaaagatggcatgcccttaaatttggatcaattgtttatgaaagtcatggccacatgtcctcaaaggggatcagatacattatctccagtgggcatcaaacagatgttagaggataagttcttgcagcatgacacctcatctgatggtggctgtagtgcagagttcaagaaaaacttaactgaattccttgataaacgtatagaattaatgaaatgcacaagaagggcactccatctacatgaggatcatgtagaaaagaaagattcttgcctagaagaatctattgctgctattatatctggtatatctgcaaaacaacttcaggttttcttggacacttgcttatctcgttatcagtcaaagaagattgaagcaggagcatctattggagcaattggagctcaaagtattggggagccagggactcagatgacactgaaaacatttcattttgcgggagtagctagcatgaatgttactcttggtgttcctcgaatcaaggaaattatcaatgctgctaaaaagataagcacacctattatcaccgctcagcttttgtcaaggaaagatgtgctttctgcgcgcattgtgaaaggatctatggagaaagcagtgcttggcgaggttgcagcaaccattcagactgtcctgaaatcaagtctgccaaacttggttgtcaaacttgatatgcaacttatagaaactctccacatgggaatatctgctgattctgtgaagctgtcaattttgaatcatccaaagcttaagttaaaatctgagcatgtccgagtcattgatagagccaagttgcgaatatatccagctggaactgacaagctcaaacttcagcttgaactgcataacctcaaatccatccttccaaaagtgattgtgaagggcattccaactgttgaaagggttgttattgatgaagttaaagtcaacaacgcgacagaaagataccaattgttggttgaaggaacaaacctcctggcagtcatgggtaccccaggagttgatgctaggaagacgaaaagtaatcacatcatggaaacgaaccaaacacttggaattgaagctgctaggagatctattattgatgagattcaatacacaatgaaaagtcatggcatgaacattgatcggagacatatgatgctcttggcagatttaatgacatacaagggtgaaattctcggcattactagatacggcattgcaaagatgaaaagcagtgtgctgatgcttgcttcatttgagaaaaccgcagaacatctattcaatgcctcatacagtggtcgtcaggatcagatagagggagttagtgaatgcattatcatgggcattcccatgcagctcggtaccggtattctcaaagtcaggcaaaggctcgaccatgtgcctgaattcaagtaccaaccggacccgatactgtcgtgatacatacatgtggactgaagctggaactctgtacatatatatagctgggtcatacatgcatagcgtagcgtagcctagggcaaccctggcggcttgtcatttctccggtgaacatctaactagtctcgttccatctccatgaggcagactctaggtcaacaactccctcttcggctgcatcggcaaatgcgagagtaaaattgtggcaaacacttgctacatcttctaggcagtggtacatgatcgtgttacatatctctgcaggctaatgaagcctgggaagaatcattgtttttttcttgactagataaatatctgtgttgtaaaggaaaaataataatacaatgagaattaagaattacacgcgtgtttgccaaaccacgatacttcagtgagatggttgctgttaaggcccattaggcctaggcctactgcatatatatatatatatctgtatctgtactaactattaagaccatactgtagactgcccccgccaacaaccgtccgcccgatcccgccgcgacctcgcccgccgccaaccgcctgtcgcgacccctgaccgtcgccaaccgcaagaagcgaacgccccaccgccgcgaatcgcgtctgccgcgaccgctccgcaaacgctgcgaacagcccgcacgccgtgccgcgccgccgcgaacgcccgcaagccacgatacacccgccacaatatttttctgttccaggatatttctcgctgggaagaaggttatgcagatagcgttggggcgtccgcctgctgatgaagctgagacaggcctccacaaactttccaagttccttcaaggcaactctggtctgttcttcaccaatcttccaagggatgatgttgagaggatgtttcgagaatttgaggagcatgattttgcaaggacaggatgtactgcggcagatacggttgagcttaaggaaggccctctagaacagttcacacatgagatggagccctttctacgcaagcaaggacttccagttcgcttgaacaaaggtgtcgtagagttagttgcagaccatgtagtttgtgaggaagggaagccccttgcgccagaagcagcatagactctgcggctgcttgggatacagatggcgacattccatctataccttgtgtgtcgctggtcgagcgatgaatttgaagcttacaaagaaggcttgatgcacctaggagctgatgattcatcttaagcttgtgtttcgtgtatacacaacacaaagggcacttgctgtcttcgctgggttggaaattagaaagatgctatctgcagaaaatttttgctagaaatgcgagtaacggtgatcttgcactcatcgattggattaaagaacttgcactccggttgctgatggttgtcattgggagcagtatcagatctattccaattacaggcaaggatgttacccagtttattcatcaacttctaaagggaccttgagatgggtaaggaggtagccaagaagctttttgtgattgagccaggtaataccgggaactatgtcctgcttgctaatatctatgcgtcacatggaagattggaggaggcaaaggaggtgcggaggtggatgatgtttcaggagttaaggaaggaaaagggatgcagtttaatcaacaattgagaaccaaatctgatgcttatgtgccgattcaacgaggctaaagccacgcatttcatgcaactctgtacaaaattgtaagtttgttttcatcatgattttcatggatgttctggtgtaaatttaatatatattttctctattaatttcttgagaaataaagttggaggccttgaagatttgtcattaatagtttatattgtcagttttacaagagcagatatctcattactggttgttgttcttggatttgaaatttctattggagttgttgtttggaactctggatagcatgctgtggtaagagcagctgatgataagataatatatatgttgctcatgtaaaggcaaagtgtag

SEQ ID NO: 24762 - DNA, 6877 bp, Zea Mays
gtcatcagtaaggtaaaagtgatctaggtctcccgcgccgccgccgccgccgcctaagctgcttccacctccgctttctgtgcagaggactcctcgccggagaatagccggcggcggctcgagacgaaactacggtgctcgtctcccgccgcccgccgcccttcactccccagcatacctagtccctactctaatccgtacagagcaacgcatcaagtgatggcgaagccggaggagaagctgcgctgcaccaaggaacccttcatcgaggacgtcggcacccggaggataaagagcatccggttcagcgtgctctcgggcagcgagattcgcaagtcagcggaggtacaggtctggaacaaccggatctatgaccgcgacatgacgccggttcccaatgggttgctcgacccgcgaatgggaatcccgactaagagaggcaaatgcaatacctgccatggtgaatttagtgactgtccaggtcatttcggctacttgaagctcgcgcttccagtttttaacgtgggcttctttaactgtattctggacgtgttgaagtgcatctgcaagagctgtagtagagttcttcttatcgagaaagaccgcagggagtttctaaagaagatgagaaatcccagggcagatgcactacagaaaagtgctacaatgaaaaaagtgagggacaaatgcaaactatcctgctgcccccgttgtgattacagaaatggtgtagttaaaaaaggcagagcgggcttgatagtagttcatgattgtagcaaagttttggatggacatacagaagaattgaagaatgcactacaaaataagaaagaaaaggtgtctgctagttcagttctagtgttagaccctgcaactgttctatctctattcagaagaatgattgatgaggattgtgaattactaaaccttggtgataggccagagaaacttattgtgacagagattgcagtgccacctgttcctatacggccttctgttgttgttggtaatagtagaacaagcaacgaagacagcattacagttattttgaagagcattgttaatacaaactccatccttaaggagacccttcatactgggggtccattcaccaagtgctttgattgctggcaataccttcaacttcaagttgttgaatatgtgaatagtgatgccccttctcttcctgagtcacaacatcggggccttgttcaacgactcaaagggaagactggacgatttcgtggcaatttgtccggaaaacgtactgagtacacaggaagaaccgtcatatctcctgatccaaatttgaaaataacagaggtggctattcctgtgttgatggctcgagtcttgacttatcctgaaagggtttcaaactataacattgagaagctgagacaatgtatacgaaatggaccattcaaatatccaggggctaattttgttacacaacctgatggcatgaagcagagcttaaagtatggtgatagaaggattactgctcgggatttaaagtgtggatgtatagttgaaagacatttagaagatggagatgttgtcctctttaatagacagccgagcctgcatagaatgtcaattatgtgtcacagggcaaggataatgccatggagaacactcagatttaatgagtctgtttgcaacccttacaatgctgattttgacggagatgaaatgaatttgcatgtccctcagacagaggaagctcgcactgaagcgcttatgctcatgggggttcagaataatttatgtactcctaagaatggtgagatactggttgcttccacgcaagacttcttgacctcatctttcctagttacaagaaaagatactttctatgatagatcttcctttactcttttgtgctcataccttggtgatggaatggagaacattgatttgccaacaccagccttgattaaacctgttgagctttggactggtaaacaactatttagtgtgttagtccgacctaatgcgcacacaaaggtgtttctgaatcttgctgttcaagaaaaaatttattcaaagaaaaagggaaaaaaagaggggggagaggaggtaaaggaaacaatgtgtggaagggaaacaatgtgtcccaatgatggttatgtttatttccgaaatagtgaactgttatctggacaagtagggaaggccactttaggtaatgggaacaaggatggcctttactctgttcttttaagagattataattctcatgctgcagcaagctgtatgaatcgtttggcaaaatttagtgcaagatttatagggaaccatggtttttccattggtgtggacgatgtccaaccaggagaacatctaaatcggcaaaagaaaaaggaaatagacggagggtacaaaaaatgccatgatcttatttctttgtttgcgaaaggcgcgctcgcattgcatcctggttgcaacgcagcccaaacgctggagcataacatcactggtgtgttaaatgaaatcagatcaattgctggaaatgtgtgcatggatacgcttcactggaggaacagcccattgattatgtctcagtgtggttccaaaggttctccaatcaatatcagtcagatggttgcatgtgttggacagcaatcagttggagggcgtcgtgccccagatggttttctaaacagaactcttcctcactttcctataaattcaaagacccctgcagctaaaggttttgttgctaattcattctatactggtttgactgctactgagtttttcttccacacaatgggtggacgagaaggtcttgttgacacggcggtcaaaacagcagaaactggatatatgtcccgcagattgatgaaaggcttggaagatctctcagttttctatgatcagacagttcgaaatgctagcggtggtatagttcaatttttgtatggagatgatggcatggatcctgcaaagatggaaggaaaagatggcatgcccttaaatttggatcaattgtttatgaaagtcatggccacatgtcctcaaaggggatcagatacattatctccagtgggcatcaaacagatgttagaggataagttcttgcagcatgacacctcatctgatggtggctgtagtgcagagttcaagaaaaacttaactgaattccttgataaacgtatagaattaatgaaatgcacaagaagggcactccatctacatgaggatcatgtagaaaagaaagattcttgcctagaagaatctattgctgctattatatctggtatatctgcaaaacaacttcaggttttcttggacacttgcttatctcgttatcagtcaaagaagattgaagcaggagcatctattggagcaattggagctcaaagtattggggagccagggactcagatgacactgaaaacatttcattttgcgggagtagctagcatgaatgttactcttggtgttcctcgaatcaaggaaattatcaatgctgctaaaaagataagcacacctattatcaccgctcagcttttgtcaaggaaagatgtgctttctgcgcgcattgtgaaaggatctatggagaaagcagtgcttggcgaggttgcagcaaccattcagactgtcctgaaatcaagtctgccaaacttggttgtcaaacttgatatgcaacttatagaaactctccacatgggaatatctgctgattctgtgaagctgtcaattttgaatcatccaaagcttaagttaaaatctgagcatgtccgagtcattgatagagccaagttgcgaatatatccagctggaactgacaagctcaaacttcagcttgaactgcataacctcaaatccatccttccaaaagtgattgtgaagggcattccaactgttgaaagggttgttattgatgaagttaaagtcaacaacgcgacagaaagataccaattgttggttgaaggaacaaacctcctggcagtcatgggtaccccaggagttgatgctaggaagacgaaaagtaatcacatcatggaaacgaaccaaacacttggaattgaagctgctaggagatctattattgatgagattcaatacacaatgaaaagtcatggcatgaacattgatcggagacatatgatgctcttggcagatttaatgacatacaagggtgaaattctcggcattactagatacggcattgcaaagatgaaaagcagtgtgctgatgcttgcttcatttgagaaaaccgcagaacatctattcaatgcctcatacagtggtcgtcaggatcagatagagggagttagtgaatgcattatcatgggcattcccatgcagctcggtaccggtattctcaaagtcaggcaaaggctcgaccatgtgcctgaattcaagtaccaaccggacccgatactgtcgtgatacatacatgtggactgaagctggaactctgtacatatatatagctgggtcatacatgcatagcgtagcgtagcctagggcaaccctggcggcttgtcatttctccggtgaacatctaactagtctcgttccatctccatgaggcagactctaggtcaacaactccctcttcggctgcatcggcaaatgcgagagtaaaattgtggcaaacacttgctacatcttctaggcagtggtacatgatcgtgttacatatctctgcaggctaatgaagcctgggaagaatcattgtttttttcttgactagataaatatctgtgttgtaaaggaaaaataataatacaatgagaattaagaattacacgcgtgtttgccaaaccacgatacttcagtgagatggttgctgttaaggcccattaggcctaggcctactgcatatatatatatatatctgtatctgtactaactattaagaccatactgtagactgcccccgccaacaaccgtccgcccgatcccgccgcgacctcgcccgccgccaaccgcctgtcgcgacccctgaccgtcgccaaccgcaagaagcgaacgccccaccgccgcgaatcgcgtctgccgcgaccgctccgcaaacgctgcgaacagcccgcacgccgtgccgcgccgccgcgaacgcccgcaagccacgatacacccgccacaatatttttctgttccaggatatttctcgctgggaagaaggttatgcagatagcgttggggcgtccgcctgctgatgaagctgagacaggcctccacaaactttccaagttccttcaaggcaactctggtctgttcttcaccaatcttccaagggatgatgttgagaggatgtttcgagaatttgaggagcatgattttgcaaggacaggatgtactgcggcagatacggttgagcttaaggaaggccctctagaacagttcacacatgagatggagccctttctacgcaagcaaggacttccagttcgcttgaacaaaggtgtcgtagagttagttgcagaccatgtagtttgtgaggaagggaagccccttgcgccagaagcagcatagactctgcggctgcttgggatacagatggcgacattccatctataccttgtgtgtcgctggtcgagcgatgaatttgaagcttacaaagaaggcttgatgcacctaggagctgatgattcatcttaagcttgtgtttcgtgtatacacaacacaaagggcacttgctgtcttcgctgggttggaaattagaaagatgctatctgcagaaaatttttgctagaaatgcgagtaacggtgatcttgcactcatcgattggattaaagaacttgcactccggttgctgatggttgtcattgggagcagtatcagatctattccaattacaggcaaggatgttacccagtttattcatcaacttctaaaggtagcttcctctgccttcttgttgactgtagaaagacactactcaacctgtctagataacggtactatctacattttactatctacatttaatggtaaaatatcatgtgcattgtgcaatcaacgaatctgaaacattaaatatgtatccaatggtaactgccgttatatttatattctttcacctcacacaccgttgaaatttgccaaacccccctgaaatagctaccgtcagatatagattgaacgtctcatattggatgattgcacgattgcacagatatgagtgattgcacacgatatgtccccgagaatagaaatatgaaaatgtggttcatctggagaagcaactatcataatggtatatttgatgtgtaataatatatcaaacaataagttacacttgaacattcattcaagaaaaagctccacctgaacatgttaacgaactcctttgggcttgcatgaactacagggaccttgagatgggtaaggaggtagccaagaagctttttgtgattgagccaggtaataccgggaactatgtcctgcttgctaatatctatgcgtcacatggaagattggaggaggcaaaggaggtgcggaggtggatgatgtttcaggagttaaggaaggaaaagggatgcagtttaatcaacaattgagaaccaaatctgatgcttatgtgccgattcaacgaggctaaagccacgcatttcatgcaactctgtacaaaattgtaagtttgttttcatcatgattttcatggatgttctggtgtaaatttaatatatattttctctattaatttcttgagaaataaagttggaggccttgaagatttgtcattaatagtttatattgtcagttttacaagagcagatatctcattactggttgttgttcttggatttgaaatttctattggagttgttgtttggaactctggatagcatgctgtggtaagagcagctgatgataagataatatatatgttgctcatgtaaaggcaaagtgtag

SEQ ID NO: 24763 - DNA, 2006 bp, Zea Mays
gaaaagagtaacccagttttctctgaagccgagatgtcaaaacagcagaaactggatatatgtcccgcagattgatgaaaggcttggaagatctctcagttttctatgatcagacagttcgaaatgctagcggtggtatagttcaatttttgtatggagatgatggcatggatcctgcaaagatggaaggaaaagatggcatgcccttaaatttggatcaattgtttatgaaagtcatggccacatgtcctcaaaggggatcagatacattatctccagtgggcatcaaacagatgttagaggataagttcttgcagcatgacacctcatctgatggtggctgtagtgcagagttcaagaaaaacttaactgaattccttgataaacgtatagaattaatgaaatgcacaagaagggcactccatctacatgaggatcatgtagaaaagaaagattcttgcctagaagaatctattgctgctattatatctggtatatctgcaaaacaacttcaggttttcttggacacttgcttatctcgttatcagtcaaagaagattgaagcaggagcatctattggagcaattggagctcaaagtattggggagccagggactcagatgacactgaaaacatttcattttgcgggagtagctagcatgaatgttactcttggtgttcctcgaatcaaggaaattatcaatgctgctaaaaagataagcacacctattatcaccgctcagcttttgtcaaggaaagatgtgctttctgcgcgcattgtgaaaggatctatggagaaagcagtgcttggcgaggttgcagcaaccattcagactgtcctgaaatcaagtctgccaaacttggttgtcaaacttgatatgcaacttatagaaactctccacatgggaatatctgctgattctgtgaagctgtcaattttgaatcatccaaagcttaagttaaaatctgagcatgtccgagtcattgatagagccaagttgcgaatatatccagctggaactgacaagctcaaacttcagcttgaactgcataacctcaaatccatccttccaaaagtgattgtgaagggcattccaactgttgaaagggttgttattgatgaagttaaagtcaacaacgcgacagaaagataccaattgttggttgaaggaacaaacctcctggcagtcatgggtaccccaggagttgatgctaggaagacgaaaagtaatcacatcatggaaacgaaccaaacacttggaattgaagctgctaggagatctattattgatgagattcaatacacaatgaaaagtcatggcatgaacattgatcggagacatatgatgctcttggcagatttaatgacatacaagggtgaaattctcggcattactagatacggcattgcaaagatgaaaagcagtgtgctgatgcttgcttcatttgagaaaaccgcagaacatctattcaatgcctcatacagtggtcgtcaggatcagatagagggagttagtgaatgcattatcatgggcattcccatgcagctcggtaccggtattctcaaagtcaggcaaaggctcgaccatgtgcctgaattcaagtaccaaccggacccgatactgtcgtgatacatacatgtggactgaagctggaactctgtacatatatatagctgggtcatacatgcatagcgtagcgtagcctagggcaaccctggcggcttgtcatttctccggtgaacatctaactagtctcgttccatctccatgaggcagactctaggtcaacaactccctcttcggctgcatcggcaaatgcgagagtaaaattgtggcaaacacttgctacatcttctaggcagtggtacatgatcgtgttacatatctctgcaggctaatgaagcctgggaagaatcattgtttttttcttgactagataaatatctgtgttgtaaaggaaaaataataatacaatgagaattaagaattacacgcgtgtttgcc

SEQ ID NO: 24764 - DNA, 2697 bp, Zea Mays
caacaattggctggaactgctgcctagataacttgtgtaaggatagaggaagtcccaaatagcgacaatgaaaggaagatatttcacaaggcagcagcacatgagtttccaacatgtcctcctcagagcaatggacccagcaagttcctgcacttgcatgcattggcttcctctgtggtgtgggaagctattaactgatgtgcaagatttatagggaaccatggtttttccattggtgtggacgatgtccaaccaggagaacatctaaatcggcaaaagaaaaaggaaatagacggagggtacaaaaaatgccatgatcttatttctttgtttgcgaaaggcgcgctcgcattgcatcctggttgcaacgcagcccaaacgctggagcataacatcactggtgtgttaaatgaaatcagatcaattgctggaaatgtgtgcatggatacgcttcactggaggaacagcccattgattatgtctcagtgtggttccaaaggttctccaatcaatatcagtcagatggttgcatgtgttggacagcaatcagttggagggcgtcgtgccccagatggttttctaaacagaactcttcctcactttcctataaattcaaagacccctgcagctaaaggttttgttgctaattcattctatactggtttgactgctactgagtttttcttccacacaatgggtggacgagaaggtcttgttgacacggcggtcaaaacagcagaaactggatatatgtcccgcagattgatgaaaggcttggaagatctctcagttttctatgatcagacagttcgaaatgctagcggtggtatagttcaatttttgtatggagatgatggcatggatcctgcaaagatggaaggaaaagatggcatgcccttaaatttggatcaattgtttatgaaagtcatggccacatgtcctcaaaggggatcagatacattatctccagtgggcatcaaacagatgttagaggataagttcttgcagcatgacacctcatctgatggtggctgtagtgcagagttcaagaaaaacttaactgaattccttgataaacgtatagaattaatgaaatgcacaagaagggcactccatctacatgaggatcatgtagaaaagaaagattcttgcctagaagaatctattgctgctattatatctggtatatctgcaaaacaacttcaggttttcttggacacttgcttatctcgttatcagtcaaagaagattgaagcaggagcatctattggagcaattggagctcaaagtattggggagccagggactcagatgacactgaaaacatttcattttgcgggagtagctagcatgaatgttactcttggtgttcctcgaatcaaggaaattatcaatgctgctaaaaagataagcacacctattatcaccgctcagcttttgtcaaggaaagatgtgctttctgcgcgcattgtgaaaggatctatggagaaagcagtgcttggcgaggttgcagcaaccattcagactgtcctgaaatcaagtctgccaaacttggttgtcaaacttgatatgcaacttatagaaactctccacatgggaatatctgctgattctgtgaagctgtcaattttgaatcatccaaagcttaagttaaaatctgagcatgtccgagtcattgatagagccaagttgcgaatatatccagctggaactgacaagctcaaacttcagcttgaactgcataacctcaaatccatccttccaaaagtgattgtgaagggcattccaactgttgaaagggttgttattgatgaagttaaagtcaacaacgcgacagaaagataccaattgttggttgaaggaacaaacctcctggcagtcatgggtaccccaggagttgatgctaggaagacgaaaagtaatcacatcatggaaacgaaccaaacacttggaattgaagctgctaggagatctattattgatgagattcaatacacaatgaaaagtcatggcatgaacattgatcggagacatatgatgctcttggcagatttaatgacatacaagggtgaaattctcggcattactagatacggcattgcaaagatgaaaagcagtgtgctgatgcttgcttcatttgagaaaaccgcagaacatctattcaatgcctcatacagtggtcgtcaggatcagatagagggagttagtgaatgcattatcatgggcattcccatgcagctcggtaccggtattctcaaagtcaggcaaaggctcgaccatgtgcctgaattcaagtaccaaccggacccgatactgtcgtgatacatacatgtggactgaagctggaactctgtacatatatatagctgggtcatacatgcatagcgtagcgtagcctagggcaaccctggcggcttgtcatttctccggtgaacatctaactagtctcgttccatctccatgaggcagactctaggtcaacaactccctcttcggctgcatcggcaaatgcgagagtaaaattgtggcaaacacttgctacatcttctaggcagtggtacatgatcgtgttacatatctctgcaggctaatgaagcctgggaagaatcattgtttttttcttgactagataaatatctgtgttgtaaaggaaaaataataatacaatgagaattaagaattacacgcgtgtttgcc

SEQ ID NO: 24765 - DNA, 3745 bp, Zea Mays
tggaattggaattggtattggtaaagtcgaattccagcgtttggatgttcacggaattcggaactggaaatccatcccaattcccctggattgctggcaataccttcaacttcaagttgttgaatatgtgaatagtgatgccccttctcttcctgagtcacaacatcggggccttgttcaacgactcaaagggaagactggacgatttcgtggcaatttgtccggaaaacgtactgagtacacaggaagaaccgtcatatctcctgatccaaatttgaaaataacagaggtggctattcctgtgttgatggctcgagtcttgacttatcctgaaagggtttcaaactataacattgagaagctgagacaatgtatacgaaatggaccattcaaatatccaggggctaattttgttacacaacctgatggcatgaagcagagcttaaagtatggtgatagaaggattactgctcgggatttaaagtgtggatgtatagttgaaagacatttagaagatggagatgttgtcctctttaatagacagccgagcctgcatagaatgtcaattatgtgtcacagggcaaggataatgccatggagaacactcagatttaatgagtctgtttgcaacccttacaatgctgattttgacggagatgaaatgaatttgcatgtccctcagacagaggaagctcgcactgaagcgcttatgctcatgggggttcagaataatttatgtactcctaagaatggtgagatactggttgcttccacgcaagacttcttgacctcatctttcctagttacaagaaaagatactttctatgatagatcttcctttactcttttgtgctcataccttggtgatggaatggagaacattgatttgccaacaccagccttgattaaacctgttgagctttggactggtaaacaactatttagtgtgttagtccgacctaatgcgcacacaaaggtgtttctgaatcttgctgttcaagaaaaaatttattcaaagaaaaagggaaaaaaagaggggggagaggaggtaaaggaaacaatgtgtggaagggaaacaatgtgtcccaatgatggttatgtttatttccgaaatagtgaactgttatctggacaagtagggaaggccactttaggtaatgggaacaaggatggcctttactctgttcttttaagagattataattctcatgctgcagcaagctgtatgaatcgtttggcaaaatttagtgcaagatttatagggaaccatggtttttccattggtgtggacgatgtccaaccaggagaacatctaaatcggcaaaagaaaaaggaaatagacggagggtacaaaaaatgccatgatcttatttctttgtttgcgaaaggcgcgctcgcattgcatcctggttgcaacgcagcccaaacgctggagcataacatcactggtgtgttaaatgaaatcagatcaattgctggaaatgtgtgcatggatacgcttcactggaggaacagcccattgattatgtctcagtgtggttccaaaggttctccaatcaatatcagtcagatggttgcatgtgttggacagcaatcagttggagggcgtcgtgccccagatggttttctaaacagaactcttcctcactttcctataaattcaaagacccctgcagctaaaggttttgttgctaattcattctatactggtttgactgctactgagtttttcttccacacaatgggtggacgagaaggtcttgttgacacggcggtcaaaacagcagaaactggatatatgtcccgcagattgatgaaaggcttggaagatctctcagttttctatgatcagacagttcgaaatgctagcggtggtatagttcaatttttgtatggagatgatggcatggatcctgcaaagatggaaggaaaagatggcatgcccttaaatttggatcaattgtttatgaaagtcatggccacatgtcctcaaaggggatcagatacattatctccagtgggcatcaaacagatgttagaggataagttcttgcagcatgacacctcatctgatggtggctgtagtgcagagttcaagaaaaacttaactgaattccttgataaacgtatagaattaatgaaatgcacaagaagggcactccatctacatgaggatcatgtagaaaagaaagattcttgcctagaagaatctattgctgctattatatctggtatatctgcaaaacaacttcaggttttcttggacacttgcttatctcgttatcagtcaaagaagattgaagcaggagcatctattggagcaattggagctcaaagtattggggagccagggactcagatgacactgaaaacatttcattttgcgggagtagctagcatgaatgttactcttggtgttcctcgaatcaaggaaattatcaatgctgctaaaaagataagcacacctattatcaccgctcagcttttgtcaaggaaagatgtgctttctgcgcgcattgtgaaaggatctatggagaaagcagtgcttggcgaggttgcagcaaccattcagactgtcctgaaatcaagtctgccaaacttggttgtcaaacttgatatgcaacttatagaaactctccacatgggaatatctgctgattctgtgaagctgtcaattttgaatcatccaaagcttaagttaaaatctgagcatgtccgagtcattgatagagccaagttgcgaatatatccagctggaactgacaagctcaaacttcagcttgaactgcataacctcaaatccatccttccaaaagtgattgtgaagggcattccaactgttgaaagggttgttattgatgaagttaaagtcaacaacgcgacagaaagataccaattgttggttgaaggaacaaacctcctggcagtcatgggtaccccaggagttgatgctaggaagacgaaaagtaatcacatcatggaaacgaaccaaacacttggaattgaagctgctaggagatctattattgatgagattcaatacacaatgaaaagtcatggcatgaacattgatcggagacatatgatgctcttggcagatttaatgacatacaagggtgaaattctcggcattactagatacggcattgcaaagatgaaaagcagtgtgctgatgcttgcttcatttgagaaaaccgcagaacatctattcaatgcctcatacagtggtcgtcaggatcagatagagggagttagtgaatgcattatcatgggcattcccatgcagctcggtaccggtattctcaaagtcaggcaaaggctcgaccatgtgcctgaattcaagtaccaaccggacccgatactgtcgtgatacatacatgtggactgaagctggaactctgtacatatatatagctgggtcatacatgcatagcgtagcgtagcctagggcaaccctggcggcttgtcatttctccggtgaacatctaactagtctcgttccatctccatgaggcagactctaggtcaacaactccctcttcggctgcatcggcaaatgcgagagtaaaattgtggcaaacacttgctacatcttctaggcagtggtacatgatcgtgttacatatctctgcaggctaatgaagcctgggaagaatcattgtttttttcttgactagataaatatctgtgttgtaaaggaaaaataataatacaatgagaattaagaattacacgcgtgtttgcc

SEQ ID NO: 24766 - DNA, 3996 bp, Zea Mays
cttaagtgaagaaggaccatttgatgtgttctgctactccctgttttagtgctcaataacactaggacaggattgtgaattactaaaccttggtgataggccagagaaacttattgtgacagagattgcagtgccacctgttcctatacggccttctgttgttgttggtaatagtagaacaagcaacgaagacagcattacagttattttgaagagcattgttaatacaaactccatccttaaggagacccttcatactgggggtccattcaccaagtgctttgattgctggcaataccttcaacttcaagttgttgaatatgtgaatagtgatgccccttctcttcctgagtcacaacatcggggccttgttcaacgactcaaagggaagactggacgatttcgtggcaatttgtccggaaaacgtactgagtacacaggaagaaccgtcatatctcctgatccaaatttgaaaataacagaggtggctattcctgtgttgatggctcgagtcttgacttatcctgaaagggtttcaaactataacattgagaagctgagacaatgtatacgaaatggaccattcaaatatccaggggctaattttgttacacaacctgatggcatgaagcagtaagttctaacttgacgaacttctgaattgttatccagctcagcttcttctatcatccttatgccttttcaggagcttaaagtatggtgatagaaggattactgctcgggatttaaagtgtggatgtatagttgaaagacatttagaagatggagatgttgtcctctttaatagacagccgagcctgcatagaatgtcaattatgtgtcacagggcaaggataatgccatggagaacactcagatttaatgagtctgtttgcaacccttacaatgctgattttgacggagatgaaatgaatttgcatgtccctcagacagaggaagctcgcactgaagcgcttatgctcatgggggttcagaataatttatgtactcctaagaatggtgagatactggttgcttccacgcaagacttcttgacctcatctttcctagttacaagaaaagatactttctatgatagatcttcctttactcttttgtgctcataccttggtgatggaatggagaacattgatttgccaacaccagccttgattaaacctgttgagctttggactggtaaacaactatttagtgtgttagtccgacctaatgcgcacacaaaggtgtttctgaatcttgctgttcaagaaaaaatttattcaaagaaaaagggaaaaaaagaggggggagaggaggtaaaggaaacaatgtgtggaagggaaacaatgtgtcccaatgatggttatgtttatttccgaaatagtgaactgttatctggacaagtagggaaggccactttaggtaatgggaacaaggatggcctttactctgttcttttaagagattataattctcatgctgcagcaagctgtatgaatcgtttggcaaaatttagtgcaagatttatagggaaccatggtttttccattggtgtggacgatgtccaaccaggagaacatctaaatcggcaaaagaaaaaggaaatagacggagggtacaaaaaatgccatgatcttatttctttgtttgcgaaaggcgcgctcgcattgcatcctggttgcaacgcagcccaaacgctggagcataacatcactggtgtgttaaatgaaatcagatcaattgctggaaatgtgtgcatggatacgcttcactggaggaacagcccattgattatgtctcagtgtggttccaaaggttctccaatcaatatcagtcagatggttgcatgtgttggacagcaatcagttggagggcgtcgtgccccagatggttttctaaacagaactcttcctcactttcctataaattcaaagacccctgcagctaaaggttttgttgctaattcattctatactggtttgactgctactgagtttttcttccacacaatgggtggacgagaaggtcaaaacagcagaaactggatatatgtcccgcagattgatgaaaggcttggaagatctctcagttttctatgatcagacagttcgaaatgctagcggtggtatagttcaatttttgtatggagatgatggcatggatcctgcaaagatggaaggaaaagatggcatgcccttaaatttggatcaattgtttatgaaagtcatggccacatgtcctcaaaggggatcagatacattatctccagtgggcatcaaacagatgttagaggataagttcttgcagcatgacacctcatctgatggtggctgtagtgcagagttcaagaaaaacttaactgaattccttgataaacgtatagaattaatgaaatgcacaagaagggcactccatctacatgaggatcatgtagaaaagaaagattcttgcctagaagaatctattgctgctattatatctggtatatctgcaaaacaacttcaggttttcttggacacttgcttatctcgttatcagtcaaagaagattgaagcaggagcatctattggagcaattggagctcaaagtattggggagccagggactcagatgacactgaaaacatttcattttgcgggagtagctagcatgaatgttactcttggtgttcctcgaatcaaggaaattatcaatgctgctaaaaagataagcacacctattatcaccgctcagcttttgtcaaggaaagatgtgctttctgcgcgcattgtgaaaggatctatggagaaagcagtgcttggcgaggttgcagcaaccattcagactgtcctgaaatcaagtctgccaaacttggttgtcaaacttgatatgcaacttatagaaactctccacatgggaatatctgctgattctgtgaagctgtcaattttgaatcatccaaagcttaagttaaaatctgagcatgtccgagtcattgatagagccaagttgcgaatatatccagctggaactgacaagctcaaacttcagcttgaactgcataacctcaaatccatccttccaaaagtgattgtgaagggcattccaactgttgaaagggttgttattgatgaagttaaagtcaacaacgcgacagaaagataccaattgttggttgaaggaacaaacctcctggcagtcatgggtaccccaggagttgatgctaggaagacgaaaagtaatcacatcatggaaacgaaccaaacacttggaattgaagctgctaggagatctattattgatgagattcaatacacaatgaaaagtcatggcatgaacattgatcggagacatatgatgctcttggcagatttaatgacatacaagggtgaaattctcggcattactagatacggcattgcaaagatgaaaagcagtgtgctgatgcttgcttcatttgagaaaaccgcagaacatctattcaatgcctcatacagtggtcgtcaggatcagatagagggagttagtgaatgcattatcatgggcattcccatgcagctcggtaccggtattctcaaagtcaggcaaaggctcgaccatgtgcctgaattcaagtaccaaccggacccgatactgtcgtgatacatacatgtggactgaagctggaactctgtacatatatatagctgggtcatacatgcatagcgtagcgtagcctagggcaaccctggcggcttgtcatttctccggtgaacatctaactagtctcgttccatctccatgaggcagactctaggtcaacaactccctcttcggctgcatcggcaaatgcgagagtaaaattgtggcaaacacttgctacatcttctaggcagtggtacatgatcgtgttacatatctctgcaggctaatgaagcctgggaagaatcattgtttttttcttgactagataaatatctgtgttgtaaaggaaaaataataatacaatgagaattaagaattacacgcgtgtttgcc

SEQ ID NO: 24767 - DNA, 3950 bp, Zea Mays
cttcaagggtcttaagtgaagaaggaccatttgatgtgttctgctactccctgttttagtgctcaataacactaggacaggattgtgaattactaaaccttggtgataggccagagaaacttattgtgacagagattgcagtgccacctgttcctatacggccttctgttgttgttggtaatagtagaacaagcaacgaagacagcattacagttattttgaagagcattgttaatacaaactccatccttaaggagacccttcatactgggggtccattcaccaagtgctttgattgctggcaataccttcaacttcaagttgttgaatatgtgaatagtgatgccccttctcttcctgagtcacaacatcggggccttgttcaacgactcaaagggaagactggacgatttcgtggcaatttgtccggaaaacgtactgagtacacaggaagaaccgtcatatctcctgatccaaatttgaaaataacagaggtggctattcctgtgttgatggctcgagtcttgacttatcctgaaagggtttcaaactataacattgagaagctgagacaatgtatacgaaatggaccattcaaatatccaggggctaattttgttacacaacctgatggcatgaagcagagcttaaagtatggtgatagaaggattactgctcgggatttaaagtgtggatgtatagttgaaagacatttagaagatggagatgttgtcctctttaatagacagccgagcctgcatagaatgtcaattatgtgtcacagggcaaggataatgccatggagaacactcagatttaatgagtctgtttgcaacccttacaatgctgattttgacggagatgaaatgaatttgcatgtccctcagacagaggaagctcgcactgaagcgcttatgctcatgggggttcagaataatttatgtactcctaagaatggtgagatactggttgcttccacgcaagacttcttgacctcatctttcctagttacaagaaaagatactttctatgatagatcttcctttactcttttgtgctcataccttggtgatggaatggagaacattgatttgccaacaccagccttgattaaacctgttgagctttggactggtaaacaactatttagtgtgttagtccgacctaatgcgcacacaaaggtgtttctgaatcttgctgttcaagaaaaaatttattcaaagaaaaagggaaaaaaagaggggggagaggaggtaaaggaaacaatgtgtggaagggaaacaatgtgtcccaatgatggttatgtttatttccgaaatagtgaactgttatctggacaagtagggaaggccactttaggtaatgggaacaaggatggcctttactctgttcttttaagagattataattctcatgctgcagcaagctgtatgaatcgtttggcaaaatttagtgcaagatttatagggaaccatggtttttccattggtgtggacgatgtccaaccaggagaacatctaaatcggcaaaagaaaaaggaaatagacggagggtacaaaaaatgccatgatcttatttctttgtttgcgaaaggcgcgctcgcattgcatcctggttgcaacgcagcccaaacgctggagcataacatcactggtgtgttaaatgaaatcagatcaattgctggaaatgtgtgcatggatacgcttcactggaggaacagcccattgattatgtctcagtgtggttccaaaggttctccaatcaatatcagtcagatggttgcatgtgttggacagcaatcagttggagggcgtcgtgccccagatggttttctaaacagaactcttcctcactttcctataaattcaaagacccctgcagctaaaggttttgttgctaattcattctatactggtttgactgctactgagtttttcttccacacaatgggtggacgagaaggtcttgttgacacggcggtcaaaacagcagaaactggatatatgtcccgcagattgatgaaaggcttggaagatctctcagttttctatgatcagacagttcgaaatgctagcggtggtatagttcaatttttgtatggagatgatggcatggatcctgcaaagatggaaggaaaagatggcatgcccttaaatttggatcaattgtttatgaaagtcatggccacatgtcctcaaaggggatcagatacattatctccagtgggcatcaaacagatgttagaggataagttcttgcagcatgacacctcatctgatggtggctgtagtgcagagttcaagaaaaacttaactgaattccttgataaacgtatagaattaatgaaatgcacaagaagggcactccatctacatgaggatcatgtagaaaagaaagattcttgcctagaagaatctattgctgctattatatctggtatatctgcaaaacaacttcaggttttcttggacacttgcttatctcgttatcagtcaaagaagattgaagcaggagcatctattggagcaattggagctcaaagtattggggagccagggactcagatgacactgaaaacatttcattttgcgggagtagctagcatgaatgttactcttggtgttcctcgaatcaaggaaattatcaatgctgctaaaaagataagcacacctattatcaccgctcagcttttgtcaaggaaagatgtgctttctgcgcgcattgtgaaaggatctatggagaaagcagtgcttggcgaggttgcagcaaccattcagactgtcctgaaatcaagtctgccaaacttggttgtcaaacttgatatgcaacttatagaaactctccacatgggaatatctgctgattctgtgaagctgtcaattttgaatcatccaaagcttaagttaaaatctgagcatgtccgagtcattgatagagccaagttgcgaatatatccagctggaactgacaagctcaaacttcagcttgaactgcataacctcaaatccatccttccaaaagtgattgtgaagggcattccaactgttgaaagggttgttattgatgaagttaaagtcaacaacgcgacagaaagataccaattgttggttgaaggaacaaacctcctggcagtcatgggtaccccaggagttgatgctaggaagacgaaaagtaatcacatcatggaaacgaaccaaacacttggaattgaagctgctaggagatctattattgatgagattcaatacacaatgaaaagtcatggcatgaacattgatcggagacatatgatgctcttggcagatttaatgacatacaagggtgaaattctcggcattactagatacggcattgcaaagatgaaaagcagtgtgctgatgcttgcttcatttgagaaaaccgcagaacatctattcaatgcctcatacagtggtcgtcaggatcagatagagggagttagtgaatgcattatcatgggcattcccatgcagctcggtaccggtattctcaaagtcaggcaaaggctcgaccatgtgcctgaattcaagtaccaaccggacccgatactgtcgtgatacatacatgtggactgaagctggaactctgtacatatatatagctgggtcatacatgcatagcgtagcgtagcctagggcaaccctggcggcttgtcatttctccggtgaacatctaactagtctcgttccatctccatgaggcagactctaggtcaacaactccctcttcggctgcatcggcaaatgcgagagtaaaattgtggcaaacacttgctacatcttctaggcagtggtacatgatcgtgttacatatctctgcaggctaatgaagcctgggaagaatcattgtttttttcttgactagataaatatctgtgttgtaaaggaaaaataataatacaatgagaattaagaattacacgcgtgtttgcc

SEQ ID NO: 24768 - DNA, 4585 bp, Zea Mays
gtaaaagtgatctaggtctcccgcgccgccgccgccgccgcctaagctgcttccacctccgctttctgtgcagaggactcctcgccggagaatagccggcggcggctcgagacgaaactacggtgctcgtctcccgccgcccgccgcccttcactccccagcatacctagtccctactctaatccgtacagagcaacgcatcaagtgatggcgaagccggaggagaagctgcgctgcaccaaggaacccttcatcgaggacgtcggcacccggaggataaagagcatccggttcagcgtgctctcgggcagcgagattcgcaagtcagcggaggtacaggtctggaacaaccggatctatgaccgcgacatgacgccggttcccaatgggttgctcgacccgcgaatgggaatcccgactaagagaggcaaatgcaatacctgccatggtgaatttagtgactgtccaggtcatttcggctacttgaagctcgcgcttccagtttttaacgtgggcttctttaactgtattctggacgtgttgaagtgcatctgcaagagctgtagtagagttcttcttatcgagaaagaccgcagggagtttctaaagaagatgagaaatcccagggcagatgcactacagaaaagtgctacaatgaaaaaagtgagggacaaatgcaaactatcctgctgcccccgttgtgattacagaaatggattgtgaattactaaaccttggtgataggccagagaaacttattgtgacagagattgcagtgccacctgttcctatacggccttctgttgttgttggtaatagtagaacaagcaacgaagacagcattacagttattttgaagagcattgttaatacaaactccatccttaaggagacccttcatactgggggtccattcaccaagtgctttgattgctggcaataccttcaacttcaagttgttgaatatgtgaatagtgatgccccttctcttcctgagtcacaacatcggggccttgttcaacgactcaaagggaagactggacgatttcgtggcaatttgtccggaaaacgtactgagtacacaggaagaaccgtcatatctcctgatccaaatttgaaaataacagaggtggctattcctgtgttgatggctcgagtcttgacttatcctgaaagggtttcaaactataacattgagaagctgagacaatgtatacgaaatggaccattcaaatatccaggggctaattttgttacacaacctgatggcatgaagcagagcttaaagtatggtgatagaaggattactgctcgggatttaaagtgtggatgtatagttgaaagacatttagaagatggagatgttgtcctctttaatagacagccgagcctgcatagaatgtcaattatgtgtcacagggcaaggataatgccatggagaacactcagatttaatgagtctgtttgcaacccttacaatgctgattttgacggagatgaaatgaatttgcatgtccctcagacagaggaagctcgcactgaagcgcttatgctcatgggggttcagaataatttatgtactcctaagaatggtgagatactggttgcttccacgcaagacttcttgacctcatctttcctagttacaagaaaagatactttctatgatagatcttcctttactcttttgtgctcataccttggtgatggaatggagaacattgatttgccaacaccagccttgattaaacctgttgagctttggactggtaaacaactatttagtgtgttagtccgacctaatgcgcacacaaaggtgtttctgaatcttgctgttcaagaaaaaatttattcaaagaaaaagggaaaaaaagaggggggagaggaggtaaaggaaacaatgtgtggaagggaaacaatgtgtcccaatgatggttatgtttatttccgaaatagtgaactgttatctggacaagtagggaaggccactttaggtaatgggaacaaggatggcctttactctgttcttttaagagattataattctcatgctgcagcaagctgtatgaatcgtttggcaaaatttagtgcaagatttatagggaaccatggtttttccattggtgtggacgatgtccaaccaggagaacatctaaatcggcaaaagaaaaaggaaatagacggagggtacaaaaaatgccatgatcttatttctttgtttgcgaaaggcgcgctcgcattgcatcctggttgcaacgcagcccaaacgctggagcataacatcactggtgtgttaaatgaaatcagatcaattgctggaaatgtgtgcatggatacgcttcactggaggaacagcccattgattatgtctcagtgtggttccaaaggttctccaatcaatatcagtcagatggttgcatgtgttggacagcaatcagttggagggcgtcgtgccccagatggttttctaaacagaactcttcctcactttcctataaattcaaagacccctgcagctaaaggttttgttgctaattcattctatactggtttgactgctactgagtttttcttccacacaatgggtggacgagaaggtcttgttgacacggcggtcaaaacagcagaaactggatatatgtcccgcagattgatgaaaggcttggaagatctctcagttttctatgatcagacagttcgaaatgctagcggtggtatagttcaatttttgtatggagatgatggcatggatcctgcaaagatggaaggaaaagatggcatgcccttaaatttggatcaattgtttatgaaagtcatggccacatgtcctcaaaggggatcagatacattatctccagtgggcatcaaacagatgttagaggataagttcttgcagcatgacacctcatctgatggtggctgtagtgcagagttcaagaaaaacttaactgaattccttgataaacgtatagaattaatgaaatgcacaagaagggcactccatctacatgaggatcatgtagaaaagaaagattcttgcctagaagaatctattgctgctattatatctggtatatctgcaaaacaacttcaggttttcttggacacttgcttatctcgttatcagtcaaagaagattgaagcaggagcatctattggagcaattggagctcaaagtattggggagccagggactcagatgacactgaaaacatttcattttgcgggagtagctagcatgaatgttactcttggtgttcctcgaatcaaggaaattatcaatgctgctaaaaagataagcacacctattatcaccgctcagcttttgtcaaggaaagatgtgctttctgcgcgcattgtgaaaggatctatggagaaagcagtgcttggcgaggttgcagcaaccattcagactgtcctgaaatcaagtctgccaaacttggttgtcaaacttgatatgcaacttatagaaactctccacatgggaatatctgctgattctgtgaagctgtcaattttgaatcatccaaagcttaagttaaaatctgagcatgtccgagtcattgatagagccaagttgcgaatatatccagctggaactgacaagctcaaacttcagcttgaactgcataacctcaaatccatccttccaaaagtgattgtgaagggcattccaactgttgaaagggttgttattgatgaagttaaagtcaacaacgcgacagaaagataccaattgttggttgaaggaacaaacctcctggcagtcatgggtaccccaggagttgatgctaggaagacgaaaagtaatcacatcatggaaacgaaccaaacacttggaattgaagctgctaggagatctattattgatgagattcaatacacaatgaaaagtcatggcatgaacattgatcggagacatatgatgctcttggcagatttaatgacatacaagggtgaaattctcggcattactagatacggcattgcaaagatgaaaagcagtgtgctgatgcttgcttcatttgagaaaaccgcagaacatctattcaatgcctcatacagtggtcgtcaggatcagatagagggagttagtgaatgcattatcatgggcattcccatgcagctcggtaccggtattctcaaagtcaggcaaaggctcgaccatgtgcctgaattcaagtaccaaccggacccgatactgtcgtgatacatacatgtggactgaagctggaactctgtacatatatatagctgggtcatacatgcatagcgtagcgtagcctagggcaaccctggcggcttgtcatttctccggtgaacatctaactagtctcgttccatctccatgaggcagactctaggtcaacaactccctcttcggctgcatcggcaaatgcgagagtaaaattgtggcaaacacttgctacatcttctaggcagtggtacatgatcgtgttacatatctctgcaggctaatgaagcctgggaagaatcattgtttttttcttgactagataaatatctgtgttgtaaaggaaaaataataatacaatgagaattaagaattacacgcgtgtttgcc

SEQ ID NO: 24769 - DNA, 4695 bp, Zea Mays
gtaaaagtgatctaggtctcccgcgccgccgccgccgccgcctaagctgcttccacctccgctttctgtgcagaggactcctcgccggagaatagccggcggcggctcgagacgaaactacggtgctcgtctcccgccgcccgccgcccttcactccccagcatacctagtccctactctaatccgtacagagcaacgcatcaagtgatggcgaagccggaggagaagctgcgctgcaccaaggaacccttcatcgaggacgtcggcacccggaggataaagagcatccggttcagcgtgctctcgggcagcgagattcgcaagtcagcggaggtacaggtctggaacaaccggatctatgaccgcgacatgacgccggttcccaatgggttgctcgacccgcgaatgggaatcccgactaagagaggcaaatgcaatacctgccatggtgaatttagtgactgtccaggtcatttcggctacttgaagctcgcgcttccagtttttaacgtgggcttctttaactgtattctggacgtgttgaagtgcatctgcaagagctgtagtagagttcttcttatcgagaaagaccgcagggagtttctaaagaagatgagaaatcccagggcagatgcactacagaaaagtgctacaatgaaaaaagtgagggacaaatgcaaactatcctgctgcccccgttgtgattacagaaatggtgtagttaaaaaaggcagagcgggcttgatagtagttcatgattgtagcaaagttttggatggacatacagaagaattgaagaatgcactacaaaataagaaagaaaaggattgtgaattactaaaccttggtgataggccagagaaacttattgtgacagagattgcagtgccacctgttcctatacggccttctgttgttgttggtaatagtagaacaagcaacgaagacagcattacagttattttgaagagcattgttaatacaaactccatccttaaggagacccttcatactgggggtccattcaccaagtgctttgattgctggcaataccttcaacttcaagttgttgaatatgtgaatagtgatgccccttctcttcctgagtcacaacatcggggccttgttcaacgactcaaagggaagactggacgatttcgtggcaatttgtccggaaaacgtactgagtacacaggaagaaccgtcatatctcctgatccaaatttgaaaataacagaggtggctattcctgtgttgatggctcgagtcttgacttatcctgaaagggtttcaaactataacattgagaagctgagacaatgtatacgaaatggaccattcaaatatccaggggctaattttgttacacaacctgatggcatgaagcagagcttaaagtatggtgatagaaggattactgctcgggatttaaagtgtggatgtatagttgaaagacatttagaagatggagatgttgtcctctttaatagacagccgagcctgcatagaatgtcaattatgtgtcacagggcaaggataatgccatggagaacactcagatttaatgagtctgtttgcaacccttacaatgctgattttgacggagatgaaatgaatttgcatgtccctcagacagaggaagctcgcactgaagcgcttatgctcatgggggttcagaataatttatgtactcctaagaatggtgagatactggttgcttccacgcaagacttcttgacctcatctttcctagttacaagaaaagatactttctatgatagatcttcctttactcttttgtgctcataccttggtgatggaatggagaacattgatttgccaacaccagccttgattaaacctgttgagctttggactggtaaacaactatttagtgtgttagtccgacctaatgcgcacacaaaggtgtttctgaatcttgctgttcaagaaaaaatttattcaaagaaaaagggaaaaaaagaggggggagaggaggtaaaggaaacaatgtgtggaagggaaacaatgtgtcccaatgatggttatgtttatttccgaaatagtgaactgttatctggacaagtagggaaggccactttaggtaatgggaacaaggatggcctttactctgttcttttaagagattataattctcatgctgcagcaagctgtatgaatcgtttggcaaaatttagtgcaagatttatagggaaccatggtttttccattggtgtggacgatgtccaaccaggagaacatctaaatcggcaaaagaaaaaggaaatagacggagggtacaaaaaatgccatgatcttatttctttgtttgcgaaaggcgcgctcgcattgcatcctggttgcaacgcagcccaaacgctggagcataacatcactggtgtgttaaatgaaatcagatcaattgctggaaatgtgtgcatggatacgcttcactggaggaacagcccattgattatgtctcagtgtggttccaaaggttctccaatcaatatcagtcagatggttgcatgtgttggacagcaatcagttggagggcgtcgtgccccagatggttttctaaacagaactcttcctcactttcctataaattcaaagacccctgcagctaaaggttttgttgctaattcattctatactggtttgactgctactgagtttttcttccacacaatgggtggacgagaaggtcttgttgacacggcggtcaaaacagcagaaactggatatatgtcccgcagattgatgaaaggcttggaagatctctcagttttctatgatcagacagttcgaaatgctagcggtggtatagttcaatttttgtatggagatgatggcatggatcctgcaaagatggaaggaaaagatggcatgcccttaaatttggatcaattgtttatgaaagtcatggccacatgtcctcaaaggggatcagatacattatctccagtgggcatcaaacagatgttagaggataagttcttgcagcatgacacctcatctgatggtggctgtagtgcagagttcaagaaaaacttaactgaattccttgataaacgtatagaattaatgaaatgcacaagaagggcactccatctacatgaggatcatgtagaaaagaaagattcttgcctagaagaatctattgctgctattatatctggtatatctgcaaaacaacttcaggttttcttggacacttgcttatctcgttatcagtcaaagaagattgaagcaggagcatctattggagcaattggagctcaaagtattggggagccagggactcagatgacactgaaaacatttcattttgcgggagtagctagcatgaatgttactcttggtgttcctcgaatcaaggaaattatcaatgctgctaaaaagataagcacacctattatcaccgctcagcttttgtcaaggaaagatgtgctttctgcgcgcattgtgaaaggatctatggagaaagcagtgcttggcgaggttgcagcaaccattcagactgtcctgaaatcaagtctgccaaacttggttgtcaaacttgatatgcaacttatagaaactctccacatgggaatatctgctgattctgtgaagctgtcaattttgaatcatccaaagcttaagttaaaatctgagcatgtccgagtcattgatagagccaagttgcgaatatatccagctggaactgacaagctcaaacttcagcttgaactgcataacctcaaatccatccttccaaaagtgattgtgaagggcattccaactgttgaaagggttgttattgatgaagttaaagtcaacaacgcgacagaaagataccaattgttggttgaaggaacaaacctcctggcagtcatgggtaccccaggagttgatgctaggaagacgaaaagtaatcacatcatggaaacgaaccaaacacttggaattgaagctgctaggagatctattattgatgagattcaatacacaatgaaaagtcatggcatgaacattgatcggagacatatgatgctcttggcagatttaatgacatacaagggtgaaattctcggcattactagatacggcattgcaaagatgaaaagcagtgtgctgatgcttgcttcatttgagaaaaccgcagaacatctattcaatgcctcatacagtggtcgtcaggatcagatagagggagttagtgaatgcattatcatgggcattcccatgcagctcggtaccggtattctcaaagtcaggcaaaggctcgaccatgtgcctgaattcaagtaccaaccggacccgatactgtcgtgatacatacatgtggactgaagctggaactctgtacatatatatagctgggtcatacatgcatagcgtagcgtagcctagggcaaccctggcggcttgtcatttctccggtgaacatctaactagtctcgttccatctccatgaggcagactctaggtcaacaactccctcttcggctgcatcggcaaatgcgagagtaaaattgtggcaaacacttgctacatcttctaggcagtggtacatgatcgtgttacatatctctgcaggctaatgaagcctgggaagaatcattgtttttttcttgactagataaatatctgtgttgtaaaggaaaaataataatacaatgagaattaagaattacacgcgtgtttgcc

SEQ ID NO: 24770 - DNA, 4589 bp, Zea Mays
gtaaaagtgatctaggtctcccgcgccgccgccgccgccgcctaagctgcttccacctccgctttctgtgcagaggactcctcgccggagaatagccggcggcggctcgagacgaaactacggtgctcgtctcccgccgcccgccgcccttcactccccagcatacctagtccctactctaatccgtacagagcaacgcatcaagtgatggcgaagccggaggagaagctgcgctgcaccaaggaacccttcatcgaggacgtcggcacccggaggataaagagcatccggttcagcgtgctctcgggcagcgagattcgcaagtcagcggaggtacaggtctggaacaaccggatctatgaccgcgacatgacgccggttcccaatgggttgctcgacccgcgaatgggaatcccgactaagagaggcaaatgcaatacctgccatggtgaatttagtgactgtccaggtcatttcggctacttgaagctcgcgcttccagtttttaacgtgggcttctttaactgtattctggacgtgttgaagtgcatctgcaagagctgtagtagagttcttcttatcgagaaagaccgcagggagtttctaaagaagatgagaaatcccagggcagatgcactacagaaaagtgctacaatgaaaaaagtgagggacaaatgcaaactatcctgctgcccccgttgtgattacagaaatggtgtagttaaaaaaggcagagcgggcttgatagtagttcatgattgtagcaaagttttggatggacatacagaagaattgaagaatgcactacaaaataagaaagaaaaggtgtctgctagttcagttctagtgttagaccctgcaactgttctatctctattcagaagaatgattgatgaggattgtgaattactaaaccttggtgataggccagagaaacttattgtgacagagattgcagtgccacctgttcctatacggccttctgttgttgttggtaatagtagaacaagcaacgaagacagcattacagttattttgaagagcattgttaatacaaactccatccttaaggagacccttcatactgggggtccattcaccaagtgctttgattgctggcaataccttcaacttcaagttgttgaatatgtgaatagtgatgccccttctcttcctgagtcacaacatcggggccttgttcaacgactcaaagggaagactggacgatttcgtggcaatttgtccggaaaacgtactgagtacacaggaagaaccgtcatatctcctgatccaaatttgaaaataacagaggtggctattcctgtgttgatggctcgagtcttgacttatcctgaaagggtttcaaactataacattgagaagctgagacaatgtatacgaaatggaccattcaaatatccaggggctaattttgttacacaacctgatggcatgaagcagagcttaaagtatggtgatagaaggattactgctcgggatttaaagtgtggatgtatagttgaaagacatttagaagatggagatgttgtcctctttaatagacagccgagcctgcatagaatgtcaattatgtgtcacagggcaaggataatgccatggagaacactcagatttaatgagtctgtttgcaacccttacaatgctgattttgacggagatgaaatgaatttgcatgtccctcagacagaggaagctcgcactgaagcgcttatgctcatgggggttcagaataatttatgtactcctaagaatggtgagatactggttgcttccacgcaagacttcttgacctcatctttcctagttacaagaaaagatactttctatgatagatcttcctttactcttttgtgctcataccttggtgatggaatggagaacattgatttgccaacaccagccttgattaaacctgttgagctttggactggtaaacaactatttagtgtgttagtccgacctaatgcgcacacaaaggtaatgggaacaaggatggcctttactctgttcttttaagagattataattctcatgctgcagcaagctgtatgaatcgtttggcaaaatttagtgcaagatttatagggaaccatggtttttccattggtgtggacgatgtccaaccaggagaacatctaaatcggcaaaagaaaaaggaaatagacggagggtacaaaaaatgccatgatcttatttctttgtttgcgaaaggcgcgctcgcattgcatcctggttgcaacgcagcccaaacgctggagcataacatcactggtgtgttaaatgaaatcagatcaattgctggaaatgtgtgcatggatacgcttcactggaggaacagcccattgattatgtctcagtgtggttccaaaggttctccaatcaatatcagtcagatggttgcatgtgttggacagcaatcagttggagggcgtcgtgccccagatggttttctaaacagaactcttcctcactttcctataaattcaaagacccctgcagctaaaggttttgttgctaattcattctatactggtttgactgctactgagtttttcttccacacaatgggtggacgagaaggtcttgttgacacggcggtcaaaacagcagaaactggatatatgtcccgcagattgatgaaaggcttggaagatctctcagttttctatgatcagacagttcgaaatgctagcggtggtatagttcaatttttgtatggagatgatggcatggatcctgcaaagatggaaggaaaagatggcatgcccttaaatttggatcaattgtttatgaaagtcatggccacatgtcctcaaaggggatcagatacattatctccagtgggcatcaaacagatgttagaggataagttcttgcagcatgacacctcatctgatggtggctgtagtgcagagttcaagaaaaacttaactgaattccttgataaacgtatagaattaatgaaatgcacaagaagggcactccatctacatgaggatcatgtagaaaagaaagattcttgcctagaagaatctattgctgctattatatctggtatatctgcaaaacaacttcaggttttcttggacacttgcttatctcgttatcagtcaaagaagattgaagcaggagcatctattggagcaattggagctcaaagtattggggagccagggactcagatgacactgaaaacatttcattttgcgggagtagctagcatgaatgttactcttggtgttcctcgaatcaaggaaattatcaatgctgctaaaaagataagcacacctattatcaccgctcagcttttgtcaaggaaagatgtgctttctgcgcgcattgtgaaaggatctatggagaaagcagtgcttggcgaggttgcagcaaccattcagactgtcctgaaatcaagtctgccaaacttggttgtcaaacttgatatgcaacttatagaaactctccacatgggaatatctgctgattctgtgaagctgtcaattttgaatcatccaaagcttaagttaaaatctgagcatgtccgagtcattgatagagccaagttgcgaatatatccagctggaactgacaagctcaaacttcagcttgaactgcataacctcaaatccatccttccaaaagtgattgtgaagggcattccaactgttgaaagggttgttattgatgaagttaaagtcaacaacgcgacagaaagataccaattgttggttgaaggaacaaacctcctggcagtcatgggtaccccaggagttgatgctaggaagacgaaaagtaatcacatcatggaaacgaaccaaacacttggaattgaagctgctaggagatctattattgatgagattcaatacacaatgaaaagtcatggcatgaacattgatcggagacatatgatgctcttggcagatttaatgacatacaagggtgaaattctcggcattactagatacggcattgcaaagatgaaaagcagtgtgctgatgcttgcttcatttgagaaaaccgcagaacatctattcaatgcctcatacagtggtcgtcaggatcagatagagggagttagtgaatgcattatcatgggcattcccatgcagctcggtaccggtattctcaaagtcaggcaaaggctcgaccatgtgcctgaattcaagtaccaaccggacccgatactgtcgtgatacatacatgtggactgaagctggaactctgtacatatatatagctgggtcatacatgcatagcgtagcgtagcctagggcaaccctggcggcttgtcatttctccggtgaacatctaactagtctcgttccatctccatgaggcagactctaggtcaacaactccctcttcggctgcatcggcaaatgcgagagtaaaattgtggcaaacacttgctacatcttctaggcagtggtacatgatcgtgttacatatctctgcaggctaatgaagcctgggaagaatcattgtttttttcttgactagataaatatctgtgttgtaaaggaaaaataataatacaatgagaattaagaattacacgcgtgtttgcc

SEQ ID NO: 24771 - DNA, 1790 bp, Zea Mays
ctacatgcaaaggaaccttggattcttatattttgtgaaatcagttccacttcataatctatgaagccatatatccacagcaaccactccttcaaccttgtatttaggctggttacattagcactgctataagtgatggtccaggatgtttgatgttgaggtgtcctgatccatcttgtgctgctgctgttggacaagatatgataaattcactggctgctgatgatgataaggaaaagtatgggcgatatcttcgcagatcttacattgaggataatagaaagacaaaatggtgtcctgcgcctggatgtgaatacgcagtggaattcgtcatgggcagtggcagctatgatgttaattgcaactgttcatatgggttttgttggaattgcaccgaggaagctcatcgtccagtagactgtgccactgtttcgaagtggatcctcaagaacagtgcagagtcagagaatatgaattggatactggctaattcaaagccttgtcccaaatgcaaacggcctattgaaaaaaatcagggatgcatgcacatcacatgcactccaccatgcaaatttgagttctgctggctatgtcttggtccatggtcagagcatggagagaggactggtggattttatgcttgtaaccgctatgagtcagcaaggcaagaaggagcgtatgatgaatctgaaaggagaagagaaatggcaaagaactcccttgagagatacacacattattatgaacgatgggcagccaatcagtcgtcgaggcaaaaggcactgggggaccttcaaagcctacagaatgacaagcttgaaaggttaagtgacatacaaagtcaacctgagtcacagctgaagttcattgtagaggcatggttacagattgttgaatgcagaagggtattgaagtggacttatgcctatggattttacctgccagagcatgagcatgccaaaagacagttctttgaatatctgcaaggtgaggcagaatctggtttggagcggctacatcaatgtgcagagaaagaacttcaaatataccttgacgcagaatctccctcgaaagacttcaatgatttccgtacaaagttggctggattaactaggcccttccactagccatggcacatgcagcaaaagcgcaacttccaagagcctcggtggtaaaagtaagagtggcaagaacagggcatcaagcagcagttccaaatctggcggctcaacccgaggtgtggatgatagtaacatctggacatgcgatcagtgcacatatgcaaaccccaaatctgccagagcctgccaggcttgtgatcgccagcatcgatagcggtgtcagtcattgctagagatttggaccccatttgtcgagaattttctggtgttgcgccgtgcgatacacaacatacatgaaaattgaatattagctgatctctgggggtaggttttcgtgtatcatggattgtttgtcgactgactgcgcatgtgaagcctcaactcagcatccactcccatttgtgtatataagtatatccatatctgtaacaatgttttgttcaatggaagtagcggagctaggaggcgtctgctgccaaaggaactcaactgttgtagtgctgttgtaatgtaagatgcattggtcaaatttaaagaaagttagtcaccctgttacagaaattccaagggaactcttgttacatgtgattgtggtggttgactggtgccaaattcctgccctttagcgtttacagagaagacaacggtgtcggtggttgtctgctgggc

SEQ ID NO: 24772 - DNA, 2072 bp, Zea Mays
gtcaattggggcttgaaatatttatctacatgcaaaggaaccttggattcttatattttgtgaaatcagttccacttcataatctatgaagccatatatccacagcaaccactccttcaaccttgtatttaggctggttacattagcactgctataagtgatggtccaggatgtttgatgttgaggtgtcctgatccatcttgtgctgctgctgttggacaagatatgataaattcactggctgctgatgatgataaggaaaagtatgggcgatatcttcgcagatcttacattgaggataatagaaagacaaaatggtgtcctgcgcctggatgtgaatacgcagtggaattcgtcatgggcagtggcagctatgatgttaattgcaactgttcatatgggttttgttggaattgcaccgaggaagctcatcgtccagtagactgtgccactgtttcgaagtggatcctcaagaacagtgcagagtcagagaatatgaattggatactggctaattcaaagccttgtcccaaatgcaaacggcctattgaaaaaaatcagggatgcatgcacatcacatgcactccaccatgcaaatttgagttctgctggctatgtcttggtccatggtcagagcatggagagaggactggtggattttatgcttgtaaccgctatgagtcagcaaggcaagaaggagcgtatgatgaatctgaaaggagaagagaaatggcaaagaactcccttgagagatacacacattattatgaacgatgggcagccaatcagtcgtcgaggcaaaaggcactgggggaccttcaaagcctacagaatgacaagcttgaaaggttaagtgacatacaaagtcaacctgagtcacagctgaagttcattgtagaggcatggttacagattgttgaatgcagaagggtattgaagtggacttatgcctatggattttacctgccagagcatgagcatgccaaaagacagttctttgaatatctgcaaggtgaggcagaatctggtttggagcggctacatcaatgtgcagagaaagaacttcaaatataccttgacgcagaatctccctcgaaagacttcaatgatttccgtacaaagttggctggattaactaggtacatgttacttctttctatgccatctatgcttgctttgatgacatgaacaaaattacaaaataactgctatgttgtatccctgtggatgtttactgtgtttccttttttttcccgtgaggacttgaccagctctaaggctctaaattcaaaaacatgaccttttttttccatttgacatctttaattttacagtgtgactcgcaattattttgaaaatctcgtccgggctctggaaactggattaaatgatgtaggcccttccactagccatggcacatgcagcaaaagcgcaacttccaagagcctcggtggtaaaagtaagagtggcaagaacagggcatcaagcagcagttccaaatctggcggctcaacccgaggtgtggatgatagtaacatctggacatgcgatcagtgcacatatgcaaaccccaaatctgccagagcctgccaggcttgtgatcgccagcatcgatagcggtgtcagtcattgctagagatttggaccccatttgtcgagaattttctggtgttgcgccgtgcgatacacaacatacatgaaaattgaatattagctgatctctgggggtaggttttcgtgtatcatggattgtttgtcgactgactgcgcatgtgaagcctcaactcagcatccactcccatttgtgtatataagtatatccatatctgtaacaatgttttgttcaatggaagtagcggagctaggaggcgtctgctgccaaaggaactcaactgttgtagtgctgttgtaatgtaagatgcattggtcaaatttaaagaaagttagtcaccctgttacagaaattccaagggaactcttgttacatgtgattgtggtggttgactggtgccaaattcctgccctttagcgtttacagagaagacaacggtgtcggtggttgtctgctgggc

SEQ ID NO: 24773 - DNA, 1812 bp, Zea Mays
tggtcttctggagatgaatacagtattattatcctcaaacttgtaacatgtggaatatgtttcgaaagttgccctcgtgggtcgatgagtgctgctgcatgtggtcatcctttctgcagtacatgttggagaggttacattagcactgctataagtgatggtccaggatgtttgatgttgaggtgtcctgatccatcttgtgctgctgctgttggacaagatatgataaattcactggctgctgatgatgataaggaaaagtatgggcgatatcttcgcagatcttacattgaggataatagaaagacaaaatggtgtcctgcgcctggatgtgaatacgcagtggaattcgtcatgggcagtggcagctatgatgttaattgcaactgttcatatgggttttgttggaattgcaccgaggaagctcatcgtccagtagactgtgccactgtttcgaagtggatcctcaagaacagtgcagagtcagagaatatgaattggatactggctaattcaaagccttgtcccaaatgcaaacggcctattgaaaaaaatcagggatgcatgcacatcacatgcactccaccatgcaaatttgagttctgctggctatgtcttggtccatggtcagagcatggagagaggactggtggattttatgcttgtaaccgctatgagtcagcaaggcaagaaggagcgtatgatgaatctgaaaggagaagagaaatggcaaagaactcccttgagagatacacacattattatgaacgatgggcagccaatcagtcgtcgaggcaaaaggcactgggggaccttcaaagcctacagaatgacaagcttgaaaggttaagtgacatacaaagtcaacctgagtcacagctgaagttcattgtagaggcatggttacagattgttgaatgcagaagggtattgaagtggacttatgcctatggattttacctgccagagcatgagcatgccaaaagacagttctttgaatatctgcaaggtgaggcagaatctggtttggagcggctacatcaatgtgcagagaaagaacttcaaatataccttgacgcagaatctccctcgaaagacttcaatgatttccgtacaaagttggctggattaactaggcccttccactagccatggcacatgcagcaaaagcgcaacttccaagagcctcggtggtaaaagtaagagtggcaagaacagggcatcaagcagcagttccaaatctggcggctcaacccgaggtgtggatgatagtaacatctggacatgcgatcagtgcacatatgcaaaccccaaatctgccagagcctgccaggcttgtgatcgccagcatcgatagcggtgtcagtcattgctagagatttggaccccatttgtcgagaattttctggtgttgcgccgtgcgatacacaacatacatgaaaattgaatattagctgatctctgggggtaggttttcgtgtatcatggattgtttgtcgactgactgcgcatgtgaagcctcaactcagcatccactcccatttgtgtatataagtatatccatatctgtaacaatgttttgttcaatggaagtagcggagctaggaggcgtctgctgccaaaggaactcaactgttgtagtgctgttgtaatgtaagatgcattggtcaaatttaaagaaagttagtcaccctgttacagaaattccaagggaactcttgttacatgtgattgtggtggttgactggtgccaaattcctgccctttagcgtttacagagaagacaacggtgtcggtggttgtctgctgggc

SEQ ID NO: 24774 - DNA, 1784 bp, Zea Mays
agttgcctaagcatgtaacatgtggaatatgtttcgaaagttgccctcgtgggtcgatgagtgctgctgcatgtggtcatcctttctgcagtacatgttggagaggttacattagcactgctataagtgatggtccaggatgtttgatgttgaggtgtcctgatccatcttgtgctgctgctgttggacaagatatgataaattcactggctgctgatgatgataaggaaaagtatgggcgatatcttcgcagatcttacattgaggataatagaaagacaaaatggtgtcctgcgcctggatgtgaatacgcagtggaattcgtcatgggcagtggcagctatgatgttaattgcaactgttcatatgggttttgttggaattgcaccgaggaagctcatcgtccagtagactgtgccactgtttcgaagtggatcctcaagaacagtgcagagtcagagaatatgaattggatactggctaattcaaagccttgtcccaaatgcaaacggcctattgaaaaaaatcagggatgcatgcacatcacatgcactccaccatgcaaatttgagttctgctggctatgtcttggtccatggtcagagcatggagagaggactggtggattttatgcttgtaaccgctatgagtcagcaaggcaagaaggagcgtatgatgaatctgaaaggagaagagaaatggcaaagaactcccttgagagatacacacattattatgaacgatgggcagccaatcagtcgtcgaggcaaaaggcactgggggaccttcaaagcctacagaatgacaagcttgaaaggttaagtgacatacaaagtcaacctgagtcacagctgaagttcattgtagaggcatggttacagattgttgaatgcagaagggtattgaagtggacttatgcctatggattttacctgccagagcatgagcatgccaaaagacagttctttgaatatctgcaaggtgaggcagaatctggtttggagcggctacatcaatgtgcagagaaagaacttcaaatataccttgacgcagaatctccctcgaaagacttcaatgatttccgtacaaagttggctggattaactaggcccttccactagccatggcacatgcagcaaaagcgcaacttccaagagcctcggtggtaaaagtaagagtggcaagaacagggcatcaagcagcagttccaaatctggcggctcaacccgaggtgtggatgatagtaacatctggacatgcgatcagtgcacatatgcaaaccccaaatctgccagagcctgccaggcttgtgatcgccagcatcgatagcggtgtcagtcattgctagagatttggaccccatttgtcgagaattttctggtgttgcgccgtgcgatacacaacatacatgaaaattgaatattagctgatctctgggggtaggttttcgtgtatcatggattgtttgtcgactgactgcgcatgtgaagcctcaactcagcatccactcccatttgtgtatataagtatatccatatctgtaacaatgttttgttcaatggaagtagcggagctaggaggcgtctgctgccaaaggaactcaactgttgtagtgctgttgtaatgtaagatgcattggtcaaatttaaagaaagttagtcaccctgttacagaaattccaagggaactcttgttacatgtgattgtggtggttgactggtgccaaattcctgccctttagcgtttacagagaagacaacggtgtcggtggttgtctgctgggc

SEQ ID NO: 24775 - DNA, 2727 bp, Zea Mays
aaagctctcgtttctagcttccttagaggaaagctctcgttcctagcaaccaagctagcgaatccaacccaacccgtccatttctccacatccccaccctccctccgtctccgcctccgcctgcgccaccctccaatccgcgccggcgcgtcgccaccctacccgattgctacctcctcgtggtgggcgccgctccgatccgcccgatccgcgccggcgcctcgccaccctacccgattgctacctcctcgtggtgggcgcctgctcctggagttccggcgcgcggcgggggcggcgtagtaatggaatccgaggacgacatgcacgacgcgaacgactccgctgaagacgatttctacagcggcggggaggccggtctcgccgccagcgacgacggagacgccgactacgactttgcggaccacgactccgacgactccgcggagctcatctcccacagacagcagcaaaattatagtatattgagtgaagttgatatacagcggcgccaagaggatgatataaatagggtttcaaccgttctttcaatttccaaaccagaagcatgtgttcttctccgcaactataactggagtgttagtaaggtgcatgacgaatggtttgctgatgaagagcgtgtccggaaggttgtgggtttaccagagaagcataatgaaatgccaaatgacagagaagtattcccatgcttcattagtttcgcctgtaacatgtggaatatgtttcgaaagttgccctcgtgggtcgatgagtgctgctgcatgtggtcatcctttctgcagtacatgttggagaggttacattagcactgctataagtgatggtccaggatgtttgatgttgaggtgtcctgatccatcttgtgctgctgctgttggacaagatatgataaattcactggctgctgatgatgataaggaaaagtatgggcgatatcttcgcagatcttacattgaggataatagaaagacaaaatggtgtcctgcgcctggatgtgaatacgcagtggaattcgtcatgggcagtggcagctatgatgttaattgcaactgttcatatgggttttgttggaattgcaccgaggaagctcatcgtccagtagactgtgccactgtttcgaagtggatcctcaagaacagtgcagagtcagagaatatgaattggatactggctaattcaaagccttgtcccaaatgcaaacggcctattgaaaaaaatcagggatgcatgcacatcacatgcactccaccatgcaaatttgagttctgctgagcatggagagaggactggtggattttatgcttgtaaccgctatgagtcagcaaggcaagaaggagcgtatgatgaatctgaaaggagaagagaaatggcaaagaactcccttgagagatacacacattattatgaacgatgggcagccaatcagtcgtcgaggcaaaaggcactgggggaccttcaaagcctacagaatgacaagcttgaaaggttaagtgacatacaaagtcaacctgagtcacagctgaagttcattgtagaggcatggttacagattgttgaatgcagaagggtattgaagtggacttatgcctatggattttacctgccagagcatgagcatgccaaaagacagttctttgaatatctgcaaggtgaggcagaatctggtttggagcggctacatcaatgtgcagagaaagaacttcaaatataccttgacgcagaatctccctcgaaagacttcaatgatttccgtacaaagttggctggattaactaggtacatgttacttctttctatgccatctatgcttgctttgatgacatgaacaaaattacaaaataactgctatgttgtatccctgtggatgtttactgtgtttccttttttttcccgtgaggacttgaccagctctaaggctctaaattcaaaaacatgaccttttttttccatttgacatctttaattttacagtgtgactcgcaattattttgaaaatctcgtccgggctctggaaactggattaaatgatgtaggcccttccactagccatggcacatgcagcaaaagcgcaacttccaagagcctcggtggtaaaagtaagagtggcaagaacagggcatcaagcagcagttccaaatctggcggctcaacccgaggtgtggatgatagtaacatctggacatgcgatcagtgcacatatgcaaaccccaaatctgccagagcctgccaggcttgtgatcgccagcatcgatagcggtgtcagtcattgctagagatttggaccccatttgtcgagaattttctggtgttgcgccgtgcgatacacaacatacatgaaaattgaatattagctgatctctgggggtaggttttcgtgtatcatggattgtttgtcgactgactgcgcatgtgaagcctcaactcagcatccactcccatttgtgtatataagtatatccatatctgtaacaatgttttgttcaatggaagtagcggagctaggaggcgtctgctgccaaaggaactcaactgttgtagtgctgttgtaatgtaagatgcattggtcaaatttaaagaaagttagtcaccctgttacagaaattccaagggaactcttgttacatgtgattgtggtggttgactggtgccaaattcctgccctttagcgtttacagagaagacaacggtgtcggtggttgtctgctgggc

SEQ ID NO: 24776 - DNA, 2555 bp, Zea Mays
aaagctctcgtttctagcttccttagaggaaagctctcgttcctagcaaccaagctagcgaatccaacccaacccgtccatttctccacatccccaccctccctccgtctccgcctccgcctgcgccaccctccaatccgcgccggcgcgtcgccaccctacccgattgctacctcctcgtggtgggcgccgctccgatccgcccgatccgcgccggcgcctcgccaccctacccgattgctacctcctcgtggtgggcgcctgctcctggagttccggcgcgcggcgggggcggcgtagtaatggaatccgaggacgacatgcacgacgcgaacgactccgctgaagacgatttctacagcggcggggaggccggtctcgccgccagcgacgacggagacgccgactacgactttgcggaccacgactccgacgactccgcggagctcatctcccacagacagcagcaaaattatagtatattgagtgaagttgatatacagcggcgccaagaggatgatataaatagggtttcaaccgttctttcaatttccaaaccagaagcatgtgttcttctccgcaactataactggagtgttagtaaggtgcatgacgaatggtttgctgatgaagagcgtgtccggaaggttgtgggtttaccagagaagcataatgaaatgccaaatgacagagaagtattcccatgcttcattagtttcgcctgtaacatgtggaatatgtttcgaaagttgccctcgtgggtcgatgagtgctgctgcatgtggtcatcctttctgcagtacatgttggagaggttacattagcactgctataagtgatggtccaggatgtttgatgttgaggtgtcctgatccatcttgtgctgctgctgttggacaagatatgataaattcactggctgctgatgatgataaggaaaagtatgggcgatatcttcgcagatcttacattgaggataatagaaagacaaaatggtgtcctgcgcctggatgtgaatacgcagtggaattcgtcatgggcagtggcagctatgatgttaattgcaactgttcatatgggttttgttggaattgcaccgaggaagctcatcgtccagtagactgtgccactgtttcgaagtggatcctcaagaacagtgcagagtcagagaatatgaattggatactggctaattcaaagccttgtcccaaatgcaaacggcctattgaaaaaaatcagggatgcatgcacatcacatgcactccaccatgcaaatttgagttctgctggctatgtcttggtccatggtcagagcatggagagaggactggtggattttatgcttgtaaccgctatgagtcagcaaggcaagaaggagcgtatgatgaatctgaaaggagaagagaaatggcaaagaactcccttgagagatacacacattattatgaacgatgggcagccaatcagtcgtcgaggcaaaaggcactgggggaccttcaaagcctacagaatgacaagcttgaaaggttaagtgacatacaaagtcaacctgagtcacagctgaagttcattgtagaggcatggttacagattgttgaatgcagaagggtattgaagtggacttatgcctatggattttacctgccagagcatgagcatgccaaaagacagttctttgaatatctgcaaggtgaggcagaatctggtttggagcggctacatcaatgtgcagagaaagaacttcaaatataccttgacgcagaatctccctcgaaagacttcaatgatttccgtacaaagttggctggattaactagtgtgactcgcaattattttgaaaatctcgtccgggctctggaaactggattaaatgatgtaggcccttccactagccatggcacatgcagcaaaagcgcaacttccaagagcctcggtggtaaaagtaagagtggcaagaacagggcatcaagcagcagttccaaatctggcggctcaacccgaggtgtggatgatagtaacatctggacatgcgatcagtgcacatatgcaaaccccaaatctgccagagcctgccaggcttgtgatcgccagcatcgatagcggtgtcagtcattgctagagatttggaccccatttgtcgagaattttctggtgttgcgccgtgcgatacacaacatacatgaaaattgaatattagctgatctctgggggtaggttttcgtgtatcatggattgtttgtcgactgactgcgcatgtgaagcctcaactcagcatccactcccatttgtgtatataagtatatccatatctgtaacaatgttttgttcaatggaagtagcggagctaggaggcgtctgctgccaaaggaactcaactgttgtagtgctgttgtaatgtaagatgcattggtcaaatttaaagaaagttagtcaccctgttacagaaattccaagggaactcttgttacatgtgattgtggtggttgactggtgccaaattcctgccctttagcgtttacagagaagacaacggtgtcggtggttgtctgctgggc

SEQ ID NO: 24777 - DNA, 1928 bp, Zea Mays
aaagctctcgtttctagcttccttagaggaaagctctcgttcctagcaaccaagctagcgaatccaacccaacccgtccatttctccacatccccaccctccctccgtctccgcctccgcctgcgccaccctccaatccgcgccggcgcgtcgccaccctacccgattgctacctcctcgtggtgggcgccgctccgatccgcccgatccgcgccggcgcctcgccaccctacccgattgctacctcctcgtggtgggcgcctgctcctggagttccggcgcgcggcgggggcggcgtagtaatggaatccgaggacgacatgcacgacgcgaacgactccgctgaagacgatttctacagcggcggggaggccggtctcgccgccagcgacgacggagacgccgactacgactttgcggaccacgactccgacgactccgcggagctcatctcccacagacagcagcaaaattatagtatattgagtgaagttgatatacagcggcgccaagaggatgatataaatagggtttcaaccgttctttcaatttccaaaccagaagcatgtgttcttctccgcaactataactggagtgttagtaaggtgcatgacgaatggtttgctgatgaagagcgtgtccggaaggttgtgggtttaccagagaagcataatgaaatgccaaatgacagagaagtaacatgtggaatatgtttcgaaagttgccctcgtgggtcgatgagtgctgctgcatgtgagaggactggtggattttatgcttgtaaccgctatgagtcagcaaggcaagaaggagcgtatgatgaatctgaaaggagaagagaaatggcaaagaactcccttgagagatacacacattattatgaacgatgggcagccaatcagtcgtcgaggcaaaaggcactgggggaccttcaaagcctacagaatgacaagcttgaaaggttaagtgacatacaaagtcaacctgagtcacagctgaagttcattgtagaggcatggttacagattgttgaatgcagaagggtattgaagtggacttatgcctatggattttacctgccagagcatgagcatgccaaaagacagttctttgaatatctgcaaggtgaggcagaatctggtttggagcggctacatcaatgtgcagagaaagaacttcaaatataccttgacgcagaatctccctcgaaagacttcaatgatttccgtacaaagttggctggattaactaggcccttccactagccatggcacatgcagcaaaagcgcaacttccaagagcctcggtggtaaaagtaagagtggcaagaacagggcatcaagcagcagttccaaatctggcggctcaacccgaggtgtggatgatagtaacatctggacatgcgatcagtgcacatatgcaaaccccaaatctgccagagcctgccaggcttgtgatcgccagcatcgatagcggtgtcagtcattgctagagatttggaccccatttgtcgagaattttctggtgttgcgccgtgcgatacacaacatacatgaaaattgaatattagctgatctctgggggtaggttttcgtgtatcatggattgtttgtcgactgactgcgcatgtgaagcctcaactcagcatccactcccatttgtgtatataagtatatccatatctgtaacaatgttttgttcaatggaagtagcggagctaggaggcgtctgctgccaaaggaactcaactgttgtagtgctgttgtaatgtaagatgcattggtcaaatttaaagaaagttagtcaccctgttacagaaattccaagggaactcttgttacatgtgattgtggtggttgactggtgccaaattcctgccctttagcgtttacagagaagacaacggtgtcggtggttgtctgctgggc

SEQ ID NO: 24778 - DNA, 2450 bp, Zea Mays
gaagaaaagtgtaagaaagagagaggaaagctctcgtttctagcttccttagaggaaagctctcgttcctagcaaccaagctagcgaatccaacccaacccgtccatttctccacatccccaccctccctccgtctccgcctccgcctgcgccaccctccaatccgcgccggcgcgtcgccaccctacccgattgctacctcctcgtggtgggcgccgctccgatccgcccgatccgcgccggcgcctcgccaccctacccgattgctacctcctcgtggtgggcgcctgctcctggagttccggcgcgcggcgggggcggcgtagtaatggaatccgaggacgacatgcacgacgcgaacgactccgctgaagacgatttctacagcggcggggaggccggtctcgccgccagcgacgacggagacgccgactacgactttgcggaccacgactccgacgactccgcggagctcatctcccacagacagcagcaaaattatagtatattgagtgaagttgatatacagcggcgccaagaggatgatataaatagggtttcaaccgttctttcaatttccaaaccagaagcatgtgttcttctccgcaactataactggagtgttagtaaggtgcatgacgaatggtttgctgatgaagagcgtgtccggaaggttgtgggtttaccagagaagcataatgaaatgccaaatgacagagaagtaacatgtggaatatgtttcgaaagttgccctcgtgggtcgatgagtgctgctgcatgtggtcatcctttctgcagtacatgttggagaggttacattagcactgctataagtgatggtccaggatgtttgatgttgaggtgtcctgatccatcttgtgctgctgctgttggacaagatatgataaattcactggctgctgatgatgataaggaaaagtatgggcgatatcttcgcagatcttacattgaggataatagaaagacaaaatggtgtcctgcgcctggatgtgaatacgcagtggaattcgtcatgggcagtggcagctatgatgttaattgcaactgttcatatgggttttgttggaattgcaccgaggaagctcatcgtccagtagactgtgccactgtttcgaagtggatcctcaagaacagtgcagagtcagagaatatgaattggatactggctaattcaaagccttgtcccaaatgcaaacggcctattgaaaaaaatcagggatgcatgcacatcacatgcactccaccatgcaaatttgagttctgctggctatgtcttggtccatggtcagagcatggagagaggactggtggattttatgcttgtaaccgctatgagtcagcaaggcaagaaggagcgtatgatgaatctgaaaggagaagagaaatggcaaagaactcccttgagagatacacacattattatgaacgatgggcagccaatcagtcgtcgaggcaaaaggcactgggggaccttcaaagcctacagaatgacaagcttgaaaggttaagtgacatacaaagtcaacctgagtcacagctgaagttcattgtagaggcatggttacagattgttgaatgcagaagggtattgaagtggacttatgcctatggattttacctgccagagcatgagcatgccaaaagacagttctttgaatatctgcaaggtgaggcagaatctggtttggagcggctacatcaatgtgcagagaaagaacttcaaatataccttgacgcagaatctccctcgaaagacttcaatgatttccgtacaaagttggctggattaactagtgtgactcgcaattattttgaaaatctcgtccgggctctggaaactggattaaatgatgtaggcccttccactagccatggcacatgcagcaaaagcgcaacttccaagagcctcggtggtaaaagtaagagtggcaagaacagggcatcaagcagcagttccaaatctggcggctcaacccgaggtgtggatgatagtaacatctggacatgcgatcagtgcacatatgcaaaccccaaatctgccagagcctgccaggcttgtgatcgccagcatcgatagcggtgtcagtcattgctagagatttggaccccatttgtcgagaattttctggtgttgcgccgtgcgatacacaacatacatgaaaattgaatattagctgatctctgggggtaggttttcgtgtatcatggattgtttgtcgactgactgcgcatgtgaagcctcaactcagctgttgtagtgctgttgtaatgtaagatgcattggtcaaatttaaagaaagttagtcaccctgttacagaaattccaagggaactcttgttacatgtgattgtggtggttgactggtgccaaattcctgccctttagcgtttacagagaagacaacggtgtcggtggttgtctgctgggc

SEQ ID NO: 24779 - DNA, 2946 bp, Zea Mays
gcacgccagcgacacgttagccatgtgagtgaccaacgccctctcccgggggcgggcaggttgggaggacgagcaaacgacgtgaggcgtcgggcgtcgtgggtgcagcggtgcgaacggaccgcggactggactcggtccaaagtccaaacacgtatgtacacggtctgtccggaggccggagcttcacatcgctggccggccccccgcgaccgagatgtcgcggccgtgcttcacatcgctggcccgcccgctcgttcgtcggtctcggaactttgtccacctctgcgctgctggcctcctgctgctcctctccctcctgcagcgttgccgtccacaggaacaggacgggacgggttgagaaaatttcagcgaaaccatcggcggattacataagccgacagccaccggtcgttgcgtcttgctcatcagaacgctagctaggactaggagaagcttaacctctgcaaccaccgataagagttactactatttacataggagcggcagctgccaccgcgtgcgccggcgatggggtggtgggagaacgccaagagcgtgttcggcgacgccgggaacgtcggctgcttcccgaggatcgggaggaagcagtccaagaactcgtacgctttcccggcggatcctgggagcgaaaaacggagagggtcaggcggccccgcccccgccccggaggaggtgatcacggtggaggtgccggaggtgcccctgcgcgagctgaacgggatcacggcgtccttctcaggcgagaagctgatcgggcaagggtcctacgccaaggtctaccaggccacgacgcggagcggcaggctggctgtcgtcaagcggctggagaagccctccaagcacgcgtccaacgacgtcttcctcaagcagctcggggtggcgtccaggctcaagcacgacaacttcgtccgcctgctcgggtacaccatcagcggcgacctccgcgtgctggtctacgagttcgccaccatgggcaccctccacgacgtgcttcacggtgggtctccctcccccctcccctgctgttgctgctgctggtggtggtcagaaacatgtatccaggcagcagccactcttggaccaacgacaacgaaccaaccacgtacgcaggggacagggatgtgctgaggctgccgccgccggagcagggcagcgccgccaggccggtgctgctgagctggattcaccgcgtgcacatcgcgctggacgcggcgagggggctggagtacctgcacgagatggtgcagccgccggtgacgcacaaggacgtgcgctccaccaacgtcctgctgttcgagggcttcagggccaagatcgccgactacaacatgttcagccaggccgcggacatggccaggctcaaccgctccacgcacacgctcggttccttcggctaccaggcgcccgagtacgccatgacgggccagatgacggacaagagcgacgtgtacagcttcggcatcgttctcctggagctcctgacgggtaggaagccattggaccggacgttgccgccgggccagcgaagcctggtgaactgggtaagaattatcgaatacttgtaggtcacccaccccctgactctgattccattattagttacgtaatctgaaggcaaccaaaatgatagtccgcatcaatcaaacagtgaaaaataaacgcgaaaccaaactggaataattgcaaccagttagtgtatcctactactaatcaccgcattcttacctaacccagctgagaatcgatcgaaagaggtactttcctagacacaagtggaagatttgggtggcattctgtcaaactgatcaaaatgtgttttctttgttcaacttcaagaaagttctagaccccagattaaaaatcgatggagcttgccctccgagtgctataaccaataatgttgatgcaccctggatggaataaccccaaccccaacgagcaccaaaaaatgggagagaaaaaaaaaacgtctggcgatttcctgatcatgttgatgcatcaggcaactccgatgctgacggaagacagggttcaggaatgcatcgatccgcaacttggtgatcagtatcctcctgctggagctgtcaagctcgggcgaatcgcggtgcagtgcctgcagtacgaccccaccttccggccgtccatgggcaccgtcgcccgcgtcatcaactacgccgtcttgcgagaccagcagggcgtcgtctgatttgatggcgtgccgaattttggttatttttagggttactcactgttcagattctggagacttctacagaaggaggaaaagcaccaacaaattctcgatgcatgtcgagctttggaggtggtggcgatgtaagtttttgcaatgcatggatggcgctcgaatgcaagaattgaagatggctagtgttttctatagtcatgacattttgttttctttgagttagtttaattattcaagcaactactctatggtgcaataatcgttatgtaatggatgtacgtatttgtatgctaaagccggaactcttgtttccataataaaaaaaatctattggcccaaaatgtggggctataaaacaagaaaacagaggaacaaggtggcccgaattctgcttctgcgtgtatagatatttcttttgcgtatacagttgacaagtcatttgttctactctcagcaaaaaaagaagaagaatttcttctatacctacctgcaggaccaaataaatcgacttcagaaaaaatccttatgaatgagatgttcctatgtaagtttagagtgcactgctaaaaagactttgaacatgtagatgaactgttgtaccgttatgccagcaaattaggtttatatttttcagtgccatcaagtcatcatttacatgctggtcactaatgttcctcatacaaacaaaagattataagcatgagatgtaccttaag

SEQ ID NO: 24780 - DNA, 3504 bp, Zea Mays
gcacgccagcgacacgttagccatgtgagtgaccaacgccctctcccgggggcgggcaggttgggaggacgagcaaacgacgtgaggcgtcgggcgtcgtgggtgcagcggtgcgaacggaccgcggactggactcggtccaaagtccaaacacgtatgtacacggtctgtccggaggccggagcttcacatcgctggccggccccccgcgaccgagatgtcgcggccgtgcttcacatcgctggcccgcccgctcgttcgtcggtctcggaactttgtccacctctgcgctgctggcctcctgctgctcctctccctcctgcagcgttgccgtccacaggaacaggacgggacgggttgagaaaatttcagcgaaaccatcggcggattacataagccgacagccaccggtcgttgcgtcttgctcatcagaacgctagctaggactaggagaagcttaacctctgcaaccaccgataagagttactactatttacataggagcggcagctgccaccgcgtgcgccggcgatggggtggtgggagaacgccaagagcgtgttcggcgacgccgggaacgtcggctgcttcccgaggatcgggaggaagcagtccaagaactcgtacgctttcccggcggatcctgggagcgaaaaacggagagggtcaggcggccccgcccccgccccggaggaggtgatcacggtggaggtgccggaggtgcccctgcgcgagctgaacgggatcacggcgtccttctcaggcgagaagctgatcgggcaagggtcctacgccaaggtctaccaggccacgacgcggagcggcaggctggctgtcgtcaagcggctggagaagccctccaagcacgcgtccaacgacgtcttcctcaagcagctcggggtggcgtccaggctcaagcacgacaacttcgtccgcctgctcgggtacaccatcagcggcgacctccgcgtgctggtctacgagttcgccaccatgggcaccctccacgacgtgcttcacggggacagggatgtgctgaggctgccgccgccggagcagggcagcgccgccaggccggtgctgctgagctggattcaccgcgtgcacatcgcgctggacgcggcgagggggctggagtacctgcacgagatggtgcagccgccggtgacgcacaaggacgtgcgctccaccaacgtcctgctgttcgagggcttcagggccaagatcgccgactacaacatgttcagccaggccgcggacatggccaggctcaaccgctccacgcacacgctcggttccttcggctaccaggcgcccgagtacgccatgacgggccagatgacggacaagagcgacgtgtacagcttcggcatcgttctcctggagctcctgacgggtaggaagccattggaccggacgttgccgccgggccagcgaagcctggtgaactgggtaagaattatcgaatacttgtaggtcacccaccccctgactctgattccattattagttacgtaatctgaaggcaaccaaaatgatagtccgcatcaatcaaacagtgaaaaataaacgcgaaaccaaactggaataattgcaaccagttagtgtatcctactactaatcaccgcattcttacctaacccagctgagaatcgatcgaaagaggtactttcctagacacaagtggaagatttgggtggcattctgtcaaactgatcaaaatgtgttttctttgttcaacttcaagaaagttctagaccccagattaaaaatcgatggagcttgccctccgagtgctataaccaataatgttgatgcaccctggatggaataaccccaaccccaacgagcaccaaaaaatgggagagaaaaaaaaaacgtctggcgatttcctgatcatgttgatgcatcaggcaactccgatgctgacggaagacagggttcaggaatgcatcgatccgcaacttggtgatcagtatcctcctgctggagctgtcaagctcgggcgaatcgcggtgcagtgcctgcagtacgaccccaccttccggccgtccatgggcaccgtcgcccgcgtcatcaactacgccgtcttgcgagaccagcagggcgtcgtctgatttgatggcgtgccgaattttggtactatagctgtgaatatcatgcatgtcttgctgtgctatgttaagtaagctggccatgtttgagcagcggttattatctgagaatggatactatccttggaagcagcacggaatgggttgcggttacgaccacataaaacaatgggctagtttgtaataacaatatatttttctctgagaatgttttgtgaaggtgtacaaaaaaaaaaagatacaggagctggtcactaaatcagttggggtttctcgacctgagcgagttcttattgatggcatatttaattcgtggctaactcgccacattttatctaagtttagtcgttcgaattgaagtactaaacttagacatgcaataccaaaaaatgtcttgcaccctaggtcagtttttctttttttaaaaaaaaaaatcaacaacaaaagttgtacactgtcattttgcattagttgtgttccatctattggcccaaaagtatatggagaatcatttactttgctttaaaaatagacatgcccattagcattaatcatattatcggatcttgggaatctaataatgctctggcatacaaaaaattattactgacttgaatatcagctttattttggtccatctggctctgtcgaaacgaggtggtgtttaatcataaaccaatactatcaattgtgcaggttatttttagggttactcactgttcagattctggagacttctacagaaggaggaaaagcaccaacaaattctcgatgcatgtcgagctttggaggtggtggcgatgtaagtttttgcaatgcatggatggcgctcgaatgcaagaattgaagatggctagtgttttctatagtcatgacattttgttttctttgagttagtttaattattcaagcaactactctatggtgcaataatcgttatgtaatggatgtacgtatttgtatgctaaagccggaactcttgtttccataataaaaaaaatctattggcccaaaatgtggggctataaaacaagaaaacagaggaacaaggtggcccgaattctgcttctgcgtgtatagatatttcttttgcgtatacagttgacaagtcatttgttctactctcagcaaaaaaagaagaagaatttcttctatacctacctgcaggaccaaataaatcgacttcagaaaaaatccttatgaatgagatgttcctatgtaagtttagagtgcactgctaaaaagactttgaacatgtagatgaactgttgtaccgttatgccagcaaattaggtttatatttttcagtgccatcaagtcatcatttacatgctggtcactaatgttcctcatacaaacaaaagattataagcatgagatgtaccttaag

SEQ ID NO: 24781 - DNA, 1005 bp, Zea Mays
gtttttgttataaaagtcgccacagaagcgttgagatggcacattgcgcgcaatgaccacctaaacctaaccagaaatcgtaaggtaggtgggacggtggtgcttaggaactgtctaggtggctgaggtcatcaccttctaaagcagcacagtcaatcatttgaaataacccgctgaacccttataagccctacctgtgttctcgcatgtttacacatcctcgaactattctacttatatattataagtcatttattttaaataatatgtatctgattttatgtatattttcctgagtaatctcatcatgtgtataaactgtgtctatcatctctgcagactatatgccgctgcaacctcttgaagacgagaatgacactgttatcagtttcttatatcctctagaacccccgatagtagatgagtttgactgggaaatggacgattacgaggattttgctgatcagaaagttcaagaaggtggcctgccagaggatgagaaagaaaaattcaaggagttcctgaaggagaaggttagagaaaggaagagagagcttaaacaggctaaagaagccaggaggaaagctattgatgatatggatcctaaggtgaaagaggcattcgagaacatcaaattttacaaattttatcctgtgaaaaccccagacacgcctgatgtaaacaatgtaaaggcgaggtacatcaacagatactacaggaatgcccattatctgatgtgatggctttccttatcgcacgtgcttggcgagcttgtcacttgagaggagttgatatgaaaacagttcggtgttgtactagagttggccccagtttttcaccccccctgggcatcttttgctctccggtgtatacaatcctgaggatagattattgtgtagcactaagaggggcaaagtagtttgagactaaacaaatcattaaggaacaatttgttcccttttcatcatctattttgtggttgttttaacatctacaacgcgcaag

SEQ ID NO: 24782 - DNA, 1564 bp, Zea Mays
cctgactccctcgtggctcgtcccattcccgcaccatctcgacaaaccacaccaactgtcatcggacggcccaaaactgtgccgcgtgttccgttcaacggctatttcagcccgcagaacgcacatcagaagggtaaagccacgaaccccccggtccgcgcctgcgccgccttccctctcctgccttctccgcttcaaatttgcgtagcgttgatttcacgcccggatctcacaacgctcaatccaaacgctagccgcaaccctaaccctagcaaccggtgagtaatggcgcgccctaggggcaagaagcgcacggcgccccgggcggccgccactgattctgtccagccggaggcggcggcgacggagacagcggcggcggagccggcaaatcgggggcggtggaagcgcgtcaaggcgccgcccaagcccaagcccgagacggattacttcgccgagaaaagaaatctggaggatctatggttatctgcttttcctgtcggtactgagtgggaaaacattgataagataaaggagttcaactggagctttgaaaatttagagaaagccttagaagaagggggcgagcttcatgcccaactattggatgttaatggcgaatcaaagatagtgcttattccaatcgtagttgctgtagactgccctttccctccatcagacaaaattggcataaactctgtccaaagggaaaatgaggaaatagtgccaatgaaggcgatgaagatggcatgggtgccttatgttccccttgaggaccggcttagcaggattgacagtttgaaaacaaaaatattcactctcggatgcacgcagcggaggtctgcactgaagcatctcaaaattgagagagtcaagaagtttgactactgcatgccttactatatgccgctgcaacctcttgaagacgagaatgacactgttatcagtttcttatatcctctagaacccccgatagtagatgagtttgactgggaaatggacgattacgaggattttgctgatcagaaagttcaagaaggtggcctgccagaggatgagaaagaaaaattcaaggagttcctgaaggagaaggttagagaaaggaagagagagcttaaacaggctaaagaagccaggaggaaagctattgatgatatggatcctaaggtgaaagaggcattcgagaacatcaaattttacaaattttatcctgtgaaaaccccagacacgcctgatgtaaacaatgtaaaggcgaggtacatcaacagatactacaggaatgcccattatctgatgtgatggctttccttatcgcacgtgcttggcgagcttgtcacttgagaggagttgatatgaaaacagttcggtgttgtactagagttggccccagtttttcaccccccctgggcatcttttgctctccggtgtatacaatcctgaggatagattattgtgtagcactaagaggggcaaagtagtttgagactaaacaaatcattaaggaacaatttgttcccttttcatcatctattttgtggttgttttaacatctacaacgcgcaag

SEQ ID NO: 24783 - DNA, 1259 bp, Zea Mays
cctgactccctcgtggctcgtcccattcccgcaccatctcgacaaaccacaccaactgtcatcggacggcccaaaactgtgccgcgtgttccgttcaacggctatttcagcccgcagaacgcacatcagaagggaggatctatggttatctgcttttcctgtcggtactgagtgggaaaacattgataagataaaggagttcaactggagctttgaaaatttagagaaagccttagaagaagggggcgagcttcatggtaaaacagtttatctgtttggaagcactgagccccaactattggatgttaatggcgaatcaaagatagtgcttattccaatcgtagttgctgtagactgccctttccctccatcagacaaaattggcataaactctgtccaaagggaaaatgaggaaatagtgccaatgaaggcgatgaagatggcatgggtgccttatgttccccttgaggaccggcttagcaggattgacagtttgaaaacaaaaatattcactctcggatgcacgcagcggaggtctgcactgaagcatctcaaaattgagagagtcaagaagtttgactactgcatgccttactatatgccgctgcaacctcttgaagacgagaatgacactgttatcagtttcttatatcctctagaacccccgatagtagatgagtttgactgggaaatggacgattacgaggattttgctgatcagaaagttcaagaaggtggcctgccagaggatgagaaagaaaaattcaaggagttcctgaaggagaaggttagagaaaggaagagagagcttaaacaggctaaagaagccaggaggaaagctattgatgatatggatcctaaggtgaaagaggcattcgagaacatcaaattttacaaattttatcctgtgaaaaccccagacacgcctgatgtaaacaatgtaaaggcgaggtacatcaacagatactacaggaatgcccattatctgatgtgatggctttccttatcgcacgtgcttggcgagcttgtcacttgagaggagttgatatgaaaacagttcggtgttgtactagagttggccccagtttttcaccccccctgggcatcttttgctctccggtgtatacaatcctgaggatagattattgtgtagcactaagaggggcaaagtagtttgagactaaacaaatcattaaggaacaatttgttcccttttcatcatctattttgtggttgttttaacatctacaacgcgcaag

SEQ ID NO: 24784 - DNA, 1863 bp, Zea Mays
cctgactccctcgtggctcgtcccattcccgcaccatctcgacaaaccacaccaactgtcatcggacggcccaaaactgtgccgcgtgttccgttcaacggctatttcagcccgcagaacgcacatcagaagggtaaagccacgaaccccccggtccgcgcctgcgccgccttccctctcctgccttctccgcttcaaatttgcgtagcgttgatttcacgcccggatctcacaacgctcaatccaaacgctagccgcaaccctaaccctagcaaccggtgagtaatggcgcgccctaggggcaagaagcgcacggcgccccgggcggccgccactgattctgtccagccggaggcggcggcgacggagacagcggcggcggagccggcaaatcgggggcggtggaagcgcgtcaaggcgccgcccaagcccaagcccgagacggattacttcgccgagaaaagaaatctggaggatctatggttatctgcttttcctgtcggtactgagtgggaaaacattgataagataaaggagttcaactggagctttgaaaatttagagaaagccttagaagaagggggcgagcttcatggtaaaacagtttatctgtttggaagcactgagccccaactattggatgttaatggcgaatcaaagatagtgcttattccaatcgtagttgctgtagactgccctttccctccatcagacaaaattggcataaactctgtccaaagggaaaatgaggaaatagtgccaatgaaggcgatgaagatggcatgggtgccttatgttccccttgaggaccggcttagcaggattgacagtttgaaaacaaaaatattcactctcggatgcacgcagcggaggtctgcactgaagcatctcaaaattgagagagtcaagaagtttgactactgcatgccttactatatgccgctgcaacctcttgaagacgagaatgacactgttatcagtttcttatatcctctagaacccccggtaagattccttatttatttcagtgaggagtattacctaatcggtgcaaactgaaatgtaaggttggggctgtttgaagttttcctctattttgtgagattatctgctcactgcctcactgtagttttcacttcaaaatttttattagtttctccttccaacattattgtatttgatgcttcctaattgatgcatgcattttgatttcatataggtgtagattgttgtcatgcatcactgtgtttactttctactgcttgttgcagatagtagatgagtttgactgggaaatggacgattacgaggattttgctgatcagaaagttcaagaaggtggcctgccagaggatgagaaagaaaaattcaaggagttcctgaaggagaaggttagagaaaggaagagagagcttaaacaggctaaagaagccaggaggaaagctattgatgatatggatcctaaggtgaaagaggcattcgagaacatcaaattttacaaattttatcctgtgaaaaccccagacacgcctgatgtaaacaatgtaaaggcgaggtacatcaacagatactacaggaatgcccattatctgatgtgatggctttccttatcgcacgtgcttggcgagcttgtcacttgagaggagttgatatgaaaacagttcggtgttgtactagagttggccccagtttttcaccccccctgggcatcttttgctctccggtgtatacaatcctgaggatagattattgtgtagcactaagaggggcaaagtagtttgagactaaacaaatcattaaggaacaatttgttcccttttcatcatctattttgtggttgttttaacatctacaacgcgcaag

SEQ ID NO: 24785 - DNA, 1414 bp, Zea Mays
gcgtttctttaccctaagcttttagctggtccaacgaaaggcacacagcccgacagccgccgctgtttcttcatcttcctcgcagcgccggcgctccttcttccgctccctctccgattcgcgctcggcacgcaggcgacggcggcggcgctcgtgctcgggctctcagcgacggcgggcagtcccagactcggtgtcggcgtcagcggtcccccttccgcctgtcaccaatcgcctcgcgccctcgcctccggtcctccgcacaccgaccggcgccctgcgtgcacgcctcccgctcccctcctgcctccggtggaccgtcgacggcgctcggacccggaggctgcactgcgcgccgcgtgcgaccggcgggcagcgggagccagcagccgcgccgctttggctgtaacacattggtatttgaagaccattgcaggttgtaacacactgttatatttgaagaccagtggtgggttgacttaaaagcagggtttaaacatcacttttgtgatttgttctgcaatatctttgccatatcatggggtttcagaccataccagtcgtaccagaccttgtggtggataagagtgaggttgaaacctcacaagttgcgggctctgattcaatagtcatagaaagggtggaaacaaatctgagcaaggaaccctttctgctagttcccttggaaaataaggaagagaaagagtcccttggtataatttgttatcttgaaaataacaaggttgatgttcctgaggccttctctccaaggagagatatacttgaattgtcaatctctagcaagtctactgatgatagtctttcattgggttgtgagacaccacgtgaaagcatctttgatccatttgctccaggacctgaggaggcagcctgtgcaccaaagaagaaagtgactagaggtgctcaagttccacctcgcaggaagctaaattttgattcaggtgactacccagttaaaaggttaagtttcgattgcagtgattctgaagaggaggatcaatatatcgaagtgattcacaagatgatcctggatctattaattctagatgtccctcttggtggacaaaaagaaactggaaagaatgcgacagatttgggcctacatggaagctgcaagacacctgattcaaagcctctacttactggcattgcatccacatgcccagatgcacctttgaggccatctcttaaagcgttaaagctgagcccaggcatttgtcgaaagattgactttgacttcgatgcagtcagtggctcaggaagtctaagttcttccatggataaaactattatagttcttctagattattgtattgagtatgcactaaccaatttaacacaaaaaattaaactgactagttaaaagttaaaacgcatatgtggcacgctcgtg

SEQ ID NO: 24786 - DNA, 1076 bp, Zea Mays
atggtttcctaaaaatgatcgaacctgtgcgctcgtgagtccaacgctctcattcatctcttaggctgtaacacattggtatttgaagaccattgcaggttgtaacacactgttatatttgaagaccagtggtgggttgacttaaaagcagggtttaaacatcacttttgtgatttgttctgcaatatctttgccatatcatggggtttcagaccataccagtcgtaccagaccttgtggtggataagagtgaggttgaaacctcacaagttgcgggctctgattcaatagtcatagaaagggtggaaacaaatctgagcaaggaaccctttctgctagttcccttggaaaataaggaagagaaagagtcccttggtataatttgttatcttgaaaataacaaggttgatgttcctgaggccttctctccaaggagagatatacttgaattgtcaatctctagcaagtctactgatgatagtctttcattgggttgtgagacaccacgtgaaagcatctttgatccatttgctccaggacctgaggaggcagcctgtgcaccaaagaagaaagtgactagaggtgctcaagttccacctcgcaggaagctaaattttgattcaggtgactacccagttaaaaggttaagtttcgattgcagtgattctgaagaggaggatcaatatatcgaagtgattcacaagatgatcctggatctattaattctagatgtccctcttggtggacaaaaagaaactggaaagaatgcgacagatttgggcctacatggaagctgcaagacacctgattcaaagcctctacttactggcattgcatccacatgcccagatgcacctttgaggccatctcttaaagcgttaaagctgagcccaggcatttgtcgaaagattgactttgacttcgatgcagtcagtggctcaggaagtctaagttcttccatggataaaactattatagttcttctagattattgtattgagtatgcactaaccaatttaacacaaaaaattaaactgactagttaaaagttaaaacgcatatgtggcacgctcgtg

SEQ ID NO: 24787 - DNA, 4095 bp, Zea Mays
tagcaggtagcagcagtcgcttccgtcccccttcctcttgtattcgcttcgccgcccaacccagcctccaccgctgccttcccgaccgttctcgccgccgctgtctcctcgcccaccaccccgcacggccggcgaccagcgcccacgcggccgctcgatccaaggccagaacgagcccaccacgatccgcatcacgccgatatttttcaggttgttggtacggatctagggttttcctgctgcggattcgttcgattcgctcatggccgctgggcgccatgggggttacagggactacgaggagagggagcgggagctcgacgcggaggcctccaggaggagcaaggagcagcaccaccatctcggcggccgccaccgcgacgtggaccgccgccgcgatggcgggcgcagcaggggtggtagagactttgccaacggccacggtcgccgacgttcgcccccgcccaggagccgcctcgcgggaaggcttggtgaccgtgagcctggcgaggtgctgagcggtagcgcatctgatgactccggtgggaggtcggatagagggagggaaaatggcgtgcgcagttctagcagggagggcgacatggtggcaggcactgggatctcgtcaccgatcaagaagaggaaattctcaccgataatttgggacagggatagcccaaagccaccgcattctggtgcagccagggacaagaaatcggtagaatctgttccttctgagctccctccgccgccgccgctgccacaagaccacatcccactgagcttgtctgtggagaagtcacctatggatgtagaaactactgttggtacagagagtgctgagcagttgccggaacatgaggtcaataaggtgatagagcaggaagaggactatccaagtccaacaatgaggaacatatcgacttcaagatgggcgggtgcaaatgatgatgaggaaggtggggcagctccaatgaagaagagaagtgtttcacctgcagactcctctgtaccaggtcagtggaaacgagcaagcccagaacctggtgaagtctctggaggaagggcaatgtctaggtcatctgattcagggaaaataggtaatgatgagaaagaagattccgaggtcgataaagatgactatatggatgttgacagggagcatgctagtgacagtggtacagaaaactgtatgtcggatactgactcagacaatgaaatgtgcaggcctgaaacccctgaaccagagaggccaccacacaggtgtatcaatatgcttcaaggttgcagaagtgttgatgagtttgagaggctcaacaaaattaatgagggaacatatggtgttgtatacagagcaagggataagaagacaagtgagattgttgcattgaagaaggtaaagatggagagggagcgagaaggtttcccattaacctctcttagggaaataaatatcctcttgtctttccaccatccttcaatcgtggatgttaaggaagtagtagttggaagtagtttagatagcatttttatggttatggagtacatggaacatgatcttaaaggtgtcatggagaccatgaaacaaccatatacacaaagcgaggtcaaatgtttgatgcttcagctgctagagggtgtaaaatatctacatgacaattgggtactccatagggatctgaagacctcaaatcttttgctgaataaccgtggtgagttaaaaatatgtgattttggactgtctcgtcaatatgggagcccattaaaaccttatactcaactggttgtgactttgtggtacagggccccagaactgttgttaggaacaaaggagtattctactgctattgatatgtggtccgtgggctgtataatggctgagctccttgccaaagaaccattatttaatggaaaaacagagtttgaacagctagataagatttttagaacacttggcacacctagcgagaagatttggcctggctatgctaaattaccaggcgtgaaagtaaattttgtcaaacaaccgtataataggctaagggataagttcccagctgcatctttttctgggcgaccaatcctgtctgaagctggttttgatctattgaatagactgctaacttatgatcctgataagcgcatatcagcagacgatgctctgaaacacaaatggttctctgaagttcctctgcctaaatcaaaagacttcatgccaacatttcctgctcttaatgaacttgacaggcgtaccaaacgttatctgaagagtcctgatcctctggaagagcaacgtctgaaagaactgcaagggaacataggcaaccgtgggctttttggctgaactaagagtacttgattggattcctgtccgtactaactgttatgcttcaccctgaatccacgaggtcagatgtcttctgaggcttggtgccggtttgagtggataaggtttctccttgtggcccatcatagaaattttgttgcaggattaacactccatccagattgatcataaaagcaaatataaaccgtcttcatcgtaaggtgtgacatgttggctttgaatgggtacaccagtttcacctttggaacttctgtatgtaaaatattccagattgagacgaaagaagcgcaggggaaggaagccttttgcttttatcaggaaatcaatgacattaatacaacttagaagctaagctgtggctgcttcaagataggaaagtgacaatttgtggagggccttcaaaagtgttttactagtgaaccatggtggctgtaacacattggtatttgaagaccattgcaggttgtaacacactgttatatttgaagaccagtggtgggttgacttaaaagcagggtttaaacatcacttttgtgatttgttctgcaatatctttgccatatcatggggtttcagaccataccagtcgtaccagaccttgtggtggataagagtgaggttgaaacctcacaagttgcgggctctgattcaatagtcatagaaagggtggaaacaaatctgagcaaggaaccctttctgctagttcccttggaaaataaggaagagaaagagtcccttggtataatttgttatcttgaaaataacaaggttgatgttcctgaggccttctctccaaggagagatatacttgaattgtcaatctctagcaagtctactgatgatagtctttcattgggttgtgagacaccacgtgaaagcatctttgatccatttgctccaggacctgaggaggcagcctgtgcaccaaagaagaaagtgactagaggtgctcaagttccacctcgcaggaagctaaattttgattcaggtgactacccagttaaaaggttaagtttcgattgcagtgattctgaagaggaggatcaatatatcgaagtgattcacaagatgatcctggatctattaattctagatgtccctcttggtggacaaaaagaaactggaaagaatgcgacagatttgggcctacatggaagctgcaagacacctgattcaaagcctctacttactggcattgcatccacatgcccagatgcacctttgaggccatctcttaaagcgttaaagctgagcccaggcatttgtcgaaagattgactttgacttcgatgcagtcagtggctcaggaagtctaagttcttccatggataaagaaagtaattgatcgttctgcccttcttgattgacaatgacaagtaatgaactgtgcattttgggactgaatgaagcatcgtgatgatcttccccaggaacagctttaatctgcatatttgcatctcatgtatcagtatcctatgccgttgtggcaccttagctaaccctgatgctttggggattattgctgatggtagacaagtacttaagtagcaagcagtttatgttatacatgtaatctatctctggttttcttttgtaactggccttgtgctaattacctcctagatttatatcagttgattcgagctctgaccatattattttgtaaatcttaagacgagacttattccatctgattaaagtaatgcacccgatgcagtttcttggtagctgttaaatcagctctgacca

SEQ ID NO: 24788 - DNA, 3944 bp, Zea Mays
gctctagcaggtagcagcagtcgcttccgtcccccttcctcttgtattcgcttcgccgcccaacccagcctccaccgctgccttcccgaccgttctcgccgccgctgtctcctcgcccaccaccccgcacggccggcgaccagcgcccacgcggccgctcgatccaaggccagaacgagcccaccacgatccgcatcacgccgatatttttcaggttgttggtacggatctagggttttcctgctgcggattcgttcgattcgctcatggccgctgggcgccatgggggttacagggactacgaggagagggagcgggagctcgacgcggaggcctccaggaggagcaaggagcagcaccaccatctcggcggccgccaccgcgacgtggaccgccgccgcgatggcgggcgcagcaggggtggtagagactttgccaacggccacggtcgccgacgttcgcccccgcccaggagccgcctcgcgggaaggcttggtgaccgtgagcctggcgaggtgctgagcggtagcgcatctgatgactccggtgggaggtcggatagagggagggaaaatggcgtgcgcagttctagcagggagggcgacatggtggcaggcactgggatctcgtcaccgatcaagaagaggaaattctcaccgataatttgggacagggatagcccaaagccaccgcattctggtgcagccagggacaagaaatcggtagaatctgttccttctgagctccctccgccgccgccgctgccacaagaccacatcccactgagcttgtctgtggagaagtcacctatggatgtagaaactactgttggtacagagagtgctgagcagttgccggaacatgaggtcaataaggtgatagagcaggaagaggactatccaagtccaacaatgaggaacatatcgacttcaagatgggcgggtgcaaatgatgatgaggaaggtggggcagctccaatgaagaagagaagtgtttcacctgcagactcctctgtaccaggtcagtggaaacgagcaagcccagaacctggtgaagtctctggaggaagggcaatgtctaggtcatctgattcagggaaaataggtaatgatgagaaagaagattccgaggtcgataaagatgactatatggatgttgacagggagcatgctagtgacagtggtacagaaaactgtatgtcggatactgactcagacaatgaaatgtgcaggcctgaaacccctgaaccagagaggccaccacacaggtgtatcaatatgcttcaaggttgcagaagtgttgatgagtttgagaggctcaacaaaattaatgagggaacatatggtgttgtatacagagcaagggataagaagacaagtgagattgttgcattgaagaaggtaaagatggagagggagcgagaaggtttcccattaacctctcttagggaaataaatatcctcttgtctttccaccatccttcaatcgtggatgttaaggaagtagtagttggaagtagtttagatagcatttttatggttatggagtacatggaacatgatcttaaaggtgtcatggagaccatgaaacaaccatatacacaaagcgaggtcaaatgtttgatgcttcagctgctagagggtgtaaaatatctacatgacaattgggtactccatagggatctgaagacctcaaatcttttgctgaataaccgtgggccccagaactgttgttaggaacaaaggagtattctactgctattgatatgtggtccgtgggctgtataatggctgagctccttgccaaagaaccattatttaatggaaaaacagagtttgaacagctagataagatttttagaacacttggcacacctagcgagaagatttggcctggctatgctaaattaccaggcgtgaaagtaaattttgtcaaacaaccgtataataggctaagggataagttcccagctgcatctttttctgggcgaccaatcctgtctgaagctggttttgatctattgaatagactgctaacttatgatcctgataagcgcatatcagcagacgatgctctgaaacacaaatggttctctgaagttcctctgcctaaatcaaaagacttcatgccaacatttcctgctcttaatgaacttgacaggcgtaccaaacgttatctgaagagtcctgatcctctggaagagcaacgtctgaaagaactgcaagggaacataggcaaccgtgggctttttggctgaactaagagtacttgattggattcctgtccgtactaactgttatgcttcaccctgaatccacgaggtcagatgtcttctgaggattaacactccatccagattgatcataaaagcaaatataaaccgtcttcatcgtaaggtgtgacatgttggctttgaatgggtacaccagtttcacctttggaacttctgtatgtaaaatattccagattgagacgaaagaagcgcaggggaaggaagccttttgcttttatcaggaaatcaatgacattaatacaacttagaagctaagctgtggctgcttcaagataggaaagtgacaatttgtggagggccttcaaaagtgttttactagtgaaccatggtggctgtaacacattggtatttgaagaccattgcaggttgtaacacactgttatatttgaagaccagtggtgggttgacttaaaagcagggtttaaacatcacttttgtgatttgttctgcaatatctttgccatatcatggggtttcagaccataccagtcgtaccagaccttgtggtggataagagtgaggttgaaacctcacaagttgcgggctctgattcaatagtcatagaaagggtggaaacaaatctgagcaaggaaccctttctgctagttcccttggaaaataaggaagagaaagagtcccttggtataatttgttatcttgaaaataacaaggttgatgttcctgaggccttctctccaaggagagatatacttgaattgtcaatctctagcaagtctactgatgatagtctttcattgggttgtgagacaccacgtgaaagcatctttgatccatttgctccaggacctgaggaggcagcctgtgcaccaaagaagaaagtgactagaggtgctcaagttccacctcgcaggaagctaaattttgattcaggtgactacccagttaaaaggttaagtttcgattgcagtgattctgaagaggaggatcaatatatcgaagtgattcacaagatgatcctggatctattaattctagatgtccctcttggtggacaaaaagaaactggaaagaatgcgacagatttgggcctacatggaagctgcaagacacctgattcaaagcctctacttactggcattgcatccacatgcccagatgcacctttgaggccatctcttaaagcgttaaagctgagcccaggcatttgtcgaaagattgactttgacttcgatgcagtcagtggctcaggaagtctaagttcttccatggataaagaaagtaattgatcgttctgcccttcttgattgacaatgacaagtaatgaactgtgcattttgggactgaatgaagcatcgtgatgatcttccccaggaacagctttaatctgcatatttgcatctcatgtatcagtatcctatgccgttgtggcaccttagctaaccctgatgctttggggattattgctgatggtagacaagtacttaagtagcaagcagtttatgttatacatgtaatctatctctggttttcttttgtaactggccttgtgctaattacctcctagatttatatcagttgattcgagctctgaccatattattttgtaaatcttaagacgagacttattccatctgattaaagtaatgcacccgatgcagtttcttggtagctgttaaatcagctctgacca

SEQ ID NO: 24789 - DNA, 3052 bp, Zea Mays
gccgctctagcaggtagcagcagtcgcttccgtcccccttcctcttgtattcgcttcgccgcccaacccagcctccaccgctgccttcccgaccgttctcgccgccgctgtctcctcgcccaccaccccgcacggccggcgaccagcgcccacgcggccgctcgatccaaggccagaacgagcccaccacgatccgcatcacgccgatatttttcaggttgttggtacggatctagggttttcctgctgcggattcgttcgattcgctcatggccgctgggcgccatgggggttacagggactacgaggagagggagcgggagctcgacgcggaggcctccaggaggagcaaggagcagcaccaccatctcggcggccgccaccgcgacgtggaccgccgccgcgatggcgggcgcagcaggggtggtagagactttgccaacggccacggtcgccgacgttcgcccccgcccaggagccgcctcgcgggaaggcttggtgaccgtgagcctggcgaggtgctgagcggtagcgcatctgatgactccggtgggaggtcggatagagggagggaaaatggcgtgcgcagttctagcagggagggcgacatggtggcaggcactgggatctcgtcaccgatcaagaagaggaaattctcaccgataatttgggacagggatagcccaaagccaccgcattctggtgcagccagggacaagaaatcggtagaatctgttccttctgagctccctccgccgccgccgctgccacaagaccacatcccactgagcttgtctgtggagaagtcacctatggatgtagaaactactgttggtacagagagtgctgagcagttgccggaacatgaggtcaataaggtgatagagcaggaagaggactatccaagtccaacaatgaggaacatatcgacttcaagatgggcgggtgcaaatgatgatgaggaaggtggggcagctccaatgaagaagagaagtgtttcacctgcagactcctctgtaccaggtcagtggaaacgagcaagcccagaacctggtgaagtctctggaggaagggcaatgtctaggtcatctgattcagggaaaataggtaatgatgagaaagaagattccgaggtcgataaagatgactatatggatgttgacagggagcatgctagtgacagtggtacagaaaactgtatgtcggatactgactcagacaatgaaatgtgcaggcctgaaacccctgaaccagagaggccaccacacaggtgtatcaatatgcttcaaggttgcagaagtgttgatgagtttgagaggctcaacaaaattaatgagggaacatatggtgttgtatacagagcaagggataagaagacaagtgagattgttgcattgaagaaggtaaagatggagagggagcgagaaggtttcccattaacctctcttagggaaataaatatcctcttgtctttccaccatccttcaatcgtggatgttaaggaagtagtagttggaagtagtttagatagcatttttatggttatggagtacatggaacatgatcttaaaggtgtcatggagaccatgaaacaaccatatacacaaagcgaggtcaaatgtttgatgcttcagctgctagagggtgtaaaatatctacatgacaattgggtactccatagggatctgaagacctcaaatcttttgctgaataaccgtggtgagttaaaaatatgtgattttggactgtctcgtcaatatgggagcccattaaaaccttatactcaactggttgtgactttgtggtacagggccccagaactgttgttaggaacaaaggagtattctactgctattgatatgtggtccgtgggctgtataatggctgagctccttgccaaagaaccattatttaatggaaaaacagagtttgaacagctagataagatttttagaacacttggcacacctagcgagaagatttggcctggctatgctaaattaccaggcgtgaaagtaaattttgtcaaacaaccgtataataggctaagggataagttcccagctgcatctttttctgggcgaccaatcctgtctgaagctggttttgatctattgaatagactgctaacttatgatcctgataagcgcatatcagcagacgatgctctgaaacacaaatggttctctgaagttcctctgcctaaatcaaaagacttcatgccaacatttcctgctcttaatgaacttgacaggcgtaccaaacgttatctgaagagtcctgatcctctggaagagcaacgtctgaaagaactgcaagggaacataggcaaccgtgggctttttggctgaactaagagtacttgattggattcctgtccgtactaactgttatgcttcaccctgaatccacgaggtcagatgtcttctgaggtgaggtgccatggacatgaagtatcacatcttctcggtgtctagcagcgactgatagtgttctttagcaggcttggtgccggtttgagtggataaggtttctccttgtggcccatcatagaaattttgttgcaggattaacactccatccagattgatcataaaagcaaatataaaccgtcttcatcgtaaggtgtgacatgttggctttgaatgggtacaccagtttcacctttggaacttctgtatgtaaaatattccagattggtacgttgtaaacaatccccagtgtgtcggatttaaatttaaataaaacatcatcattattagttttcttcatgctccttgtgccttttcttttgatctttgcattttgtttgcaagagacgaaagaagcgcaggggaaggaagccttttgcttttatcaggaaatcaatgacattaatacaacttagaagctaagctgtggctgcttcaagataggaaagtgacaatttgtggagggccttcaaaagtgttttactagtgaaccatggtgatgtgctctggagtcgccaacgccatctcgctcttgagtctggacaccaggagggcttgcccccgccgctcgctcggagttc

SEQ ID NO: 24790 - DNA, 2843 bp, Zea Mays
tagcaggtagcagcagtcgcttccgtcccccttcctcttgtattcgcttcgccgcccaacccagcctccaccgctgccttcccgaccgttctcgccgccgctgtctcctcgcccaccaccccgcacggccggcgaccagcgcccacgcggccgctcgatccaaggccagaacgagcccaccacgatccgcatcacgccgatatttttcaggttgttggtacggatctagggttttcctgctgcggattcgttcgattcgctcatggccgctgggcgccatgggggttacagggactacgaggagagggagcgggagctcgacgcggaggcctccaggaggagcaaggagcagcaccaccatctcggcggccgccaccgcgacgtggaccgccgccgcgatggcgggcgcagcaggggtggtagagactttgccaacggccacggtcgccgacgttcgcccccgcccaggagccgcctcgcgggaaggcttggtgaccgtgagcctggcgaggtgctgagcggtagcgcatctgatgactccggtgggaggtcggatagagggagggaaaatggcgtgcgcagttctagcagggagggcgacatggtggcaggcactgggatctcgtcaccgatcaagaagaggaaattctcaccgataatttgggacagggatagcccaaagccaccgcattctggtgcagccagggacaagaaatcggtagaatctgttccttctgagctccctccgccgccgccgctgccacaagaccacatcccactgagcttgtctgtggagaagtcacctatggatgtagaaactactgttggtacagagagtgctgagcagttgccggaacatgaggtcaataaggtgatagagcaggaagaggactatccaagtccaacaatgaggaacatatcgacttcaagatgggcgggtgcaaatgatgatgaggaaggtggggcagctccaatgaagaagagaagtgtttcacctgcagactcctctgtaccaggtcagtggaaacgagcaagcccagaacctggtgaagtctctggaggaagggcaatgtctaggtcatctgattcagggaaaataggtaatgatgagaaagaagattccgaggtcgataaagatgactatatggatgttgacagggagcatgctagtgacagtggtacagaaaactgtatgtcggatactgactcagacaatgaaatgtgcaggcctgaaacccctgaaccagagaggccaccacacaggtgtatcaatatgcttcaaggttgcagaagtgttgatgagtttgagaggctcaacaaaattaatgagggaacatatggtgttgtatacagagcaagggataagaagacaagtgagattgttgcattgaagaaggtaaagatggagagggagcgagaaggtttcccattaacctctcttagggaaataaatatcctcttgtctttccaccatccttcaatcgtggatgttaaggaagtagtagttggaagtagtttagatagcatttttatggttatggagtacatggaacatgatcttaaaggtgtcatggagaccatgaaacaaccatatacacaaagcgaggtcaaatgtttgatgcttcagctgctagagggtgtaaaatatctacatgacaattgggtactccatagggatctgaagacctcaaatcttttgctgaataaccgtggtgagttaaaaatatgtgattttggactgtctcgtcaatatgggagcccattaaaaccttatactcaactggttgtgactttgtggtacagggccccagaactgttgttaggaacaaaggagtattctactgctattgatatgtggtccgtgggctgtataatggctgagctccttgccaaagaaccattatttaatggaaaaacagagtttgaacagctagataagatttttagaacacttggcacacctagcgagaagatttggcctggctatgctaaattaccaggcgtgaaagtaaattttgtcaaacaaccgtataataggctaagggataagttcccagctgcatctttttctgggcgaccaatcctgtctgaagctggttttgatctattgaatagactgctaacttatgatcctgataagcgcatatcagcagacgatgctctgaaacacaaatggttctctgaagttcctctgcctaaatcaaaagacttcatgccaacatttcctgctcttaatgaacttgacaggcgtaccaaacgttatctgaagagtcctgatcctctggaagagcaacgtctgaaagaactgcaagggaacataggcaaccgtgggctttttggctgaactaagagtacttgattggattcctgtccgtactaactgttatgcttcaccctgaatccacgaggtcagatgtcttctgaggattaacactccatccagattgatcataaaagcaaatataaaccgtcttcatcgtaaggtgtgacatgttggctttgaatgggtacaccagtttcacctttggaacttctgtatgtaaaatattccagattgacgaaagaagcgcaggggaaggaagccttttgcttttatcaggaaatcaatgacattaatacaacttagaagctaagctgtggctgcttcaagataggaaagtgacaatttgtggagggccttcaaaagtgttttactagtgaaccatggtgaaaaacatgaagcgattggtttccgcaataaacaaagtgaaagttagcatgtagagtattgcaatacgtgcggtgccatttgaagttctggtgaggtttgcttgcgatagagctctttgggggcacttagaagt

SEQ ID NO: 24791 - DNA, 2888 bp, Zea Mays
tagcaggtagcagcagtcgcttccgtcccccttcctcttgtattcgcttcgccgcccaacccagcctccaccgctgccttcccgaccgttctcgccgccgctgtctcctcgcccaccaccccgcacggccggcgaccagcgcccacgcggccgctcgatccaaggccagaacgagcccaccacgatccgcatcacgccgatatttttcaggttgttggtacggatctagggttttcctgctgcggattcgttcgattcgctcatggccgctgggcgccatgggggttacagggactacgaggagagggagcgggagctcgacgcggaggcctccaggaggagcaaggagcagcaccaccatctcggcggccgccaccgcgacgtggaccgccgccgcgatggcgggcgcagcaggggtggtagagactttgccaacggccacggtcgccgacgttcgcccccgcccaggagccgcctcgcgggaaggcttggtgaccgtgagcctggcgaggtgctgagcggtagcgcatctgatgactccggtgggaggtcggatagagggagggaaaatggcgtgcgcagttctagcagggagggcgacatggtggcaggcactgggatctcgtcaccgatcaagaagaggaaattctcaccgataatttgggacagggatagcccaaagccaccgcattctggtgcagccagggacaagaaatcggtagaatctgttccttctgagctccctccgccgccgccgctgccacaagaccacatcccactgagcttgtctgtggagaagtcacctatggatgtagaaactactgttggtacagagagtgctgagcagttgccggaacatgaggtcaataaggtgatagagcaggaagaggactatccaagtccaacaatgaggaacatatcgacttcaagatgggcgggtgcaaatgatgatgaggaaggtggggcagctccaatgaagaagagaagtgtttcacctgcagactcctctgtaccaggtcagtggaaacgagcaagcccagaacctggtgaagtctctggaggaagggcaatgtctaggtcatctgattcagggaaaataggtaatgatgagaaagaagattccgaggtcgataaagatgactatatggatgttgacagggagcatgctagtgacagtggtacagaaaactgtatgtcggatactgactcagacaatgaaatgtgcaggcctgaaacccctgaaccagagaggccaccacacaggtgtatcaatatgcttcaaggttgcagaagtgttgatgagtttgagaggctcaacaaaattaatgagggaacatatggtgttgtatacagagcaagggataagaagacaagtgagattgttgcattgaagaaggtaaagatggagagggagcgagaaggtttcccattaacctctcttagggaaataaatatcctcttgtctttccaccatccttcaatcgtggatgttaaggaagtagtagttggaagtagtttagatagcatttttatggttatggagtacatggaacatgatcttaaaggtgtcatggagaccatgaaacaaccatatacacaaagcgaggtcaaatgtttgatgcttcagctgctagagggtgtaaaatatctacatgacaattgggtactccatagggatctgaagacctcaaatcttttgctgaataaccgtggtgagttaaaaatatgtgattttggactgtctcgtcaatatgggagcccattaaaaccttatactcaactggttgtgactttgtggtacagggccccagaactgttgttaggaacaaaggagtattctactgctattgatatgtggtccgtgggctgtataatggctgagctccttgccaaagaaccattatttaatggaaaaacagagtttgaacagctagataagatttttagaacacttggcacacctagcgagaagatttggcctggctatgctaaattaccaggcgtgaaagtaaattttgtcaaacaaccgtataataggctaagggataagttcccagctgcatctttttctgggcgaccaatcctgtctgaagctggttttgatctattgaatagactgctaacttatgatcctgataagcgcatatcagcagacgatgctctgaaacacaaatggttctctgaagttcctctgcctaaatcaaaagacttcatgccaacatttcctgctcttaatgaacttgacaggcgtaccaaacgttatctgaagagtcctgatcctctggaagagcaacgtctgaaagaactgcaagggaacataggcaaccgtgggctttttggctgaactaagagtacttgattggattcctgtccgtactaactgttatgcttcaccctgaatccacgaggtcagatgtcttctgaggattaacactccatccagattgatcataaaagcaaatataaaccgtcttcatcgtaaggtgtgacatgttggctttgaatgggtacaccagtttcacctttggaacttctgtatgtaaaatattccagattgagacgaaagaagcgcaggggaaggaagccttttgcttttatcaggaaatcaatgacattaatacaacttagaagctaagctgtggctgcttcaagataggaaagtgacaatttgtggagggccttcaaaagtgttttactagtgaaccatggtggttgttgcttatcttcagctgacagttataacattgctcacagaaaaacatgaagcgattggtttccgcaataaacaaagtgaaagttagcatgtagagtattgcaatacgtgcggtgccatttgaagttctggtgaggtttgcttgcgatagagctctttgggggcacttagaagt

SEQ ID NO: 24792 - DNA, 2845 bp, Zea Mays
tagcaggtagcagcagtcgcttccgtcccccttcctcttgtattcgcttcgccgcccaacccagcctccaccgctgccttcccgaccgttctcgccgccgctgtctcctcgcccaccaccccgcacggccggcgaccagcgcccacgcggccgctcgatccaaggccagaacgagcccaccacgatccgcatcacgccgatatttttcaggttgttggtacggatctagggttttcctgctgcggattcgttcgattcgctcatggccgctgggcgccatgggggttacagggactacgaggagagggagcgggagctcgacgcggaggcctccaggaggagcaaggagcagcaccaccatctcggcggccgccaccgcgacgtggaccgccgccgcgatggcgggcgcagcaggggtggtagagactttgccaacggccacggtcgccgacgttcgcccccgcccaggagccgcctcgcgggaaggcttggtgaccgtgagcctggcgaggtgctgagcggtagcgcatctgatgactccggtgggaggtcggatagagggagggaaaatggcgtgcgcagttctagcagggagggcgacatggtggcaggcactgggatctcgtcaccgatcaagaagaggaaattctcaccgataatttgggacagggatagcccaaagccaccgcattctggtgcagccagggacaagaaatcggtagaatctgttccttctgagctccctccgccgccgccgctgccacaagaccacatcccactgagcttgtctgtggagaagtcacctatggatgtagaaactactgttggtacagagagtgctgagcagttgccggaacatgaggtcaataaggtgatagagcaggaagaggactatccaagtccaacaatgaggaacatatcgacttcaagatgggcgggtgcaaatgatgatgaggaaggtggggcagctccaatgaagaagagaagtgtttcacctgcagactcctctgtaccaggtcagtggaaacgagcaagcccagaacctggtgaagtctctggaggaagggcaatgtctaggtcatctgattcagggaaaataggtaatgatgagaaagaagattccgaggtcgataaagatgactatatggatgttgacagggagcatgctagtgacagtggtacagaaaactgtatgtcggatactgactcagacaatgaaatgtgcaggcctgaaacccctgaaccagagaggccaccacacaggtgtatcaatatgcttcaaggttgcagaagtgttgatgagtttgagaggctcaacaaaattaatgagggaacatatggtgttgtatacagagcaagggataagaagacaagtgagattgttgcattgaagaaggtaaagatggagagggagcgagaaggtttcccattaacctctcttagggaaataaatatcctcttgtctttccaccatccttcaatcgtggatgttaaggaagtagtagttggaagtagtttagatagcatttttatggttatggagtacatggaacatgatcttaaaggtgtcatggagaccatgaaacaaccatatacacaaagcgaggtcaaatgtttgatgcttcagctgctagagggtgtaaaatatctacatgacaattgggtactccatagggatctgaagacctcaaatcttttgctgaataaccgtggtgagttaaaaatatgtgattttggactgtctcgtcaatatgggagcccattaaaaccttatactcaactggttgtgactttgtggtacagggccccagaactgttgttaggaacaaaggagtattctactgctattgatatgtggtccgtgggctgtataatggctgagctccttgccaaagaaccattatttaatggaaaaacagagtttgaacagctagataagatttttagaacacttggcacacctagcgagaagatttggcctggctatgctaaattaccaggcgtgaaagtaaattttgtcaaacaaccgtataataggctaagggataagttcccagctgcatctttttctgggcgaccaatcctgtctgaagctggttttgatctattgaatagactgctaacttatgatcctgataagcgcatatcagcagacgatgctctgaaacacaaatggttctctgaagttcctctgcctaaatcaaaagacttcatgccaacatttcctgctcttaatgaacttgacaggcgtaccaaacgttatctgaagagtcctgatcctctggaagagcaacgtctgaaagaactgcaagggaacataggcaaccgtgggctttttggctgaactaagagtacttgattggattcctgtccgtactaactgttatgcttcaccctgaatccacgaggtcagatgtcttctgaggattaacactccatccagattgatcataaaagcaaatataaaccgtcttcatcgtaaggtgtgacatgttggctttgaatgggtacaccagtttcacctttggaacttctgtatgtaaaatattccagattgagacgaaagaagcgcaggggaaggaagccttttgcttttatcaggaaatcaatgacattaatacaacttagaagctaagctgtggctgcttcaagataggaaagtgacaatttgtggagggccttcaaaagtgttttactagtgaaccatggtgaaaaacatgaagcgattggtttccgcaataaacaaagtgaaagttagcatgtagagtattgcaatacgtgcggtgccatttgaagttctggtgaggtttgcttgcgatagagctctttgggggcacttagaagt

SEQ ID NO: 24793 - DNA, 2900 bp, Zea Mays
tagcaggtagcagcagtcgcttccgtcccccttcctcttgtattcgcttcgccgcccaacccagcctccaccgctgccttcccgaccgttctcgccgccgctgtctcctcgcccaccaccccgcacggccggcgaccagcgcccacgcggccgctcgatccaaggccagaacgagcccaccacgatccgcatcacgccgatatttttcaggttgttggtacggatctagggttttcctgctgcggattcgttcgattcgctcatggccgctgggcgccatgggggttacagggactacgaggagagggagcgggagctcgacgcggaggcctccaggaggagcaaggagcagcaccaccatctcggcggccgccaccgcgacgtggaccgccgccgcgatggcgggcgcagcaggggtggtagagactttgccaacggccacggtcgccgacgttcgcccccgcccaggagccgcctcgcgggaaggcttggtgaccgtgagcctggcgaggtgctgagcggtagcgcatctgatgactccggtgggaggtcggatagagggagggaaaatggcgtgcgcagttctagcagggagggcgacatggtggcaggcactgggatctcgtcaccgatcaagaagaggaaattctcaccgataatttgggacagggatagcccaaagccaccgcattctggtgcagccagggacaagaaatcggtagaatctgttccttctgagctccctccgccgccgccgctgccacaagaccacatcccactgagcttgtctgtggagaagtcacctatggatgtagaaactactgttggtacagagagtgctgagcagttgccggaacatgaggtcaataaggtgatagagcaggaagaggactatccaagtccaacaatgaggaacatatcgacttcaagatgggcgggtgcaaatgatgatgaggaaggtggggcagctccaatgaagaagagaagtgtttcacctgcagactcctctgtaccaggtcagtggaaacgagcaagcccagaacctggtgaagtctctggaggaagggcaatgtctaggtcatctgattcagggaaaataggtaatgatgagaaagaagattccgaggtcgataaagatgactatatggatgttgacagggagcatgctagtgacagtggtacagaaaactgtatgtcggatactgactcagacaatgaaatgtgcaggcctgaaacccctgaaccagagaggccaccacacaggtgtatcaatatgcttcaaggttgcagaagtgttgatgagtttgagaggctcaacaaaattaatgagggaacatatggtgttgtatacagagcaagggataagaagacaagtgagattgttgcattgaagaaggtaaagatggagagggagcgagaaggtttcccattaacctctcttagggaaataaatatcctcttgtctttccaccatccttcaatcgtggatgttaaggaagtagtagttggaagtagtttagatagcatttttatggttatggagtacatggaacatgatcttaaaggtgtcatggagaccatgaaacaaccatatacacaaagcgaggtcaaatgtttgatgcttcagctgctagagggtgtaaaatatctacatgacaattgggtactccatagggatctgaagacctcaaatcttttgctgaataaccgtggtgagttaaaaatatgtgattttggactgtctcgtcaatatgggagcccattaaaaccttatactcaactggttgtgactttgtggtacagggccccagaactgttgttaggaacaaaggagtattctactgctattgatatgtggtccgtgggctgtataatggctgagctccttgccaaagaaccattatttaatggaaaaacagagtttgaacagctagataagatttttagaacacttggcacacctagcgagaagatttggcctggctatgctaaattaccaggcgtgaaagtaaattttgtcaaacaaccgtataataggctaagggataagttcccagctgcatctttttctgggcgaccaatcctgtctgaagctggttttgatctattgaatagactgctaacttatgatcctgataagcgcatatcagcagacgatgctctgaaacacaaatggttctctgaagttcctctgcctaaatcaaaagacttcatgccaacatttcctgctcttaatgaacttgacaggcgtaccaaacgttatctgaagagtcctgatcctctggaagagcaacgtctgaaagaactgcaagggaacataggcaaccgtgggctttttggctgaactaagagtacttgattggattcctgtccgtactaactgttatgcttcaccctgaatccacgaggtcagatgtcttctgaggcttggtgccggtttgagtggataaggtttctccttgtggcccatcatagaaattttgttgcaggattaacactccatccagattgatcataaaagcaaatataaaccgtcttcatcgtaaggtgtgacatgttggctttgaatgggtacaccagtttcacctttggaacttctgtatgtaaaatattccagattgaagcgcaggggaaggaagccttttgcttttatcaggaaatcaatgacattaatacaacttagaagctaagctgtggctgcttcaagataggaaagtgacaatttgtggagggccttcaaaagtgttttactagtgaaccatggtgaaaaacatgaagcgattggtttccgcaataaacaaagtgaaagttagcatgtagagtattgcaatacgtgcggtgccatttgaagttctggtgaggtttgcttgcgatagagctctttgggggcacttagaagt

SEQ ID NO: 24794 - DNA, 2822 bp, Zea Mays
gctctagcaggtagcagcagtcgcttccgtcccccttcctcttgtattcgcttcgccgcccaacccagcctccaccgctgccttcccgaccgttctcgccgccgctgtctcctcgcccaccaccccgcacggccggcgaccagcgcccacgcggccgctcgatccaaggccagaacgagcccaccacgatccgcatcacgccgatatttttcaggttgttggtacggatctagggttttcctgctgcggattcgttcgattcgctcatggccgctgggcgccatgggggttacagggactacgaggagagggagcgggagctcgacgcggaggcctccaggaggagcaaggagcagcaccaccatctcggcggccgccaccgcgacgtggaccgccgccgcgatggcgggcgcagcaggggtggtagagactttgccaacggccacggtcgccgacgttcgcccccgcccaggagccgcctcgcgggaaggcttggtgaccgtgagcctggcgaggtgctgagcggtagcgcatctgatgactccggtgggaggtcggatagagggagggaaaatggcgtgcgcagttctagcagggagggcgacatggtggcaggcactgggatctcgtcaccgatcaagaagaggaaattctcaccgataatttgggacagggatagcccaaagccaccgcattctggtgcagccagggacaagaaatcggtagaatctgttccttctgagctccctccgccgccgccgctgccacaagaccacatcccactgagcttgtctgtggagaagtcacctatggatgtagaaactactgttggtacagagagtgctgagcagttgccggaacatgaggtcaataaggtgatagagcaggaagaggactatccaagtccaacaatgaggaacatatcgacttcaagatgggcgggtgcaaatgatgatgaggaaggtggggcagctccaatgaagaagagaagtgtttcacctgcagactcctctgtaccaggtcagtggaaacgagcaagcccagaacctggtgaagtctctggaggaagggcaatgtctaggtcatctgattcagggaaaataggtaatgatgagaaagaagattccgaggtcgataaagatgactatatggatgttgacagggagcatgctagtgacagtggtacagaaaactgtatgtcggatactgactcagacaatgaaatgtgcaggcctgaaacccctgaaccagagaggccaccacacaggtgtatcaatatgcttcaaggttgcagaagtgttgatgagtttgagaggctcaacaaaattaatgagggaacatatggtgttgtatacagagcaagggataagaagacaagtgagattgttgcattgaagaaggtaaagatggagagggagcgagaaggtttcccattaacctctcttagggaaataaatatcctcttgtctttccaccatccttcaatcgtggatgttaaggaagtagtagttggaagtagtttagatagcatttttatggttatggagtacatggaacatgatcttaaaggtgtcatggagaccatgaaacaaccatatacacaaagcgaggtcaaatgtttgatgcttcagctgctagagggtgtaaaatatctacatgacaattgggtactccatagggatctgaagacctcaaatcttttgctgaataaccgtgggccccagaactgttgttaggaacaaaggagtattctactgctattgatatgtggtccgtgggctgtataatggctgagctccttgccaaagaaccattatttaatggaaaaacagagtttgaacagctagataagatttttagaacacttggcacacctagcgagaagatttggcctggctatgctaaattaccaggcgtgaaagtaaattttgtcaaacaaccgtataataggctaagggataagttcccagctgcatctttttctgggcgaccaatcctgtctgaagctggttttgatctattgaatagactgctaacttatgatcctgataagcgcatatcagcagacgatgctctgaaacacaaatggttctctgaagttcctctgcctaaatcaaaagacttcatgccaacatttcctgctcttaatgaacttgacaggcgtaccaaacgttatctgaagagtcctgatcctctggaagagcaacgtctgaaagaactgcaagggaacataggcaaccgtgggctttttggctgaactaagagtacttgattggattcctgtccgtactaactgttatgcttcaccctgaatccacgaggtcagatgtcttctgaggcttggtgccggtttgagtggataaggtttctccttgtggcccatcatagaaattttgttgcaggattaacactccatccagattgatcataaaagcaaatataaaccgtcttcatcgtaaggtgtgacatgttggctttgaatgggtacaccagtttcacctttggaacttctgtatgtaaaatattccagattgagacgaaagaagcgcaggggaaggaagccttttgcttttatcaggaaatcaatgacattaatacaacttagaagctaagctgtggctgcttcaagataggaaagtgacaatttgtggagggccttcaaaagtgttttactagtgaaccatggtgaaaaacatgaagcgattggtttccgcaataaacaaagtgaaagttagcatgtagagtattgcaatacgtgcggtgccatttgaagttctggtgaggtttgcttgcgatagagctctttgggggcacttagaagt

SEQ ID NO: 24795 - DNA, 2759 bp, Zea Mays
gctctagcaggtagcagcagtcgcttccgtcccccttcctcttgtattcgcttcgccgcccaacccagcctccaccgctgccttcccgaccgttctcgccgccgctgtctcctcgcccaccaccccgcacggccggcgaccagcgcccacgcggccgctcgatccaaggccagaacgagcccaccacgatccgcatcacgccgatatttttcaggttgttggtacggatctagggttttcctgctgcggattcgttcgattcgctcatggccgctgggcgccatgggggttacagggactacgaggagagggagcgggagctcgacgcggaggcctccaggaggagcaaggagcagcaccaccatctcggcggccgccaccgcgacgtggaccgccgccgcgatggcgggcgcagcaggggtggtagagactttgccaacggccacggtcgccgacgttcgcccccgcccaggagccgcctcgcgggaaggcttggtgaccgtgagcctggcgaggtgctgagcggtagcgcatctgatgactccggtgggaggtcggatagagggagggaaaatggcgtgcgcagttctagcagggagggcgacatggtggcaggcactgggatctcgtcaccgatcaagaagaggaaattctcaccgataatttgggacagggatagcccaaagccaccgcattctggtgcagccagggacaagaaatcggtagaatctgttccttctgagctccctccgccgccgccgctgccacaagaccacatcccactgagcttgtctgtggagaagtcacctatggatgtagaaactactgttggtacagagagtgctgagcagttgccggaacatgaggtcaataaggtgatagagcaggaagaggactatccaagtccaacaatgaggaacatatcgacttcaagatgggcgggtgcaaatgatgatgaggaaggtggggcagctccaatgaagaagagaagtgtttcacctgcagactcctctgtaccaggtcagtggaaacgagcaagcccagaacctggtgaagtctctggaggaagggcaatgtctaggtcatctgattcagggaaaataggtaatgatgagaaagaagattccgaggtcgataaagatgactatatggatgttgacagggagcatgctagtgacagtggtacagaaaactgtatgtcggatactgactcagacaatgaaatgtgcaggcctgaaacccctgaaccagagaggccaccacacaggtgtatcaatatgcttcaaggttgcagaagtgttgatgagtttgagaggctcaacaaaattaatgagggaacatatggtgttgtatacagagcaagggataagaagacaagtgagattgttgcattgaagaaggtaaagatggagagggagcgagaaggtttcccattaacctctcttagggaaataaatatcctcttgtctttccaccatccttcaatcgtggatgttaaggaagtagtagttggaagtagtttagatagcatttttatggttatggagtacatggaacatgatcttaaaggtgtcatggagaccatgaaacaaccatatacacaaagcgaggtcaaatgtttgatgcttcagctgctagagggtgtaaaatatctacatgacaattgggtactccatagggatctgaagacctcaaatcttttgctgaataaccgtgggccccagaactgttgttaggaacaaaggagtattctactgctattgatatgtggtccgtgggctgtataatggctgagctccttgccaaagaaccattatttaatggaaaaacagagtttgaacagctagataagatttttagaacacttggcacacctagcgagaagatttggcctggctatgctaaattaccaggcgtgaaagtaaattttgtcaaacaaccgtataataggctaagggataagttcccagctgcatctttttctgggcgaccaatcctgtctgaagctggttttgatctattgaatagactgctaacttatgatcctgataagcgcatatcagcagacgatgctctgaaacacaaatggttctctgaagttcctctgcctaaatcaaaagacttcatgccaacatttcctgctcttaatgaacttgacaggcgtaccaaacgttatctgaagagtcctgatcctctggaagagcaacgtctgaaagaactgcaagggaacataggcaaccgtgggctttttggctgaactaagagtacttgattggattcctgtccgtactaactgttatgcttcaccctgaatccacgaggtcagatgtcttctgaggattaacactccatccagattgatcataaaagcaaatataaaccgtcttcatcgtaaggtgtgacatgttggctttgaatgggtacaccagtttcacctttggaacttctgtatgtaaaatattccagattggagacgaaagaagcgcaggggaaggaagccttttgcttttatcaggaaatcaatgacattaatacaacttagaagctaagctgtggctgcttcaagataggaaagtgacaatttgtggagggccttcaaaagtgttttactagtgaaccatggtgaaaaacatgaagcgattggtttccgcaataaacaaagtgaaagttagcatgtagagtattgcaatacgtgcggtgccatttgaagttctggtgaggtttgcttgcgatagagctctttgggggcacttagaagt

SEQ ID NO: 24796 - DNA, 3050 bp, Zea Mays
gctctagcaggtagcagcagtcgcttccgtcccccttcctcttgtattcgcttcgccgcccaacccagcctccaccgctgccttcccgaccgttctcgccgccgctgtctcctcgcccaccaccccgcacggccggcgaccagcgcccacgcggccgctcgatccaaggccagaacgagcccaccacgatccgcatcacgccgatatttttcaggttgttggtacggatctagggttttcctgctgcggattcgttcgattcgctcatggccgctgggcgccatgggggttacagggactacgaggagagggagcgggagctcgacgcggaggcctccaggaggagcaaggagcagcaccaccatctcggcggccgccaccgcgacgtggaccgccgccgcgatggcgggcgcagcaggggtggtagagactttgccaacggccacggtcgccgacgttcgcccccgcccaggagccgcctcgcgggaaggcttggtgaccgtgagcctggcgaggtgctgagcggtagcgcatctgatgactccggtgggaggtcggatagagggagggaaaatggcgtgcgcagttctagcagggagggcgacatggtggcaggcactgggatctcgtcaccgatcaagaagaggaaattctcaccgataatttgggacagggatagcccaaagccaccgcattctggtgcagccagggacaagaaatcggtagaatctgttccttctgagctccctccgccgccgccgctgccacaagaccacatcccactgagcttgtctgtggagaagtcacctatggatgtagaaactactgttggtacagagagtgctgagcagttgccggaacatgaggtcaataaggtgatagagcaggaagaggactatccaagtccaacaatgaggaacatatcgacttcaagatgggcgggtgcaaatgatgatgaggaaggtggggcagctccaatgaagaagagaagtgtttcacctgcagactcctctgtaccaggtcagtggaaacgagcaagcccagaacctggtgaagtctctggaggaagggcaatgtctaggtcatctgattcagggaaaataggtaatgatgagaaagaagattccgaggtcgataaagatgactatatggatgttgacagggagcatgctagtgacagtggtacagaaaactgtatgtcggatactgactcagacaatgaaatgtgcaggcctgaaacccctgaaccagagaggccaccacacaggtgtatcaatatgcttcaaggttgcagaagtgttgatgagtttgagaggctcaacaaaattaatgagggaacatatggtgttgtatacagagcaagggataagaagacaagtgagattgttgcattgaagaaggtaaagatggagagggagcgagaaggtttcccattaacctctcttagggaaataaatatcctcttgtctttccaccatccttcaatcgtggatgttaaggaagtagtagttggaagtagtttagatagcatttttatggttatggagtacatggaacatgatcttaaaggtgtcatggagaccatgaaacaaccatatacacaaagcgaggtcaaatgtttgatgcttcagctgctagagggtgtaaaatatctacatgacaattgggtactccatagggatctgaagacctcaaatcttttgctgaataaccgtgggccccagaactgttgttaggaacaaaggagtattctactgctattgatatgtggtccgtgggctgtataatggctgagctccttgccaaagaaccattatttaatggaaaaacagagtttgaacagctagataagatttttagaacacttggcacacctagcgagaagatttggcctggctatgctaaattaccaggcgtgaaagtaaattttgtcaaacaaccgtataataggctaagggataagttcccagctgcatctttttctgggcgaccaatcctgtctgaagctggttttgatctattgaatagactgctaacttatgatcctgataagcgcatatcagcagacgatgctctgaaacacaaatggttctctgaagttcctctgcctaaatcaaaagacttcatgccaacatttcctgctcttaatgaacttgacaggcgtaccaaacgttatctgaagagtcctgatcctctggaagagcaacgtctgaaagaactgcaagggaacataggcaaccgtgggctttttggctgaactaagagtacttgattggattcctgtccgtactaactgttatgcttcaccctgaatccacgaggcttggtgccggtttgagtggataaggtttctccttgtggcccatcatagaaattttgttgcaggattaacactccatccagattgatcataaaagcaaatataaaccgtcttcatcgtaaggtgtgacatgttggctttgaatgggtacaccagtttcacctttggaacttctgtatgtaaaatattccagattggtacgttgtaaacaatccccagtgtgtcggatttaaatttaaataaaacatcatcattattagttttcttcatgctccttgtgccttttcttttgatctttgcattttgtttgcaagagacgaaagaagcgcaggggaaggaagccttttgcttttatcaggaaatcaatgacattaatacaacttagaaggtaatatatcaaaagccaattgctgcaagtgacgtgttgctaactagaaactaatgaacgagggagttctttactgaaaaatcagctaagctgtggctgcttcaagataggaaagtgacaatttgtggagggccttcaaaagtgttttactagtgaaccatggtggttgttgcttatcttcagctgacagttataacattgctcacagaaaaacatgaagcgattggtttccgcaataaacaaagtgaaagttagcatgtagagtattgcaatacgtgcggtgccatttgaagttctggtgaggtttgcttgcgatagagctctttgggggcacttagaagt

SEQ ID NO: 24797 - DNA, 2982 bp, Zea Mays
gctctagcaggtagcagcagtcgcttccgtcccccttcctcttgtattcgcttcgccgcccaacccagcctccaccgctgccttcccgaccgttctcgccgccgctgtctcctcgcccaccaccccgcacggccggcgaccagcgcccacgcggccgctcgatccaaggccagaacgagcccaccacgatccgcatcacgccgatatttttcaggttgttggtacggatctagggttttcctgctgcggattcgttcgattcgctcatggccgctgggcgccatgggggttacagggactacgaggagagggagcgggagctcgacgcggaggcctccaggaggagcaaggagcagcaccaccatctcggcggccgccaccgcgacgtggaccgccgccgcgatggcgggcgcagcaggggtggtagagactttgccaacggccacggtcgccgacgttcgcccccgcccaggagccgcctcgcgggaaggcttggtgaccgtgagcctggcgaggtgctgagcggtagcgcatctgatgactccggtgggaggtcggatagagggagggaaaatggcgtgcgcagttctagcagggagggcgacatggtggcaggcactgggatctcgtcaccgatcaagaagaggaaattctcaccgataatttgggacagggatagcccaaagccaccgcattctggtgcagccagggacaagaaatcggtagaatctgttccttctgagctccctccgccgccgccgctgccacaagaccacatcccactgagcttgtctgtggagaagtcacctatggatgtagaaactactgttggtacagagagtgctgagcagttgccggaacatgaggtcaataaggtgatagagcaggaagaggactatccaagtccaacaatgaggaacatatcgacttcaagatgggcgggtgcaaatgatgatgaggaaggtggggcagctccaatgaagaagagaagtgtttcacctgcagactcctctgtaccaggtcagtggaaacgagcaagcccagaacctggtgaagtctctggaggaagggcaatgtctaggtcatctgattcagggaaaataggtaatgatgagaaagaagattccgaggtcgataaagatgactatatggatgttgacagggagcatgctagtgacagtggtacagaaaactgtatgtcggatactgactcagacaatgaaatgtgcaggcctgaaacccctgaaccagagaggccaccacacaggtgtatcaatatgcttcaaggttgcagaagtgttgatgagtttgagaggctcaacaaaattaatgagggaacatatggtgttgtatacagagcaagggataagaagacaagtgagattgttgcattgaagaaggtaaagatggagagggagcgagaaggtttcccattaacctctcttagggaaataaatatcctcttgtctttccaccatccttcaatcgtggatgttaaggaagtagtagttggaagtagtttagatagcatttttatggttatggagtacatggaacatgatcttaaaggtgtcatggagaccatgaaacaaccatatacacaaagcgaggtcaaatgtttgatgcttcagctgctagagggtgtaaaatatctacatgacaattgggtactccatagggatctgaagacctcaaatcttttgctgaataaccgtgggccccagaactgttgttaggaacaaaggagtattctactgctattgatatgtggtccgtgggctgtataatggctgagctccttgccaaagaaccattatttaatggaaaaacagagtttgaacagctagataagatttttagaacacttggcacacctagcgagaagatttggcctggctatgctaaattaccaggcgtgaaagtaaattttgtcaaacaaccgtataataggctaagggataagttcccagctgcatctttttctgggcgaccaatcctgtctgaagctggttttgatctattgaatagactgctaacttatgatcctgataagcgcatatcagcagacgatgctctgaaacacaaatggttctctgaagttcctctgcctaaatcaaaagacttcatgccaacatttcctgctcttaatgaacttgacaggcgtaccaaacgttatctgaagagtcctgatcctctggaagagcaacgtctgaaagaactgcaagggaacataggcaaccgtgggctttttggctgaactaagagtacttgattggattcctgtccgtactaactgttatgcttcaccctgaatccacgaggtcagatgtcttctgaggcttggtgccggtttgagtggataaggtttctccttgtggcccatcatagaaattttgttgcaggattaacactccatccagattgatcataaaagcaaatataaaccgtcttcatcgtaaggtgtgacatgttggctttgaatgggtacaccagtttcacctttggaacttctgtatgtaaaatattccagattggtacgttgtaaacaatccccagtgtgtcggatttaaatttaaataaaacatcatcattattagttttcttcatgctccttgtgccttttcttttgatctttgcattttgtttgcaagagacgaaagaagcgcaggggaaggaagccttttgcttttatcaggaaatcaatgacattaatacaacttagaagctaagctgtggctgcttcaagataggaaagtgacaatttgtggagggccttcaaaagtgttttactagtgaaccatggtggttgttgcttatcttcagctgacagttataacattgctcacagaaaaacatgaagcgattggtttccgcaataaacaaagtgaaagttagcatgtagagtattgcaatacgtgcggtgccatttgaagttctggtgaggtttgcttgcgatagagctctttgggggcacttagaagt

SEQ ID NO: 24798 - DNA, 2796 bp, Zea Mays
gctctagcaggtagcagcagtcgcttccgtcccccttcctcttgtattcgcttcgccgcccaacccagcctccaccgctgccttcccgaccgttctcgccgccgctgtctcctcgcccaccaccccgcacggccggcgaccagcgcccacgcggccgctcgatccaaggccagaacgagcccaccacgatccgcatcacgccgatatttttcaggttgttggtacggatctagggttttcctgctgcggattcgttcgattcgctcatggccgctgggcgccatgggggttacagggactacgaggagagggagcgggagctcgacgcggaggcctccaggaggagcaaggagcagcaccaccatctcggcggccgccaccgcgacgtggaccgccgccgcgatggcgggcgcagcaggggtggtagagactttgccaacggccacggtcgccgacgttcgcccccgcccaggagccgcctcgcgggaaggcttggtgaccgtgagcctggcgaggtgctgagcggtagcgcatctgatgactccggtgggaggtcggatagagggagggaaaatggcgtgcgcagttctagcagggagggcgacatggtggcaggcactgggatctcgtcaccgatcaagaagaggaaattctcaccgataatttgggacagggatagcccaaagccaccgcattctggtgcagccagggacaagaaatcggtagaatctgttccttctgagctccctccgccgccgccgctgccacaagaccacatcccactgagcttgtctgtggagaagtcacctatggatgtagaaactactgttggtacagagagtgctgagcagttgccggaacatgaggtcaataaggtgatagagcaggaagaggactatccaagtccaacaatgaggaacatatcgacttcaagatgggcgggtgcaaatgatgatgaggaaggtggggcagctccaatgaagaagagaagtgtttcacctgcagactcctctgtaccaggtcagtggaaacgagcaagcccagaacctggtgaagtctctggaggaagggcaatgtctaggtcatctgattcagggaaaataggtaatgatgagaaagaagattccgaggtcgataaagatgactatatggatgttgacagggagcatgctagtgacagtggtacagaaaactgtatgtcggatactgactcagacaatgaaatgtgcaggcctgaaacccctgaaccagagaggccaccacacaggtgtatcaatatgcttcaaggttgcagaagtgttgatgagtttgagaggctcaacaaaattaatgagggaacatatggtgttgtatacagagcaagggataagaagacaagtgagattgttgcattgaagaaggtaaagatggagagggagcgagaaggtttcccattaacctctcttagggaaataaatatcctcttgtctttccaccatccttcaatcgtggatgttaaggaagtagtagttggaagtagtttagatagcatttttatggttatggagtacatggaacatgatcttaaaggtgtcatggagaccatgaaacaaccatatacacaaagcgaggtcaaatgtttgatgcttcagctgctagagggtgtaaaatatctacatgacaattgggtactccatagggatctgaagacctcaaatcttttgctgaataaccgtgggccccagaactgttgttaggaacaaaggagtattctactgctattgatatgtggtccgtgggctgtataatggctgagctccttgccaaagaaccattatttaatggaaaaacagagtttgaacagctagataagatttttagaacacttggcacacctagcgagaagatttggcctggctatgctaaattaccaggcgtgaaagtaaattttgtcaaacaaccgtataataggctaagggataagttcccagctgcatctttttctgggcgaccaatcctgtctgaagctggttttgatctattgaatagactgctaacttatgatcctgataagcgcatatcagcagacgatgctctgaaacacaaatggttctctgaagttcctctgcctaaatcaaaagacttcatgccaacatttcctgctcttaatgaacttgacaggcgtaccaaacgttatctgaagagtcctgatcctctggaagagcaacgtctgaaagaactgcaagggaacataggcaaccgtgggctttttggctgaactaagagtacttgattggattcctgtccgtactaactgttatgcttcaccctgaatccacgaggtcagatgtcttctgaggtttctccttgtggcccatcatagaaattttgttgcaggattaacactccatccagattgatcataaaagcaaatataaaccgtcttcatcgtaaggtgtgacatgttggctttgaatgggtacaccagtttcacctttggaacttctgtatgtaaaatattccagattgagacgaaagaagcgcaggggaaggaagccttttgcttttatcaggaaatcaatgacattaatacaacttagaagctaagctgtggctgcttcaagataggaaagtgacaatttgtggagggccttcaaaagtgttttactagtgaaccatggtgaaaaacatgaagcgattggtttccgcaataaacaaagtgaaagttagcatgtagagtattgcaatacgtgcggtgccatttgaagttctggtgaggtttgcttgcgatagagctctttgggggcacttagaagt

SEQ ID NO: 24799 - DNA, 2754 bp, Zea Mays
tgagcggccgctctagcaggtagcagcagtcgcttccgtcccccttcctcttgtattcgcttcgccgcccaacccagcctccaccgctgccttcccgaccgttctcgccgccgctgtctcctcgcccaccaccccgcacggccggcgaccagcgcccacgcggccgctcgatccaaggccagaacgagcccaccacgatccgcatcacgccgatatttttcaggttgttggtacggatctagggttttcctgctgcggattcgttcgattcgctcatggccgctgggcgccatgggggttacagggactacgaggagagggagcgggagctcgacgcggaggcctccaggaggagcaaggagcagcaccaccatctcggcggccgccaccgcgacgtggaccgccgccgcgatggcgggcgcagcaggggtggtagagactttgccaacggccacggtcgccgacgttcgcccccgcccaggagccgcctcgcgggaaggcttggtgaccgtgagcctggcgaggtgctgagcggtagcgcatctgatgactccggtgggaggtcggatagagggagggaaaatggcgtgcgcagttctagcagggagggcgacatggtggcaggcactgggatctcgtcaccgatcaagaagaggaaattctcaccgataatttgggacagggatagcccaaagccaccgcattctggtgcagccagggacaagaaatcggtagaatctgttccttctgagctccctccgccgccgccgctgccacaagaccacatcccactgagcttgtctgtggagaagtcacctatggatgtagaaactactgttggtacagagagtgctgagcagttgccggaacatgaggtcaataaggtgatagagcaggaagaggactatccaagtccaacaatgaggaacatatcgacttcaagatgggcgggtgcaaatgatgatgaggaaggtggggcagctccaatgaagaagagaagtgtttcacctgcagactcctctgtaccaggtcagtggaaacgagcaagcccagaacctggtgaagtctctggaggaagggcaatgtctaggtcatctgattcagggaaaataggtaatgatgagaaagaagattccgaggtcgataaagatgactatatggatgttgacagggagcatgctagtgacagtggtacagaaaactgtatgtcggatactgactcagacaatgaaatgtgcaggcctgaaacccctgaaccagagaggccaccacacaggtgtatcaatatgcttcaaggttgcagaagtgttgatgagtttgagaggctcaacaaaattaatgagggaacatatggtgttgtatacagagcaagggataagaagacaagtgagattgttgcattgaagaaggtaaagatggagagggagcgagaaggtttcccattaacctctcttagggaaataaatatcctcttgtctttccaccatccttcaatcgtggatgttaaggaagtagtagttggaagtagtttagatagcatttttatggttatggagtacatggaacatgatcttaaaggtgtcatggagaccatgaaacaaccatatacacaaagcgaggtcaaatgtttgatgcttcagctgctagagggtgtaaaatatctacatgacaattgggtactccatagggatctgaagacctcaaatcttttgctgaataaccgtgggccccagaactgttgttaggaacaaaggagtattctactgctattgatatgtggtccgtgggctgtataatggctgagctccttgccaaagaaccattatttaatggaaaaacagagtttgaacagctagataagatttttagaacacttggcacacctagcgagaagatttggcctggctatgctaaattaccaggcgtgaaagtaaattttgtcaaacaaccgtataataggctaagggataagttcccagctgcatctttttctgggcgaccaatcctgtctgaagctggttttgatctattgaatagactgctaacttatgatcctgataagcgcatatcagcagacgatgctctgaaacacaaatggttctctgaagttcctctgcctaaatcaaaagacttcatgccaacatttcctgctcttaatgaacttgacaggcgtaccaaacgttatctgaagagtcctgatcctctggaagagcaacgtctgaaagaactgcaagggaacataggcaaccgtgggctttttggctgaactaagagtacttgattggattcctgtccgtactaactgttatgcttcaccctgaatccacgaggtcagatgtcttctgaggtgaggtgccatggacatgaagtatcacatcttctcggtgtctagcagcgactgatagtgttctttagcaggcttggtgccggtttgagtggataaggtttctccttgtggcccatcatagaaattttgttgcaggattaacactccatccagattgatcataaaagcaaatataaaccgtcttcatcgtaagctaagctgtggctgcttcaagataggaaagtgacaatttgtggagggccttcaaaagtgttttactagtgaaccatggtgaaaaacatgaagcgattggtttccgcaataaacaaagtgaaagttagcatgtagagtattgcaatacgtgcggtgccatttgaagttctggtgaggtttgcttgcgatagagctctttgggggcacttagaagt

SEQ ID NO: 24800 - DNA, 3088 bp, Zea Mays
gcagtcttccattaaaaaaaacacatatgttcaagtggattgagagataaattatttgagtttctaaactactagtcgctaaatgacattactggactactggacccacgcccgcgggttctcagaaggcccgataaggtaaatcctagagccgacccgtaaacgctgagcggccgctctagcaggtagcagcagtcgcttccgtcccccttcctcttgtattcgcttcgccgcccaacccagcctccaccgctgccttcccgaccgttctcgccgccgctgtctcctcgcccaccaccccgcacggccggcgaccagcgcccacgcggccgctcgatccaaggccagaacgagcccaccacgatccgcatcacgccgatatttttcaggttgttggtacggatctagggttttcctgctgcggattcgttcgattcgctcatggccgctgggcgccatgggggttacagggactacgaggagagggagcgggagctcgacgcggaggcctccaggaggagcaaggagcagcaccaccatctcggcggccgccaccgcgacgtggaccgccgccgcgatggcgggcgcagcaggggtggtagagactttgccaacggccacggtcgccgacgttcgcccccgcccaggagccgcctcgcgggaaggcttggtgaccgtgagcctggcgaggtgctgagcggtagcgcatctgatgactccggtgggaggtcggatagagggagggaaaatggcgtgcgcagttctagcagggagggcgacatggtggcaggcactgggatctcgtcaccgatcaagaagaggaaattctcaccgataatttgggacagggatagcccaaagccaccgcattctggtgcagccagggacaagaaatcggtagaatctgttccttctgagctccctccgccgccgccgctgccacaagaccacatcccactgagcttgtctgtggagaagtcacctatggatgtagaaactactgttggtacagagagtgctgagcagttgccggaacatgaggtcaataaggtgatagagcaggaagaggactatccaagtccaacaatgaggaacatatcgacttcaagatgggcgggtgcaaatgatgatgaggaaggtggggcagctccaatgaagaagagaagtgtttcacctgcagactcctctgtaccaggtcagtggaaacgagcaagcccagaacctggtgaagtctctggaggaagggcaatgtctaggtcatctgattcagggaaaataggtaatgatgagaaagaagattccgaggtcgataaagatgactatatggatgttgacagggagcatgctagtgacagtggtacagaaaactgtatgtcggatactgactcagacaatgaaatgtgcaggcctgaaacccctgaaccagagaggccaccacacaggtgtatcaatatgcttcaaggttgcagaagtgttgatgagtttgagaggctcaacaaaattaatgagggaacatatggtgttgtatacagagcaagggataagaagacaagtgagattgttgcattgaagaaggtaaagatggagagggagcgagaaggtttcccattaacctctcttagggaaataaatatcctcttgtctttccaccatccttcaatcgtggatgttaaggaagtagtagttggaagtagtttagatagcatttttatggttatggagtacatggaacatgatcttaaaggtgtcatggagaccatgaaacaaccatatacacaaagcgaggtcaaatgtttgatgcttcagctgctagagggtgtaaaatatctacatgacaattgggtactccatagggatctgaagacctcaaatcttttgctgaataaccgtggtgagttaaaaatatgtgattttggactgtctcgtcaatatgggagcccattaaaaccttatactcaactggttgtgactttgtggtacagggccccagaactgttgttaggaacaaaggagtattctactgctattgatatgtggtccgtgggctgtataatggctgagctccttgccaaagaaccattatttaatggaaaaacagagtttgaacagctagataagatttttagaacacttggcacacctagcgagaagatttggcctggctatgctaaattaccaggcgtgaaagtaaattttgtcaaacaaccgtataataggctaagggataagttcccagctgcatctttttctgggcgaccaatcctgtctgaagctggttttgatctattgaatagactgctaacttatgatcctgataagcgcatatcagcagacgatgctctgaaacacaaatggttctctgaagttcctctgcctaaatcaaaagacttcatgccaacatttcctgctcttaatgaacttgacaggcgtaccaaacgttatctgaagagtcctgatcctctggaagagcaacgtctgaaagaactgcaagggaacataggcaaccgtgggctttttggctgaactaagagtacttgattggattcctgtccgtactaactgttatgcttcaccctgaatccacgaggtcagatgtcttctgaggcttggtgccggtttgagtggataaggtttctccttgtggcccatcatagaaattttgttgcaggattaacactccatccagattgatcataaaagcaaatataaaccgtcttcatcgtaaggtgtgacatgttggctttgaatgggtacaccagtttcacctttggaacttctgtatgtaaaatattccagattgagacgaaagaagcgcaggggaaggaagccttttgcttttatcaggaaatcaatgacattaatacaacttagaagctaagctgtggctgcttcaagataggaaagtgacaatttgtggagggccttcaaaagtgttttactagtgaaccatggtgaaaaacatgaagcgattggtttccgcaataaacaaagtgaaagttagcatgtagagtattgcaatacgtgcggtgccatttgaagttctggtgaggtttgcttgcgatagagctctttgggggcacttagaagt

SEQ ID NO: 24801 - DNA, 2580 bp, Zea Mays
ccgctctagcaggtagcagcagtcgcttccgtcccccttcctcttgtattcgcttcgccgcccaacccagcctccaccgctgccttcccgaccgttctcgccgccgctgtctcctcgcccaccaccccgcacggccggcgaccagcgcccacgcggccgctcgatccaaggccagaacgagcccaccacgatccgcatcacgccgatatttttcaggttgttggtacggatctagggttttcctgctgcggattcgttcgattcgctcatggccgctgggcgccatgggggttacagggactacgaggagagggagcgggagctcgacgcggaggcctccaggaggagcaaggagcagcaccaccatctcggcggccgccaccgcgacgtggaccgccgccgcgatggcgggcgcagcaggggtggtagagactttgccaacggccacggtcgccgacgttcgcccccgcccaggagccgcctcgcgggaaggcttggtgaccgtgagcctggcgaggtgctgagcggtagcgcatctgatgactccggtgggaggtcggatagagggagggaaaatggcgtgcgcagttctagcagggagggcgacatggtggcaggcactgggatctcgtcaccgatcaagaagaggaaattctcaccgataatttgggacagggatagcccaaagccaccgcattctggtgcagccagggacaagaaatcggtagaatctgttccttctgagctccctccgccgccgccgctgccacaagaccacatcccactgagcttgtctgtggagaagtcacctatggatgtagaaactactgttggtacagagagtgctgagcagttgccggaacatgaggtcaataaggtgatagagcaggaagaggactatccaagtccaacaatgaggaacatatcgacttcaagatgggcgggtgcaaatgatgatgaggaaggtggggcagctccaatgaagaagagaagtgtttcacctgcagactcctctgtaccaggtcagtggaaacgagcaagcccagaacctggtgaagtctctggaggaagggcaatgtctaggtcatctgattcagggaaaataggtaatgatgagaaagaagattccgaggtcgataaagatgactatatggatgttgacagggagcatgctagtgacagtggtacagaaaactgtatgtcggatactgactcagacaatgaaatgtgcaggcctgaaacccctgaaccagagaggccaccacacaggtgtatcaatatgcttcaaggttgcagaagtgttgatgagtttgagaggctcaacaaaattaatgagggaacatatggtgttgtatacagagcaagggataagaagacaagtgagattgttgcattgaagaaggtaaagatggagagggagcgagaaggtttcccattaacctctcttagggaaataaatatcctcttgtctttccaccatccttcaatcgtggatgttaaggaagtagtagttggaagtagtttagatagcatttttatggttatggagtacatggaacatgatcttaaaggtgtcatggagaccatgaaacaaccatatacacaaagcgaggtcaaatgtttgatgcttcagctgctagagggtgtaaaatatctacatgacaattgggtactccatagggatctgaagacctcaaatcttttgctgaataaccggccccagaactgttgttaggaacaaaggagtattctactgctattgatatgtggtccgtgggctgtataatggctgagctccttgccaaagaaccattatttaatggaaaaacagagtttgaacagctagataagatttttagaacacttggcacacctagcgagaagatttggcctggctatgctaaattaccaggcgtgaaagtaaattttgtcaaacaaccgtataataggctaagggataagttcccagctgcatctttttctgggcgaccaatcctgtctgaagctggttttgatctattgaatagactgctaacttatgatcctgataagcgcatatcagcagacgatgctctgaaacacaaatggttctctgaagttcctctgcctaaatcaaaagacttcatgccaacatttcctgctcttaatgaacttgacaggcgtaccaaacgttatctgaagagtcctgatcctctggaagagcaacgtctgaaagaactgcaagggaacataggcaaccgtgggctttttggctgaactaagagtacttgattggattcctgtccgtactaactgttatgcttcaccctgaatccacgaggtcagatgtcttctgaggattaacactccatccagattgatcataaaagcaaatataaaccgtcttcatcgtaaggtgtgacatgttggctttgaatgggtacaccagtttcacctttggaacttctgtatgtaaaatattccagattgacgaaagaagcgcaggggaaggaagccttttgcttttatcaggaaatcaatgacattaatacaacttagaaggtgaattaattgtgagatatgtccacaacaaattcggaa

SEQ ID NO: 24802 - DNA, 3216 bp, Zea Mays
gtccatccagcatgcagataagcaaactgcgttcagtttcaaatttttctggcaactaaaaagaagaacttgtataaggacaaaaccgcaacataccaccttatcatcattatctaacacagcagtgctgttttatggtcttcagaggatgaacaagacttgattctgagttctagatgccgccgtgcactgaaataagccacacagctgtaccactaatttgcttcccccaagcatatctatcttagtaaaagcggtaccaagtgaattaaagaaatcgttatgttgggagcaggcagagaacaagtgtcgataaaatctcttaccactttttatcgttgaagtctaatattcccatcaaataatgtttcgcttgaggccctccaccatttgtaatgagaaggcaatcttcatcacagcaacattagagtggaagctttaatgagcacgctctaagttctagcctgtacatatcaaagacatagaagattaccaaccaagtactagggaattccggctcgctttcctcattcacctagtttattgaaagggtgagggaatgttcatgctgcaaggaaagaggatgaggtgtcaatctgacagacaagtcaaaaggcagaccacttttcaggagcatatcatgtctagctagggtaacactgtaacagatatagggaataagtgagtgcagtcatcagattttattcaccaatgtggggttaccatggacactcctgtttttttttctgtaagcccagatagtggacatacaggcctacactgtccagtagtgacgaccgatataaatatatgcatcttaaagctgagattctaaggcatctagagcacacgactcctgatatcatgaaagccttcagcacttcaggttacaagtataaataggacacgtacctgcacccatcagtgcacccaacttcacatttgaggccaaatcagcttctttgttctctagagagcgggcctcaaaatagcattcttgactaaccatgtcaagggacccactagtagtaggacatgtagtaggtgacattctggacccatttattaaaacagcctcacttaaggttctgtacaacaacaaggaactgaccaatggatctgacctcaagccatcacaagtagcaagtgaaccaagggttgaaattggtgggcgcgacatgaggaacctttacactctggtaagtccataactagttcattacgacattgagcagtattaagtttagttaaagtgaatacaaggtatcagggtaaataaacaatcatatgcctagctgcacaagatctctgtttttataaaactaagtacacaatctcttacttgtaacatctgcttttggagttcatcacctttaattgttttcagtgcccacatagcaatgaaaacaaagaatctcaactttccataagttgtacaattttttttatggattgaaaaggacctctgcacttgcatttaatttcatgcaccatccgtatgttcgacagcatcggcacatgtacctgcatcttgtacatggtgctgactagaataaaaagttatgtcatcaacaactacaggaagtttgaattactatagtaagatgcataaatacatgtcatatgatatgagttttcgcattttagtagtgttatgacgattgacgaagacctttagagacaccagtgtgtagttggattctaaagagcgataataataaaaaaagagacaaagaaaggtcaaaattgacatgaaaaaagacaataaaatgagacttgaaaggataaaatataccaaagatttagtcttaaataggagcgaatgaaaaacagctatctatgtgactgaaccttgatttatggcttcttttgactttcaactctagcctactccaatttacttgggactaaaagactttattgttatatgacgaggttattgtagtagtaacattaaaataagtctgcattagagactttctttttgtgtttgagaaaaaaggctttatttcattcatcagggttaacaggtaccttaaaaaagaatgcctagattgcgctggttaatcaaatagtatctttgtaattctctgaataaaagataaggaagtgtggtaacaatttcagagaacaaatgctaagcacctgctactgaataagggaactattatgtttagttctgagatatttcctcaagataacaagctaacccttgctactaggtgatggtggatccagactccccaagtccaagtaacccaacaaatagagaatatcttcattggttggtgacagacatcccggaatcagcaaatgctagctatagtgggttcttccattctgtacttctcaatttaagaaatgaaattgtcagctatgaaaacccaaagccatctgctggaatacatcgctttgtctttgtactcttccgccagtctgtccagcaaaccgtttatgcaccaggatggagacaaaatttcaacacgagagacttttctgcgctctataatcttggacctccagtggctgcagttttcttcaattgtcaaagggagaatgggtgtggaggaagacgatatattagataaataccatctcactgactgtgcactgcaagaaggaatattaattaaattttaaaaaaaacatggccagccacttcacaaagccatgataaatgctgggccttgaaatgtagcttcatttgaaaattacttcgccacatctgcaagtgcaatgaatttagcttacagtttcaccatcttgaacaatggtctgtcccaagtgaggcaaacctgcatattaaaattattgttctggtcgtgttcaaaagcatatacccccttcatcaaactaataagttaactacattgtagtagcgacaaaataaatcatgcttttgttttaatgtaactgcataaccattggctgacactcgccgggtgttttatatgcactttctcatcatagaaaaaaatacagaggaaagagcttacatagtcacatgtactccatataagaaaaacttctcaacaatagaaaatggcatacccgttcacatatgcacagacgattctagctgacgcccgaaatggcgtcactgaatcaccaacacatgggtgcacctttaaacgtgtacaaaaaaaaagtatcacaaattatgaatggatagtaccggatgcagaatttgagggggaaaatcagcacacaaagaac

SEQ ID NO: 24803 - DNA, 2193 bp, Zea Mays
gtccatccagcatgcagataagcaaactgcgttcagtttcaaatttttctggcaactaaaaagaagaacttgtataaggacaaaaccgcaacataccaccttatcatcattatctaacacagcagtgctgttttatggtcttcagaggatgaacaagacttgattctgagttctagatgccgccgtgcactgaaataagccacacagctgtaccactaatttgcttcccccaagcatatctatcttagtaaaagcggtaccaagtgaattaaagaaatcgttatgttgggagcaggcagagaacaagtgtcgataaaatctcttaccactttttatcgttgaagtctaatattcccatcaaataatgtttcgcttgaggccctccaccatttgtaatgagaaggcaatcttcatcacagcaacattagagtggaagctttaatgagcacgctctaagttctagcctgtacatatcaaagacatagaagattaccaaccaagtactagggaattccggctcgctttcctcattcacctagtttattgaaagggtgagggaatgttcatgctgcaaggaaagaggatgaggtgtcaatctgacagacaagtcaaaaggcagaccacttttcaggagcatatcatgtctagctagggtaacactgtaacagatatagggaataagtgagtgcagtcatcagattttattcaccaatgtggggttaccatggacactcctgtttttttttctgtaagcccagatagtggacatacaggcctacactgtccagtagtgacgaccgatataaatatatgcatcttaaagctgagattctaaggcatctagagcacacgactcctgatatcatgaaagccttcagcacttcaggttacaagtataaataggacacgtacctgcacccatcagtgcacccaacttcacatttgaggccaaatcagcttctttgttctctagagagcgggcctcaaaatagcattcttgactaaccatgtcaagggacccactagtagtaggacatgtagtaggtgacattctggacccatttattaaaacagcctcacttaaggttctgtacaacaacaaggaactgaccaatggatctgacctcaagccatcacaagtagcaagtgaaccaagggttgaaattggtgggcgcgacatgaggaacctttacactctggtgatggtggatccagactccccaagtccaagtaacccaacaaatagagaatatcttcattggttggtgacagacatcccggaatcagcaaatgctagctatagtgggttcttccattctgtacttctcaatttaagaaatgaaattgtcagctatgaaaacccaaagccatctgctggaatacatcgctttgtctttgtactcttccgccagtctgtccagcaaaccgtttatgcaccaggatggagacaaaatttcaacacgagagacttttctgcgctctataatcttggacctccagtggctgcagttttcttcaattgtcaaagggagaatgggtgtggaggaagacgatatattagataaataccatctcactgactgtgcactgcaagaaggaatattaattaaattttaaaaaaaacatggccagccacttcacaaagccatgataaatgctgggccttgaaatgtagcttcatttgaaaattacttcgccacatctgcaagtgcaatgaatttagcttacagtttcaccatcttgaacaatggtctgtcccaagtgaggcaaacctgcatattaaaattattgttctggtcgtgttcaaaagcatatacccccttcatcaaactaataagttaactacattgtagtagcgacaaaataaatcatgcttttgttttaatgtaactgcataaccattggctgacactcgccgggtgttttatatgcactttctcatcatagaaaaaaatacagaggaaagagcttacatagtcacatgtactccatataagaaaaacttctcaacaatagaaaatggcatacccgttcacatatgcacagacgattctagctgacgcccgaaatggcgtcactgaatcaccaacacatgggtgcacctttaaacgtgtacaaaaaaaaagtatcacaaattatgaatggatagtaccggatgcagaatttgagggggaaaatcagcacacaaagaac

SEQ ID NO: 24804 - DNA, 3183 bp, Zea Mays
gtccatccagcatgcagataagcaaactgcgttcagtttcaaatttttctggcaactaaaaagaagaacttgtataaggacaaaaccgcaacataccaccttatcatcattatctaacacagcagtgctgttttatggtcttcagaggatgaacaagacttgattctgagttctagatgccgccgtgcactgaaataagccacacagctgtaccactaatttgcttcccccaagcatatctatcttagtaaaagcggtaccaagtgaattaaagaaatcgttatgttgggagcaggcagagaacaagtgtcgataaaatctcttaccactttttatcgttgaagtctaatattcccatcaaataatgtttcgcttgaggccctccaccatttgtaatgagaaggcaatcttcatcacagcaacattagagtggaagctttaatgagcacgctctaagttctagcctgtacatatcaaagacatagaagattaccaaccaagtactagggaattccggctcgctttcctcattcacctagtttattgaaagggtgagggaatgttcatgctgcaaggaaagaggatgaggtgtcaatctgacagacaagtcaaaaggcagaccacttttcaggagcatatcatgtctagctagggtaacactgtaacagatatagggaataagtgagtgcagtcatcagattttattcaccaatgtggggttaccatggacactcctgtttttttttctgtaagcccagatagtggacatacaggcctacactgtccagtagtgacgaccgatataaatatatgcatcttaaagctgagattctaaggcatctagagcacacgactcctgatatcatgaaagccttcagcacttcaggttacaagtataaataggacacgtacctgcacccatcagtgcacccaacttcacatttgaggccaaatcagcttctttgttctctagagagcgggcctcaaaatagcattcttgactaaccatgtcaagggacccactagtagtaggacatgtagtaggtgacattctggacccatttattaaaacagcctcacttaaggttctgtacaacaacaaggaactgaccaatggatctgacctcaagccatcacaagtagcaagtgaaccaagggttgaaattggtgggcgcgacatgaggaacctttacactctggtaagtccataactagttcattacgacattgagcagtattaagtttagttaaagtgaatacaaggtatcagggtaaataaacaatcatatgcctagctgcacaagatctctgtttttataaaactaagtacacaatctcttacttgtaacatctgcttttggagttcatcacctttaattgttttcagtgcccacatagcaatgaaaacaaagaatctcaactttccataagttgtacaattttttttatggattgaaaaggacctctgcacttgcatttaatttcatgcaccatccgtatgttcgacagcatcggcacatgtacctgcatcttgtacatggtgctgactagaataaaaagttatgtcatcaacaactacaggaagtttgaattactatagtaagatgcataaatacatgtcatatgatatgagttttcgcattttagtagtgttatgacgattgacgaagacctttagagacaccagtgtgtagttggattctaaagagcgataataataaaaaaagagacaaagaaaggtcaaaattgacatgaaaaaagacaataaaatgagacttgaaaggataaaatataccaaagatttagtcttaaataggagcgaatgaaaaacagctatctatgtgactgaaccttgatttatggcttcttttgactttcaactctagcctactccaatttacttgggactaaaagactttattgttatatgacgaggttattgtagtagtaacattaaaataagtctgcattagagactttctttttgtgtttgagaaaaaaggctttatttcattcatcagggttaacaggtaccttaaaaaagaatgcctagattgcgctggttaatcaaatagtatctttgtaattctctgaataaaagataaggaagtgtggtaacaatttcagagaacaaatgctaagcacctgctactgaataagggaactattatgtttagttctgagatatttcctcaagataacaagctaacccttgctactaggtgatggtggatccagactccccaagtccaagtaacccaacaaatagagaatatcttcattggttggtgacagacatcccggaatcagcaaatgctagctatagaaatgaaattgtcagctatgaaaacccaaagccatctgctggaatacatcgctttgtctttgtactcttccgccagtctgtccagcaaaccgtttatgcaccaggatggagacaaaatttcaacacgagagacttttctgcgctctataatcttggacctccagtggctgcagttttcttcaattgtcaaagggagaatgggtgtggaggaagacgatatattagataaataccatctcactgactgtgcactgcaagaaggaatattaattaaattttaaaaaaaacatggccagccacttcacaaagccatgataaatgctgggccttgaaatgtagcttcatttgaaaattacttcgccacatctgcaagtgcaatgaatttagcttacagtttcaccatcttgaacaatggtctgtcccaagtgaggcaaacctgcatattaaaattattgttctggtcgtgttcaaaagcatatacccccttcatcaaactaataagttaactacattgtagtagcgacaaaataaatcatgcttttgttttaatgtaactgcataaccattggctgacactcgccgggtgttttatatgcactttctcatcatagaaaaaaatacagaggaaagagcttacatagtcacatgtactccatataagaaaaacttctcaacaatagaaaatggcatacccgttcacatatgcacagacgattctagctgacgcccgaaatggcgtcactgaatcaccaacacatgggtgcacctttaaacgtgtacaaaaaaaaagtatcacaaattatgaatggatagtaccggatgcagaatttgagggggaaaatcagcacacaaagaac

SEQ ID NO: 24805 - DNA, 2661 bp, Zea Mays
cttttgcattccttgtttagttggtcaggaggagcctccatatccgattaaatccggtcttctgatgcctgtgtgtgttttttttaagtcttgagatttccaacgagcatcatatctttaaagaaattacacaagtttttgctgatgtcatggcactgaacggttcttccatggagaggagaaagaaaaacagacccggttcgagcgggaaaattgtaacccatgccagcagggctgcactccggtaagctgttttgttcattgcaaatgctggagcgttgtcgatttgatgagagatggtgccatatacgatccaccgccgatcaggtgggtacatccaatattttcgctttgccggcccagccaatcctgttggccactactgtgccaataattcagtccgggccattccattttcgaaagaaacccccgtagccaaccttgagtagctgggcgggtggacgattcctccgctgcggggaacctttccattccatggcacgcgcccgcgccgtcttcttctgggatttggatttggggttggtccttgggggtacgagtcccatccgtcacgcgacgaatgggatgctcccacgtgaacgagcatggcgctttgcctcacttgctctctggtcaagattatcatgccagcgacggttcgattcctccaatctgacgattcacttcctccacgtagccgggctccgtgcctttcctgccctggatctgtttctccgaaaggcccccgtgtttataagtacagcatcagccttcatttgatcagatgagaggccacactccgaaagagagccactccttcctgtatccactttttatcgttgaagtctaatattcccatcaaataatgtttcgcttgaggccctccaccatttgtaatgagaaggcaatcttcatcacagcaacattagagtggaagctttaatgagcacgctctaagttctagcctgtacatatcaaagacatagaagattaccaaccaagtactagggaattccggctcgctttcctcattcacctagtttattgaaagggtgagggaatgttcatgctgcaaggaaagaggatgaggtgtcaatctgacagacaagtcaaaaggcagaccacttttcaggagcatatcatgtctagctagggtaacactgtaacagatatagggaataagtgagtgcagtcatcagattttattcaccaatgtggggttaccatggacactcctgtttttttttctgtaagcccagatagtggacatacaggcctacactgtccagtagtgacgaccgatataaatatatgcatcttaaagctgagattctaaggcatctagagcacacgactcctgatatcatgaaagccttcagcacttcaggttacaagtataaataggacacgtacctgcacccatcagtgcacccaacttcacatttgaggccaaatcagcttctttgttctctagagagcgggcctcaaaatagcattcttgactaaccatgtcaagggacccactagtagtaggacatgtagtaggtgacattctggacccatttattaaaacagcctcacttaaggttctgtacaacaacaaggaactgaccaatggatctgacctcaagccatcacaagtagcaagtgaaccaagggttgaaattggtgggcgcgacatgaggaacctttacactctggtgatggtggatccagactccccaagtccaagtaacccaacaaatagagaatatcttcattggttggtgacagacatcccggaatcagcaaatgctagctatagaaatgaaattgtcagctatgaaaacccaaagccatctgctggaatacatcgctttgtctttgtactcttccgccagtctgtccagcaaaccgtttatgcaccaggatggagacaaaatttcaacacgagagacttttctgcgctctataatcttggacctccagtggctgcagttttcttcaattgtcaaagggagaatgggtgtggaggaagacgatatattagataaataccatctcactgactgtgcactgcaagaaggaatattaattaaattttaaaaaaaacatggccagccacttcacaaagccatgataaatgctgggccttgaaatgtagcttcatttgaaaattacttcgccacatctgcaagtgcaatgaatttagcttacagtttcaccatcttgaacaatggtctgtcccaagtgaggcaaacctgcatattaaaattattgttctggtcgtgttcaaaagcatatacccccttcatcaaactaataagttaactacattgtagtagcgacaaaataaatcatgcttttgttttaatgtaactgcataaccattggctgacactcgccgggtgttttatatgcactttctcatcatagaaaaaaatacagaggaaagagcttacatagtcacatgtactccatataagaaaaacttctcaacaatagaaaatggcatacccgttcacatatgcacagacgattctagctgacgcccgaaatggcgtcactgaatcaccaacacatgggtgcacctttaaacgtgtacaaaaaaaaagtatcacaaattatgaatggatagtaccggatgcagaatttgagggggaaaatcagcacacaaagaac

SEQ ID NO: 24806 - DNA, 2856 bp, Zea Mays
gtccatccagcatgcagataagcaaactgcgttcagtttcaaatttttctggcaactaaaaagaagaacttgtataaggacaaaaccgcaacataccaccttatcatcattatctaacacagcagtgctgttttatggtcttcagaggatgaacaagacttgattctgagttctagatgccgccgtgcactgaaataagccacacagctgtaccactaatttgcttcccccaagcatatctatcttagtaaaagcggtaccaagtgaattaaagaaatcgttatgttgggagcaggcagagaacaagtgtcgataaaatctcttaccactttttatcgttgaagtctaatattcccatcaaataatgtttcgcttgaggccctccaccatttgtaatgagaaggcaatcttcatcacagcaacattagagtggaagctttaatgagcacgctctaagttctagcctgtacatatcaaagacatagaagattaccaaccaagtactagggaattccggctcgctttcctcattcacctagtttattgaaagggtgagggaatgttcatgctgcaaggaaagaggatgaggtgtcaatctgacagacaagtcaaaaggcagaccacttttcaggagcatatcatgtctagctagggtaacactgtaacagatatagggaataagtgagtgcagtcatcagattttattcaccaatgtggggttaccatggacactcctgtttttttttctgtaagcccagatagtggacatacaggcctacactgtccagtagtgacgaccgatataaatatatgcatcttaaagctgagattctaaggcatctagagcacacgactcctgatatcatgaaagccttcagcacttcaggttacaagtataaataggacacgtacctgcacccatcagtgcacccaacttcacatttgaggccaaatcagcttctttgttctctagagagcgggcctcaaaatagcattcttgactaaccatgtcaagggacccactagtagtaggacatgtagtaggtgacattctggacccatttattaaaacagcctcacttaaggttctgtacaacaacaaggaactgaccaatggatctgacctcaagccatcacaagtagcaagtgaaccaagggttgaaattggtgggcgcgacatgaggaacctttacactctggtaagtccataactagttcattacgacattgagcagtattaagtttagttaaagtgaatacaaggtatcagggtaaataaacaatcatatgcctagctgcacaagatctctgtttttataaaactaagtacacaatctcttacttgtaacatctgcttttggagttcatcacctttaattgttttcagtgcccacatagcaatgaaaacaaagaatctcaactttccataagttgtacaattttttttatggattgaaaaggacctctgcacttgcatttaatttcatgcaccatccgtatgttcgacagcatcggcacatgtacctgcatcttgtacatggtgctgactagaataaaaagttatgtcatcaacaactacaggaagtttgaattactatagtaagatgcataaatacatgtcatatgatatgagttttcgcattttagtagtgttatgacgattgacgaagacctttagagacaccagtgtgtagttggattctaaagagcgataataataaaaaaagagacaaagaaaggtcaaaattgacatgaaaaaagacaataaaatgagacttgaaaggataaaatataccaaagatttagtcttaaataggagcgaatgaaaaacagctatctatgtgactgaaccttgatttatggcttcttttgactttcaactctagcctactccaatttacttgggactaaaagactttattgttatatgacgaggttattgtagtagtaacattaaaataagtctgcattagagactttctttttgtgtttgagaaaaaaggctttatttcattcatcagggttaacaggtaccttaaaaaagaatgcctagattgcgctggttaatcaaatagtatctttgtaattctctgaataaaagataaggaagtgtggtaacaatttcagagaacaaatgctaagcacctgctactgaataagggaactattatgtttagttctgagatatttcctcaagataacaagctaacccttgctactaggtgatggtggatccagactccccaagtccaagtaacccaacaaatagagaatatcttcattggtaagtcctggaacttttcacaattattggaaaatactaattctactactttgatgtgacaaatctaaaataaatacatgtcacaggttggtgacagacatcccggaatcagcaaatgctagctatagtgggttcttccattctgtacttctcaatttaagtactccctatgtcccaaaataaaattcgttttaggtatttattggattcacacaatacttgatgtatgtattttatatatgtgtctagatgtatcttcatctatttgaatataaacataaaaatcaagagctaaaacgactactattttggaatggagggagtagttcattacttcaatacttatattagattctaaagtaaatgcatatggtgttcctcaagatgacatgtacatatacctcattgctacacaacaaaaaattggcaagtatatcatctccattttcttgaaaaaatgataatataaaggttaccacagattatgcagcctggacggtaagcagctgcctgtcatgtctacagcacctatcagtgtcagaaaattatttgaattatattgctaaaagttg

SEQ ID NO: 24807 - DNA, 3692 bp, Zea Mays
cagacctacttgcagaaacagaactactttccaaattatttactgaaataccctctccttcactagggtttaggccgttatgcccacctccggcgccccaaaacctccatggccggggcttcaattcccgccgcctcctcgtcccttctttccacctccacctccgtatccctttattggaccacctccaccccatgattagccgccgcgcggcggccacggcagccctacgcgcctctgtgcggcgtgcctgctcttcctcctcccgcgccgccgaccctgacgaccaactgcttggcctcttagaagcccctgagccgcagcgcggaccccgcctctcatccaaggacttcgcctttcttcaggtgcccacccctgtcctccacgccgcggccctcccgccgccggaggctgttcttatatccaaggcgatccgagcctacgcctccgactttgacgggaaggcggagcggttcctgcggcggcaccgggacttcctgaacgacgccgtggtagttgcggtgctcaggtcggtgcgcaccccggagctctgtgtcaggttcttcctttgggccgagcggcaggtgggctacagccacaccggcgcctgctacaacgcgctggcggaagtattgcattttgacgatcgtgctaggaccaccgagaggctgctgagggagattggggaggatgatcgtgaggtactcggcagattgctcaatgtgatagtacggaaatgctgccgccacggagcttgggccaaggcgctggaggagctcgggagactgaaggattttgggtacaggccgtcaggtgcgacctacaatgctctggtccaggtgcttgcaaccgccggacagatggacatgggttttcgtgtgcagaaagagatgtcagagttggggttctgcacggataagttcacagttgggtgctttgcacaggcgctatgtaaggaggggcgatggtctgacgcacttgtcatgatagagcgggaggatttcaaacttgacacagtgttgtgcacccagatgatcagtggactgatggaggcctccctttttgatgaggcaatttcattccttcataggatgcggtgtaactcttgcatccctaatgtggtcacatatagaacactgcttgctggatttttaaaaaagaagcagcttggctggtgcaagaggataatcagcatgatgatgaacgagggttgcaatccaaacccctccttgtttaattctcttgtgcatagttattgcaatgccagggattatccatatgcttataaacttttaaataggatggctggttgtggttgccctcctggctatgtcgtatacaacatttttattggaagcatatgtagtggagaagaattgccaagccctgacttgttggcattggcagaaaaagtttatgaggagatgctggcttctagttgcgttcttaataaggtgaacactgcaaattttgctcgatgcctttgcggtatggggaaatttgataaagcatttcagatcattaagttgatgatgagaaaaggctttgtacctgacacgagcacatactctaaggttgggctcattgaacaggcgaggagctggtttgatgaaatggagagtgtcggctgctccccaagtgtagtaacatacactgccttgcttcatgcttacctcaaaacaaagcaggtacctcaggctagtgacatttttcatagaatggttgatgctggctgtgctcccaataccattacctacagcgcactagttgatggcctctgtaaggcaggtgaaagccaaaaggcttgtgaagtctatgccaaaatgattggaacatctgacaatgtgggatctgatttttactttgaaggcgagcacacagactccattgctccaaatgtggtcacatatggtgcactcatagatggtttgtgtaaggcacacaaggtggttgatgctcaagaattgctagatgttatgtcatcgaatgggtgcgagccaaatcacattatatatgatgcattgattgatggcttttgcaaagttggaaagcttgataatgcacaggaggtattttttaggatgtctaagtgtggctacttgcctacggtgcatacatacacctccttaattgatgcgatgtttaaggacagaaggcttgatctagccattaaagttctctctcaaatgctggagagttcttgcactcctaatgttgtcacttacacagctatgattgatgggctttgcagaataggcgaatgtcaaaaggccttaaagttgttgtcaatgatggaaaagaggggatgcaacccaaatgttgtgacttacacttctctcatagatggattgggaaaatctggtaaagttgatatgagtcttcagctttttacacaaatgatcacacaagggtgtgcccctaattatgttacctacagagttctgataaaccattgctgtgctgctggtcttttggatgaggcacattcactgctaagtgaaatgaagcagacttactggccaaaatatgtgcaaggatactgcagcgtagttcaaggttttagcaagaagttcattgcttctcttggattgttggaggagctggagtcacatggcatggtgtcaatagctcctgtttatgggttgctcattgatagtttctccaaggctggcagactggagaaagccttggagttgcacaaagagatgatggaagtctcatcatcactaaacataaccagcaaggatacatacacttcattgatccaggcactttgtttggcatctcagcttgaaaaagcatttgaattatacagtgaaataacaaggaaaggtgttgtgccagaactaagtgcctttatttgcctcataaaggggctaatcaaagtaaataagtggaatgaagccctgcagttgtgttacagcatgtgtgatgagggtgtgaactggcagagcaacaactcttttgatggaggctagagctttgttttcttacatggttactccagatgaaagcattgtcccataagagcttattttgattggggtgatttggttcaaattcaaaccaaagttattttaatgattcctgttccgaacatcgctctagggagtcattcatttctgacatcttactggaagattacagtatgaagtggttaccaaggagatacggattaaaatgtgcttttgtgcaactcattgatggattgggaaaacagcactatgttttgattaaaactgtatatgttcatatataacctttctgggtgctgaaggataaagtgaagaccttcaaaaaactatgtgcagtcaagctcactcattaatttctgacttaccttcagatggacaaaggatcatctcaatgtctatcaacttctgtatataagttgctgatggttagacacaagggtgaaatatgtggtgaaagagaacttctgaaatccataattctctattcatcagttcagtgattcatccttatagctccttccagtgtttttgctctcgtaatagagcaataaagatatgatgaaatcacaaaaatgtagtcaaatgtactgcagttcactacttcactgtacaaatgtaaaaattacttcaagttaaaatttatttatttaacctgttgatatccggtgatattctatcaaagcaaatcatttcagccattacttttggatcatcaaa

SEQ ID NO: 24808 - DNA, 3860 bp, Zea Mays
cagacctacttgcagaaacagaactactttccaaattatttactgaaataccctctccttcactagggtttaggccgttatgcccacctccggcgccccaaaacctccatggccggggcttcaattcccgccgcctcctcgtcccttctttccacctccacctccgtatccctttattggaccacctccaccccatgattagccgccgcgcggcggccacggcagccctacgcgcctctgtgcggcgtgcctgctcttcctcctcccgcgccgccgaccctgacgaccaactgcttggcctcttagaagcccctgagccgcagcgcggaccccgcctctcatccaaggacttcgcctttcttcaggtgcccacccctgtcctccacgccgcggccctcccgccgccggaggctgttcttatatccaaggcgatccgagcctacgcctccgactttgacgggaaggcggagcggttcctgcggcggcaccgggacttcctgaacgacgccgtggtagttgcggtgctcaggtcggtgcgcaccccggagctctgtgtcaggttcttcctttgggccgagcggcaggtgggctacagccacaccggcgcctgctacaacgcgctggcggaagtattgcattttgacgatcgtgctaggaccaccgagaggctgctgagggagattggggaggatgatcgtgaggtactcggcagattgctcaatgtgatagtacggaaatgctgccgccacggagcttgggccaaggcgctggaggagctcgggagactgaaggattttgggtacaggccgtcaggtgcgacctacaatgctctggtccaggtgcttgcaaccgccggacagatggacatgggttttcgtgtgcagaaagagatgtcagagttggggttctgcacggataagttcacagttgggtgctttgcacaggcgctatgtaaggaggggcgatggtctgacgcacttgtcatgatagagcgggaggatttcaaacttgacacagtgttgtgcacccagatgatcagtggactgatggaggcctccctttttgatgaggcaatttcattccttcataggatgcggtgtaactcttgcatccctaatgtggtcacatatagaacactgcttgctggatttttaaaaaagaagcagcttggctggtgcaagaggataatcagcatgatgatgaacgagggttgcaatccaaacccctccttgtttaattctcttgtgcatagttattgcaatgccagggattatccatatgcttataaacttttaaataggatggctggttgtggttgccctcctggctatgtcgtatacaacatttttattggaagcatatgtagtggagaagaattgccaagccctgacttgttggcattggcagaaaaagtttatgaggagatgctggcttctagttgcgttcttaataaggtgaacactgcaaattttgctcgatgcctttgcggtatggggaaatttgataaagcatttcagatcattaagttgatgatgagaaaaggctttgtacctgacacgagcacatactctaaggtgattacctttttatgtgaggctatgaaggtagaaaaggctttccttttgtttcaagagatgaagagtgttggtgttattcctgatgtttatacatacacaattttgattgatagcttttgtaaggttgggctcattgaacaggcgaggagctggtttgatgaaatggagagtgtcggctgctccccaagtgtagtaacatacactgccttgcttcatgcttacctcaaaacaaagcaggtacctcaggctagtgacatttttcatagaatggttgatgctggctgtgctcccaataccattacctacagcgcactagttgatggcctctgtaaggcaggtgaaagccaaaaggcttgtgaagtctatgccaaaatgattggaacatctgacaatgtgggatctgatttttactttgaaggcgagcacacagactccattgctccaaatgtggtcacatatggtgcactcatagatggtttgtgtaaggcacacaaggtggttgatgctcaagaattgctagatgttatgtcatcgaatgggtgcgagccaaatcacattatatatgatgcattgattgatggcttttgcaaagttggaaagcttgataatgcacaggaggtattttttaggatgtctaagtgtggctacttgcctacggtgcatacatacacctccttaattgatgcgatgtttaaggacagaaggcttgatctagccattaaagttctctctcaaatgctggagagttcttgcactcctaatgttgtcacttacacagctatgattgatgggctttgcagaataggcgaatgtcaaaaggccttaaagttgttgtcaatgatggaaaagaggggatgcaacccaaatgttgtgacttacacttctctcatagatggattgggaaaatctggtaaagttgatatgagtcttcagctttttacacaaatgatcacacaagggtgtgcccctaattatgttacctacagagttctgataaaccattgctgtgctgctggtcttttggatgaggcacattcactgctaagtgaaatgaagcagacttactggccaaaatatgtgcaaggatactgcagcgtagttcaaggttttagcaagaagttcattgcttctcttggattgttggaggagctggagtcacatggcatggtgtcaatagctcctgtttatgggttgctcattgatagtttctccaaggctggcagactggagaaagccttggagttgcacaaagagatgatggaagtctcatcatcactaaacataaccagcaaggatacatacacttcattgatccaggcactttgtttggcatctcagcttgaaaaagcatttgaattatacagtgaaataacaaggaaaggtgttgtgccagaactaagtgcctttatttgcctcataaaggggctaatcaaagtaaataagtggaatgaagccctgcagttgtgttacagcatgtgtgatgagggtgtgaactggcagagcaacaactcttttgatggaggctagagctttgttttcttacatggttactccagatgaaagcattgtcccataagagcttattttgattggggtgatttggttcaaattcaaaccaaagttattttaatgattcctgttccgaacatcgctctagggagtcattcatttctgacatcttactggaagattacagtatgaagtggttaccaaggagatacggattaaaatgtgcttttgtgcaactcattgatggattgggaaaacagcactatgttttgattaaaactgtatatgttcatatataacctttctgggtgctgaaggataaagtgaagaccttcaaaaaactatgtgcagtcaagctcactcattgctgcacgccattttacattgtcagtgggtgatgaccgaagtaatttctgacttaccttcagatggacaaaggatcatctcaatgtctatcaacttctgtatataagttgctgatggttagacacaagggtgaaatatgtggtgaaagagaacttctgaaatccataattctctattcatcagttcagtgattcatccttatagctccttccagtgtttttgctctcgtaatagagcaataaagatatgatgaaatcacaaaaatgtagtcaaatgtactgcagttcactacttcactgtacaaatgtaaaaattacttcaagttaaaatttatttatttaacctgttgatatccggtgatattctatcaaagcaaatcatttcagccattacttttggatcatcaaa

SEQ ID NO: 24809 - DNA, 707 bp, Zea Mays
acagtcgccatcgctcagcacagccgcccagcaacaccctactcgcctcctcgatcgggaaaccgcatacgccgcctcctctcccctttccaccgagctagaaacggctggcacaatagtctctgctattgatggcgctgaagacagccgctgacccttcttcccccccggcgacctctgatcttctcccttctctataaatcgcaagctacgccctccgtggtgccgttccccgccttcatgtgctcgccccacgcctccccttcctgttgcgcgcaaagaacacgccgccgacatctatcctcatcgacactggtgttctcggccaccttccaccgccagaggactgctctgaagacccacatcgatctccgtcgccggtatctagctctgcagcgccgcccgccgccaagccgagctcaacgccgttctttccctctcctattcgacgttgctgcgagaagctgatttcgtggtagaggacctgaactcgtttgaggaagacccacaataaatgtttgagcaagaaggtgaatcagaagactttgacaaagatgttgacgagtattgagtctagcaacgctccggtcatctttctatgggagattgcccatgatatttctgttgtactttgatcatgatactgtttaagactcttaagtctggatgatgtgataaagttattatactctcttttacgcctttat

SEQ ID NO: 24810 - DNA, 1451 bp, Zea Mays
atcaaatgcatcgctctagacagcaaggtcagagaagcaaccaatattagaaccaatagaggaacagttcccaaaccggtcaaaggtctggtggttactgatagggaaatgtgcccttgggcaaattctataagtattttggtgattagatgcccaacacaataaattgagtacttatgtgcgagaagtgcaaatcagagacaaaggtatgtttctagacttggtgaattgtattatgtactaacatagttatccaagtgctagaaatagtgactaaagaagaagagaagaaaaggaaaagagttggctgtgtgcagctaacatcagctcggtttggcacaccggactgtccggtggtgcaccggacagtgtctggtgtgccaggctggccagcggaaaacagtctgctctcgggaaacagcagaggcgtacgactataattcaccggactgtccggtgagccaacagtcgccagcgccaacggtcggctgcgcaatccgcgggcgacgcgtggcccgcagcaacggtcaattgggcacaccggacagtgtacggtgcgccaaccgacgccgaggaccaacagtcggatgcgccagatatggaaggagatcgcgcaccggacagctacagtgactgtccggtggtgcaccggacagtccggtgcaccacctgtggcagaacctcccaagttattgggtccacatgcacctgtccttgtcccaaagacctcagacggctatgcatgtgcaccagataacttaacaggatccgtccgatttccccaaggacatcggataaaccacttacaaccagaaccgcgggattaagtaacacaaatcacacacaacatttttgcagcaaaaatcttattaccaaattttacaggttacaaaaattttacagtattttatcggtgtgattacaaaagtataagtttgaaatatatgctagctcaagtgaccatccttaataagaagataaagacggggtatacttatataagaaggccgagcccaccggcacttaacaccatcaacagcagcacaaaactataacctgaaaaacaacagggaataaaaccctgagtatggaattactcagcaagacttacccgactaaagaaaagactctcaaggatatgctggatttgggaatcaaggagaggctttagcaagaatcaacttagatacttttgtagaaatagcttactaaagtgagtccttactttcaatattttaacgccagattaaatattaatagactctgtttgcatctggtctaatttcaccatctcatcaatacaacatcatttttattcatgaggttcacatcctgacttaggttgtagggcagtgaccaagtcttcataaccgcgaaggtacatcgatccaaatcgatgatactcaactgaggatctccaatcacacgacatatgtagcacttaacccttg

SEQ ID NO: 24811 - DNA, 1120 bp, Zea Mays
gtttaattgaagaaatgttgcaaccatccatttttgttcaacttcagtattcactgtgtaatggtcaaaggataaaactcgatgaatgaagaatgtacaaagagcaaattatggctaattgaccttgctggaagtgaacaggataagctgtgcaggggagctcttagcacatattagaacagtgaagatgtacagttgggagaaactattcactgaacgtttggtggaaagaagagaatcagaagtgaagcatctcgcgacaagaaaatatctggatgcttggtgcgtttatttctgggcaaccacaccgacattgttctccctttccaccttttctatttttgcaataacgggacacgcattggatgctgccacggtatttacttgtgttgcactctttaacacactaatatcaccgctaaactcatttccatgggttattaatgggatgattgatgctgttatctctagcagacgactgagtaattatttatctactccagagcatcactcatccgagttaaatgcctctgctgaccttttaaaccaccactttaagagatattccaaagttggttctggtaaatcatctttattgaacacaatcattggagagactcgtgtcatcagtgggttcaattgcctatgtaccacagaagtaatagaggcatgtgcgcttcatgttgacatattggcaatgaccagaggagatatgtcacatattggagagaaaggtaccaacttatctggtggacaaagagctcgtctagcattggcaagggctttgtaccacaattctgatgtatacttgtttgatgacatccttagcgcggttgactcccaagttgcttcgtgcatcctggaaaaggctattatgggggcaccaactaatgcagaaaacaagattactaagcacacacaatcttcagtaaaacgacagagttctgatggctctgttatgtccgatggccccgggcagccgtcggacataacacaatacgtctgacggctggcagagagactaattggtctactaaagtagctactctgacctgctcaatatgggagacagctatgacagattctgctcttctgaagaagctattttgatcgattttgg

SEQ ID NO: 24812 - DNA, 1653 bp, Zea Mays
atgacccctgaagcagctttggatcatgtacgatccattaggcctcgagtgcttttggcgccctcgcagtggcatgctattagttcatttggagctctcaccggtggacaacttccagtatggagtacgaacttggcctgtttcctagaagccattgaagctggctgtacgaacacaggaaatgatactatagtgcagcaagataacatagataaagagaatgactctgctatgaaattagacgtttccagttccatggaaaaaccttcaggccaggggccagaggagtctatccttgagagcgattgtattggtgatgtccccatagaatgtgataaacatggtgatagtgaaccattgagcatggaaggcaaaatcatttctggcaatgtgaatgtgaagaaccaaatatcgagggaggatctaaaagaagcattcaaaaattttggaactgtccggatgcgccaacagagtgaaaccctaggaaaacatgccatgcactttcttgctggttatatttccatgttttctacacagggtccttttcagacagggataacacggggagctcttagcacatattagaacagtgaagatgtacagttgggagaaactattcactgaacgtttggtggaaagaagagaatcagaagtgaagcatctcgcgacaagaaaatatctggatgcttggtgcgtttatttctgggcaaccacaccgacattgttctccctttccaccttttctatttttgcaataacgggacacgcattggatgctgccacggtatttacttgtgttgcactctttaacacactaatatcaccgctaaactcatttccatgggttattaatgggatgattgatgctgttatctctagcagacgactgagtaattatttatctactccagagcatcactcatccgagttaaatgcctctgctgaccttttaaaccaccactttaagagatattccaaagttggttctggtaaatcatctttattgaacacaatcattggagagactcgtgtcatcagtgggttcaattgcctatgtaccacaggtaccatggattttatctggctttttacgagataatattttgcttggtaaagaatttgatccaaggagaggagatatgtcacatattggagagaaaggtaccaacttatctggtggacaaagagctcgtctagcattggcaagggctttgtaccacaattctgatgtatacttgtttgatgacatccttagcgcggttgactcccaagttgcttcgtgcatcctggaaaaggctattatgggggcaccaactaatgcagaaaacaagattactaagcacacacaatcttcagtaattgttgctaggccgagggaagtagctactttgacctgctcaatatgggagacaactatgacagattctgctcttctgaatcctaaaatgacggtgcattacagtaaaacgacagagttctgatggctctgttatgtccgatggccccgggcagccgtcggacataacacaatacgtctgacggctggcagagagactaattggtctactaaagtagctactctgacctgctcaatatgggagacagctatgacagattctgctcttctgaagaagctattttgatcgattttgg

SEQ ID NO: 24813 - DNA, 1813 bp, Zea Mays
atgacccctgaagcagctttggatcatgtacgatccattaggcctcgagtgcttttggcgccctcgcagtggcatgctattagttcatttggagctctcaccggtggacaacttccagtatggagtacgaacttggcctgtttcctagaagccattgaagctggctgtacgaacacaggaaatgatactatagtgcagcaagataacatagataaagagaatgactctgctatgaaattagacgtttccagttccatggaaaaaccttcaggccaggggccagaggagtctatccttgagagcgattgtattggtgatgtccccatagaatgtgataaacatggtgatagtgaaccattgagcatggaaggcaaaatcatttctggcaatgtgaatgtgaagaaccaaatatcgagggaggatctaaaagaagcattcaaaaattttggaactgtccggatgcgccaacagagtgaaaccctaggaaaacatgccatgcactttcttgctggttatatttccatgttttctacacagggtccttttcagacagggataacacggataagctgtgcaggggagctcttagcacatattagaacagtgaagatgtacagttgggagaaactattcactgaacgtttggtggaaagaagagaatcagaagtgaagcatctcgcgacaagaaaatatctggatgcttggtgcgtttatttctgggcaaccacaccgacattgttctccctttccaccttttctatttttgcaataacgggacacgcattggatgctgccacggtatttacttgtgttgcactctttaacacactaatatcaccgctaaactcatttccatgggttattaatgggatgattgatgctgttatctctagcagacgactgagtaattatttatctactccagagcatcactcatccgagttaaatgcctctgctgaccttttaaaccaccactttaagagatattccaaagttggttctggtaaatcatctttattgaacacaatcattggagagactcgtgtcatcagtgggttcaattgcctatgtaccacaggtaccatggattttatctggctttttacgagataatattttgcttggtaaagaatttgatccaaggagaggagatatgtcacatattggagagaaaggtaccaacttatctggtggacaaagagctcgtctagcattggcaagggctttgtaccacaattctgatgtatacttgtttgatgacatccttagcgcggttgactcccaagttgcttcgtgcatcctggaaaaggctattatgggggcaccaactaatgcagaaaacaagattactaagcacacacaatcttcaggtagttttcactgaatcttgtccaaaaaaaaactacaccacattggtattaaatgtatgaatcgtccttttcccctctattcaacttttgttatagaggctcgacatgattttaataaggtgcgttcacattttatgttttctaagtaattgttgctaggccgagggaagtagctactttgacctgctcaatatgggagacaactatgacagattctgctcttctgaatcctaaaatgacggtgcattacagtaaaacgacagagttctgatggctctgttatgtccgatggccccgggcagccgtcggacataacacaatacgtctgacggctggcagagagactaattggtctactaaagtagctactctgacctgctcaatatgggagacagctatgacagattctgctcttctgaagaagctattttgatcgattttgg

SEQ ID NO: 24814 - DNA, 1606 bp, Zea Mays
catgacccctgaagcagctttggatcatgtacgatccattaggcctcgagtgcttttggcgccctcgcagtggctattagttcatttggagctctcaccggtggacaacttccagtatggagtacgaacttggcctgtttcctagaagccattgaagctggctgtacgaacacaggaaatgatactatagtgcagcaagataacatagataaagagaatgactctgctatgaaattagacgtttccagttccatggaaaaaccttcaggccaggggccagaggagtctatccttgagagcgatgttattatgcaagggatgtcttcagatgacatgaccaaagagaaagatctaaacattggggaagctacataatctgagaagtgtattggtgatgtccccatagaatgtgataaacatggtgatagtgaaccattgagcatggaaggcaaaatcatttctggcaatgtgaatgtgaagaaccaaatatcgagggaggatctaaaagaagcattcaaaaattttggaactgtccggatgcgccaacagagtgaaaccctaggaaaacatgccatgcactttcttgctggttatatttccatgttttctacacagggtccttttcagacagggataacacggggagctcttagcacatattagaacagtgaagatgtacagttgggagaaactattcactgaacgtttggtggaaagaagagaatcagaagtgaagcatctcgcgacaagaaaatatctggatgcttggtgcgtttatttctgggcaaccacaccgacattgttctccctttccaccttttctatttttgcaataacgggacacgcattggatgctgccacggtatttacttgtgttgcactctttaacacactaatatcaccgctaaactcatttccatgggttattaatgggatgattgatgctgttatctctagcagacgactgagtaattatttatctactccagagcatcactcatccgagttaaatgcctctgctgaccttttaaaccaccactttaagagatattccaaagttggttctggtaaatcatctttattgaacacaatcattggagagactcgtgtcatcagtgggttcaattgcctatgtaccacagaagtaatagaggcatgtgcgcttcatgttgacatattggcaatgaccagaggagatatgtcacatattggagagaaaggtaccaacttatctggtggacaaagagctcgtctagcattggcaagggctttgtaccacaattctgatgtatacttgtttgatgacatccttagcgcggttgactcccaagttgcttcgtgcatcctggaaaaggctattatgggggcaccaactaatgcagaaaacaagattactaagcacacacaatcttcagtaaaacgacagagttctgatggctctgttatgtccgatggccccgggcagccgtcggacataacacaatacgtctgacggctggcagagagactaattggtctactaaagtagctactctgacctgctcaatatgggagacagctatgacagattctgctcttctgaagaagctattttgatcgattttgg

SEQ ID NO: 24815 - DNA, 1788 bp, Zea Mays
aatacaggaacatgacccctgaagcagctttggatcatgtacgatccattaggcctcgagtgcttttggcgccctcgcagtggcatgctattagttcatttggagctctcaccggtggacaacttccagtatggagtacgaacttggcctgtttcctagaagccattgaagctggctgtacgaacacaggaaatgatactatagtgcagcaagataacatagataaagagaatgactctgctatgaaattagacgtttccagttccatggaaaaaccttcaggccaggggccagaggagtctatccttgagagcgatgttattatgcaagggatgtcttcagatgacatgaccaaagagaaagatctaaacattggggaagctacataatctgagaagtgtattggtgatgtccccatagaatgtgataaacatggtgatagtgaaccattgagcatggaaggcaaaatcatttctggcaatgtgaatgtgaagaaccaaatatcgagggaggatctaaaagaagcattcaaaaattttggaactgtccggatgcgccaacagagtgaaaccctaggaaaacatgccatgcactttcttgctggttatatttccatgttttctacacagggtccttttcagacagggataacacggataagctgtgcaggggagctcttagcacatattagaacagtgaagatgtacagttgggagaaactattcactgaacgtttggtggaaagaagagaatcagaagtgaagcatctcgcgacaagaaaatatctggatgcttggtgcgtttatttctgggcaaccacaccgacattgttctccctttccaccttttctatttttgcaataacgggacacgcattggatgctgccacggtatttacttgtgttgcactctttaacacactaatatcaccgctaaactcatttccatgggttattaatgggatgattgatgctgttatctctagcagacgactgagtaattatttatctactccagagcatcactcatccgagttaaatgcctctgctgaccttttaaaccaccactttaagagatattccaaagtaactcataatccaatggccatcatctttcagaatgtatcctgttcttggtctagcagctctgttgctgaactgaacatagttctcagagatatatctttgcagctacaaaagggctctttattgcaattgtaggttggttctggtaaatcatctttattgaacacaatcattggagagactcgtgtcatcagtgggttcaattgcctatgtaccacaggtaccatggattttatctggctttttacgagataatattttgcttggtaaagaatttgatccaaggagaggagatatgtcacatattggagagaaaggtaccaacttatctggtggacaaagagctcgtctagcattggcaagggctttgtaccacaattctgatgtatacttgtttgatgacatccttagcgcggttgactcccaagttgcttcgtgcatcctggaaaaggctattatgggggcaccaactaatgcagaaaacaagattactaagcacacacaatcttcagtaaaacgacagagttctgatggctctgttatgtccgatggccccgggcagccgtcggacataacacaatacgtctgacggctggcagagagactaattggtctactaaagtagctactctgacctgctcaatatgggagacagctatgacagattctgctcttctgaagaagctattttgatcgattttgg

SEQ ID NO: 24816 - DNA, 2036 bp, Zea Mays
aatacaggaacatgacccctgaagcagctttggatcatgtacgatccattaggcctcgagtgcttttggcgccctcgcagtggcatgctattagttcatttggagctctcaccggtggacaacttccagtatggagtacgaacttggcctgtttcctagaagccattgaagctggctgtacgaacacaggaaatgatactatagtgcagcaagataacatagataaagagaatgactctgctatgaaattagacgtttccagttccatggaaaaaccttcaggccaggggccagaggagtctatccttgagagcgatgttattatgcaagggatgtcttcagatgacatgaccaaagagaaagatctaaacattggggaagctacataatctgagaagtgtattggtgatgtccccatagaatgtgataaacatggtgatagtgaaccattgagcatggaaggcaaaatcatttctggcaatgtgaatgtgaagaaccaaatatcgagggaggatctaaaagaagcattcaaaaattttggaactgtccggatgcgccaacagagtgaaaccctaggaaaacatgccatgcactttcttgctggttatatttccatgttttctacacagggtccttttcagacagggataacacggataagctgtgcaggggagctcttagcacatattagaacagtgaagatgtacagttgggagaaactattcactgaacgtttggtggaaagaagagaatcagaagtgaagcatctcgcgacaagaaaatatctggatgcttggtgcgtttatttctgggcaaccacaccgacattgttctccctttccaccttttctatttttgcaataacgggacacgcattggatgctgccacggtatttacttgtgttgcactctttaacacactaatatcaccgctaaactcatttccatgggttattaatgggatgattgatgctgttatctctagcagacgactgagtaattatttatctactccagagcatcactcatccgagttaaatgcctctgctgaccttttaaaccaccactttaagagatattccaaagtaactcataatccaatggccatcatctttcagaatgtatcctgttcttggtctagcagctctgttgctgaactgaacatagttctcagagatatatctttgcagctacaaaagggctctttattgcaattgttggttctggtaaatcatctttattgaacacaatcattggagagactcgtgtcatcagtgggttcaattgcctatgtaccacaggtaccatggattttatctggctttttacgagataatattttgcttggtaaagaatttgatccaaggagaggagatatgtcacatattggagagaaaggtaccaacttatctggtggacaaagagctcgtctagcattggcaagggctttgtaccacaattctgatgtatacttgtttgatgacatccttagcgcggttgactcccaagttgcttcgtgcatcctggaaaaggctattatgggggcaccaactaatgcagaaaacaagattactaagcacacacaatcttcaggtagttttcactgaatcttgtccaaaaaaaaactacaccacattggtattaaatgtatgaatcgtccttttcccctctattcaacttttgttatagaggctcgacatgattttaataaggtgcgttcacattttatgttttctaagtaattgttgctaggccgagggaagtagctactttgacctgctcaatatgggagacaactatgacagattctgctcttctgaatcctaaaatgacggtgcattacagtaaaacgacagagttctgatggctctgttatgtccgatggccccgggcagccgtcggacataacacaatacgtctgacggctggcagagagactaattggtctactaaagtagctactctgacctgctcaatatgggagacagctatgacagattctgctcttctgaagaagctattttgatcgattttgg

SEQ ID NO: 24817 - DNA, 1949 bp, Zea Mays
attaaatacaggaacatgacccctgaagcagctttggatcatgtacgatccattaggcctcgagtgcttttggcgccctcgcagtggcatgctattagttcatttggagctctcaccggtggacaacttccagtatggagtacgaacttggcctgtttcctagaagccattgaagctggctgtacgaacacaggaaatgatactatagtgcagcaagataacatagataaagagaatgactctgctatgaaattagacgtttccagttccatggaaaaaccttcaggccaggggccagaggagtctatccttgagagcgattgtattggtgatgtccccatagaatgtgataaacatggtgatagtgaaccattgagcatggaaggcaaaatcatttctggcaatgtgaatgtgaagaaccaaatatcgagggaggatctaaaagaagcattcaaaaattttggaactgtccggatgcgccaacagagtgaaaccctaggaaaacatgccatgcactttcttgctggttatatttccatgttttctacacagggtccttttcagacagggataacacggggagctcttagcacatattagaacagtgaagatgtacagttgggagaaactattcactgaacgtttggtggaaagaagagaatcagaagtgaagcatctcgcgacaagaaaatatctggatgcttggtgcgtttatttctgggcaaccacaccgacattgttctccctttccaccttttctatttttgcaataacgggacacgcattggatgctgccacggtatttacttgtgttgcactctttaacacactaatatcaccgctaaactcatttccatgggttattaatgggatgattgatgctgttatctctagcagacgactgagtaattatttatctactccagagcatcactcatccgagttaaatgcctctgctgaccttttaaaccaccactttaagagatattccaaagtaactcataatccaatggccatcatctttcagaatgtatcctgttcttggtctagcagctctgttgctgaactgaacatagttctcagagatatatctttgcagctacaaaagggctctttattgcaattgtaggttggttctggtaaatcatctttattgaacacaatcattggagagactcgtgtcatcagtgggttcaattgcctatgtaccacaggtaccatggattttatctggctttttacgagataatattttgcttggtaaagaatttgatccaaggagaggagatatgtcacatattggagagaaaggtaccaacttatctggtggacaaagagctcgtctagcattggcaagggctttgtaccacaattctgatgtatacttgtttgatgacatccttagcgcggttgactcccaagttgcttcgtgcatcctggaaaaggctattatgggggcaccaactaatgcagaaaacaagattactaagcacacacaatcttcaggtagttttcactgaatcttgtccaaaaaaaaactacaccacattggtattaaatgtatgaatcgtccttttcccctctattcaacttttgttatagaggctcgacatgattttaataaggtgcgttcacattttatgttttctaagtaattgttgctaggccgagggaagtagctactttgacctgctcaatatgggagacaactatgacagattctgctcttctgaatcctaaaatgacggtgcattacagtaaaacgacagagttctgatggctctgttatgtccgatggccccgggcagccgtcggacataacacaatacgtctgacggctggcagagagactaattggtctactaaagtagctactctgacctgctcaatatgggagacagctatgacagattctgctcttctgaagaagctattttgatcgattttgg

SEQ ID NO: 24818 - DNA, 2050 bp, Zea Mays
gttgctcctgcacttggcacccttgcggagattaaatacaggaacatgacccctgaagcagctttggatcatgtacgatccattaggcctcgagtgcttttggcgccctcgcagtggcatgctattagttcatttggagctctcaccggtggacaacttccagtatggagtacgaacttggcctgtttcctagaagccattgaagctggctgtacgaacacaggaaatgatactatagtgcagcaagataacatagataaagagaatgactctgctatgaaattagacgtttccagttccatggaaaaaccttcaggccaggggccagaggagtctatccttgagagcgatgttattatgcaagggatgtcttcagatgacatgaccaaagagaaagatctaaacattggggaagctacataatctgagaagtgtattggtgatgtccccatagaatgtgataaacatggtgatagtgaaccattgagcatggaaggcaaaatcatttctggcaatgtgaatgtgaagaaccaaatatcgagggaggatctaaaagaagcattcaaaaattttggaactgtccggatgcgccaacagagtgaaaccctaggaaaacatgccatgcactttcttgctggttatatttccatgttttctacacagggtccttttcagacagggataacacggataagctgtgcaggggagctcttagcacatattagaacagtgaagatgtacagttgggagaaactattcactgaacgtttggtggaaagaagagaatcagaagtgaagcatctcgcgacaagaaaatatctggatgcttggtgcgtttatttctgggcaaccacaccgacattgttctccctttccaccttttctatttttgcaataacgggacacgcattggatgctgccacggtatttacttgtgttgcactctttaacacactaatatcaccgctaaactcatttccatgggttattaatgggatgattgatgctgttatctctagcagacgactgagtaattatttatctactccagagcatcactcatccgagttaaatgcctctgctgaccttttaaaccaccactttaagagatattccaaagtaactcataatccaatggccatcatctttcagaatgtatcctgttcttggtctagcagctctgttgctgaactgaacatagttctcagagatatatctttgcagctacaaaagggctctttattgcaattgtaggtgaggttggttctggtaaatcatctttattgaacacaatcattggagagactcgtgtcatcagtgggttcaattgcctatgtaccacaggtaccatggattttatctggctttttacgagataatattttgcttggtaaagaatttgatccaaggaggtagtttatctgtctctgacatacattaccacaagtttgtttcattatgtcattgcatggcattaaagcagctatcatgattcatgaactattggagatgctcatacaccatagaatttattgcttccccttttaattagcattctgcattacaaaatcaatgcatatacgaagaagtaatagaggcatgtgcgcttcatgttgacatattggcaatgaccagaggagatatgtcacatattggagagaaaggtaccaacttatctggtggacaaagagctcgtctagcattggcaagggctttgtaccacaattctgatgtatacttgtttgatgacatccttagcgcggttgactcccaagttgcttcgtgcatcctggaaaaggctattatgggggcaccaactaatgcagaaaacaagattactaagcacacacaatcttcagtaaaacgacagagttctgatggctctgttatgtccgatggccccgggcagccgtcggacataacacaatacgtctgacggctggcagagagactaattggtctactaaagtagctactctgacctgctcaatatgggagacagctatgacagattctgctcttctgaagaagctattttgatcgattttgg

SEQ ID NO: 24819 - DNA, 2112 bp, Zea Mays
gacaagcaacattttggcagggcggtagtgtaacacatggcttgtttctggcctagtgtcacatggcccaacccatggcccaactcggaagatgggtacaagagcagcatcagagaaatgaggaagcagagaagaaaagaatcgaatcttattcccttctgtcgctgtcttccgtacggaggcgcgattcagctcgccaacgctcgacggcggccgtgcggtgcgctcatgtctcggtggtggctcaccggaggctacgggccatcacaattagttacgacttacgacggagacccaaactgtagcgcgtcctggaatcatatcgacgacggataccgctaccgcgcatcctggaatcaaaaaagacgtcgacgactgcgagtgcgttggcacttggcagtggcacgggcgcgggcagtggcgccgatgtcgtcagcgctttccacggcagcacgaagtggacgggcttgcagcaaacggggcagcgcatgcggttctcgcggagccagtcgtccatgttgctcctgcacttggcacccttgcggagattaaatacaggaacatgacccctgaagcagctttggatcatgtacgatccattaggcctcgagtgcttttggcgccctcgcagtggcatgctattagttcatttggagctctcaccggtggacaacttccagtatggagtacgaacttggcctgtttcctagaagccattgaagctggctgtacgaacacaggaaatgatactatagtgcagcaagataacatagataaagagaatgactctgctatgaaattagacgtttccagttccatggaaaaaccttcaggccaggggccagaggagtctatccttgagagcgattgtattggtgatgtccccatagaatgtgataaacatggtgatagtgaaccattgagcatggaaggcaaaatcatttctggcaatgtgaatgtgaagaaccaaatatcgagggaggatctaaaagaagcattcaaaaattttggaactgtccggatgcgccaacagagtgaaaccctaggaaaacatgccatgcactttcttgctggttatatttccatgttttctacacagggtccttttcagacagggataacacggataagctgtgcaggggagctcttagcacatattagaacagtgaagatgtacagttgggagaaactattcactgaacgtttggtggaaagaagagaatcagaagtgaagcatctcgcggtatttacttgtgttgcactctttaacacactaatatcaccgctaaactcatttccatgggttattaatgggatgattgatgctgttatctctagcagacgactgagtaattatttatctactccagagcatcactcatccgagttaaatgcctctgctgaccttttaaaccaccactttaagagatattccaaagttggttctggtaaatcatctttattgaacacaatcattggagagactcgtgtcatcagtgggttcaattgcctatgtaccacaggtaccatggattttatctggctttttacgagataatattttgcttggtaaagaatttgatccaaggagaggagatatgtcacatattggagagaaaggtaccaacttatctggtggacaaagagctcgtctagcattggcaagggctttgtaccacaattctgatgtatacttgtttgatgacatccttagcgcggttgactcccaagttgcttcgtgcatcctggaaaaggctattatgggggcaccaactaatgcagaaaacaagattactaagcacacacaatcttcagtaattgttgctaggccgagggaagtagctactttgacctgctcaatatgggagacaactatgacagattctgctcttctgaatcctaaaatgacggtgcattacagtaaaacgacagagttctgatggctctgttatgtccgatggccccgggcagccgtcggacataacacaatacgtctgacggctggcagagagactaattggtctactaaagtagctactctgacctgctcaatatgggagacagctatgacagattctgctcttctgaagaagctattttgatcgattttgg

SEQ ID NO: 24820 - DNA, 2277 bp, Zea Mays
gacaagcaacattttggcagggcggtagtgtaacacatggcttgtttctggcctagtgtcacatggcccaacccatggcccaactcggaagatgggtacaagagcagcatcagagaaatgaggaagcagagaagaaaagaatcgaatcttattcccttctgtcgctgtcttccgtacggaggcgcgattcagctcgccaacgctcgacggcggccgtgcggtgcgctcatgtctcggtggtggctcaccggaggctacgggccatcacaattagttacgacttacgacggagacccaaactgtagcgcgtcctggaatcatatcgacgacggataccgctaccgcgcatcctggaatcaaaaaagacgtcgacgactgcgagtgcgttggcacttggcagtggcacgggcgcgggcagtggcgccgatgtcgtcagcgctttccacggcagcacgaagtggacgggcttgcagcaaacggggcagcgcatgcggttctcgcggagccagtcgtccatgttgctcctgcacttggcacccttgcggagattaaatacaggaacatgacccctgaagcagctttggatcatgtacgatccattaggcctcgagtgcttttggcgccctcgcagtggcatgctattagttcatttggagctctcaccggtggacaacttccagtatggagtacgaacttggcctgtttcctagaagccattgaagctggctgtacgaacacaggaaatgatactatagtgcagcaagataacatagataaagagaatgactctgctatgaaattagacgtttccagttccatggaaaaaccttcaggccaggggccagaggagtctatccttgagagcgatgttattatgcaagggatgtcttcagatgacatgaccaaagagaaagatctaaacattggggaagctacataatctgagaagtgtattggtgatgtccccatagaatgtgataaacatggtgatagtgaaccattgagcatggaaggcaaaatcatttctggcaatgtgaatgtgaagaaccaaatatcgagggaggatctaaaagaagcattcaaaaattttggaactgtccggatgcgccaacagagtgaaaccctaggaaaacatgccatgcactttcttgctggttatatttccatgttttctacacagggtccttttcagacagggataacacggggagctcttagcacatattagaacagtgaagatgtacagttgggagaaactattcactgaacgtttggtggaaagaagagaatcagaagtgaagcatctcgcgacaagaaaatatctggatgcttggtgcgtttatttctgggcaaccacaccgacattgttctccctttccaccttttctatttttgcaataacgggacacgcattggatgctgccacggtatttacttgtgttgcactctttaacacactaatatcaccgctaaactcatttccatgggttattaatgggatgattgatgctgttatctctagcagacgactgagtaattatttatctactccagagcatcactcatccgagttaaatgcctctgctgaccttttaaaccaccactttaagagatattccaaagttggttctggtaaatcatctttattgaacacaatcattggagagactcgtgtcatcagtgggttcaattgcctatgtaccacagaagtaatagaggcatgtgcgcttcatgttgacatattggcaatgaccagaggagatatgtcacatattggagagaaaggtaccaacttatctggtggacaaagagctcgtctagcattggcaagggctttgtaccacaattctgatgtatacttgtttgatgacatccttagcgcggttgactcccaagttgcttcgtgcatcctggaaaaggctattatgggggcaccaactaatgcagaaaacaagattactaagcacacacaatcttcagtaattgttgctaggccgagggaagtagctactttgacctgctcaatatgggagacaactatgacagattctgctcttctgaatcctaaaatgacggtgcattacagtaaaacgacagagttctgatggctctgttatgtccgatggccccgggcagccgtcggacataacacaatacgtctgacggctggcagagagactaattggtctactaaagtagctactctgacctgctcaatatgggagacagctatgacagattctgctcttctgaagaagctattttgatcgattttgg

SEQ ID NO: 24821 - DNA, 2104 bp, Zea Mays
gacaagcaacattttggcagggcggtagtgtaacacatggcttgtttctggcctagtgtcacatggcccaacccatggcccaactcggaagatgggtacaagagcagcatcagagaaatgaggaagcagagaagaaaagaatcgaatcttattcccttctgtcgctgtcttccgtacggaggcgcgattcagctcgccaacgctcgacggcggccgtgcggtgcgctcatgtctcggtggtggctcaccggaggctacgggccatcacaattagttacgacttacgacggagacccaaactgtagcgcgtcctggaatcatatcgacgacggataccgctaccgcgcatcctggaatcaaaaaagacgtcgacgactgcgagtgcgttggcacttggcagtggcacgggcgcgggcagtggcgccgatgtcgtcagcgctttccacggcagcacgaagtggacgggcttgcagcaaacggggcagcgcatgcggttctcgcggagccagtcgtccatgttgctcctgcacttggcacccttgcggagattaaatacaggaacatgacccctgaagcagctttggatcatgtacgatccattaggcctcgagtgcttttggcgccctcgcagtggcatgctattagttcatttggagctctcaccggtggacaacttccagtatggagtacgaacttggcctgtttcctagaagccattgaagctggctgtacgaacacaggaaatgatactatagtgcagcaagataacatagataaagagaatgactctgctatgaaattagacgtttccagttccatggaaaaaccttcaggccaggggccagaggagtctatccttgagagcgattgtattggtgatgtccccatagaatgtgataaacatggtgatagtgaaccattgagcatggaaggcaaaatcatttctggcaatgtgaatgtgaagaaccaaatatcgagggaggatctaaaagaagcattcaaaaattttggaactgtccggatgcgccaacagagtgaaaccctaggaaaacatgccatgcactttcttgctggttatatttccatgttttctacacagggtccttttcagacagggataacacggataagctgtgcaggggagctcttagcacatattagaacagtgaagatgtacagttgggagaaactattcactgaacgtttggtggaaagaagagaatcagaagtgaagcatctcgcgacaagaaaatatctggatgcttggtgcgtttatttctgggcaaccacaccgacattgttctccctttccaccttttctatttttgcaataacgggacacgcattggatgctgccacggtatttacttgtgttgcactctttaacacactaatatcaccgctaaactcatttccatgggttattaatgggatgattgatgctgttatctctagcagacgactgagtaattatttatctactccagagcatcactcatccgagttaaatgcctctgctgaccttttaaaccaccactttaagagatattccaaagttggttctggtaaatcatctttattgaacacaatcattggagagactcgtgtcatcagtgggttcaattgcctatgtaccacagaagtaatagaggcatgtgcgcttcatgttgacatattggcaatgaccagaggagatatgtcacatattggagagaaaggtaccaacttatctggtggacaaagagctcgtctagcattggcaagggctttgtaccacaattctgatgtatacttgtttgatgacatccttagcgcggttgactcccaagttgcttcgtgcatcctggaaaaggctattatgggggcaccaactaatgcagaaaacaagattactaagcacacacaatcttcagtaaaacgacagagttctgatggctctgttatgtccgatggccccgggcagccgtcggacataacacaatacgtctgacggctggcagagagactaattggtctactaaagtagctactctgacctgctcaatatgggagacagctatgacagattctgctcttctgaagaagctattttgatcgattttgg

SEQ ID NO: 24822 - DNA, 2888 bp, Zea Mays
atggcttgtttctggcatggtgtcacatggcccaacccacggcccaactcggaagatgggtacaagagcagcatcagagaaatgaggaagcagagaagaaaagaatcggatcttattcccttctgtcgccgtcttcaggcgcgattcagctcgccaacgctcgacggcggccctgcggtgcgctcacgtcccggtggtggctcaccggaggctacggccccatcacagatggtattcagagccgttccaatccctggagaaattttttgccatcctaccctaccctatttctctctcgattccgctcaaatccgagcagtcgggagaaccatattcgaccgggagctgttccacgtcgacctcgacgatgcacccgtcttcgacgccgacactgacaacctcagcgtcgaacccatctttgacgacgtggtgttcgaggacattgagcccaacttcgacgacctcgatgacgagcccctcttcgacaccaagttcgacgagctcgacaagggatcagtattcgacactgagtcgatccccgaccatgtcgccgtctccgtgttcgagttcgtcaggccggagtatgatgctgagctcaccgtcttcgacaccgactcggacagcctcaacgacctgccggtagtcgacatggggccggtccatgacgccgagctcgccgtgttcaaccaaggaaacgacggctcctcgactgcacacaccggcgtcctcgacgggcaccctgtctttgacgtggagctcgtatttgatgaggagcctctcatcgaaatcgattgcagcatctttaacactaatgcgcccttcatgtgtttgacagattgtctgagctacgtcgatgacatggtgtctgctacttttaaggaggggcatatctttgataaggagactgtagtagaagcagtacagaaggaaagtggcagggattactatactgctcacgattaaatacaggaacatgacccctgaagcagctttggatcatgtacgatccattaggcctcgagtgcttttggcgccctcgcagtggcatgctattagttcatttggagctctcaccggtggacaacttccagtatggagtacgaacttggcctgtttcctagaagccattgaagctggctgtacgaacacaggaaatgatactatagtgcagcaagataacatagataaagagaatgactctgctatgaaattagacgtttccagttccatggaaaaaccttcaggccaggggccagaggagtctatccttgagagcgatgttattatgcaagggatgtcttcagatgacatgaccaaagagaaagatctaaacattggggaagctacataatctgagaagtgtattggtgatgtccccatagaatgtgataaacatggtgatagtgaaccattgagcatggaaggcaaaatcatttctggcaatgtgaatgtgaagaaccaaatatcgagggaggatctaaaagaagcattcaaaaattttggaactgtccggatgcgccaacagagtgaaaccctaggaaaacatgccatgcactttcttgctggttatatttccatgttttctacacagggtccttttcagacagggataacacggataagctgtgcaggggagctcttagcacatattagaacagtgaagatgtacagttgggagaaactattcactgaacgtttggtggaaagaagagaatcagaagtgaagcatctcgcgacaagaaaatatctggatgcttggtgcgtttatttctgggcaaccacaccgacattgttctccctttccaccttttctatttttgcaataacgggacacgcattggatgctgccacggtatttacttgtgttgcactctttaacacactaatatcaccgctaaactcatttccatgggttattaatgggatgattgatgctgttatctctagcagacgactgagtaattatttatctactccagagcatcactcatccgaaatgtatcctgttcttggtctagcagctctgttgctgaactgaacatagttctcagagatatatctttgcagctacaaaagggctctttattgcaattgtaggttggttctggtaaatcatctttattgaacacaatcattggagagactcgtgtcatcagtgggttcaattgcctatgtaccacaggtaccatggattttatctggctttttacgagataatattttgcttggtaaagaatttgatccaaggaggtagtttatctgtctctgacatacattaccacaagtttgtttcattatgtcattgcatggcattaaagcagctatcatgattcatgaactattggagatgctcatacaccatagaatttattgcttccccttttaattagcattctgcattacaaaatcaatgcatatacgaagaagtaatagaggcatgtgcgcttcatgttgacatattggcaatgaccagaggagatatgtcacatattggagagaaaggtaccaacttatctggtggacaaagagctcgtctagcattggcaagggctttgtaccacaattctgatgtatacttgtttgatgacatccttagcgcggttgactcccaagttgcttcgtgcatcctggaaaaggctattatgggggcaccaactaatgcagaaaacaagattactaagcacacacaatcttcagtaaaacgacagagttctgatggctctgttatgtccgatggccccgggcagccgtcggacataacacaatacgtctgacggctggcagagagactaattggtctactaaagtagctactctgacctgctcaatatgggagacagctatgacagattctgctcttctgaagaagctattttgatcgattttgg

SEQ ID NO: 24823 - DNA, 2760 bp, Zea Mays
atggcttgtttctggcatggtgtcacatggcccaacccacggcccaactcggaagatgggtacaagagcagcatcagagaaatgaggaagcagagaagaaaagaatcggatcttattcccttctgtcgccgtcttcaggcgcgattcagctcgccaacgctcgacggcggccctgcggtgcgctcacgtcccggtggtggctcaccggaggctacggccccatcacagatggtattcagagccgttccaatccctggagaaattttttgccatcctaccctaccctatttctctctcgattccgctcaaatccgagcagtcgggagaaccatattcgaccgggagctgttccacgtcgacctcgacgatgcacccgtcttcgacgccgacactgacaacctcagcgtcgaacccatctttgacgacgtggtgttcgaggacattgagcccaacttcgacgacctcgatgacgagcccctcttcgacaccaagttcgacgagctcgacaagggatcagtattcgacactgagtcgatccccgaccatgtcgccgtctccgtgttcgagttcgtcaggccggagtatgatgctgagctcaccgtcttcgacaccgactcggacagcctcaacgacctgccggtagtcgacatggggccggtccatgacgccgagctcgccgtgttcaaccaaggaaacgacggctcctcgactgcacacaccggcgtcctcgacgggcaccctgtctttgacgtggagctcgtatttgatgaggagcctctcatcgaaatcgattgcagcatctttaacactaatgcgcccttcatgtgtttgacagattgtctgagctacgtcgatgacatggtgtctgctacttttaaggaggggcatatctttgataaggagactgtagtagaagcagtacagaaggaaagtggcagggattactatactgctcacggcggtactacatatgttcattgtaaagctggaagaggacgaagcaccactattgtattgtgctacttggtaggatgaactgcatttgttgttgcaactcagtacgcatgctcctgttcaatttcctgataatccttgtgttgcagattaaatacaggaacatgacccctgaagcagctttggatcatgtacgatccattaggcctcgagtgcttttggcgccctcgcagtggcatgctattagttcatttggagctctcaccggtggacaacttccagtatggagtacgaacttggcctgtttcctagaagccattgaagctggctgtacgaacacaggaaatgatactatagtgcagcaagataacatagataaagagaatgactctgctatgaaattagacgtttccagttccatggaaaaaccttcaggccaggggccagaggagtctatccttgagagcgatgttattatgcaagggatgtcttcagatgacatgaccaaagagaaagatctaaacattggggaagctacataatctgagaagtgtattggtgatgtccccatagaatgtgataaacatggtgatagtgaaccattgagcatggaaggcaaaatcatttctggcaatgtgaatgtgaagaaccaaatatcgagggaggatctaaaagaagcattcaaaaattttggaactgtccggatgcgccaacagagtgaaaccctaggaaaacatgccatgcactttcttgctggttatatttccatgttttctacacagggtccttttcagacagggataacacggataagctgtgcaggggagctcttagcacatattagaacagtgaagatgtacagttgggagaaactattcactgaacgtttggtggaaagaagagaatcagaagtgaagcatctcgcgacaagaaaatatctggatgcttggtgcgtttatttctgggcaaccacaccgacattgttctccctttccaccttttctatttttgcaataacgggacacgcattggatgctgccacggtatttacttgtgttgcactctttaacacactaatatcaccgctaaactcatttccatgggttattaatgggatgattgatgctgttatctctagcagacgactgagtaattatttatctactccagagcatcactcatccgagttaaatgcctctgctgaccttttaaaccaccactttaagagatattccaaagttggttctggtaaatcatctttattgaacacaatcattggagagactcgtgtcatcagtgggttcaattgcctatgtaccacaggtaccatggattttatctggctttttacgagataatattttgcttggtaaagaatttgatccaaggagaggagatatgtcacatattggagagaaaggtaccaacttatctggtggacaaagagctcgtctagcattggcaagggctttgtaccacaattctgatgtatacttgtttgatgacatccttagcgcggttgactcccaagttgcttcgtgcatcctggaaaaggctattatgggggcaccaactaatgcagaaaacaagattactaagcacacacaatcttcagtaaaacgacagagttctgatggctctgttatgtccgatggccccgggcagccgtcggacataacacaatacgtctgacggctggcagagagactaattggtctactaaagtagctactctgacctgctcaatatgggagacagctatgacagattctgctcttctgaagaagctattttgatcgattttgg

SEQ ID NO: 24824 - DNA, 2804 bp, Zea Mays
atggcttgtttctggcatggtgtcacatggcccaacccacggcccaactcggaagatgggtacaagagcagcatcagagaaatgaggaagcagagaagaaaagaatcggatcttattcccttctgtcgccgtcttcaggcgcgattcagctcgccaacgctcgacggcggccctgcggtgcgctcacgtcccggtggtggctcaccggaggctacggccccatcacagatggtattcagagccgttccaatccctggagaaattttttgccatcctaccctaccctatttctctctcgattccgctcaaatccgagcagtcgggagaaccatattcgaccgggagctgttccacgtcgacctcgacgatgcacccgtcttcgacgccgacactgacaacctcagcgtcgaacccatctttgacgacgtggtgttcgaggacattgagcccaacttcgacgacctcgatgacgagcccctcttcgacaccaagttcgacgagctcgacaagggatcagtattcgacactgagtcgatccccgaccatgtcgccgtctccgtgttcgagttcgtcaggccggagtatgatgctgagctcaccgtcttcgacaccgactcggacagcctcaacgacctgccggtagtcgacatggggccggtccatgacgccgagctcgccgtgttcaaccaaggaaacgacggctcctcgactgcacacaccggcgtcctcgacgggcaccctgtctttgacgtggagctcgtatttgatgaggagcctctcatcgaaatcgattgcagcatctttaacactaatgcgcccttcatgtgtttgacagattgtctgagctacgtcgatgacatggtgtctgctacttttaaggaggggcatatctttgataaggagactgtagtagaagcagtacagaaggaaagtggcagggattactatactgctcacgattaaatacaggaacatgacccctgaagcagctttggatcatgtacgatccattaggcctcgagtgcttttggcgccctcgcagtggcatgctattagttcatttggagctctcaccggtggacaacttccagtatggagtacgaacttggcctgtttcctagaagccattgaagctggctgtacgaacacaggaaatgatactatagtgcagcaagataacatagataaagagaatgactctgctatgaaattagacgtttccagttccatggaaaaaccttcaggccaggggccagaggagtctatccttgagagcgattgtattggtgatgtccccatagaatgtgataaacatggtgatagtgaaccattgagcatggaaggcaaaatcatttctggcaatgtgaatgtgaagaaccaaatatcgagggaggatctaaaagaagcattcaaaaattttggaactgtccggatgcgccaacagagtgaaaccctaggaaaacatgccatgcactttcttgctggttatatttccatgttttctacacagggtccttttcagacagggataacacggataagctgtgcaggggagctcttagcacatattagaacagtgaagatgtacagttgggagaaactattcactgaacgtttggtggaaagaagagaatcagaagtgaagcatctcgcggtatttacttgtgttgcactctttaacacactaatatcaccgctaaactcatttccatgggttattaatgggatgattgatgctgttatctctagcagacgactgagtaattatttatctactccagagcatcactcatccgagttaaatgcctctgctgaccttttaaaccaccactttaagagatattccaaagtaactcataatccaatggccatcatctttcagaatgtatcctgttcttggtctagcagctctgttgctgaactgaacatagttctcagagatatatctttgcagctacaaaagggctctttattgcaattgtaggttggttctggtaaatcatctttattgaacacaatcattggagagactcgtgtcatcagtgggttcaattgcctatgtaccacaggtaccatggattttatctggctttttacgagataatattttgcttggtaaagaatttgatccaaggagaggagatatgtcacatattggagagaaaggtaccaacttatctggtggacaaagagctcgtctagcattggcaagggctttgtaccacaattctgatgtatacttgtttgatgacatccttagcgcggttgactcccaagttgcttcgtgcatcctggaaaaggctattatgggggcaccaactaatgcagaaaacaagattactaagcacacacaatcttcaggtagttttcactgaatcttgtccaaaaaaaaactacaccacattggtattaaatgtatgaatcgtccttttcccctctattcaacttttgttatagaggctcgacatgattttaataaggtgcgttcacattttatgttttctaagtaattgttgctaggccgagggaagtagctactttgacctgctcaatatgggagacaactatgacagattctgctcttctgaatcctaaaatgacggtgcattacagtaaaacgacagagttctgatggctctgttatgtccgatggccccgggcagccgtcggacataacacaatacgtctgacggctggcagagagactaattggtctactaaagtagctactctgacctgctcaatatgggagacagctatgacagattctgctcttctgaagaagctattttgatcgattttgg

SEQ ID NO: 24825 - DNA, 1294 bp, Zea Mays
aatggaagtactctggctgtgatccttggattaaggaggacaagaaatctgtaggttcgactggcataaatgcaacttttgcggacttgccagctccagaactgaaatgggaggagatggctgaagcacctgtggcccgtttggatggcgctgctatacagattaagaatctcttatatgtatttgctgggtatggcaccattaaccatgtgcattctcatgttgatatatacaatttctcggataatacatggggtggaagatttgacatgcccgaagacatggcacattcacatttggggatggttactgatggaagattcatctatgtggtaactggacagtatggtccacaatgtaggggaccaacaactcgaaattttgtattggacacagaaacaaaagaatggcgtggcatgccaccattgccagttcctagatatgctccagcaacacaactttggagaggcagacttcatgtgatgggtggcagcaaggaggataggcatgaacctgcgcttgaacactggagtctcgcggtaaaggatgggaaagcattggagaaagagtggaggagcgagaaaccaataccgcgtggaggtcctcatagggcttgtgtagttgcaaatgataaactccttgttattggtggtcaagaaggtgatttcatggccaagcctgggtctcctatatttaaatgtgttagaagaagtgaggttgtgtatagtaatgtttatatgcttgatgatggaacgacttggaaggaacttccacctatgccaaaaccagattcacatatagaatttgcttgggtgaatgtcaacaattctcttgttattgctggaggaacgacagataagcacccaataactaaaaagatggtgttggttggtgaagtatttcggttcaatctgggtacgctggaatggagtgtgattgggcggttacctttccgaatcaagaccacattggtaggatactgggatggctggctgtatttcacttctgggcaacgagacaaaggaccaaaagacccgtctcctaaaaaggtgaaatgggtggcgttggggactgtctgccattgccaccggtgtgttgtatgtttattcttttagttaggatcaccaacttttgcaccattttgtacagagagaatcgatctgtccaggtgctgtcgcaatcttgtaagttgtagcgtgtacctttttttttattgagctcttacactcatcttctaaaattaatcacaacttcaacttgagccaagctaaaattaaattaaaaaaaacacaaa

SEQ ID NO: 24826 - DNA, 1531 bp, Zea Mays
cgccgatccaacgggaatgtcaccgacgcgacgcgctccagtcccctccatcgctgcgtccaccttctgtagtccagttgtagccgcttgccgatggcgcggccggcggcgaaggcgcgggtgccgaagcacttggtggcgctcgccgtcgtcgccatcctcggcctcgtactcgtcgctgactacctctgggcttcgtcctccgcgtcgtcctcggccgtctggtcctccaggcttaatctccacaccggacccgccggttcgacgccgcccgtcgcgaagaagattaaggaggacaagaaatctgtaggttcgactggcataaatgcaacttttgcggacttgccagctccagaactgaaatgggaggagatggctgaagcacctgtggcccgtttggatggcgctgctatacagattaagaatctcttatatgtatttgctgggtgcattctcatgttgatatatacaatttctcggataatacatggggtggaagatttgacatgcccgaagacatggcacattcacatttggggatggttactgatggaagattcatctatgtggtaactggacagtatggtccacaatgtaggggaccaacaactcgaaattttgtattggacacagaaacaaaagaatggcgtggcatgccaccattgccagttcctagatatgctccagcaacacaactttggagaggcagacttcatgtgatgggtggcagcaaggaggataggcatgaacctgcgcttgaacactggagtctcgcggtaaaggatgggaaagcattggagaaagagtggaggagcgagaaaccaataccgcgtggaggtcctcatagggcttgtgtagttgcaaatgataaactccttgttattggtggtcaagaaggtgatttcatggccaagcctgggtctcctatatttaaatgtgttagaagaagtgaggttgtgtatagtaatgtttatatgcttgatgatggaacgacttggaaggaacttccacctatgccaaaaccagattcacatatagaatttgcttgggtgaatgtcaacaattctcttgttattgctggaggaacgacagataagcacccaataactaaaaagatggtgttggttggtgaagtatttcggttcaatctgggtacgctggaatggagtgtgattgggcggttacctttccgaatcaagaccacattggtaggatactgggatggctggctgtatttcacttctgggcaacgagacaaaggaccaaaagacccgtctcctaaaaaggtgaaatgggtggcgttggggactgtctgccattgccaccggtgtgttgtatgtttattcttttagttaggatcaccaacttttgcaccattttgtacagagagaatcgatctgtccaggtgctgtcgcaatcttgtaagttgtagcgtgtacctttttttttattgagctcttacactcatcttctaaaattaatcacaacttcaacttgagccaagctaaaattaaattaaaaaaaacacaaa

SEQ ID NO: 24827 - DNA, 1361 bp, Zea Mays
aaggaaggaagaacctaggactatatacacacaacagatacgaatcgaaaagcgccgaggaaagaataaacggcgagccgcccgtcaaacaatcgttaaacccagaagcctcctcgtcctctctctgactctctctcaccctctcccctccctcggggtcgcggttgcttcctcgcggccgattcgtatcttccgtggcagcagggagggtacggtactcctccggccggcgggaggagaagaggagcttcgagatgggggcgtccctcgcttccgcgggcttggtgaactacccgcttgtcgcggcgctcctcgcgttcgctctcgcgcagtcctccaagttcttcaccacctggtacaaagaaggtcggtgggatgccagacaacttatagcttctggcgggatgccatcatcccactcagctacagtgacagcactttcagtggcagtgggaatccaagaaggctttcgtagtgcaacatttgcaactgcactagtctttgcatgtgtggtactttgcacatcttcatgttgaactactgcttcaactgcatttgataataatactcagagttggtctgtttcttgcagtgactcaaggatgtggatgtcttgctagatgttacttgttcttatgaatgcagcctttgatttgacttagttggtacttctgtttgcaggttatgcatgatgcttttggagttcggttacatgccggaaagcaggcagaggtgctgaatcaaattgtctatgagctgccagaggaacacccattatcagagacaaagccactgcgtgaaatccttggacatactgttcctcaggtcgtggccggttgcatccttggaatcctcatggctgtcgttatgcttttggctctcgggaggtcttagtcaagtgttgttcaccctatatctcactggtgatggctacaaagcataaaaacatgatctccccatggttctggctgtccaagtgttcgatagtacaaagttctaaccgaatttagatctggactgtaggtttcaggttgtagctcgagttggttgctgtaaatctgaaagggtcacttttaattccaaccacggtgtaatggaagctttgttatacaatcagcagcggtaagatcattttgcggatcagtatggtcgataccatgccgtcgcatttgctttatactcctttaattgaaaactgcgagtcattttggctcttccagacatgttgtttttgctacgtatttaaaagcaatgtatttgaatatacattatatctagatatatagttagagtcatgtatttagaaaaggacaaacattgatatggagggggtaagcggttcattgaccccttgagttgcg

SEQ ID NO: 24828 - DNA, 1929 bp, Zea Mays
atcgttcgtgagctggtgagttcgtacccgtggaattcagtgggcacagcatattcgtcgagccaaatccagcggctggagcatatccaggagaccatagagccaggcaccgggcagtcggaccagccttgcgaattgcgagctgtaaggaaggaagaacctaggactatatacacacaacagatacgaatcgaaaagcgccgaggaaagaataaacggcgagccgcccgtcaaacaatcgttaaacccagaagcctcctcgtcctctctctgactctctctcaccctctcccctccctcggggtcgcggttgcttcctcgcggccgattcgtatcttccgtggcagcagggagggtacggtactcctccggccggcgggaggagaagaggagcttcgagatgggggcgtccctcgcttccgcgggcttggtgaactacccgcttgtcgcggcgctcctcgcgttcgctctcgcgcagtcctccaagttcttcaccacctgtatgtctatcaagggtgcgagaggcgagacgcctcagacaacaacgcgagataacatggtgtgaatgatcatgagcctaaatttaattcatctcctactaaaaaatggtacaaagaaggtcggtgggatgccagacaacttatagcttctggcgggatgccatcatcccactcagctacagtgacagcactttcagtggcagtgggaatccaagaaggctttcgtagtgcaacatttgcaactgcactagtctttgcatgtgtggttatgcatgatgcttttggagttcggttacatgccggaaagcaggcagaggtgctgaatcaaattgtctatgagctgccagaggaacacccattatcagagacaaagccactgcgtgaaatccttggacatactgttcctcaggttgagttaaatgcttcatattatctctcttgatgttttaactattctgtggcctttccggttaggaaaaacagtcaatactcaatgaagatagagtgattgggatataggcccgttctttttcagggcatcgtataatgaacttatttagtgacactcaaataatgaatatatgagatgctagatgcactatggtaactataggctacagcattcctagcctgtgatctacaatcagtttcagcgtgtaaaaaccttactatcctgaaaattgcttaaattgcaaacaaacttaagaacatgttcgcatgtgcagataacaagatgtgcctatttcctttatcctatgtaccatgttatcacctctgatgattgaacttctcttccaaatctgacacaacagtttgacagcagacacaatcagatagtacatgcaacattctaggtgtaacactataacatattcttcctttggacatgtcaggtcgtggccggttgcatccttggaatcctcatggctgtcgttatgcttttggctctcgggaggtcttagtcaagtgttgttcaccctatatctcactggtgatggctacaaagcataaaaacatgatctccccatggttctggctgtccaagtgttcgatagtacaaagttctaaccgaatttagatctggactgtaggtttcaggttgtagctcgagttggttgctgtaaatctgaaagggtcacttttaattccaaccacggtgtaatggaagctttgttatacaatcagcagcggtaagatcattttgcggatcagtatggtcgataccatgccgtcgcatttgctttatactcctttaattgaaaactgcgagtcattttggctcttccagacatgttgtttttgctacgtatttaaaagcaatgtatttgaatatacattatatctagatatatagttagagtcatgtatttagaaaaggacaaacattgatatggagggggtaagcggttcattgaccccttgagttgcg

SEQ ID NO: 24829 - DNA, 1443 bp, Zea Mays
gccgcgttgcttctccgtcccactgaaccatcgccgccggctagccgcaggagaagttcccgccgcgccgacgccgaaaccgccgtcgcgtgttttgaagctctcgaaaaaagggcgcgcagcatgagagcggccgtgaactcgccacctccgcactgctactcgcgccgccgcgccagcgccacgctgctggatgcgcgccatgtgttcgaccacgtgccgcagcagcgcctaccgaacctggccgcgggactccgcgcgcggcctgtcgccgcggccgcctggaggcccgcgcggcgctcggccgcatctgcggctgcccgcacctgtggcaccgtttcaggacattcctgcaaatcccaacatcctcttcttcagcttatcgcgcactagtagcttcgtctgcattcttgccatcaagacggagctttgaaggctacattcctcgtagctgctccagctcatcgctccagatctacagccggtcaccgctgttaaatctatcgccgtcttcagctctcatggtatcctcccagctcacgggctcctccgacgtagcccaacgttcagaggaatggtttgctcttcgcaaggacaagctcaccacaagcaccttcagtactgctttgggtttctgggctggcaacagaagaccagagctgtggaacgagaaagtcttcggagcgacagagatcaagctagcagatgccgctagatctgccatggactgggggacgcatcacgaaagcgtagccatagagcagtacacgagcatcacaggaagaccggtgggcaccctcggcttcgcggtgcacaccgaggccagcttcggatggctcggagcctcgcctgatggggtcctcgggtgcgagccacacgacgggatcctggaagtgaagtgcccgttcaacaagggcaagcctgagctcgctctgccctggcgcgccatgccgtactactacatgccgcaggtgcaggggctgatggaaatcctgggcagggactgggtggacctctactgctggacacccaacgggagcagcctgttccgggtgccgcgggactgcgcgtactgggagctcatccacgaggcgctgcgcgacttctggtggggcaacgtggtgcccgcgcgggagctggcgctcctggggaaggacgacgaggcgaggtccttcgagcctcagcccaagcaccggctcacgaacctcgtgctgtataggagccggaagctggcctccgaagcgaagctactttgtatggatgttggcggccatgtagaattcttccaatgaggagtcctgccgccgtttattgtacactgtattatgactattctttaattaacttatgaattcgttaccttcccagcgccatgttcttttttgttctgttctgttctgtttaacaaagagtgtaagtataatcttccagtttgcgtgttca

SEQ ID NO: 24830 - DNA, 2019 bp, Zea Mays
atcttgtactgccagagttgcagatcttttttccctcttcgatggagggaattatacaggtagaagagaatcgtgccatttgtcatgtcaggaggatcttcaccatcatcaaggcgaaacagctttaattctttgtctaaggacctagaccttccttcagagcaaggttgtctctccattgttgtacttggggcttctggtgaccttgctaagaagaaaacattcccagccctctaccacctctttgagcagggattcatacaatctggagaagtccatatatttggttatgctagatcaaatctttctgatgatgggttaagagaacgcattcgtgggtatctcaaaggagccccagaagatctttcagaatttttgcaactaataaaatatgtcagtggttcctatgatactggagaaggatttgagaaactgaacagggcaatatcagagtatgaggtgtcaaagagttcaggaagctatcgcaggctcttttatttggcattgcctccatctgtctacccttcagtgtgcaaaatgatcagaacatattgcatgaatccatcttctcaccctggatggaccagagtcattgttgagaagccctttggaaaggacttggattccgctgaagaattaagtgcccaacttggggagctattcgaggaacaccaactatacaggatagaccattacctgggaaaagagttggtccaaaacttgcttgttcttcgttttgccaaccgattattcttgcctctttggaaccgcgacaatattgataatatacagattgtattcagggaagactttggtactgaagggcgtggaggatattttgaccaatatggaatcattcgtgatatcattcagaatcatttactgcaggttttctgtttggttgcaatggaaaagcctgtctcccttaagcctgagcacatcagagatgagaaagtcaaggttctgcaatctgtgaaccctattaagcctgaagaggtagtccttgggcaatacgatggctacaaggatgaccctacagtgccagatgactcgaataccccaacttttgcatctgttgttcttcgggtacacaatgaaagatgggaaggtgttcctttcattcttaaagctggtaaagcattgagttcaaagaaagcagaagttcgggtgcaattcaaggatgtccctggtgacatttttagaagcaagaagcaaggaagaaatgagtttgttatacgcctccaaccatcagaagccatgtacatgaaactaactgttaagaagcctgggttagaaatggctactgaacaaagtgaacttgatctgtcatatgggatgcggtaccaaaatgtcaaaattcctgaggcatatgaacgccttatcttggatacaataagaggtgatcagcagcactttgttcgcagagatgagctacaggctgcttggaagatcttcactcctttgctgcatgacattgacgacggcaagctgaaggccctcccgtatgaacctggcagccggggacccaaggaagccgacgaattgagcgcgagagttggatacgtgcagacccacggttacatatgggtaccgccgacccttgcatagaagagaatacgaattgtttgtacctaggaagatccgagtgtcctacaataaagctgtgcgtatatgctcattttcgctatatcgcctgccgttgtaataatgttgtgctggatatgaaataaaattgcgtgttccattcagtatatgcaatggccagcgatggaatgttgttttaccctgcaataccgatgaactatatagaaaaaacatgacgggagatcatgtcatgctcatgcctcattttgaaggataaaaccaaatgataattatacgtgtatgatgatcaaccaatggccataagccagggcaagcaaaagaaacgaggagagaaaacaagagatgcaacagtttctctttcctattttcaagaggtgttttcttgttttaggctagtttggcaactctattttt

SEQ ID NO: 24831 - DNA, 2393 bp, Zea Mays
aacgaacccaagcgacagacgggcagcgtggggaggccgccgccgttgcggtatataaacggacgctcgccgttgggggaccaaccgaagcagcgacagagctcttccctcccacacgctcggcgctctgtccgccagaaatctcgtcgctgcaggtagaagagaatcgtgccatttgtcatgtcaggaggatcttcaccatcatcaaggcgaaacagctttaattctttgtctaaggacctagaccttccttcagagcaaggttgtctctccattgttgtacttggggcttctggtgaccttgctaagaagaaaacattcccagccctctaccacctctttgagcagggattcatacaatctggagaagtccatatatttggttatgctagatcaaatctttctgatgatgggttaagagaacgcattcgtgggtatctcaaaggagccccagaagatctttcagaatttttgcaactaataaaatatgtcagtggttcctatgatactggagaaggatttgagaaactgaacagggcaatatcagagtatgaggtgtcaaagagttcaggaagctatcgcaggctcttttatttggcattgcctccatctgtctacccttcagtgtgcaaaatgatcagaacatattgcatgaatccatcttctcaccctggatggaccagagtcattgttgagaagccctttggaaaggacttggattccgctgaagaattaagtgcccaacttggggagctattcgaggaacaccaactatacaggatagaccattacctgggaaaagagttggtccaaaacttgcttgttcttcgttttgccaaccgattattcttgcctctttggaaccgcgacaatattgataatatacaggtaagatcttttgtatttggtagctagcagttgggaacttcattttgctggtataagctctatgcacataaattgcagtccctttatcattcaagaatgtactctttagttctatacttctattcataagttgtttgacttggtccgttggtgattatagtagggagctattgtattctattgtaacaattgactacagtttgaaatgagtcaaactgaacctaagataactgaaagtacagtatcaatgacatggcatgctaattactacactgcagattgtattcagggaagactttggtactgaagggcgtggaggatattttgaccaatatggaatcattcgtgatatcattcagaatcatttactgcaggttttctgtttggttgcaatggaaaagcctgtctcccttaagcctgagcacatcagagatgagaaagtcaaggttctgcaatctgtgaaccctattaagcctgaagaggtagtccttgggcaatacgatggctacaaggatgaccctacagtgccagatgactcgaataccccaacttttgcatctgttgttcttcgggtacacaatgaaagatgggaaggtgttcctttcattcttaaagctggtaaagcattgagttcaaagaaagcagaagttcgggtgcaattcaaggatgtccctggtgacatttttagaagcaagaagcaaggaagaaatgagtttgttatacgcctccaaccatcagaagccatgtacatgaaactaactgttaagaagcctgggttagaaatggctactgaacaaagtgaacttgatctgtcatatgggatgcggtaccaaaatgtcaaaattcctgaggcatatgaacgccttatcttggatacaataagaggtgatcagcagcactttgttcgcagagatgagctacaggctgcttggaagatcttcactcctttgctgcatgacattgacgacggcaagctgaaggccctcccgtatgaacctggcagccggggacccaaggaagccgacgaattgagcgcgagagttggatacgtgcagacccacggttacatatgggtaccgccgacccttgcatagaagagaatacgaattgtttgtacctaggaagatccgagtgtcctacaataaagctgtgcgtatatgctcattttcgctatatcgcctgccgttgtaataatgttgtgctggatatgaaataaaattgcgtgttccattcagtatatgcaatggccagcgatggaatgttgttttaccctgcaataccgatgaactatatagaaaaaacatgacgggagatcatgtcatgctcatgcctcattttgaaggataaaaccaaatgataattatacgtgtatgatgatcaaccaatggccataagccagggcaagcaaaagaaacgaggagagaaaacaagagatgcaacagtttctctttcctattttcaagaggtgttttcttgttttaggctagtttggcaactctattttt

SEQ ID NO: 24832 - DNA, 1200 bp, Zea Mays
aggaatggacgcatgcaatgaatgcttcggaggataagctgaaagcagtgtcagaggaacttggacatgagatccgggttttttcaagtgagaactttgctctacaaccgagcaagctgcctagtgcagatcatgaggaaggtgacgacttttatgagcttcagcctgctgattactacaacttgatttcaaacaggatgggagagctatctaaaatgctaaagactcgcaagatgcgggaagcagaacttgctgctcagcgagcaaagcgaacaaaggcagtaatgagggtgcgattccctgatggctacatacttgaggctgactttcttccatcagagaggattcatagtctagtggacctgctcatgaaagtacttgctagaccagatctgccattctatctctatacagtacctccaaagaagcgaatactggacacatcacaggacttctatacatctggttttgttcctggagctaatgttcatttttcttatgatctgcccgaagatgatctaaaagcaggacccttcctccgtgaaggaattctaagtttggatggattgtcacttctgctgaaacctgctagtcaacctgatgattctagaatgaactcttctactcatcaatctggtgcatctcaatctgaccctgtaccaacaacaaataagaagcctggcagaccaaagtggctgaaaaggtgataccactccaggcgtcagactacactgctgcagtacaaggattggaccctctgcccactgaagctgttgggggcattataattggggccccacctttttgtaggtgggagacaagtagcatgtaaacttgaatgtgttgctgactcaaacagaacagtgctctgctctggctaagcacctggccatcttacacatcgtgtaagccccatagtaacttgaatgtgttacacatcgtgtgcctgtctttgctatccagtctttacacagcatttcaggaaacagaaagtgcttgaaagtgtaccaagtgtggccgtgtggggtttcagttcgcccatgatattgtggcaagtcgctttcttgtgattgatggtgatggtgccctcaccagcgactaatttgtcgccaaatggcatgtgttttcttcttatgatggtgacttgctgtccagctataccctgtgtggttgtgatttgtggtttatattcaacgtcca

SEQ ID NO: 24833 - DNA, 1819 bp, Zea Mays
tgtttaggccgtcgagcgttggccgcgcgtcgtatacgaagtccgagcccgacccgcaacccgaaacccgtctcgcctcgccaaggcaaggcttcctttcctctcccttcccgtccaagatggaagcagagtacccccaccagcaggcggccccctcttactccacgaccgccaccgtcttctggccgtacgcgactcgccgcagaaagagagccgaggacggcagcgacctctcgctggcgtcggatatggatctcgacgccgacgcgcagcgcgccgcagataagctgaaagcagtgtcagaggaacttggacatgagatccgggttttttcaagtgagaactttgctctacaaccgagcaagctgcctagtgcagatcatgaggaaggtgacgacttttatgagcttcagcctgctgattactacaacttgatttcaaacaggatgggagagctatctaaaatgctaaagactcgcaagatgcgggaagcagaacttgctgctcagcgagcaaagcgaacaaaggcagtaatgagggtgcgattccctgatggctacatacttgaggctgactttcttccatcagagaggattcatagtctagtggacctgctcatgaaagtacttgctagaccagatctgccattctatctctatacagtacctccaaagaagcgaatactggacacatcacaggacttctatacatctggttttgttcctggagctaatgttcatttttcttatgatctgcccgaaggtatgcatcatcataatgactagtggcaagttaagaaataaacaacaattacctctcagctctatgtttgaaatatatgttgtatcttaacagaagtcaattccagtgccatgcctttctccccaccccatccacacacacacaaaacaaagacaaacaacactatgacccaagctcgcggcccgcccacccaacacacatgcaaatacatgaaataatttgtcactggcgcctatgacaaattatttatttcacccctgttattatacagaagcatcatggttgtcactttgttagacattcagatacgagttcttgaaatgagtgggtaccaaatggtttgggcatgcaggtttgttgttaaatgcagatgatctaaaagcaggacccttcctccgtgaaggaattctaagtttggatggattgtcacttctgctgaaacctgctagtcaacctgatgattctagaatgaactcttctactcatcaatctggtgcatctcaatctgaccctgtaccaacaacaaataagaagcctggcagaccaaagtggctgaaaaggtgataccactccaggcgtcagactacactgctgcagtacaaggattggaccctctgcccactgaagctgttgggggcattataattggggccccacctttttgtaggtgggagacaagtagcatgtaaacttgaatgtgttgctgactcaaacagaacagtgctctgctctggctaagcacctggccatcttacacatcgtgtaagccccatagtaacttgaatgtgttacacatcgtgtgcctgtctttgctatccagtctttacacagcatttcaggaaacagaaagtgcttgaaagtgtaccaagtgtggccgtgtggggtttcagttcgcccatgatattgtggcaagtcgctttcttgtgattgatggtgatggtgccctcaccagcgactaatttgtcgccaaatggcatgtgttttcttcttatgatggtgacttgctgtccagctataccctgtgtggttgtgatttgtggtttatattcaacgtcca

SEQ ID NO: 24834 - DNA, 2237 bp, Zea Mays
tgtttaggccgtcgagcgttggccgcgcgtcgtatacgaagtccgagcccgacccgcaacccgaaacccgtctcgcctcgccaaggcaaggcttcctttcctctcccttcccgtccaagatggaagcagagtacccccaccagcaggcggccccctcttactccacgaccgccaccgtcttctggccgtacgcgactcgccgcagaaagagagccgaggacggcagcgacctctcgctggcgtcggatatggatctcgacgccgacgcgcagcgcgccgcagataagctgaaagcagtgtcagaggaacttggacatgagatccgggttttttcaagtgagaactttgctctacaaccgagcaagctgcctagtgcagatcatgaggaaggtgacgacttttatgagcttcagcctgctgattactacaacttgatttcaaacaggatgggagagctatctaaaatgctaaagactcgcaagatgcgggaagcagaacttgctgctcagcgagcaaagcgaacaaaggcagtaatgagggtgcgattccctgatggctacatacttgaggctgactttcttccatcagagaggattcatagtctagtggacctgctcatgaaagtacttgctagaccagatctgccattctatctctatacagtacctccaaagaagcgaatactggacacatcacaggacttctatacatctggttttgttcctggagctaatgttcatttttcttatgatctgcccgaaggtatgcatcatcataatgactagtggcaagttaagaaataaacaacaattacctctcagctctatgtttgaaatatatgttgtatcttaacagaagtcaattccagtgccatgcctttctccccaccccatccacacacacacaaaacaaagacaaacaacactatgacccaagctcgcggcccgcccacccaacacacatgcaaatacatgaaataatttgtcactggcgcctatgacaaattatttatttcacccctgttattatacagaagcatcatggttgtcactttgttagacattcagatacgagttcttgaaatgagtgggtaccaaatggtttgggcatgcaggtttgttgttaaatgcagatgatctaaaagcaggacccttcctccgtgaaggaattctaagtttggatggattgtcacttctgctgaaacctgctagtcaacctgatgattctagaatgaactcttctactcatcaatctggtgcatctcaatctgaccctgtaccaacaacaaataagaagcctggcagaccaaagtggctgaaaaggtaaaatccagaataatcttcttgccattgtggtacaatagttaaaaggagaaaaacttgtcaagtttctggggataattccaattccttatcaatcttcttaagcaatgatacacagctctcatgcgtatttgagaagaataattccttatcgtcttttggtaagttagcatatgcccttgctatccactgtttcagaacattgttagaacttgcaaggagcttttaaattgcagtttcattttagtgcgtgcatctcatactatcttgattgttgaaccaaccccacccaccatagggttatgtctcgtgataattctgtttgcttgaactccatttcccatctagctattttgtttcggaacatcttttgcctttgcaagaccacgacaaaataactggtacccacttgttgcaggtgataccactccaggcgtcagactacactgctgcagtacaaggattggaccctctgcccactgaagctgttgggggcattataattggggccccacctttttgtaggtgggagacaagtagcatgtaaacttgaatgtgttgctgactcaaacagaacagtgctctgctctggctaagcacctggccatcttacacatcgtgtaagccccatagtaacttgaatgtgttacacatcgtgtgcctgtctttgctatccagtctttacacagcatttcaggaaacagaaagtgcttgaaagtgtaccaagtgtggccgtgtggggtttcagttcgcccatgatattgtggcaagtcgctttcttgtgattgatggtgatggtgccctcaccagcgactaatttgtcgccaaatggcatgtgttttcttcttatgatggtgacttgctgtccagctataccctgtgtggttgtgatttgtggtttatattcaacgtcca

SEQ ID NO: 24835 - DNA, 1885 bp, Zea Mays
tgtttaggccgtcgagcgttggccgcgcgtcgtatacgaagtccgagcccgacccgcaacccgaaacccgtctcgcctcgccaaggcaaggcttcctttcctctcccttcccgtccaagatggaagcagagtacccccaccagcaggcggccccctcttactccacgaccgccaccgtcttctggccgtacgcgactcgccgcagaaagagagccgaggacggcagcgacctctcgctggcgtcggatatggatctcgacgccgacgcgcagcgcgccgcagataagctgaaagcagtgtcagaggaacttggacatgagatccgggttttttcaagtgagaactttgctctacaaccgagcaagctgcctagtgcagatcatgaggaaggtgacgacttttatgagcttcagcctgctgattactacaacttgatttcaaacaggatgggagagctatctaaaatgctaaagactcgcaagatgcgggaagcagaacttgctgctcagcgagcaaagcgaacaaaggcagtaatgagggtgcgattccctgatggctacatacttgaggctgactttcttccatcagagaggattcatagtctagtggacctgctcatgaaagtacttgctagaccagatctgccattctatctctatacagtacctccaaagaagcgaatactggacacatcacaggacttctatacatctggttttgttcctggagctaatgttcatttttcttatgatctgcccgaaggtttgttgttaaatgcagatgatctaaaagcaggacccttcctccgtgaaggaattctaagtttggatggattgtcacttctgctgaaacctgctagtcaacctgatgattctagaatgaactcttctactcatcaatctggtgcatctcaatctgaccctgtaccaacaacaaataagaagcctggcagaccaaagtggctgaaaaggtaaaatccagaataatcttcttgccattgtggtacaatagttaaaaggagaaaaacttgtcaagtttctggggataattccaattccttatcaatcttcttaagcaatgatacacagctctcatgcgtatttgagaagaataattccttatcgtcttttggtaagttagcatatgcccttgctatccactgtttcagaacattgttagaacttgcaaggagcttttaaattgcagtttcattttagtgcgtgcatctcatactatcttgattgttgaaccaaccccacccaccatagggttatgtctcgtgataattctgtttgcttgaactccatttcccatctagctattttgtttcggaacatcttttgcctttgcaagaccacgacaaaataactggtacccacttgttgcaggtgataccactccaggcgtcagactacactgctgcagtacaaggattggaccctctgcccactgaagctgttgggggcattataattggggccccacctttttgtaggtgggagacaagtagcatgtaaacttgaatgtgttgctgactcaaacagaacagtgctctgctctggctaagcacctggccatcttacacatcgtgtaagccccatagtaacttgaatgtgttacacatcgtgtgcctgtctttgctatccagtctttacacagcatttcaggaaacagaaagtgcttgaaagtgtaccaagtgtggccgtgtggggtttcagttcgcccatgatattgtggcaagtcgctttcttgtgattgatggtgatggtgccctcaccagcgactaatttgtcgccaaatggcatgtgttttcttcttatgatggtgacttgctgtccagctataccctgtgtggttgtgatttgtggtttatattcaacgtcca

SEQ ID NO: 24836 - DNA, 786 bp, Zea Mays
acctttccatcctatcattcatcctactcgctccctctccaactcgaccgccccgccgccggccgccggccgccatctcccgccgccgaccacccccgacccaccggccgcgcccagccccaactcgcccccgttgctgtccttgtgtcgctgtccccgcccgcgttgcgcctggattgcactcagccttggccgcaatccatccgtgctttccggcgctacccaccacacatcgagttgtttgattttcgattgattcgcccgaagagggcaggccggccgacgaggtaagggtgcggtgcgaagcgttggtcagatgccccagtaccttgcggtcggcgtgctacacggagtgtgtgaactgtgaagccgccggcgcagctagctttggcatgagcacaaccgcacgaggcaagctcaggtaatcagctatccatgttgttacgtctgcacgtaggtttcgatagtccagcagctactgctccacactcaggatgtgcgaaggacatgctaattcgactgtgttttcaaaccctgagaaaaactaagaggaaagcaaatatatgcatatggtcatgggctttattgatgcttccgcctcaggatatagttgcaaaatgtttctgagacagtgaaccacgtactccaaaatcttttctctttaccacgatgttatctttgaacgttgatttagccaattcaatgtaaaggtcaccacgagggtatgaaatcttgcttcattgacacaaaagaaatagacaaagcaacacatatactgggatttcg

SEQ ID NO: 24837 - DNA, 828 bp, Zea Mays
acctttccatcctatcattcatcctactcgctccctctccaactcgaccgccccgccgccggccgccggccgccatctcccgccgccgaccacccccgacccaccggccgcgcccagccccaactcgcccccgttgctgtccttgtgtcgctgtccccgcccgcgttgcgcctggattgcactcagccttggccgcaatccatccgtgctttccggcgctacccaccacacatcgaggccggccgacgaggtaagggtgcggtgcgaagcgttggtcagatgccccagtaccttgcggtcggcgtgctacacggagtgtgtgaactgtgaagccgccggcgcagctagctttggcatgagcacaaccgcacgaggcaagctcaggtaatcagctatccatgttgttacgtctgcacgtaggtttcgatagtccagcagctactgctccacactcaggatgtgcgaaggacatgctaattcgactgtgttttcaaaccctgagaaaaactaaggtaaactgttgtcgtcgggattcaatcttagtttctttttttatcagaacaatcttaatttctactgcttcttgtttagaggaaagcaaatatatgcatatggtcatgggctttattgatgcttccgcctcaggatatagttgcaaaatgtttctgagacagtgaaccacgtactccaaaatcttttctctttaccacgatgttatctttgaacgttgatttagccaattcaatgtaaaggtcaccacgagggtatgaaatcttgcttcattgacacaaaagaaatagacaaagcaacacatatactgggatttcg

SEQ ID NO: 24838 - DNA, 1754 bp, Zea Mays
gtttttgaacaacaattacagaaatcaaaaaatggaatgttattttttgttacaattcgaaagtatgaatgaaccattttttatattattatatgtaaaaatattgaatacatttttttatcatccttacaatttgatgaaatgggtacaaataaaagaaaacaaaaaaagaaatggaaaaaggaattctgttaacactgtagctttaggggaccgaatttaggggacgttgctggagacacagaatatataggggacagaatcttttagagtgttcccatcttcttcttgcagccgaagcaaagtgagggcggcgagatgaacggcggcggggaggacgggaagcagcagccgcacctggtactggcgcacaagctgttcctcctgtcgcactccgacgtcgacgacctcgccaaggtcgacctacgcgctgacgtgttcgcggcagtcaaatccgatgacatggcagctctgtacgagtcgttggcggcggacggcgtactggagacggacgcggcgctgctggccgagatgcgcgccaggatcgacgaggagatccggaagctcgacgagaagattgctgatgcagaggagaacttgggtgagagtgaagtgcgtgaggcccatctcgccaaatccttatatttcataagggttggggagaaggagaaagcactggagcagcttaaagttactgaaggaaaaactgtagctgttgggcaaaagatggaccttgttttctacacactacaaattggattgttctatatggactttgatctcatctcgaagtccattgacaaagcgaaacttgtttgaggaaggtggtgattgggaaaggaagaacagattgaaagtatatgaagggttgtactgcatggcaactagaaacttcaagaaagctgctagtttattcttggattcaatttcaactttcacgacatatgagctattcacatatgatacattcatcttctacacagtcctcacgagtgttatatctctggaccgtgtatctctgaaacaaaaggttgtagatgcgcctgagatcttagccgtaattggcaaagtacctcacctctcagagtttctcaattccctctacaattgccagtacaagtcattttttattgcattctctggcttgactgaaccaatcaagttagagcgttacttgcagcctcattttcgctactacatgcgtgaagtgcgcactgttgtctactcacagtttctggaatcgtacaagagtgtgacaatggaagccatggctgctgcatttggcgtcacagtcgactttatagaccaggaactgtcacgcttcattgccgctgggaagctccactgcaagatagacaaagttgctggcgtcttggaaacgaaccgacctgatgctaggaacgccttctaccaggcaaccatcaagcaaggagacttcctgctgaaccgcatccagaagctgtcacgagttatcgacctgtaggggagagcccttcatgcaggacaggagcttgccttggttcctggagtgtacgagcggtgcttgactttcaatgggtctcagttgaagaagcttttagggatatttgtgttctgagaaattgtgttttgcactttttagcctaactacatgaagcccccaaaaaaatttcatggcgttgcttgtagacgtttcttcattgatgaattcatcccttgttttttcttgctggatattgttttgctactaagagcctagcagatggtagacaagc

SEQ ID NO: 24839 - DNA, 798 bp, Zea Mays
tctcatgttgagagacaacacactcctcagtctgatgaagatgctgcaaagaacgtgtccagtgctgtgtctctgctgaagggtgaaagtaagaccatgcgtagaaaagagaagcgtgctcggatagaacagatcagggtcatccttggcctttctgattctcaaaggactccagtgcctggagaatcactgagagatttctacaagaggacaaatatgtactggcaaatggctgcctatgagcacactcaacacactggaaaggagctccgcaaagacggttttgatcttgccgaaactcgattcaaggaactgaaaccgatacttgacgagctggctgtgctggaggccgagcagaaagctgaggaagaggccagtgcgtcgactagttccaagagggacaccaagaaacccaagcagaagagcgcacgaaggtagctttggttctgaacgagtgtgtaagcggaagccagctttagatgaagttgctccaggaagaggccagtgcgtcagctagtcccaactcccaaggtgtgaagaggggacaccaagaaaatccaagcagaagagtgcagggagatagttttggttctgaacgagtgtttaagcgtaagacggttttaaacgattgctcaaatgctcaagttcctttgaggggatttccattttctttttgaacccaagtagacaaaattgatatttgttgttttataatagtgtatgtatatactcgtacgttgaaatttgattcatgtgcaatcttgaccgtatattctcccactattcgactaaacgaac

SEQ ID NO: 24840 - DNA, 1260 bp, Zea Mays
cgctcatcatgctatgaaaaactggcttaaaaaatgagaagtgatgtcattatgagcatgttcatgaacgagctgtatggtttccaattggataaccaccgatggtacccgctagagctcaggaaagacaagcctgctaaaatcaaggcaaggaatatcaaaagaaaagaatcaacgaatgatgtagaagctaatattattgatgatgagggtgatgaggtcatggtggacgtagaagaagctattgaaggacaacctgaagtcaatggagtttccaatcagttgatcaaaactctgaatatcactaaagatggctcaagcagaagcattgatgttctctctgattcaacagcacaagaatcatttttggaggcctcagaatctgaatggttagaaatttctgaggaagaggatgatgatgatgatgatgagactgatgatgatgaaaatgaagagggggatgctagccagacagatgaagatgaagaagagtctgatgaagatgctgcaaagaacgtgtccagtgctgtgtctctgctgaagggtgaaagtaagaccatgcgtagaaaagagaagcgtgctcggatagaacagatcagggtcatccttggcctttctgattctcaaaggactccagtgcctggagaatcactgagagatttctacaagaggacaaatatgtactggcaaatggctgcctatgagcacactcaacacactggaaaggagctccgcaaagacggttttgatcttgccgaaactcgattcaaggaactgaaaccgatacttgacgagctggctgtgctggaggccgagcagaaagctgaggaagaggccagtgcgtcgactagttccaagagggacaccaagaaacccaagcagaagagcgcacgaaggtagctttggttctgaacgagtgtgtaagcggaagccagctttagatgaagttgctccaggaagaggccagtgcgtcagctagtcccaactcccaaggtgtgaagaggggacaccaagaaaatccaagcagaagagtgcagggagatagttttggttctgaacgagtgtttaagcgtaagacggttttaaacgattgctcaaatgctcaagttcctttgaggggatttccattttctttttgaacccaagtagacaaaattgatatttgttgttttataatagtgtatgtatatactcgtacgttgaaatttgattcatgtgcaatcttgaccgtatattctcccactattcgactaaacgaac

SEQ ID NO: 24841 - DNA, 1432 bp, Zea Mays
atttaactcacgctcatcatgctatgaaaaactggcttaaaaaatgagaagtgatgtcattatgagcatgttcatgaacgagctgtatggtttccaattggataaccaccgatggtacccgctagagctcaggaaagacaagcctgctaaaatcaaggcaaggaatatcaaaagaaaagaatcaacgaatgatgtagaagctaatattattgatgatgagggtgatgaggtcatggtggacgtagaagaagctattgaaggacaacctgaagtcaatggagtttccaatcagttgatcaaaactctgaatatcactaaagatggctcaagcagaagcattgatgttctctctgattcaacagcacaagaatcatttttggaggcggtgaagcccagtggtcgtatcaatgcatgcttggccgtagggaaagatatgctctacttgtatggaggaatgatggaagtgaaagatagagaaattactcttgatgatctatattcacttaaccttagcaaacttgatgagtggaagtgtatcatatccgcctcagaatctgaatggttagaaatttctgaggaagaggatgatgatgatgatgatgagactgatgatgatgaaaatgaagagggggatgctagccagacagatgaagatgaagaagagtctgatgaagatgctgcaaagaacgtgtccagtgctgtgtctctgctgaagggtgaaagtaagaccatgcgtagaaaagagaagcgtgctcggatagaacagatcagggtcatccttggcctttctgattctcaaaggactccagtgcctggagaatcactgagagatttctacaagaggacaaatatgtactggcaaatggctgcctatgagcacactcaacacactggaaaggagctccgcaaagacggttttgatcttgccgaaactcgattcaaggaactgaaaccgatacttgacgagctggctgtgctggaggccgagcagaaagctgaggaagaggccagtgcgtcgactagttccaagagggacaccaagaaacccaagcagaagagcgcacgaaggtagctttggttctgaacgagtgtgtaagcggaagccagctttagatgaagttgctccaggaagaggccagtgcgtcagctagtcccaactcccaaggtgtgaagaggggacaccaagaaaatccaagcagaagagtgcagggagatagttttggttctgaacgagtgtttaagcgtaagacggttttaaacgattgctcaaatgctcaagttcctttgaggggatttccattttctttttgaacccaagtagacaaaattgatatttgttgttttataatagtgtatgtatatactcgtacgttgaaatttgattcatgtgcaatcttgaccgtatattctcccactattcgactaaacgaac

SEQ ID NO: 24842 - DNA, 1466 bp, Zea Mays
cttccattgtgaatgttgatatcaaattgagttgattgctgttgaacttttgtagatgtacactgcggcaccacacaataataagtgatgtcattatgagcatgttcatgaacgagctgtatggtttccaattggataaccaccgatggtacccgctagagctcaggaaagacaagcctgctaaaatcaaggcaaggaatatcaaaagaaaagaatcaacgaatgatgtagaagctaatattattgatgatgagggtgatgaggtcatggtggacgtagaagaagctattgaaggacaacctgaagtcaatggagtttccaatcagttgatcaaaactctgaatatcactaaagatggctcaagcagaagcattgatgttctctctgattcaacagcacaagaatcatttttggaggcggtgaagcccagtggtcgtatcaatgcatgcttggccgtagggaaagatatgctctacttgtatggaggaatgatggaagtgaaagatagagaaattactcttgatgatctatattcacttaaccttagcaaacttgatgagtggaagtgtatcatatccgcctcagaatctgaatggttagaaatttctgaggaagaggatgatgatgatgatgatgagactgatgatgatgaaaatgaagagggggatgctagccagacagatgaagatgaagaagagtctgatgaagatgctgcaaagaacgtgtccagtgctgtgtctctgctgaagggtgaaagtaagaccatgcgtagaaaagagaagcgtgctcggatagaacagatcagggtcatccttggcctttctgattctcaaaggactccagtgcctggagaatcactgagagatttctacaagaggacaaatatgtactggcaaatggctgcctatgagcacactcaacacactggaaaggagctccgcaaagacggttttgatcttgccgaaactcgattcaaggaactgaaaccgatacttgacgagctggctgtgctggaggccgagcagaaagctgaggaagaggccagtgcgtcgactagttccaagagggacaccaagaaacccaagcagaagagcgcacgaaggtagctttggttctgaacgagtgtgtaagcggaagccagctttagatgaagttgctccaggaagaggccagtgcgtcagctagtcccaactcccaaggtgtgaagaggggacaccaagaaaatccaagcagaagagtgcagggagatagttttggttctgaacgagtgtttaagcgtaagacggttttaaacgattgctcaaatgctcaagttcctttgaggggatttccattttctttttgaacccaagtagacaaaattgatatttgttgttttataatagtgtatgtatatactcgtacgttgaaatttgattcatgtgcaatcttgaccgtatattctcccactattcgactaaacgaac

SEQ ID NO: 24843 - DNA, 1924 bp, Zea Mays
gtagagttaatttgtatgcaactctcatttctgatgtgctgatgtgattgcttgattaatatttatttttggatcttgtttgagagagaatgggagttcccataaaattatgatttatggattcttacaattgataacacagtcacaaagtgacagaaaataaactaatagcatagaacatcttctgataatatccttccacaggtactacaatgatctgcatgtttttgatttggaccatttcaagtgggaggaaatcaagcctcgacctggatgcctatggccaagtccaagaagtggctttcaacttgctgtttaccaagatcagatatatctatatggtggatattttaaagaagtttcttctgacaaagaaaaaggaacagttcatgcagatatgtggtctcttgatcctcgtacttgggagtggaataaggttaagaaggctgggatgccgcctggtcccagagctggtttttcaatgtgtgtgcacaagaaaagggctgttctttttggtggtgtggtagatatggaagttgaaggtgatgtcattatgagcatgttcatgaacgagctgtatggtttccaattggataaccaccgatggtacccgctagagctcaggaaagacaagcctgctaaaatcaaggcaaggaatatcaaaagaaaagaatcaacgaatgatgtagaagctaatattattgatgatgagggtgatgaggtcatggtggacgtagaagaagctattgaaggacaacctgaagtcaatggagtttccaatcagttgatcaaaactctgaatatcactaaagatggctcaagcagaagcattgatgttctctctgattcaacagcacaagaatcatttttggaggcggtgaagcccagtggtcgtatcaatgcatgcttggccgtagggaaagatatgctctacttgtatggaggaatgatggaagtgaaagatagagaaattactcttgatgatctatattcacttaaccttagcaaacttgatgagtggaagtgtatcatatccgcctcagaatctgaatggttagaaatttctgaggaagaggatgatgatgatgatgatgagactgatgatgatgaaaatgaagagggggatgctagccagacagatgaagatgaagaagagtctgatgaagatgctgcaaagaacgtgtccagtgctgtgtctctgctgaagggtgaaagtaagaccatgcgtagaaaagagaagcgtgctcggatagaacagatcagggtcatccttggcctttctgattctcaaaggactccagtgcctggagaatcactgagagatttctacaagaggacaaatatgtactggcaaatggctgcctatgagcacactcaacacactggaaaggagctccgcaaagacggttttgatcttgccgaaactcgattcaaggaactgaaaccgatacttgacgagctggctgtgctggaggccgagcagaaagctgaggaagaggccagtgcgtcgactagttccaagagggacaccaagaaacccaagcagaagagcgcacgaaggtagctttggttctgaacgagtgtgtaagcggaagccagctttagatgaagttgctccaggaagaggccagtgcgtcagctagtcccaactcccaaggtgtgaagaggggacaccaagaaaatccaagcagaagagtgcagggagatagttttggttctgaacgagtgtttaagcgtaagacggttttaaacgattgctcaaatgctcaagttcctttgaggggatttccattttctttttgaacccaagtagacaaaattgatatttgttgttttataatagtgtatgtatatactcgtacgttgaaatttgattcatgtgcaatcttgaccgtatattctcccactattcgactaaacgaac

SEQ ID NO: 24844 - DNA, 1944 bp, Zea Mays
gaacagagggagtactatgttgtgttgatgaatgatattgtgatcctatctgtgcagacctttgtttatggtgatctttatcgctatgatgtagagaaaaatgaatggaaattggtatctagccctaacagtccacctccacgaagtgctcaccagacagtagcctggaagaataatatatacatgtttggtggggagtttacttcaccaaaccaagaacgttttcatcattacaaggacttttggacattggatctgaaaacaaatcaatgggagcagattcttgcaaagggctgcccaagtgcacgttcaggacacaggatggttctttacaagcataagattgttctatttggtggcttttatgacactcttagggaagtgaggtactacaatgatctgcatgtttttgatttggaccatttcaagtgggaggaaatcaagcctcgacctggatgcctatggccaagtccaagaagtggctttcaacttgctgtttaccaagatcagatatatctatatggtggatattttaaagaagtttcttctgacaaagaaaaaggaacagttcatgcagatatgtggtctcttgatcctcgtacttgggagtggaataaggttaagaaggctgggatgccgcctggtcccagagctggtttttcaatgtgtgtgcacaagaaaagggctgttctttttggtggtgtggtagatatggaagttgaaggtgatgtcattatgagcatgttcatgaacgagctgtatggtttccaattggataaccaccgatggtacccgctagagctcaggaaagacaagcctgctaaaatcaaggcaaggaatatcaaaagaaaagaatcaacgaatgatgtagaagctaatattattgatgatgagggtgatgaggtcatggtggacgtagaagaagctattgaaggacaacctgaagtcaatggagtttccaatcagttgatcaaaactctgaatatcactaaagatggctcaagcagaagcattgatgttctctctgattcaacagcacaagaatcatttttggaggcctcagaatctgaatggttagaaatttctgaggaagaggatgatgatgatgatgatgagactgatgatgatgaaaatgaagagggggatgctagccagacagatgaagatgaagaagagtctgatgaagatgctgcaaagaacgtgtccagtgctgtgtctctgctgaagggtgaaagtaagaccatgcgtagaaaagagaagcgtgctcggatagaacagatcagggtcatccttggcctttctgattctcaaaggactccagtgcctggagaatcactgagagatttctacaagaggacaaatatgtactggcaaatggctgcctatgagcacactcaacacactggaaaggagctccgcaaagacggttttgatcttgccgaaactcgattcaaggaactgaaaccgatacttgacgagctggctgtgctggaggccgagcagaaagctgaggaagaggccagtgcgtcgactagttccaagagggacaccaagaaacccaagcagaagagcgcacgaaggtagctttggttctgaacgagtgtgtaagcggaagccagctttagatgaagttgctccaggaagaggccagtgcgtcagctagtcccaactcccaaggtgtgaagaggggacaccaagaaaatccaagcagaagagtgcagggagatagttttggttctgaacgagtgtttaagcgtaagacggttttaaacgattgctcaaatgctcaagttcctttgaggggatttccattttctttttgaacccaagtagacaaaattgatatttgttgttttataatagtgtatgtatatactcgtacgttgaaatttgattcatgtgcaatcttgaccgtatattctcccactattcgactaaacgaac

SEQ ID NO: 24845 - DNA, 690 bp, Zea Mays
aagaaaaaaaaccccggcccagtagcgcacggaggagctacatgtaaacaggcccggaagccggaacagttgctctcctagtcctgcactcgcacctctttgccgttttccttctcccgttcacctcgcgccgccgccgacctacgccagttgcacaggtcttcgtcggccgctttccggcgaagagcattcgcgcgagggaggggatggggaagaagcagaagaagcctgggaaggggaaggagaagacggagcggaagacagccaagggcgaggagaagcgtgcccgccgggattcccgcaaggtcggcgaggaggacgacatcgaagccatccttaggagcatacagaaggaagaagcgaagaaggaggttcatgtggaggagaatgttcccgcaccatctcctcggtccaattgctcggtaaaggcaccgcaaagcttcaaatgactgaattaaattagcatacttctgcacctgccttatggtacttctgtaattcagctggtcttgttgggttcttagaatttatcatgtctgaacttatcgctgaaagcaaatgaggtagagtggaattagtggattgattgattgagagaggtactgcacaaggggtgtggagatcttgtgatctatagaaacaacaccaacaaggtctcctcaattctctccaaccaaagatacatattgc

SEQ ID NO: 24846 - DNA, 1690 bp, Zea Mays
acggtctcggcccctcggcgggcctccccgcctccctcgcccctgccttcgcctcattggtattggcgtccgcttgctcgctatggccgccgccccgtcgccgcggccgcgaatggcacaccgcaaaggcggagccgcccccatctccctcttccttgacaccgatctcggcacccacctcgccctgctcgtcgccccggacaccggcatccgcggcctcaagtcgcaggtggccgcggagcacgctgccgccttccccgacattggccccgtcatcaccaagtccttccaggtccggcggaagggtgtactgtatcgcctttctgattcaatgacagtgatgagttccttcaccaaaattgaaggtgggtgctttcttcacgtcaatatggcagaggctacagaagccacatactgctgccaagatgctccagcaattgatgataaaagattgagtgatgttagtcttggaattcatgtaaagaaccatattaaggagctgcctgtgatggcatcagatgttgcttgtgatttgctccctagagaccttgaaggtggtaatgatgacaccacgctgaataatgttcaagcacatgatgcattgcccaattgtaccttggtgccatcctcatcacagctaaatactgaaatactgaagaacaaagcagtgggtatggacagtgatgcagaagcaggaattgatcaagttattgacaaagcgaagagttacagtggccagataaaacatgctaatcaagctgaaggcacctacattagttccacatcaatggcatgtgttgataaatcttcaaatgagagtaatatgtcacatgctgtggcggagctacatgcaagtcgagaccatggcgttggtgatgatgtttctgacaaaaagcaagtcagggtagagcagcaactgctggaagagatacaatcaaaggatactctttcacaagtaaaggagcacaaaaaatctaggactggtttttttgacgcatcatgtacgtccctactgaaaacaggtatttcatctacagcctatgatgaaagtgaggcttccgatgatgatggggccatatcactatctcagaagagtctcaaaggtggtctgcacattagctccatcctccgtggttcccgtagctataagaaggcaagaaagaagctggaggagctgttagacgatgatgacaccattgtgcctgatagccagcccacggatggtcttcggggttgaacatgcgtcaaccttttgcaattatccacctaatacggtgcaagtttcatgcgagccccaaagccggtgtgctttgcaattgctgtagcttaacctcccacaatttgtctaaaacacatgcgcgccggcgttatccgttgaggattgcgtatttttatttattgttctcctctgtgcatactcttttcttttcgggagcaaaaaaacattgcatacacgatacatatagtgcctaaaatatacagatcatacatgagatgtaagagcatcagttcaagccgcagcattctatctactcatcatttgtacaaggctggaatagcatgtgatacggcatcgtcaaactaacaaacagacgatcacggggtgcgagacagtctcgtcatctgcgcttctgggtcttcatccctaatgttggcagtcttgcccatagatttctggctcaacatccgg

SEQ ID NO: 24847 - DNA, 4276 bp, Zea Mays
acggtctcggcccctcggcgggcctccccgcctccctcgcccctgccttcgcctcattggtattggcgtccgcttgctcgctatggccgccgccccgtcgccgcggccgcgaatggcacaccgcaaaggcggagccgcccccatctccctcttccttgacaccgatctcggcacccacctcgccctgctcgtcgccccggacaccggcatccgcggcctcaagtcgcaggtggccgcggagcacgctgccgccttccccgacattggccccgtcatcaccaagtccttccaggcgacgaagcatataatgttgaattgaatggcaaagatgaaactatagtcgaagaatctggctgtcgtctttcatcatcagaacttaatgatgcaaaccaggggggcaaaagtgttcagtttgtgagcgatgctctggcatctatagatctaatctgtaaacaagagaagtttggtcattctctcaagggatgtaaggatccttcaattgcaaatgccatttattctacaagtgaaaatgtagctattgaaggaaaaactacaaaagaaagttgtgtccctttggatagaggggacaagcatgaagaaaaaaaacaacacaatgagggatgtcataatgaagctgtacctgaaataagccacatggagaaaggtggcagaagtacagatgtctctaacaagaggcacacaaatcaaattacttctcaagtgaagaagggcaaaaaatcaaaggttggttctgttggcatgcctaccgtggatgccactggtgaaaaagatcatatgtatagtgaaaatgctgccaaacaagatactgtttctactaaaaaggagattgcccatgaaccttctgtgcagcagatgtcaaacattgtgtatcaaggagattcaaatgtagtagaaaatccgagtggtgatggaaagaaaaagaaaaaaagaagacgccactcagaatccttaaagggtatgaatcctagtcaagatctgacatcatcttctggatttgtaacaaacaaaaactcgatacaatgtacagatgctgctccaatagatgcaaagcaaacaacccagggcattatagaaggagaaacagttaatgagcacatgaagcttagtagaagtctagatgtagcagcaacaaatattgttgatggggtattggcagatctacgacctaaagacagcttaagtaaggatctggatgaagatcttttaccaggacaaactcacctaggcagcaatcagaatggactagaagttcctgaatccattgctgttaaagttggtagcgttactgcagcattacctccaaaatgccctgcagcggttcactttgcttctcctgttagctcacctagacaaaagaagtctaaggggaaaaaatcgaaagtgctatcaaccatgactgactcttctcatcaatcaagtggtgtatccgaagaagatgctaatagagaattaacagaatctgattctttgaggtttgctgataaaacaagtgatcctgaggatatagtaactggaaatgtggttgcacaagctgatgataagcgcaaaaccactaagcgtcaaaggaagaagggctctgttaagcaggtatgtgatacattggcattgaaggaaacaaatgatgcagaagaaaatttggttcagggaggttatgtagttgacactcctttaagcactgttggggaagtagagcagaaaggcaagtcttctcagataccgactcctaaaatacgaaaaactaattgttctactcatgggctggatagtcacacaactaaggacaaccagggtgtgtatgtaactgacatcattgaaacccatgataatgaaaatgctgcaggaactccaaccttgcatgaagttcagaaatatgcaatggttctcaaatctgccaacactaattctcaaaagcaaaggaaaacatcttcgaattctgaacttcaaagtcaggattgtgccctggaacatggtttcactgcagatttggtgaacggcaggactgaaagggaagttagcactacaagttctgctagtgctgttaaacctgattaccacaccgtttttcatcgtgctaatgatggaatcaatttcctcgatcattttagctgcagcaatatgaatgatgatccatcaattgctgcagaaagtaagcaaaacaatgaagatgaacctttaagggaaatgaagaataaaaagaagaaatggaagcaaggtactagtagcattgaaccaaatgacattctagaatcttttccctcagagaaagctagcttaactggtcattttggtaccagcaaagctattgtgtcatctgttgcaaaagaaagcatgaacatagaaaatgagaatgtgaatgacggcaaggagaagaagagaaagggcaaagctaatatggaagtacctactgctgaaaaggacaattctaattgtgataatcaaggaattgatattagtacccaagaatcacttatttcttttgtacaaaatgaaaggacgggtcaggacaatggaaaagagagcaacagtaaagttactcagaatgccagtataatgcaacatggacgagaagatcccacttggaatcatactcctgagaagaatctccaccagagtgttgatgatgatcaaaacaagttgctcactgaaaaggatcatgcacatataagtaaagaagtggggaaattcacttctcagccaaagccccatgctaagattagaaagcctgatgagtttactatcaagggaaaggtggctccaaatcctaagcctgtaagcaaccttatgaaggatttttccacgagcccaggagcgtcaagtgacagcacagagggtatgccacaaagtgctaaccgatataaagtttcagtccagaaagtcccaagtaaaatgtatcaagagaccagtggaaactccaaaaaagcgagtaggaaaatagtctctggtgcaatatccaatgactctatcagggagggttgtggtgatgaattggacaccacaactgtcatggaaggatcatctgatagttcatctacctctgctgactcaggtatttcatctacagcctatgatgaaagtgaggcttccgatgatgatggggccatatcactgtaagttctctgacctgcaaagtgagaaaatagctacccgcaaagtgagaaaatagctattagagaaatgcctgttttcttgtatcagcttgcgacaatgtggacgagttgcatggtaggcattaggctgtgtccagcaaatcgtcgtgtaaaacactgttttgcattgtaaatagtattgtttagagtggagtttaaaataggaggtgggatagggaatgacgaatgagatagccttatagtaacataaacctagtacataccatgtctagggggaaagatgttctgatactatctactccctccgttccaaaatataatttgttttagactaaacattcattcattcattaaccttagctggttaaaacaaccatacagtgatgacttgtttgataaaattgtttgtctactacttacccgtgttgtccaggttcagaatcccctattttggaactgagttagaaacagtcatgattgtttccttggcgtcagctgaagcttactgacaccttaatccgattttctcgcactcgttcagatctcagaagagtctcaaaggtggtctgcacattagctccatcctccgtggttcccgtagctataagaaggcaagaaagaagctggaggagctgttagacgatgatgacaccattgtgcctgatagccagcccacggatggtcttcggggttgaacatgcgtcaaccttttgcaattatccacctaatacggtgcaagtttcatgcgagccccaaagccggtgtgctttgcaattgctgtagcttaacctcccacaatttgtctaaaacacatgcgcgccggcgttatccgttgaggattgcgtatttttatttattgttctcctctgtgcatactcttttcttttcgggagcaaaaaaacattgcatacacgatacatatagtgcctaaaatatacagatcatacatgagatgtaagagcatcagttcaagccgcagcattctatctactcatcatttgtacaaggctggaatagcatgtgatacggcatcgtcaaactaacaaacagacgatcacggggtgcgagacagtctcgtcatctgcgcttctgggtcttcatccctaatgttggcagtcttgcccatagatttctggctcaacatccgg

SEQ ID NO: 24848 - DNA, 4947 bp, Zea Mays
acggtctcggcccctcggcgggcctccccgcctccctcgcccctgccttcgcctcattggtattggcgtccgcttgctcgctatggccgccgccccgtcgccgcggccgcgaatggcacaccgcaaaggcggagccgcccccatctccctcttccttgacaccgatctcggcacccacctcgccctgctcgtcgccccggacaccggcatccgcggcctcaagtcgcaggtggccgcggagcacgctgccgccttccccgacattggccccgtcatcaccaagtccttccaggtgggtgctttcttcacgtcaatatggcagaggctacagaagccacatactgctgccaagatgctccagcaattgatgataaaagattgagtgatgttagtcttggaattcatgtaaagaaccatattaaggagctgcctgtgatggcatcagatgttgcttgtgatttgctccctagagaccttgaaggtggtaatgatgacaccacgctgaataatgttcaagcacatgatgcattgcccaattgtaccttggtgccatcctcatcacagctaaatactgaaatactgaagaacaaagcagtgggtatggacagtgatgcagaagcaggaattgatcaagttattgacaaagcgaagagttacagtggccagataaaacatgctaatcaagctgaaggcacctacattagttccacatcaatggcatgtgttgataaatcttcaaatgagagtaatatgtcacatgctgtggcggagctacatgcaagtcgagaccatggcgttggtgatgatgtttctgacaaaaagcaagtcagggtagagcagcaactgctggaagagatacaatcaaaggatactctttcacaagtaaaggagcacaaaaaatctaggactggtttttttgacgcatcatgtacgtccctactgaaaacaggtactactcttgtggaatctttaaacacttctaatcatcaagaagtccatgaaaccttcaatgtggagtccatccagctagaaaatccaagcactgttggaaagaagaagaaaaggaaaaggcgtcaattgtccccttcaaaatctgcttctgctcaagagacaatagaaccatcagctacggcagtagatttattaaaacccacaggtgaaggtctgcctaataacagccttgggatacagattcataatatacttgcaatggataatctttcacaagaaaaggagcacaaaaaatctaggactagttctcctgacacatcaagtaggcatctactggaaacagaccctgcttctcttagggaacctttaaacacttcgaatcatcaagtccatgacactttacatcaggagtccatccagctagaaaacccaagtgctgctgggaagaagaaaaagagaaagcgtcaattgtccccttcaaaatctgtttctactcaaataacgacagaaccatcgcctggggcagccccagcagacttatcaagatccacaggcgacgaagcatataatgttgaattgaatggcaaagatgaaactatagtcgaagaatctggctgtcgtctttcatcatcagaacttaatgatgcaaaccaggggggcaaaagtgttcagtttgtgagcgatgctctggcatctatagatctaatctgtaaacaagagaagtttggtcattctctcaagggatgtaaggatccttcaattgcaaatgccatttattctacaagtgaaaatgtagctattgaaggaaaaactacaaaagaaagttgtgtccctttggatagaggggacaagcatgaagaaaaaaaacaacacaatgagggatgtcataatgaagctgtacctgaaataagccacatggagaaaggtggcagaagtacagatgtctctaacaagaggcacacaaatcaaattacttctcaagtgaagaagggcaaaaaatcaaaggttggttctgttggcatgcctaccgtggatgccactggtgaaaaagatcatatgtatagtgaaaatgctgccaaacaagatactgtttctactaaaaaggagattgcccatgaaccttctgtgcagcagatgtcaaacattgtgtatcaaggagattcaaatgtagtagaaaatccgagtggtgatggaaagaaaaagaaaaaaagaagacgccactcagaatccttaaagggtatgaatcctagtcaagatctgacatcatcttctggatttgtaacaaacaaaaactcgatacaatgtacagatgctgctccaatagatgcaaagcaaacaacccagggcattatagaaggagaaacagttaatgagcacatgaagcttagtagaagtctagatgtagcagcaacaaatattgttgatggggtattggcagatctacgacctaaagacagcttaagtaaggatctggatgaagatcttttaccaggacaaactcacctaggcagcaatcagaatggactagaagttcctgaatccattgctgttaaagttggtagcgttactgcagcattacctccaaaatgccctgcagcggttcactttgcttctcctgttagctcacctagacaaaagaagtctaaggggaaaaaatcgaaagtgctatcaaccatgactgactcttctcatcaatcaagtggtgtatccgaagaagatgctaatagagaattaacagaatctgattctttgaggtttgctgataaaacaagtgatcctgaggatatagtaactggaaatgtggttgcacaagctgatgataagcgcaaaaccactaagcgtcaaaggaagaagggctctgttaagcaggtatgtgatacattggcattgaaggaaacaaatgatgcagaagaaaatttggttcagggaggttatgtagttgacactcctttaagcactgttggggaagtagagcagaaaggcaagtcttctcagataccgactcctaaaatacgaaaaactaattgttctactcatgggctggatagtcacacaactaaggacaaccagggtgtgtatgtaactgacatcattgaaacccatgataatgaaaatgctgcaggaactccaaccttgcatgaagttcagaaatatgcaatggttctcaaatctgccaacactaattctcaaaagcaaaggaaaacatcttcgaattctgaacttcaaagtcaggattgtgccctggaacatggtttcactgcagatttggtgaacggcaggactgaaagggaagttagcactacaagttctgctagtgctgttaaacctgattaccacaccgtttttcatcgtgctaatgatggaatcaatttcctcgatcattttagctgcagcaatatgaatgatgatccatcaattgctgcagaaagtaagcaaaacaatgaagatgaacctttaagggaaatgaagaataaaaagaagaaatggaagcaaggtactagtagcattgaaccaaatgacattctagaatcttttccctcagagaaagctagcttaactggtcattttggtaccagcaaagctattgtgtcatctgttgcaaaagaaagcatgaacatagaaaatgagaatgtgaatgacggcaaggagaagaagagaaagggcaaagctaatatggaagtacctactgctgaaaaggacaattctaattgtgataatcaaggaattgatattagtacccaagaatcacttatttcttttgtacaaaatgaaaggacgggtcaggacaatggaaaagagagcaacagtaaagttactcagaatgccagtataatgcaacatggacgagaagatcccacttggaatcatactcctgagaagaatctccaccagagtgttgatgatgatcaaaacaagttgctcactgaaaaggatcatgcacatataagtaaagaagtggggaaattcacttctcagccaaagccccatgctaagattagaaagcctgatgagtttactatcaagggaaaggtggctccaaatcctaagcctgtaagcaaccttatgaaggatttttccacgagcccaggagcgtcaagtgacagcacagagggtatgccacaaagtgctaaccgatataaagtttcagtccagaaagtcccaagtaaaatgtatcaagagaccagtggaaactccaaaaaagcgagtaggaaaatagtctctggtgcaatatccaatgactctatcagggagggttgtggtgatgaattggacaccacaactgtcatggaaggatcatctgatagttcatctacctctgctgactcaggtatttcatctacagcctatgatgaaagtgaggcttccgatgatgatggggccatatcactatctcagaagagtctcaaaggtggtctgcacattagctccatcctccgtggttcccgtagctataagaaggcaagaaagaagctggaggagctgttagacgatgatgacaccattgtgcctgatagccagcccacggatggtcttcggggttgaacatgcgtcaaccttttgcaattatccacctaatacggtgcaagtttcatgcgagccccaaagccggtgtgctttgcaattgctgtagcttaacctcccacaatttgtctaaaacacatgcgcgccggcgttatccgttgaggattgcgtatttttatttattgttctcctctgtgcatactcttttcttttcgggagcaaaaaaacattgcatacacgatacatatagtgcctaaaatatacagatcatacatgagatgtaagagcatcagttcaagccgcagcattctatctactcatcatttgtacaaggctggaatagcatgtgatacggcatcgtcaaactaacaaacagacgatcacggggtgcgagacagtctcgtcatctgcgcttctgggtcttcatccctaatgttggcagtcttgcccatagatttctggctcaacatccgg

SEQ ID NO: 24849 - DNA, 1370 bp, Zea Mays
cccctgtccccctcctactacttccccctccctcctaccccggccctatatatgcaaagtgaacccttcttctacggccacaccggcattccactgctgctatctgctccgcacactccattgctagctgtaacgcactgcaagaaagagctagctagctcaccgtcgttacgaagatgatcaagctgaggtaccctaagaagctgttcaggaggagctcctccaagggcagcagcactaccagcagcagcagcagcagcgacggcgatgccgccggcagcgcccgcggcggggagatcgagtgggaggtccggccgggcggcatgctggtgcagaagagggacgacggcagggggcacgtggacgtcatcaccgtgagggtcgccaccggcttctcctggcacgacgtctccgtcgtggctacctgcacttttggtgagctgaaggcggtgctgtggaagatgacagggctggagcctcgggagcagaggctcctgttcaggggcaaggagagggaggacggcgaccacctccacatgatcggggtgagggacatggacaaggtgctgctcctggaggaccctgccctcaaggacatgaagctccgggccgggctcacggcggcgtatcgtcagactttcatcagggtgtaatagtaggcttaggcttgccgcccccgccccctaattaactgtgatgcatgatagagagagagagagagagagagagtaaacgaaccagtatcgtgttttcggctgctcagctgggtcggtgaacgactgcctgcctgttgaagagaagccactgcttgtttttgtttatgtttagctgtgtcttttgtcatttttgcagggtagagagatgaatcacgtacgctgagtttttactggcctagctagcaagctccacacacgtacagtttcgacttttgattgaagggcttcccagtcccaggctccagcagcacctgatatgtggacacattcttccgttcacccccttggttaattattgtgcagtttcgtcagatcgaagggctgcatggagcactgctgtcctggtggtggcatggcatataccgtactctatatgcatgtactccacatttgtgaggtagtagccgctttggactttgcgaagatcgcctgccctatgcccctattgtcccgtcacatgactctatctcgctcaccactcccgtactatatatttttccactgagtttttagaagttttaatgagtcatatgttcaccgcggtattcgttcaaagggaagtattaagaaactctagtaaggttatatgggcgaatctcacatctctatataaaagaacatatacccttataagagatagaagattaaaagagg

SEQ ID NO: 24850 - DNA, 1574 bp, Zea Mays
cccctgtccccctcctactacttccccctccctcctaccccggccctatatatgcaaagtgaacccttcttctacggccacaccggcattccactgctgctatctgctccgcacactccattgctagctgtaacgcactgcaagaaagagctagctagctcaccgtcgttacgaagatgatcaagctgaggtaccctaagaagctgttcaggaggagctcctccaagggcagcagcactaccagcagcagcagcagcagcgacggcgatgccgccggcagcgcccgcggcggggagatcgagtgggaggtccggccgggcggcatgctggtgcagaagagggacgacggcagggggcacgtggacgtcatcaccgtgagggtcgccaccggcttctcctggcacgacgtctccgtcgtggctacctgcacttttggtgagctgaaggcggtgctgtggaagatgacagggctggagcctcgggagcagaggctcctgttcaggggcaaggagagggaggacggcgaccacctccacatgatcggggtgagggacatggacaaggtgctgctcctggaggaccctgccctcaaggacatgaagctccgggccgggctcacggcggcgtatcgtcagactttcatcagggtgtaatagtaggcttaggcttgccgcccccgccccctaattaactgtgatgcatgatagagagagagagagagagagagagtaaacgaaccagtatcgtgttttcggctgctcagctgggtcggtgaacgactgcctgcctgttgaagagaagccactgcttgtttttgtttatgtttagctgtgtcttttgtcatttttgcagggtagagagatgaatcacgtacgctgagtttttactggcctagctagcaagctccacacacgtacagtttcgacttttgattgaagggcttcccagtcccaggctccagcagcacctgatatgtggacacattcttccgttcacccccttggttaattattgtgcagtttcgtcaggtgcttgcttcaaaatctctgaattgggtgtgtctggctatatatatgctgctgacaataatgacatgaggctgccaaatttacattttccacagaactgactacctccgaatttactacattttccacgcaactgactacctctgaatttactgaacaaacagtctaacagacactcgactgacactgccctctgtactgtagatcgaagggctgcatggagcactgctgtcctggtggtggcatggcatataccgtactctatatgcatgtactccacatttgtgaggtagtagccgctttggactttgcgaagatcgcctgccctatgcccctattgtcccgtcacatgactctatctcgctcaccactcccgtactatatatttttccactgagtttttagaagttttaatgagtcatatgttcaccgcggtattcgttcaaagggaagtattaagaaactctagtaaggttatatgggcgaatctcacatctctatataaaagaacatatacccttataagagatagaagattaaaagagg

SEQ ID NO: 24851 - DNA, 964 bp, Zea Mays
ctttttttcttcttctcagttacacagggcagcacgcagggaaacactgacgcatgatcccgccatgatcgtagcaggagcagcgccacatgcaggccaagctaggactggttaatttcgaggcagaaggccgaggatgtatctgccggtgggtggagagcacgcacgtcgaggcgcttctcgctcggctcgtaccggccgccccttgcgcagcagctggtaccgatgcgccgacgccgtgtacgcctgcctgcccctccgtcgtcacgctagctagctctcgccgcagtgcatgttctgcttggcgtagcccgtcgccacccatccatgcatgcccggcacacagccaggaacagcaacgccattagctatctagctagtagtagtagtaggaaccagcagcagctggagctgagtgacaagctgtgtgctcagacagtgcagagagtactggacaatgacgcggcatttagcagagggcaaatggtggcagccagcaatcgctggcgttctcggaataatggatattgagaagaaggttcagttcggaatctgagcaaggggctgcgaattcccgcacggacgcagcagactcagcttctgaacatggctgccaagcaggggacgcggacgacgacggcgatgctgctccccactccacttgctcatacaaaagctcagtcaaagttaacgtatctgtgcataattgcgtaattgcgtatgcaggctcgcctcaccatggctggtcggatacgattgtttcgactttcgagggtatggatggatgcaatcaaattgatttaaaataatttatttgttttttttctttttttcacccaaattttttgtattgtgttcatacaatctctggacctacatgttcaactttggtacatttcttatagtgttttctatatatgttacatttaattcatttaattgaatttcatcgaataattcaaat

SEQ ID NO: 24852 - DNA, 3200 bp, Zea Mays
cgccttccattattgctggaggtcagcacaccatcacctggttggggaagacgaagatgtgggagctgagcctactacaatggggtcagagcggagtttccggggaccaagcgcaaggactgcatcgtataggaaatcttctgctgtcaggatcagaggactgaacccaccaagaagcaagcaggttcaccgtgtccgccaagacggccaccgcaagtcattggattctaaccactcaaaccatagctctatccgtcaattggcagacaatatggtcagcaatgtggatgcagataaggaagagggggaagtgaattcctatgaaagaccaaaacttgcaatgccagataagtctgacgaagaggtgaaaatgccaggctgctccaaatccaggagcaagtcttctgctgcaatgagccgtgttgggagcccctgcatgtcagccagtgaggcacgctcagttgggtcaagaagaagcactttggggcatggaaccgaggatacacgactgaggtcaaatgatgtcgtgggatccaatttcagtggctgtggtataagctactgctggtcaggagcgtcaaagtaccgggagctttattctgacagcgatggtccagaccaacctctcttatccacagatgggattgaggcagcattccaaggcaatgtaccatacactgagacactgaggtgtctaagccagaagttccgccctcgttccttcagtgaactgattggcctaaatgtcgttgcccagtccctcctatattccacttgcaaaggaaaagttgctccaatgtacttgttccatggcccccggggtacaggcaagacatccacggcaaggatttttgccgcggcactgaactgtgtatctcttgaggagcaaaggccgtgtgggttctgtaaagagtgtgtcattcttttctctgggaagagcagagatgtgaaagagcttgacgctgcgaaaatggatcgtctaggccgagtgaaggcacttctcaagagcgcatcgctcgtgccatactcctcgcgcttcaaggtcttcatagtagatgagtgccacctcttgcgagaagatgcatggtcagcaatactgaagagccttgacgagccataccggcacacggtgtacattatgatcacttctgacatagaaagcctgcctcgcgcttccatcacacattgtcagaagttccattttccaaagataaaggtggcggatattgtctacaggttggagaggatctgtatagaagaaggattggaatttgaccatgatgggttgtacttcattgctgcaaagtctaatggttctcttagagattcagaaataatgcttgatcaactcagtttgcttgggaagaaggtcacaatttctcttgtgcatgaacttgtaggatctgtgtctgatgatgagttgattgaattgcttgatctagcgttgtcatccgacacaaccaataccgtaagacgagctcgagaacttatggggtcagcaatcgatcctctgcagctggtgtctcagttggccaaccttattatggacattctctcagggagatgtcaatctgcagtcacggaagtcagcaaaagtttcttgggtagatatgcattatcagaggttggaataaagaaactaagacatgcactgaagatactatcagaaactgaaaaacaattgagaacatcaaggaatcaggctacttgggttacagttgcgcttttgcagtttagcaccaatgaacctaaccctgttgctgaaacaaatgatatgcatgcacattcagtaactggatatacagatgactgggtttccaaggtgcactcaagtgccaatttttgccaggcatgtaacagcagcaagtccaactgttctgagagacactgtaggcggcttaagctcgagaacatatggaggagagccattggaaagtgtcgatctaggtcagctaaaagtttcctcaggaaagaaggcttcttatcgtcggttcacgtcaccgaagagctggccatagcagaagttggttttgaacacccagatcacctgtcaagagcggagaaaatgcaaagcctaatagaatcctctttgcaacacgttcttgggtgcaatgtggagatcagattcaaactcgtgccatgcccagtgagcaaagatgctaggttgaagagacagccgttcagctttctcaactgctctggccggaagcaagagctgtcagattcagtcgtgactgatgaagacgaagctgcgagggggcctggagcaagagagacaccgcttaaaggctacacctctagccagcaggaatcaccatacaccatgcgacgtgtcgattcgaaaccaacaacggtccacggttgcgaggatgacgcccggagtaccttgacgtcaagcagatccacggcagatgacctgacaaggacgtgcaggtcggagactggctacccaaagggtgtgcgtgagcagggccgctctgatggcacgcagcaggagcctgacctacagccgaactgcttctcgcgaacgctcaagcttcagaagaagctgctgtcttctggcgcagcgcacaccatctgtctgagggtccagccacataacaagatggatttcctgcctaagaaagagttcgatacgtacttctgcgcgtatgagccctacgagcagtgtccaagatcagattcaagagctacttacagttcaagagacgatgacttgtggagcaagaattcacgctttggctcgaatctactctgctggagagccccaaaacagtccatgtaatggaggaaagaacgagtgaactgggtggaacaaatcgattctgctacgagattttaccaattttgcccgaagctggagacatggacaccacccgcagctgcggggacaaattttgaagggaagtctaggaggggtctgtgctattcttgatcttggtaggcagctgaggattgaggaactatttagtgatgttttcttggaaatgcagatcctttataatgctagtgggcagttgtacagcgcgccagcgacgaaaccctgtgaattgttctgttattctgaattttgtaggacgatttgatgctctctctctgaatttacatgatctttttattagctgaatgattacagtgtccagaaaataggccaccacgaaacctgatagtccagaatctaatctaaaacaaggcaaaat

SEQ ID NO: 24853 - DNA, 3458 bp, Zea Mays
tgggtcatgccgtaatcaaaagaaggactacattttcatgccaacattgaagataccgccttccattattgctgggtaagttggaacagaggagtgcgtattcaagatgatggacatgaggcgccactctgtgtctgtggatgccccactgtcaagaaccttggtgcagctcaagcgagtgaggtcgctgcgggatccagcgacaaactcgatgagcaagtacgcgtctccttccgatcacatgatctgggagactgcttctagcaatggggtgactccggagcttggcaggtcagcacaccatcacctggttggggaagacgaagatgtgggagctgagcctactacaatggggtcagagcggagtttccggggaccaagcgcaaggactgcatcgtataggaaatcttctgctgtcaggatcagaggactgaacccaccaagaagcaagcaggttcaccgtgtccgccaagacggccaccgcaagtcattggattctaaccactcaaaccatagctctatccgtcaattggcagacaatatggtcagcaatgtggatgcagataaggaagagggggaagtgaattcctatgaaagaccaaaacttgcaatgccagataagtctgacgaagaggtgaaaatgccaggctgctccaaatccaggagcaagtcttctgctgcaatgagccgtgttgggagcccctgcatgtcagccagtgaggcacgctcagttgggtcaagaagaagcactttggggcatggaaccgaggatacacgactgaggtcaaatgatgtcgtgggatccaatttcagtggctgtggtataagctactgctggtcaggagcgtcaaagtaccgggagctttattctgacagcgatggtccagaccaacctctcttatccacagatgggattgaggcagcattccaaggcaatgtaccatacactgagacactgaggtgtctaagccagaagttccgccctcgttccttcagtgaactgattggcctaaatgtcgttgcccagtccctcctatattccacttgcaaaggaaaagttgctccaatgtacttgttccatggcccccggggtacaggcaagacatccacggcaaggatttttgccgcggcactgaactgtgtatctcttgaggagcaaaggccgtgtgggttctgtaaagagtgtgtcattcttttctctgggaagagcagagatgtgaaagagcttgacgctgcgaaaatggatcgtctaggccgagtgaaggcacttctcaagagcgcatcgctcgtgccatactcctcgcgcttcaaggtcttcatagtagatgagtgccacctcttgcgagaagatgcatggtcagcaatactgaagagccttgacgagccataccggcacacggtgtacattatgatcacttctgacatagaaagcctgcctcgcgcttccatcacacattgtcagaagttccattttccaaagataaaggtggcggatattgtctacaggttggagaggatctgtatagaagaaggattggaatttgaccatgatgggttgtacttcattgctgcaaagtctaatggttctcttagagattcagaaataatgcttgatcaactcagtttgcttgggaagaaggtcacaatttctcttgtgcatgaacttgtaggatctgtgtctgatgatgagttgattgaattgcttgatctagcgttgtcatccgacacaaccaataccgtaagacgagctcgagaacttatggggtcagcaatcgatcctctgcagctggtgtctcagttggccaaccttattatggacattctctcagggagatgtcaatctgcagtcacggaagtcagcaaaagtttcttggtatcagaggttggaataaagaaactaagacatgcactgaagatactatcagaaactgaaaaacaattgagaacatcaaggaatcaggctacttgggttacagttgcgcttttgcagtttagcaccaatgaacctaaccctgttgctgaaacaaatgatatgcatgcacattcagtaactggatatacagatgactgggtttccaaggtgcactcaagtgccaatttttgccaggcatgtaacagcagcaagtccaactgttctgagagacactgtaggcggcttaagctcgagaacatatggaggagagccattggaaagtgtcgatctaggtcagctaaaagtttcctcaggaaagaaggcttcttatcgtcggttcacgtcaccgaagagctggccatagcagaagttggttttgaacacccagatcacctgtcaagagcggagaaaatgcaaagcctaatagaatcctctttgcaacacgttcttgggtgcaatgtggagatcagattcaaactcgtgccatgcccagtgagcaaagatgctaggttgaagagacagccgttcagctttctcaactgctctggccggaagcaagagctgtcagattcagtcgtgactgatgaagacgaagctgcgagggggcctggagcaagagagacaccgcttaaaggctacacctctagccagcaggaatcaccatacaccatgcgacgtgtcgattcgaaaccaacaacggtccacggttgcgaggatgacgcccggagtaccttgacgtcaagcagatccacggcagatgacctgacaaggacgtgcaggtcggagactggctacccaaagggtgtgcgtgagcagggccgctctgatggcacgcagcaggagcctgacctacagccgaactgcttctcgcgaacgctcaagcttcagaagaagctgctgtcttctggcgcagcgcacaccatctgtctgagggtccagccacataacaagatggatttcctgcctaagaaagagttcgatacgtacttctgcgcgtatgagccctacgagcagtgtccaagatcagattcaagagctacttacagttcaagagacgatgacttgtggagcaagaattcacgctttggctcgaatctactctgctggagagccccaaaacagtccatgtaatggaggaaagaacgagtgaactgggtggaacaaatcgattctgctacgagattttaccaattttgcccgaagctggagacatggacaccacccgcagctgcggggacaaattttgaagggaagtctaggaggggtctgtgctattcttgatcttggtaggcagctgaggattgaggaactatttagtgatgttttcttggaaatgcagatcctttataatgctagtgggcagttgtacagcgcgccagcgacgaaaccctgtgaattgttctgttattctgaattttgtaggacgatttgatgctctctctctgaatttacatgatctttttattagctgaatgattacagtgtccagaaaataggccaccacgaaacctgatagtccagaatctaatctaaaacaaggcaaaat

SEQ ID NO: 24854 - DNA, 3233 bp, Zea Mays
tgggtcatgccgtaatcaaaagaaggactacattttcatgccaacattgaagataccgccttccattattgctgggtaagttggaacagaggagtgcgtattcaagatgatggacatgaggcgccactctgtgtctgtggatgccccactgtcaagaaccttggtgcagctcaagcgagtgaggtcgctgcgggatccagcgacaaactcgatgagcaagtacgcgtctccttccgatcacatgatctgggagactgcttctagcaatggggtgactccggagcttggcaggtcagcacaccatcacctggttggggaagacgaagatgtgggagctgagcctactacaatggggtcagagcggagtttccggggaccaagcgcaaggactgcatcgtataggaaatcttctgctgtcaggatcagaggactgaacccaccaagaagcaagcaggttcaccgtgtccgccaagacggccaccgcaagtcattggattctaaccactcaaaccatagctctatccgtcaattggcagacaatatggtcagcaatgtggatgcagataaggaagagggggaagtgaattcctatgaaagaccaaaacttgcaatgccagataagtctgacgaagaggtgaaaatgccaggctgctccaaatccaggagcaagtcttctgctgcaatgagccgtgttgggagcccctgcatgtcagccagtgaggcacgctcagttgggtcaagaagaagcactttggggcatggaaccgaggatacacgactgaggtcaaatgatgtcgtgggatccaatttcagtggctgtggtataagctactgctggtcaggagcgtcaaagtaccgggagctttattctgacagcgatggtccagaccaacctctcttatccacagatgggattgaggcagcattccaaggcaatgtaccatacactgagacactgaggtgtctaagccagaagttccgccctcgttccttcagtgaactgattggcctaaatgtcgttgcccagtccctcctatattccacttgcaaaggaaaagttgctccaatgtacttgttccatggcccccggggtacaggcaagacatccacggcaaggatttttgccgcggcactgaactgtgtatctcttgaggagcaaaggccgtgtgggttctgtaaagagtgtgtcattcttttctctgggaagagcagagatgtgaaagagcttgacgctgcgaaaatggatcgtctaggccgagtgaaggcacttctcaagagcgcatcgctcgtgccatactcctcgcgcttcaaggtcttcatagtagatgagtgccacctcttgcgagaagatgcatggtcagcaatactgaagagccttgacgagccataccggcacacggtgtacattatgatcacttctgacatagaaagcctgcctcgcgcttccatcacacattgtcagaagttccattttccaaagataaaggtggcggatattgtctacaggttggagaggatctgtatagaagaaggattggaatttgaccatgatgggttgtacttcattgctgcaaagtctaatggttctcttagagattcagaaataatgcttgatcaactcagtttgcttgggaagaaggtcacaatttctcttgtgcatgaacttgtaggatctgtgtctgatgatgagttgattgaattgcttgatctagcgttgtcatccgacacaaccaataccgtaagacgagctcgagaacttatggggtcagcaatcgatcctctgcagctggtgtctcagttggccaaccttattatggacattctctcagggagatgtcaatctgcagtcacggaagtcagcaaaagtttcttgggtagatatgcattatcagaggttggaataaagaaactaagacatgcactgaagatactatcagaaactgaaaaacaattgagaacatcaaggaatcaggctacttgggttacagttgcgcttttgcagtttagcaccaatgaacctaaccctgttgctgaaacaaatgatatgcatgcacattcagtaactggatatacagatcacctgtcaagagcggagaaaatgcaaagcctaatagaatcctctttgcaacacgttcttgggtgcaatgtggagatcagattcaaactcgtgccatgcccagtgagcaaagatgctaggttgaagagacagccgttcagctttctcaactgctctggccggaagcaagagctgtcagattcagtcgtgactgatgaagacgaagctgcgagggggcctggagcaagagagacaccgcttaaaggctacacctctagccagcaggaatcaccatacaccatgcgacgtgtcgattcgaaaccaacaacggtccacggttgcgaggatgacgcccggagtaccttgacgtcaagcagatccacggcagatgacctgacaaggacgtgcaggtcggagactggctacccaaagggtgtgcgtgagcagggccgctctgatggcacgcagcaggagcctgacctacagccgaactgcttctcgcgaacgctcaagcttcagaagaagctgctgtcttctggcgcagcgcacaccatctgtctgagggtccagccacataacaagatggatttcctgcctaagaaagagttcgatacgtacttctgcgcgtatgagccctacgagcagtgtccaagatcagattcaagagctacttacagttcaagagacgatgacttgtggagcaagaattcacgctttggctcgaatctactctgctggagagccccaaaacagtccatgtaatggaggaaagaacgagtgaactgggtggaacaaatcgattctgctacgagattttaccaattttgcccgaagctggagacatggacaccacccgcagctgcggggacaaattttgaagggaagtctaggaggggtctgtgctattcttgatcttggtaggcagctgaggattgaggaactatttagtgatgttttcttggaaatgcagatcctttataatgctagtgggcagttgtacagcgcgccagcgacgaaaccctgtgaattgttctgttattctgaattttgtaggacgatttgatgctctctctctgaatttacatgatctttttattagctgaatgattacagtgtccagaaaataggccaccacgaaacctgatagtccagaatctaatctaaaacaaggcaaaat

SEQ ID NO: 24855 - DNA, 3542 bp, Zea Mays
caaatctcttctgtttttaagtgcaggctactggtgggggtgtagggctgaggccaggtgacttcgctacaatgggtcatgccgtaatcaaaagaaggactacattttcatgccaacattgaagataccgccttccattattgctgggtaagttggaacagaggagtgcgtattcaagatgatggacatgaggcgccactctgtgtctgtggatgccccactgtcaagaaccttggtgcagctcaagcgagtgaggtcgctgcgggatccagcgacaaactcgatgagcaagtacgcgtctccttccgatcacatgatctgggagactgcttctagcaatggggtgactccggagcttggcaggtcagcacaccatcacctggttggggaagacgaagatgtgggagctgagcctactacaatggggtcagagcggagtttccggggaccaagcgcaaggactgcatcgtataggaaatcttctgctgtcaggatcagaggactgaacccaccaagaagcaagcaggttcaccgtgtccgccaagacggccaccgcaagtcattggattctaaccactcaaaccatagctctatccgtcaattggcagacaatatggtcagcaatgtggatgcagataaggaagagggggaagtgaattcctatgaaagaccaaaacttgcaatgccagataagtctgacgaagaggtgaaaatgccaggctgctccaaatccaggagcaagtcttctgctgcaatgagccgtgttgggagcccctgcatgtcagccagtgaggcacgctcagttgggtcaagaagaagcactttggggcatggaaccgaggatacacgactgaggtcaaatgatgtcgtgggatccaatttcagtggctgtggtataagctactgctggtcaggagcgtcaaagtaccgggagctttattctgacagcgatggtccagaccaacctctcttatccacagatgggattgaggcagcattccaaggcaatgtaccatacactgagacactgaggtgtctaagccagaagttccgccctcgttccttcagtgaactgattggcctaaatgtcgttgcccagtccctcctatattccacttgcaaaggaaaagttgctccaatgtacttgttccatggcccccggggtacaggcaagacatccacggcaaggatttttgccgcggcactgaactgtgtatctcttgaggagcaaaggccgtgtgggttctgtaaagagtgtgtcattcttttctctgggaagagcagagatgtgaaagagcttgacgctgcgaaaatggatcgtctaggccgagtgaaggcacttctcaagagcgcatcgctcgtgccatactcctcgcgcttcaaggtcttcatagtagatgagtgccacctcttgcgagaagatgcatggtcagcaatactgaagagccttgacgagccataccggcacacggtgtacattatgatcacttctgacatagaaagcctgcctcgcgcttccatcacacattgtcagaagttccattttccaaagataaaggtggcggatattgtctacaggttggagaggatctgtatagaagaaggattggaatttgaccatgatgggttgtacttcattgctgcaaagtctaatggttctcttagagattcagaaataatgcttgatcaactcagtttgcttgggaagaaggtcacaatttctcttgtgcatgaacttgtaggatctgtgtctgatgatgagttgattgaattgcttgatctagcgttgtcatccgacacaaccaataccgtaagacgagctcgagaacttatggggtcagcaatcgatcctctgcagctggtgtctcagttggccaaccttattatggacattctctcagggagatgtcaatctgcagtcacggaagtcagcaaaagtttcttgggtagatatgcattatcagaggttggaataaagaaactaagacatgcactgaagatactatcagaaactgaaaaacaattgagaacatcaaggaatcaggctacttgggttacagttgcgcttttgcagtttagcaccaatgaacctaaccctgttgctgaaacaaatgatatgcatgcacattcagtaactggatatacagatgactgggtttccaaggtgcactcaagtgccaatttttgccaggcatgtaacagcagcaagtccaactgttctgagagacactgtaggcggcttaagctcgagaacatatggaggagagccattggaaagtgtcgatctaggtcagctaaaagtttcctcaggaaagaaggcttcttatcgtcggttcacgtcaccgaagagctggccatagcagaagttggttttgaacacccagatcacctgtcaagagcggagaaaatgcaaagcctaatagaatcctctttgcaacacgttcttgggtgcaatgtggagatcagattcaaactcgtgccatgcccagtgagcaaagatgctaggttgaagagacagccgttcagctttctcaactgctctggccggaagcaagagctgtcagattcagtcgtgactgatgaagacgaagctgcgagggggcctggagcaagagagacaccgcttaaaggctacacctctagccagcaggaatcaccatacaccatgcgacgtgtcgattcgaaaccaacaacggtccacggttgcgaggatgacgcccggagtaccttgacgtcaagcagatccacggcagatgacctgacaaggacgtgcaggtcggagactggctacccaaagggtgtgcgtgagcagggccgctctgatggcacgcagcaggagcctgacctacagccgaactgcttctcgcgaacgctcaagcttcagaagaagctgctgtcttctggcgcagcgcacaccatctgtctgagggtccagccacataacaagatggatttcctgcctaagaaagagttcgatacgtacttctgcgcgtatgagccctacgagcagtgtccaagatcagattcaagagctacttacagttcaagagacgatgacttgtggagcaagaattcacgctttggctcgaatctactctgctggagagccccaaaacagtccatgtaatggaggaaagaacgagtgaactgggtggaacaaatcgattctgctacgagattttaccaattttgcccgaagctggagacatggacaccacccgcagctgcggggacaaattttgaagggaagtctaggaggggtctgtgctattcttgatcttggtaggcagctgaggattgaggaactatttagtgatgttttcttggaaatgcagatcctttataatgctagtgggcagttgtacagcgcgccagcgacgaaaccctgtgaattgttctgttattctgaattttgtaggacgatttgatgctctctctctgaatttacatgatctttttattagctgaatgattacagtgtccagaaaataggccaccacgaaacctgatagtccagaatctaatctaaaacaaggcaaaat

SEQ ID NO: 24856 - DNA, 3614 bp, Zea Mays
gacaaggaaaggaacgcacccatcgttgcatgcgtctatgcggtagcaggaagtcaggaactgaaccattgctggttgggagatatgggcccaaagatcttgcgatcttcactgattgtgtttattcgagtgacttcgctacaatgggtcatgccgtaatcaaaagaaggactacattttcatgccaacattgaagataccgccttccattattgctgggtaagttggaacagaggagtgcgtattcaagatgatggacatgaggcgccactctgtgtctgtggatgccccactgtcaagaaccttggtgcagctcaagcgagtgaggtcgctgcgggatccagcgacaaactcgatgagcaagtacgcgtctccttccgatcacatgatctgggagactgcttctagcaatggggtgactccggagcttggcaggtcagcacaccatcacctggttggggaagacgaagatgtgggagctgagcctactacaatggggtcagagcggagtttccggggaccaagcgcaaggactgcatcgtataggaaatcttctgctgtcaggatcagaggactgaacccaccaagaagcaagcaggttcaccgtgtccgccaagacggccaccgcaagtcattggattctaaccactcaaaccatagctctatccgtcaattggcagacaatatggtcagcaatgtggatgcagataaggaagagggggaagtgaattcctatgaaagaccaaaacttgcaatgccagataagtctgacgaagaggtgaaaatgccaggctgctccaaatccaggagcaagtcttctgctgcaatgagccgtgttgggagcccctgcatgtcagccagtgaggcacgctcagttgggtcaagaagaagcactttggggcatggaaccgaggatacacgactgaggtcaaatgatgtcgtgggatccaatttcagtggctgtggtataagctactgctggtcaggagcgtcaaagtaccgggagctttattctgacagcgatggtccagaccaacctctcttatccacagatgggattgaggcagcattccaaggcaatgtaccatacactgagacactgaggtgtctaagccagaagttccgccctcgttccttcagtgaactgattggcctaaatgtcgttgcccagtccctcctatattccacttgcaaaggaaaagttgctccaatgtacttgttccatggcccccggggtacaggcaagacatccacggcaaggatttttgccgcggcactgaactgtgtatctcttgaggagcaaaggccgtgtgggttctgtaaagagtgtgtcattcttttctctgggaagagcagagatgtgaaagagcttgacgctgcgaaaatggatcgtctaggccgagtgaaggcacttctcaagagcgcatcgctcgtgccatactcctcgcgcttcaaggtcttcatagtagatgagtgccacctcttgcgagaagatgcatggtcagcaatactgaagagccttgacgagccataccggcacacggtgtacattatgatcacttctgacatagaaagcctgcctcgcgcttccatcacacattgtcagaagttccattttccaaagataaaggtggcggatattgtctacaggttggagaggatctgtatagaagaaggattggaatttgaccatgatgggttgtacttcattgctgcaaagtctaatggttctcttagagattcagaaataatgcttgatcaactcagtttgcttgggaagaaggtcacaatttctcttgtgcatgaacttgtaggatctgtgtctgatgatgagttgattgaattgcttgatctagcgttgtcatccgacacaaccaataccgtaagacgagctcgagaacttatggggtcagcaatcgatcctctgcagctggtgtctcagttggccaaccttattatggacattctctcagggagatgtcaatctgcagtcacggaagtcagcaaaagtttcttgggtagatatgcattatcagaggttggaataaagaaactaagacatgcactgaagatactatcagaaactgaaaaacaattgagaacatcaaggaatcaggctacttgggttacagttgcgcttttgcagtttagcaccaatgaacctaaccctgttgctgaaacaaatgatatgcatgcacattcagtaactggatatacagatgactgggtttccaaggtgcactcaagtgccaatttttgccaggcatgtaacagcagcaagtccaactgttctgagagacactgtaggcggcttaagctcgagaacatatggaggagagccattggaaagtgtcgatctaggtcagctaaaagtttcctcaggaaagaaggcttcttatcgtcggttcacgtcaccgaagagctggccatagcagaagttggttttgaacacccagatcacctgtcaagagcggagaaaatgcaaagcctaatagaatcctctttgcaacacgttcttgggtgcaatgtggagatcagattcaaactcgtgccatgcccagtgagcaaagatgctaggttgaagagacagccgttcagctttctcaactgctctggccggaagcaagagctgtcagattcagtcgtgactgatgaagacgaagctgcgagggggcctggagcaagagagacaccgcttaaaggctacacctctagccagcaggaatcaccatacaccatgcgacgtgtcgattcgaaaccaacaacggtccacggttgcgaggatgacgcccggagtaccttgacgtcaagcagatccacggcagatgacctgacaaggacgtgcaggtcggagactggctacccaaagggtgtgcgtgagcagggccgctctgatggcacgcagcaggagcctgacctacagccgaactgcttctcgcgaacgctcaagcttcagaagaagctgctgtcttctggcgcagcgcacaccatctgtctgagggtccagccacataacaagatggatttcctgcctaagaaagagttcgatacgtacttctgcgcgtatgagccctacgagcagtgtccaagatcagattcaagagctacttacagttcaagagacgatgacttgtggagcaagaattcacgctttggctcgaatctactctgctggagagccccaaaacagtccatgtaatggaggaaagaacgagtgaactgggtggaacaaatcgattctgctacgagattttaccaattttgcccgaagctggagacatggacaccacccgcagctgcggggacaaattttgaagggaagtctaggaggggtctgtgctattcttgatcttggtaggcagctgaggattgaggaactatttagtgatgttttcttggaaatgcagatcctttataatgctagtgggcagttgtacagcgcgccagcgacgaaaccctgtgaattgttctgttattctgaattttgtaggacgatttgatgctctctctctgaatttacatgatctttttattagctgaatgattacagtgtccagaaaataggccaccacgaaacctgatagtccagaatctaatctaaaacaaggcaaaat

SEQ ID NO: 24857 - DNA, 3606 bp, Zea Mays
acgggttctgttcacttcccctccgtcccgcattccttgccgcgcgtctcggcgtttgcttgccccccgccgccgctggcctggatctcgcgggcttctttcgcaatgccgcagcagcactgtgacttcgctacaatgggtcatgccgtaatcaaaagaaggactacattttcatgccaacattgaagataccgccttccattattgctgggtaagttggaacagaggagtgcgtattcaagatgatggacatgaggcgccactctgtgtctgtggatgccccactgtcaagaaccttggtgcagctcaagcgagtgaggtcgctgcgggatccagcgacaaactcgatgagcaagtacgcgtctccttccgatcacatgatctgggagactgcttctagcaatggggtgactccggagcttggcaggtcagcacaccatcacctggttggggaagacgaagatgtgggagctgagcctactacaatggggtcagagcggagtttccggggaccaagcgcaaggactgcatcgtataggaaatcttctgctgtcaggatcagaggactgaacccaccaagaagcaagcaggttcaccgtgtccgccaagacggccaccgcaagtcattggattctaaccactcaaaccatagctctatccgtcaattggcagacaatatggtcagcaatgtggatgcagataaggaagagggggaagtgaattcctatgaaagaccaaaacttgcaatgccagataagtctgacgaagaggtgaaaatgccaggctgctccaaatccaggagcaagtcttctgctgcaatgagccgtgttgggagcccctgcatgtcagccagtgaggcacgctcagttgggtcaagaagaagcactttggggcatggaaccgaggatacacgactgaggtcaaatgatgtcgtgggatccaatttcagtggctgtggtataagctactgctggtcaggagcgtcaaagtaccgggagctttattctgacagcgatggtccagaccaacctctcttatccacagatgggattgaggcagcattccaaggcaatgtaccatacactgagacactgaggtgtctaagccagaagttccgccctcgttccttcagtgaactgattggcctaaatgtcgttgcccagtccctcctatattccacttgcaaaggaaaagttgctccaatgtacttgttccatggcccccggggtacaggcaagacatccacggcaaggatttttgccgcggcactgaactgtgtatctcttgaggagcaaaggccgtgtgggttctgtaaagagtgtgtcattcttttctctgggaagagcagagatgtgaaagagcttgacgctgcgaaaatggatcgtctaggccgagtgaaggcacttctcaagagcgcatcgctcgtgccatactcctcgcgcttcaaggtcttcatagtagatgagtgccacctcttgcgagaagatgcatggtcagcaatactgaagagccttgacgagccataccggcacacggtgtacattatgatcacttctgacatagaaagcctgcctcgcgcttccatcacacattgtcagaagttccattttccaaagataaaggtggcggatattgtctacaggttggagaggatctgtatagaagaaggattggaatttgaccatgatgggttgtacttcattgctgcaaagtctaatggttctcttagagattcagaaataatgcttgatcaactcagtttgcttgggaagaaggtcacaatttctcttgtgcatgaacttgtaggatctgtgtctgatgatgagttgattgaattgcttgatctagcgttgtcatccgacacaaccaataccgtaagacgagctcgagaacttatggggtcagcaatcgatcctctgcagctggtgtctcagttggccaaccttattatggacattctctcagggagatgtcaatctgcagtcacggaagtcagcaaaagtttcttgggtagatatgcattatcagaggttggaataaagaaactaagacatgcactgaagatactatcagaaactgaaaaacaattgagaacatcaaggaatcaggctacttgggttacagttgcgcttttgcagtttagcaccaatgaacctaaccctgttgctgaaacaaatgatatgcatgcacattcagtaactggatatacagatgactgggtttccaaggtgcactcaagtgccaatttttgccaggcatgtaacagcagcaagtccaactgttctgagagacactgtaggcggcttaagctcgagaacatatggaggagagccattggaaagtgtcgatctaggtcagctaaaagtttcctcaggaaagaaggcttcttatcgtcggttcacgtcaccgaagagctggccatagcagaagttggttttgaacacccagatcacctgtcaagagcggagaaaatgcaaagcctaatagaatcctctttgcaacacgttcttgggtgcaatgtggagatcagattcaaactcgtgccatgcccagtgagcaaagatgctaggttgaagagacagccgttcagctttctcaactgctctggccggaagcaagagctgtcagattcagtcgtgactgatgaagacgaagctgcgagggggcctggagcaagagagacaccgcttaaaggctacacctctagccagcaggaatcaccatacaccatgcgacgtgtcgattcgaaaccaacaacggtccacggttgcgaggatgacgcccggagtaccttgacgtcaagcagatccacggcagatgacctgacaaggacgtgcaggtcggagactggctacccaaagggtgtgcgtgagcagggccgctctgatggcacgcagcaggagcctgacctacagccgaactgcttctcgcgaacgctcaagcttcagaagaagctgctgtcttctggcgcagcgcacaccatctgtctgagggtccagccacataacaagatggatttcctgcctaagaaagagttcgatacgtacttctgcgcgtatgagccctacgagcagtgtccaagatcagattcaagagctacttacagttcaagagacgatgacttgtggagcaagaattcacgctttggctcgaatctactctgctggagagccccaaaacagtccatgtaatggaggaaagaacgagtgaactgggtggaacaaatcgattctgctacgagattttaccaattttgcccgaagctggagacatggacaccacccgcagctgcggggacaaattttgaagggaagtctaggaggggtctgtgctattcttgatcttggtaggcagctgaggattgaggaactatttagtgatgttttcttggaaatgcagatcctttataatgctagtgggcagttgtacagcgcgccagcgacgaaaccctgtgaattgttctgttattctgaattttgtaggacgatttgatgctctctctctgaatttacatgatctttttattagctgaatgattacagtgtccagaaaataggccaccacgaaacctgatagtccagaatctaatctaaaacaaggcaaaat

SEQ ID NO: 24858 - DNA, 3668 bp, Zea Mays
gtgaggtgctgggccgaccggctgagtagtctgactgtacccgccgctaccatttaccacgctgtaccgtagcagagcaggcctcacgcggcgctgtcccgaccccgtcgaggcaaaaagccctggccgttccctcctcgccccgtgccgccgccgcctccgtgcgcgcccaggcttcctcctgtgacttcgctacaatgggtcatgccgtaatcaaaagaaggactacattttcatgccaacattgaagataccgccttccattattgctgggtaagttggaacagaggagtgcgtattcaagatgatggacatgaggcgccactctgtgtctgtggatgccccactgtcaagaaccttggtgcagctcaagcgagtgaggtcgctgcgggatccagcgacaaactcgatgagcaagtacgcgtctccttccgatcacatgatctgggagactgcttctagcaatggggtgactccggagcttggcaggtcagcacaccatcacctggttggggaagacgaagatgtgggagctgagcctactacaatggggtcagagcggagtttccggggaccaagcgcaaggactgcatcgtataggaaatcttctgctgtcaggatcagaggactgaacccaccaagaagcaagcaggttcaccgtgtccgccaagacggccaccgcaagtcattggattctaaccactcaaaccatagctctatccgtcaattggcagacaatatggtcagcaatgtggatgcagataaggaagagggggaagtgaattcctatgaaagaccaaaacttgcaatgccagataagtctgacgaagaggtgaaaatgccaggctgctccaaatccaggagcaagtcttctgctgcaatgagccgtgttgggagcccctgcatgtcagccagtgaggcacgctcagttgggtcaagaagaagcactttggggcatggaaccgaggatacacgactgaggtcaaatgatgtcgtgggatccaatttcagtggctgtggtataagctactgctggtcaggagcgtcaaagtaccgggagctttattctgacagcgatggtccagaccaacctctcttatccacagatgggattgaggcagcattccaaggcaatgtaccatacactgagacactgaggtgtctaagccagaagttccgccctcgttccttcagtgaactgattggcctaaatgtcgttgcccagtccctcctatattccacttgcaaaggaaaagttgctccaatgtacttgttccatggcccccggggtacaggcaagacatccacggcaaggatttttgccgcggcactgaactgtgtatctcttgaggagcaaaggccgtgtgggttctgtaaagagtgtgtcattcttttctctgggaagagcagagatgtgaaagagcttgacgctgcgaaaatggatcgtctaggccgagtgaaggcacttctcaagagcgcatcgctcgtgccatactcctcgcgcttcaaggtcttcatagtagatgagtgccacctcttgcgagaagatgcatggtcagcaatactgaagagccttgacgagccataccggcacacggtgtacattatgatcacttctgacatagaaagcctgcctcgcgcttccatcacacattgtcagaagttccattttccaaagataaaggtggcggatattgtctacaggttggagaggatctgtatagaagaaggattggaatttgaccatgatgggttgtacttcattgctgcaaagtctaatggttctcttagagattcagaaataatgcttgatcaactcagtttgcttgggaagaaggtcacaatttctcttgtgcatgaacttgtaggatctgtgtctgatgatgagttgattgaattgcttgatctagcgttgtcatccgacacaaccaataccgtaagacgagctcgagaacttatggggtcagcaatcgatcctctgcagctggtgtctcagttggccaaccttattatggacattctctcagggagatgtcaatctgcagtcacggaagtcagcaaaagtttcttgggtagatatgcattatcagaggttggaataaagaaactaagacatgcactgaagatactatcagaaactgaaaaacaattgagaacatcaaggaatcaggctacttgggttacagttgcgcttttgcagtttagcaccaatgaacctaaccctgttgctgaaacaaatgatatgcatgcacattcagtaactggatatacagatgactgggtttccaaggtgcactcaagtgccaatttttgccaggcatgtaacagcagcaagtccaactgttctgagagacactgtaggcggcttaagctcgagaacatatggaggagagccattggaaagtgtcgatctaggtcagctaaaagtttcctcaggaaagaaggcttcttatcgtcggttcacgtcaccgaagagctggccatagcagaagttggttttgaacacccagatcacctgtcaagagcggagaaaatgcaaagcctaatagaatcctctttgcaacacgttcttgggtgcaatgtggagatcagattcaaactcgtgccatgcccagtgagcaaagatgctaggttgaagagacagccgttcagctttctcaactgctctggccggaagcaagagctgtcagattcagtcgtgactgatgaagacgaagctgcgagggggcctggagcaagagagacaccgcttaaaggctacacctctagccagcaggaatcaccatacaccatgcgacgtgtcgattcgaaaccaacaacggtccacggttgcgaggatgacgcccggagtaccttgacgtcaagcagatccacggcagatgacctgacaaggacgtgcaggtcggagactggctacccaaagggtgtgcgtgagcagggccgctctgatggcacgcagcaggagcctgacctacagccgaactgcttctcgcgaacgctcaagcttcagaagaagctgctgtcttctggcgcagcgcacaccatctgtctgagggtccagccacataacaagatggatttcctgcctaagaaagagttcgatacgtacttctgcgcgtatgagccctacgagcagtgtccaagatcagattcaagagctacttacagttcaagagacgatgacttgtggagcaagaattcacgctttggctcgaatctactctgctggagagccccaaaacagtccatgtaatggaggaaagaacgagtgaactgggtggaacaaatcgattctgctacgagattttaccaattttgcccgaagctggagacatggacaccacccgcagctgcggggacaaattttgaagggaagtctaggaggggtctgtgctattcttgatcttggtaggcagctgaggattgaggaactatttagtgatgttttcttggaaatgcagatcctttataatgctagtgggcagttgtacagcgcgccagcgacgaaaccctgtgaattgttctgttattctgaattttgtaggacgatttgatgctctctctctgaatttacatgatctttttattagctgaatgattacagtgtccagaaaataggccaccacgaaacctgatagtccagaatctaatctaaaacaaggcaaaat

SEQ ID NO: 24859 - DNA, 3593 bp, Zea Mays
ctggtgctgctcagtggcttgctcacacgctccccggcccccgccctcatgtccattgtccaggcttcagcggcgctagctcagctgagacctgagagtgagccgtgagtgacttcgctacaatgggtcatgccgtaatcaaaagaaggactacattttcatgccaacattgaagataccgccttccattattgctgggtaagttggaacagaggagtgcgtattcaagatgatggacatgaggcgccactctgtgtctgtggatgccccactgtcaagaaccttggtgcagctcaagcgagtgaggtcgctgcgggatccagcgacaaactcgatgagcaagtacgcgtctccttccgatcacatgatctgggagactgcttctagcaatggggtgactccggagcttggcaggtcagcacaccatcacctggttggggaagacgaagatgtgggagctgagcctactacaatggggtcagagcggagtttccggggaccaagcgcaaggactgcatcgtataggaaatcttctgctgtcaggatcagaggactgaacccaccaagaagcaagcaggttcaccgtgtccgccaagacggccaccgcaagtcattggattctaaccactcaaaccatagctctatccgtcaattggcagacaatatggtcagcaatgtggatgcagataaggaagagggggaagtgaattcctatgaaagaccaaaacttgcaatgccagataagtctgacgaagaggtgaaaatgccaggctgctccaaatccaggagcaagtcttctgctgcaatgagccgtgttgggagcccctgcatgtcagccagtgaggcacgctcagttgggtcaagaagaagcactttggggcatggaaccgaggatacacgactgaggtcaaatgatgtcgtgggatccaatttcagtggctgtggtataagctactgctggtcaggagcgtcaaagtaccgggagctttattctgacagcgatggtccagaccaacctctcttatccacagatgggattgaggcagcattccaaggcaatgtaccatacactgagacactgaggtgtctaagccagaagttccgccctcgttccttcagtgaactgattggcctaaatgtcgttgcccagtccctcctatattccacttgcaaaggaaaagttgctccaatgtacttgttccatggcccccggggtacaggcaagacatccacggcaaggatttttgccgcggcactgaactgtgtatctcttgaggagcaaaggccgtgtgggttctgtaaagagtgtgtcattcttttctctgggaagagcagagatgtgaaagagcttgacgctgcgaaaatggatcgtctaggccgagtgaaggcacttctcaagagcgcatcgctcgtgccatactcctcgcgcttcaaggtcttcatagtagatgagtgccacctcttgcgagaagatgcatggtcagcaatactgaagagccttgacgagccataccggcacacggtgtacattatgatcacttctgacatagaaagcctgcctcgcgcttccatcacacattgtcagaagttccattttccaaagataaaggtggcggatattgtctacaggttggagaggatctgtatagaagaaggattggaatttgaccatgatgggttgtacttcattgctgcaaagtctaatggttctcttagagattcagaaataatgcttgatcaactcagtttgcttgggaagaaggtcacaatttctcttgtgcatgaacttgtaggatctgtgtctgatgatgagttgattgaattgcttgatctagcgttgtcatccgacacaaccaataccgtaagacgagctcgagaacttatggggtcagcaatcgatcctctgcagctggtgtctcagttggccaaccttattatggacattctctcagggagatgtcaatctgcagtcacggaagtcagcaaaagtttcttgggtagatatgcattatcagaggttggaataaagaaactaagacatgcactgaagatactatcagaaactgaaaaacaattgagaacatcaaggaatcaggctacttgggttacagttgcgcttttgcagtttagcaccaatgaacctaaccctgttgctgaaacaaatgatatgcatgcacattcagtaactggatatacagatgactgggtttccaaggtgcactcaagtgccaatttttgccaggcatgtaacagcagcaagtccaactgttctgagagacactgtaggcggcttaagctcgagaacatatggaggagagccattggaaagtgtcgatctaggtcagctaaaagtttcctcaggaaagaaggcttcttatcgtcggttcacgtcaccgaagagctggccatagcagaagttggttttgaacacccagatcacctgtcaagagcggagaaaatgcaaagcctaatagaatcctctttgcaacacgttcttgggtgcaatgtggagatcagattcaaactcgtgccatgcccagtgagcaaagatgctaggttgaagagacagccgttcagctttctcaactgctctggccggaagcaagagctgtcagattcagtcgtgactgatgaagacgaagctgcgagggggcctggagcaagagagacaccgcttaaaggctacacctctagccagcaggaatcaccatacaccatgcgacgtgtcgattcgaaaccaacaacggtccacggttgcgaggatgacgcccggagtaccttgacgtcaagcagatccacggcagatgacctgacaaggacgtgcaggtcggagactggctacccaaagggtgtgcgtgagcagggccgctctgatggcacgcagcaggagcctgacctacagccgaactgcttctcgcgaacgctcaagcttcagaagaagctgctgtcttctggcgcagcgcacaccatctgtctgagggtccagccacataacaagatggatttcctgcctaagaaagagttcgatacgtacttctgcgcgtatgagccctacgagcagtgtccaagatcagattcaagagctacttacagttcaagagacgatgacttgtggagcaagaattcacgctttggctcgaatctactctgctggagagccccaaaacagtccatgtaatggaggaaagaacgagtgaactgggtggaacaaatcgattctgctacgagattttaccaattttgcccgaagctggagacatggacaccacccgcagctgcggggacaaattttgaagggaagtctaggaggggtctgtgctattcttgatcttggtaggcagctgaggattgaggaactatttagtgatgttttcttggaaatgcagatcctttataatgctagtgggcagttgtacagcgcgccagcgacgaaaccctgtgaattgttctgttattctgaattttgtaggacgatttgatgctctctctctgaatttacatgatctttttattagctgaatgattacagtgtccagaaaataggccaccacgaaacctgatagtccagaatctaatctaaaacaaggcaaaat

SEQ ID NO: 24860 - DNA, 3233 bp, Zea Mays
ccacgctgtaccgtagcagagcaggcctcacgcggcgctgtcccgaccccgtcgaggcaaaaagccctggccgttccctcctcgccccgtgccgccgccgcctccgtgcgcgcccaggcttcctcctgtgacttcgctacaatgggtcatgccgtaatcaaaagaaggactacattttcatgccaacattgaagataccgccttccattattgctgggtaagttggaacagaggagtgcgtattcaagatgatggacatgaggcgccactctgtgtctgtggatgccccactgtcaagaaccttggtgcagctcaagcgagtgaggtcgctgcgggatccagcgacaaactcgatgagcaagtacgcgtctccttccgatcacatgatctgggagactgcttctagcaatggggtgactccggagcttggcaggtcagcacaccatcacctggttggggaagacgaagatgtgggagctgagcctactacaatggggtcagagcggagtttccggggaccaagcgcaaggactgcatcgtataggaaatcttctgctgtcaggatcagaggactgaacccaccaagaagcaagcaggttcaccgtgtccgccaagacggccaccgcaagtcattggattctaaccactcaaaccatagctctatccgtcaattggcagacaatatggtcagcaatgtggatgcagataaggaagagggggaagtgaattcctatgaaagaccaaaacttgcaatgccagataagtctgacgaagaggtgaaaatgccaggctgctccaaatccaggagcaagtcttctgctgcaatgagccgtgttgggagcccctgcatgtcagccagtgaggcacgctcagttgggtcaagaagaagcactttggggcatggaaccgaggatacacgactgaggtcaaatgatgtcgtgggatccaatttcagtggctgtggtataagctactgctggtcaggagcgtcaaagtaccgggagctttattctgacagcgatggtccagaccaacctctcttatccacagatgggattgaggcagcattccaaggcaatgtaccatacactgagacactgaggtgtctaagccagaagttccgccctcgttccttcagtgaactgattggcctaaatgtcgttgcccagtccctcctatattccacttgcaaaggaaaagttgctccaatgtacttgttccatggcccccggggtacaggcaagacatccacggcaaggatttttgccgcggcactgaactgtgtatctcttgaggagcaaaggccgtgtgggttctgtaaagagtgtgtcattcttttctctgggaagagcagagatgtgaaagagcttgacgctgcgaaaatggatcgtctaggccgagtgaaggcacttctcaagagcgcatcgctcgtgccatactcctcgcgcttcaaggtcttcatagtagatgagtgccacctcttgcgagaagatgcatggtcagcaatactgaagagccttgacgagccataccggcacacggtgtacattatgatcacttctgacatagaaagcctgcctcgcgcttccatcacacattgtcagaagttccattttccaaagataaaggtggcggatattgtctacaggttggagaggatctgtatagaagaaggattggaatttgaccatgatgggttgtacttcattgctgcaaagtctaatggttctcttagagattcagaaataatgcttgatcaactcagtttgcttgggaagaaggtcacaatttctcttgtgcatgaacttgtaggatctgtgtctgatgatgagttgattgaattgcttgatctagcgttgtcatccgacacaaccaataccgtaagacgagctcgagaacttatggggtcagcaatcgatcctctgcagctggtgtctcagttggccaaccttattatggacattctctcagggagatgtcaatctgcagtcacggaagtcagcaaaagtttcttgggtagatatgcattatcagaggttggaataaagaaactaagacatgcactgaagatactatcagaaactgaaaaacaattgagaacatcaaggaatcaggctacttgggttacagttgcgcttttgcagtttagcaccaatgaacctaaccctgttgctgaaacaaatgatatgcatgcacattcagtaactggatatacagatgactgggtttccaaggtgcactcaagtgccaatttttgccaggcatgtaacagcagcaagtccaactgttctgagagacactgtaggcggcttaagctcgagaacatatggaggagagccattggaaagtgtcgatctaggtcagctaaaagtttcctcaggaaagaaggcttcttatcgtcggttcacgtcaccgaagagctggccatagcagaagttggttttgaacacccagatcacctgtcaagagcggagaaaatgcaaagcctaatagaatcctctttgcaacacgttcttgggtgcaatgtggagatcagattcaaactcgtgccatgcccagtgagcaaagatgctaggttgaagagacagccgttcagctttctcaactgctctggccggaagcaagagctgtcagattcagtcgtgactgatgaagacgaagctgcgagggggcctggagcaagagagacaccgcttaaaggctacacctctagccagcaggaatcaccatacaccatgcgacgtgtcgattcgaaaccaacaacggtccacggttgcgaggatgacgcccggagtaccttgacgtcaagcagatccacggcagatgacctgacaaggacgtgcaggtcggagactggctacccaaagggtgtgcgtgagcagggccgctctgatggcacgcagcaggagcctgacctacagccgaactgcttctcgcgaacgctcaagcttcagaagaagctgctgtcttctggcgcagcgcacaccatctgtctgagggtccagccacataacaagatggatttcctgcctaagaaagagttcgatacgtacttctgcgcgtatgagccctacgagcagtgtccaagatcagattcaagagctacttacagttcaagagacgatgacttgtggagcaagaattcacgctttggctcgaatctactctgctggagagccccaaaacagtccatgtaatggagagcatcccccacaccagcatgttgctttctt

SEQ ID NO: 24861 - DNA, 2203 bp, Zea Mays
ataattctaacatgtgtgactagtatgatctttatttatactgataaaaacgtgggcagtcaattattcgaccaaatgatatattttttccaaaaagaaagaaaacatggacatgatgataaaacagcccccgaagcgtgcaacgggtgagcccgcaggctccacgcggacgcggccatgctgtgcactccgcctccgccccagccgccgctgcagtcatcgcggcgcccgcgcccgctcccgctccgggccgcgccacgatgctccaagcccaacgacgccgagccctcgccgtccccaccgtccaccgcggccgccggcggcgtccggcgccaggtgctctcgcccgagggccgcgcgaagctggacccgcggccggaccgcgacttctacgcgctcccgcgcctggtgacgcacgtggacgacggcttcatcgccacgctcacgggcctctaccgggagcgcctccgcgccgggtgggacgtgctggacctcatgagctcctgggtcagccacctgccgccggaggtccggttccggcgcgtcgtcggccacgggctgaacgcgcaggagctcgccaggaacccgcgcctggacctcttcttcgtcaaggacctcaacaaggagcagcggctggagctggagagcggcaccttcgatgccgtgctctgcaccgtcagcgtgcagtacctgcagtcccctgaaaaggttttcgcggagatcttccgggtgctgaagccagggggcgtgtgcatcgtcagcttcagcaaccggatgttctacgagaaggccatcagcgcgtggcgggacgggaccgcgtacagccgcgtgcagctcgtcacgcagtacttccagtgcgtggaggggttcacgcagcccgaggtgatcaggaagctgccgtcggccggcggatcgccgtcctcgccgctggacgccgtgatgaggctgttcggcgtggcaggctccgacccgttctacgcagttatctcgtacaggaacttcaagccaatgtgacaccctgattgacagaacccgtgcagcattgcgatatgcagtgcatacgatctatagaatcactactggtgcaaagctagtttgtacttgtacatgcacacttcagcattagctgtctagctcagcggcgggcagatgcaagttcgttcagaagctcaaaacatcatccaccgaccatctgattcagaaacatgctagcgatccttcttattacagaaagaaccactcttttttcaccgtcgtcgttcgtgaaacacgaacggactgagaccacctagctactcagaagaagaaacacgaacaggtcctgggagtaggtgccaaccggtatcaccatccggccgccaggctttagctgatcaagcagaggctgagggatctcaggtgccgctgcaccaacatggatagcgtcgtagggtgccgcgtctggaaagccaagcctgccatctgcagttttcatagcggccagacatcttagctccaggttatttcagagtttgctggcctcaacacaagcgaggttctcaagataaggagccacggggcatcaagaacaagtttcagtaccaggatatagtaatgaaaaaaggtctatatttgaagacaactttgatatcaggcacaatagcgatatcaccgacatgtactagcacacgtacttaggccctgtttgtttctatcctaaattatataaattgaattatggtggaaagataggagagtaaaatatcactttgggattacaaataagctgaaataagctactcaatactagcttattttagcttatttgtggtcctaaaatgatattttacctttctactatcataactcaacttatataatttaggagagaaacaaacacaccatttatcccatttgggaaaaatgtactgcgaactgtctacacttgaaaatagcatgccagcaagtagacaggaaccaacagtagccaacgctgcttcatcataacatgtgtacttattaaaattaaggtgaatgggaaccatctttagaagctttaaaagctaagcgtaaacttctgcttgatgaaatcaatagctcaacatattacagataaaccaaccatcgtacctgtaacatgaaaagagagcgatccatccctcagtagtggagctgcagcacttctctgcacattttcaacagaagaagcaacgatctcgggaac

SEQ ID NO: 24862 - DNA, 613 bp, Zea Mays
atgcattgcaccttgtctctcacacctcagctgcctcgcctcctgcgctgctgctcgctcccgttactggtggttactacgtgatggctatggcttgcatctttttactgtggactctggtgtagttactctggcatctaaaacggtatagattctatcttgggttaatatataaaactcctgatgaaggagatgtatactcgacgtatatttggggttccagggtaaataatgtcttatatgtaaatggactttgttggcgtctccattatcctctgataatgcaataaggtggaccaagctgcgtgtcctcttgattgtgaaactgtaacacccacttggtaatttgctagaaataataccaatagggaaacaatttctcttcatgtgagtttgatctttatgcatcatcttatgtgaacatcatgcccaaaaacaattaataaaaaaatatatatactaccaaattatgcatcatgctcgattttcttgtgtgtgcattacttgtgacaatgtaaaaatattataaaaatgaatatgttaaatccaaagtggaatttaaaactgtgaagaaatgtggggggaggaaaaggagtacaaaaataaaataaaa

SEQ ID NO: 24863 - DNA, 894 bp, Zea Mays
cgaacacatatctcccactctggcagtctccctgcagctagctgcgcctgtgcttgcatgcattgcaccttgtctctcacacatcagcagcggagcagatcgagccatggcgcttctctcgctcctcgccttcctgctggcaacggctgcagcccccgccgcagtcgccgccgtgggcaacgcaacatacgacggtagcaagacggacgcgtccccggcggtcctatgcaacggcgaggggtgtgagccaccgcaaccgaaccgcgagcctcctggcgccggtggctacgtgccctattacaacacctcagctgcctcgcctcctgcgctgctgctcgctcccgttactggtggttactacgtgatggctatggcttgcatctttttactgtggactctggtgtagttactctggcatctaaaacggtatagattctatcttgggttaatatataaaactcctgatgaaggagatgtatactcgacgtatatttggggttccagggtaaataatgtcttatatgtaaatggactttgttggcgtctccattatcctctgataatgcaataaggtggaccaagctgcgtgtcctcttgattgtgaaactgtaacacccacttggtaatttgctagaaataataccaatagggaaacaatttctcttcatgtgagtttgatctttatgcatcatcttatgtgaacatcatgcccaaaaacaattaataaaaaaatatatatactaccaaattatgcatcatgctcgattttcttgtgtgtgcattacttgtgacaatgtaaaaatattataaaaatgaatatgttaaatccaaagtggaatttaaaactgtgaagaaatgtggggggaggaaaaggagtacaaaaataaaataaaa

SEQ ID NO: 24864 - DNA, 725 bp, Zea Mays
tcggcctttccactttccagcccccagttacgaacaaccccctcatgaagtcatggtcatggcgaagagcgaaggcccgtccgccgccgcggggctccgcccacggcagcggggcgccttccttctgggggagccaacctgggaggacaccggcagcgggcggtggcggtgcgcggagacggggcacgagctgccggagcgggagaaggaggcctacgcgcggtcccgcgcctgccgcctcgcgctcattgaccacgccgtcgcgcacaagaagccgccgctcaacgccttcaagccccaccccgagcacaaatgctgctgctggtggtggtgataacgacggtggtgatgaaaatgttacggctgagaaggatgacgctgaatcaagggaacttgcctcaatgacaaagcaaatttcttcctggctgcagctaaagcaacagattcgggcacccgtgagcgcagcctcctttcaaagttcaacgaaagggcctaaaagtcagcaggagtggatcgtccgggctagggacacagacagtccgcgtgtggtcagaacaacagtaacaactaggtggtggttggaggctataaatataaccccagccaccccatttaatggcatccaagtgatccaatcaacacaagcactcctattcattgcaatagcaagagcaagagcttccactccaagtcacactcaaagcaatagagatccaccaagtgcc

SEQ ID NO: 24865 - DNA, 845 bp, Zea Mays
tcggcctttccactttccagcccccagttacgaacaaccccctcatgaagtcatggtcatggcgaagagcgaaggcccgtccgccgccgcggggctccgcccacggcagcggggcgccttccttctgggggagccaacctgggaggacaccggcagcgggcggtggcggtgcgcggagacggggcacgagctgccggagcgggagaaggaggcctacgcgcggtcccgcgcctgccgcctcgcgctcattgaccacgccgtcgcgcacaagaagccgccgctcaacgccttcaagccccaccccgagcacaaatgctgctgctggtggtggtgataacgacggtggtgatgaaaatgttacggctgagaaggatgacgctgaatcaagggaacttgcctcaatgacaaagcaaatttcttcctggctgcagctaaagcaacagattcgggcacccgtgagcgcagcctcctttcaaagttcaacgaaagggcctaaaagtcagcaggtagaatctttagaatgtcagcaacaagttattaccagggccggccctgagattttgggggcccagagcaagacttaaacctgaggccctctcttattacaacacatatatacatcttgtatcacttattagtttaggtgctaagcaattgttacaataccggtaagaaaaaaatttcatcctcgaagataaaaacaatatctcagaaatttcaaaattagtatgcctacattacctttctttcctagtagcatacacatacacattcgaaacaattctcgtcactaaataagtcatagcgcatacattagcattgatgtcatgcatgctagtctttac

SEQ ID NO: 24866 - DNA, 1118 bp, Zea Mays
tcggcctttccactttccagcccccagttacgaacaaccccctcatgaagtcatggtcatggcgaagagcgaaggcccgtccgccgccgcggggctccgcccacggcagcggggcgccttccttctgggggagccaacctgggaggacaccggcagcgggcggtggcggtgcgcggagacggggcacgagctgccggagcgggagaaggaggcctacgcgcggtcccgcgcctgccgcctcgcgctcattgaccacgccgtcgcgcacaagaagccgccgctcaacgccttcaagccccaccccgagcacaaaaaaacaagaggaccagatgacttctggtgagatggctgatggacaatctgtgaagtcaaatgaagaagtggcaaagaagagcaagccaagcaagaagtacaagaagaaaactaatgtttccagtccattgccaggagaacctaaaccagagatggatggttcagatgatcgcaatttctgggtgcctcctgtcgagggtcgctgggatgatgatgacgggaaaaaaagatgggagttgtcaccgggaaagcacacattagcaaagaatgaagatgctgctgctggtggtggtgataacgacggtggtgatgaaaatgttacggctgagaaggatgacgctgaatcaagggaacttgcctcaatgacaaagcaaatttcttcctggctgcagctaaagcaacagattcgggcacccgtgagcgcagcctcctttcaaagttcaacgaaagggcctaaaagtcagcaggtagaatctttagaatgtcagcaacaagttattaccagggccggccctgagattttgggggcccagagcaagacttaaacctgaggccctctcttattacaacacatatatacatcttgtatcacttattagtttaggtgctaagcaattgttacaataccggtaagaaaaaaatttcatcctcgaagataaaaacaatatctcagaaatttcaaaattagtatgcctacattacctttctttcctagtagcatacacatacacattcgaaacaattctcgtcactaaataagtcatagcgcatacattagcattgatgtcatgcatgctagtctttac

SEQ ID NO: 24867 - DNA, 1813 bp, Zea Mays
cccatgacattgttgttttttcagtagttttgggtttaggactatgtagtggtgctaaaacctaaaaggtagaatgtggaatatgcagtgcctaaaagctacagctcaaatgaaagcaagtcatagtatctagggtatatgttcatggacatttccagcatgcttgagaaatactgcaaacttgtgtaggtcgttttgaactgatatatccatttttgtcaaaacaggtaacatagagtaagctccaagaaaatgaaagatggggcaaataataactggtgctactgtagtactgatggttttaaagtatgttcaaaatgttccaaaagcaataatgataatatcaaggaagaggcgaataaatgtcctggtgacaaaaaagagaatatggaaaatcatgcttccagtgcatggacagacactgagacgttactccttttagaaggagtcctaaaacatggagatgattgggatcttatcgctcagcatgtccgcacaaagaataaatcagaatgcatagcaatgcttattcaattaccttttggcgaacatatgctgggcacaataaatggtaaattcgttagcaggctccacataaaccagacagatgatggaaaaacgaaccagcacattatggagtcttcaagtcactcaaccgaaatggctgatggcatgcagattgatggaagtgaagatagtgctgataaatcagttgaagaatatcctacaaaacgcagacgattgtttttttcaatggatgctaccacttcattgatggagcagttagctatcctgaccacagcagctagcccagatgttgctgctgctgctgctgatgccgcaattaaagcatttggcaatgaaaacccgcaagcaaggaaagcctttcgcctcaacgagcaagaatataagactaaggcttttgcttctaatcatgtccaacagattgaccacaaagttagcaataaggatacggcgatgcatggccagagtggttctgataagcaggaaaagaagttcattgctagcgcatatcaattgagggcagctgttgctactgctgttggtgtagctgctgcccgtgctaaaatgcttgcagaccaggaggagcgagaaatggagctcctaatggcgtctgtaattgaaactcagctaagaaagatgcaatacaagatcaaacactttgaggagctagattcactcatggatcaagagtacaccgctatacagcaaatgaagggatccctcatgaatgaatggataaaggtccttgagcatgcattccgggctggagtgtctctaccgagagatgaattgctcaccaaactgttgctgaactagccgcccatcccatgaggacctggctgtagtcgagtagttctctgatatgcgtcacccccttgactgttgctggtagatagcttcctgcgtgggtgcgtctgtaaaggtgccgattgtgctttcgatttctcagaattttggggatcagaacaacccttcgtaactctttgccctgttgtaccaaactaggttagatggcaaaattgctgaaattttcttgtagctgttgacatgtatggtttcgttcgtatggatgtgaaaatggtacctcagttttggagtttcaaatcactggtttagaacatcaaatcgtccagagcattcaatctagattcgatggtgtttactcttatctacatttcatagataaaatagataaaggatgatgtggaaggcagagaaaatagatagagggtgatgtagaagattagaaataaaaaatggtactccctccgtttctttttatttgtcg

SEQ ID NO: 24868 - DNA, 2357 bp, Zea Mays
actgcccaccgcaggccgcaagtcttgcggctcctgcccggcccagcccggccattgctctttcccagttccgaccgcccgagcccgaagccagaccacgccttaaaccccgtcaatccgagatccgacggcccagatctttcgtctctgcctctccccgtctgaccccatcttcccgtccccccgccatgtcgccgccggctgccggcgcggccgccaactccggcgacgggacgcctccgtcgccgcgcgagctctacaccatcccggcatcatccggttggttccggtgggacgggatccacgagacggagcggcgggcgctgccggagttcttcggaggggcaggcggcgctgggttcgggacggcgacgcggaacccgcggatctaccgcgagtaccgcgacttcatcatcgccaaataccgggaggacccggcgcgccgcctcactttcaccgaggtccgcagggcgcttgtcggggacgtcacgctcctccggaagctctttgccttcctcgactcctccggcctcatcaacttctcggcctcctcgtcctcggtccccgcgtcgcggcagcaggaggtgggggtcgtcgtggaggcgcccgtgggtctgcaggtgacgccgcgtcctccagcgtcctacttcgccgaagagaagcgtgtagcggcgggcggggagaaggagaacgaattccggttgccgccgctgacctcctacagtgatgtgttcggggaatgggcacctgggaaggcgcctatatgcggtttttgcggtgaggagtgcaatggtgcggatgttgagacgctgcaggtactatgaaagctccaaaaaaggatggttttaaagtatgttcaaaatgttccaaaagcaataatgataatatcaaggaagaggcgaataaatgtcctggtgacaaaaaagagaatatggaaaatcatgcttccagtgcatggacagacactgagacgttactccttttagaaggagtcctaaaacatggagatgattgggatcttatcgctcagcatgtccgcacaaagaataaatcagaatgcatagcaatgcttattcaattaccttttggcgaacatatgctgggcacaataaatggtaaattcgttagcaggctccacataaaccagacagatgatggaaaaacgaaccagcacattatggagtcttcaagtcactcaaccgaaatggctgatggcatgcagattgatggaagtgaagatagtgctgataaatcagttgaagaatatcctacaaaacgcagacgattgtttttttcaatggatgctaccacttcattgatggagcagttagctatcctgaccacagcagctagcccagatgttgctgctgctgctgctgatgccgcaattaaagcatttggcaatgaaaacccgcaagcaaggaaagcctttcgcctcaacgagcaagaatataagactaaggcttttgcttctaatcatgtccaacagattgaccacaaagttagcaataaggatacggcgatgcatggccagagtggttctgataagcaggaaaagaagttcattgctagcgcatatcaattgagggcagctgttgctactgctgttggtgtagctgctgcccgtgctaaaatgcttgcagaccaggaggagcgagaaatggagctcctaatggcgtctgtaattgaaactcagctaagaaagatgcaatacaagatcaaacactttgaggagctagattcactcatggatcaagagtacaccgctatacagcaaatgaagggatccctcatgaatgaatggataaaggtccttgagcatgcattccgggctggagtgtctctaccgagagatgaattgctcaccaaactgttgctgaactagccgcccatcccatgaggacctggctgtagtcgagtagttctctgatatgcgtcacccccttgactgttgctggtagatagcttcctgcgtgggtgcgtctgtaaaggtgccgattgtgctttcgatttctcagaattttggggatcagaacaacccttcgtaactctttgccctgttgtaccaaactaggttagatggcaaaattgctgaaattttcttgtagctgttgacatgtatggtttcgttcgtatggatgtgaaaatggtacctcagttttggagtttcaaatcactggtttagaacatcaaatcgtccagagcattcaatctagattcgatggtgtttactcttatctacatttcatagataaaatagataaaggatgatgtggaaggcagagaaaatagatagagggtgatgtagaagattagaaataaaaaatggtactccctccgtttctttttatttgtcg

SEQ ID NO: 24869 - DNA, 2493 bp, Zea Mays
tgctagtataatggtgcatgtacttcaacggaaggaaggtctcaactttgccctccctttgtggaccacagtcgatttccttatggtgtccacaatcaagtgatcaaacaaacgctggcacaaacgaatcggccgagcaaactgcacaaacgagtactgaactctccgctctcgtctcggtccttgtccgtgatgaagctcatgaggctcggcacgcggccggactccttcttcacttccgggcccgtcaggtccgtctacacggaggtggccaccgacctgcaaatccaggtggatcactgcttgtttcgactccacaaggctctgtgcgcgggctccgacgccgccgagctgccgggcttcccgggcggcgcagaggcgttcgaggcctgcgccaagttctgctacggcgtggccatcacggtcggcgcgcacaacgtcgtgcccctgcgctgcgcggcggcgcgcctcggcatgacggaggccgccgaccgcggcaacctcgccgccaagctcgacgcgttcctcgcctcctgcctcctccgccggtggaaggacgcgctcgccgtgctccgctccgccgccggccgccacgccgccgagtgcgaggagctcggcgtcacgtcccggtgcgtcgaggccgtcgcgacgctcgtcgtctcggaccccggcggcggcgacgccgccgccgcgccgtccagctccgcgtcgccgtggtgggcgcgcgacgtctccgacctcggcgtagacctcttctggcgcgtcatggtggccgtcaaggcggccggcaccgtcaaggggagagccgtcggcgacgcgctcaagacctacgcgcgccggtggctgccggccgttgccaagagcgggtacctggtgctggagcaaaccgacatcagcacagccgagtggaacagccggcttcttgtcgaaaagatggtgagcttgctccccgccgagaggaacgccgtctcctgcagcttctttctcaagcttctcaaggcagccagcgtcctgggcgcctctcccgcgtccaaggcagagctcacgaggagggtggcgctgcagctggaagacgccagcgtgagcgacctcctgataccgtcgtcgtgcgcgggcgagacgctgtacgacgtggacgccgtgacggccatccttgaagagctggcgctgcggcaagcggcggcggcgggggtcccggaggcaagcccgccgcacgcgcgcggacacaggcggtcgcggtccgccgagagctcggagtacgagggagcgcgtcggtccgcgtccgccccggcgtcgcacggcgcgatggtcaggatcgggaggctggtcgatggattcctgatggaggtcgccaaggatcccaacctgcccctggacaagctgatcgccattgccgaggcagtgccggactgcgcccgcccggagcacgaccatctgtaccgagccgtcgacacttacctcagagtacatacgtggaaaacagactgcaccatttcagtttcagcccggttgatttttgatgcttcactcactgttcttgcttcgatttacgcgacaggtgcacccggagatagacaagggttcgaggaagaagctgtgcagggttctcaactgcaggaagctctccgagacggcgtctatgcacgccgcccggaacgagctgctgccgctccgggtggtcgtgcaggtgctcttcttcgagaacgcacgcgcggcggcgctgtccgtccgcggggctaacggccgcgccgccgccggtggcgtcaaggcgctgcttgccaagacaaggagggaggagacagacggcgaggagaaaaggctccggggcctcgccgtcgccggcgcgcctggcgacgacggcaacgactggagcgtggaggggctgaagcgcgcggcgtcgagggtgtcgaccctgaggatgaggctggaggaggacgcggacgacgaggcgttcgtgcacagggcgcgcgcgggggcggggctggtccggagcgcgtccgcccgcgtcagggcgctctgcgcgatcccggccgggaagcccaggcggatgctgagcaggctgtggccgtcgagctccagcagcgccgtcactgagaggcgttgaattgaaagacctgcacgagagcaatgcggaatgcggtggcagattgatcgatccaggcacaccattctggtcgcgaaggctgtgcatgtgtaaaaaaaaaggaaaagagaacgctgtgttggcagtgttgccatgtttacgtttgattccaaaattcactgaaaggagtttggatatatatagagagagagagtagtaaaatcaaccaaaaagttgtaaaatctttcgaaagttcacgctcggcggcatcagtagagctgcaaaacatccttggacggcggcgacgggtggtcaagcggttctctccgtggaagacgtgagccggaaggaggggctttactgtgccagcaataagggccaaccaaccattggcaaatgatgactcgttc

SEQ ID NO: 24870 - DNA, 345 bp, Zea Mays
ctccgctgccaccgccgttcacgccgtgctgcatctgcagccgcgccatcgcccatcacctggtgccccgccgctctgagctcgcatcgtcgtccgccgaggagcctgcgtggagccgttgccgagatcgcgatttgtttccgcgctccgaggaatcgacgatcaagcgtcggcgaccaaatgatcaagctctctgagttttatgaggttgaagatcctgagcatctgtttggtgaaggcaagtgtcctctgacccattatgtcccattcacttttaatgcactgtcccacattacttaattgaaacgtaaggattgactagctttctatttaccttatcattgt

SEQ ID NO: 24871 - DNA, 1157 bp, Zea Mays
cggactcatcaaacaccacatggcgagagatgaggacccggcgagagcagaggtcaaagcagcggtagcctttatggtccggggagtacccgagaaacacacagagggtggaatggggtgctagtttgtgaggagcagtggcagcggtgttcgggtagcaagcacacccgaagacacagaggtggtcatagcgcggaggggtaccgaagagtgcctggtgaggagtgggggccggacacgcagtggaagggagacggttgaggaggtaggtagaggtgtggagggccttggcccagaaacgtgtcggaaggtgtgcctggagaagaagagtgcagatggtgtcgttggtcgtgcggatcatgcgctcagccttgccgttctgggaggaggtatacgggcaagacatccgcaactacatcccgtgggagagaaagaagtcgcgggaggtggagttatcgaactcccgaccattgtcacactgaacggccttaatggtgaggccgaactgagtggacacccaggcgaagaagtggcggagggcggggaaagtctcagacttggcacgcaaaggaaaagtccacacataatgagaaaaatcatcaagcaccacaagatagtatttgtagcctgacatactggtaatgggtgaagtccacaaatcgcagtgcacaagatcaaaagcatgagtagcatgagaggaagaagaagaaaaaggaagacgaacatggcggcctaactggcacgcatgacaaagatgctcatcatgggatctagtacatgggatagtggcactacgagtaagctgcatcaaggcatcgcgtccggggtgaccaaggcgacgatgccaggtggtagaagacgtggcggcaacaaaaacagcagctgcgtcaggtgacgaagacgaagaagatgtggcgtgcggaagccgaagggtgtagagggggccggtgctgtcacatctgaggagggggcgccgagttgccgagtccttcacagtaagaccaaaagagtcaaactcgacagaacaagaattatcagcagtaaaccgacgaatagaaagaagattgtggaccaaagaaggagcgacaagaacatcgggaatgcgaaaagagccgggagggctggcggcacccatagatgtgacaggaagacacgag

SEQ ID NO: 24872 - DNA, 2701 bp, Zea Mays
atgcggctctacgtgtacgtgctcgaggcgcgcgggctaccggcgccgcgtcagcgccgcggcggcgtcgtgctgttctacgcgaaggtgacggtggggaagcagcggttccggacgcgggcggtggaggcgtcggatctgggcggcgcggcagtggcggcggcgtggaacgaggagttcgtgttcgcggtggggtcggacggagctgctgggggcgaggagctcgaggtcgccgtggcgcggcggggagcgagagggagggaggtggtgggcacggtcaggctgcccgtgccggccgccaccgctgctgctggtgccccgggggagaggcggtccgtgccgccgacgtggttcacgctgcagctgcagcgacggcggaagggcgttgtcggcgtcgacggtggcgacgaagccgcggcggattgcgggaaaattctcctcagcttttcactctacggagaaaacaacgtcaactctgtcgtccacaccgatgccgaagtggagagatcacttgacatggaacattcaagttgtaacaatggtggggtggttgattctcccaggagccatgacacagataactctgagcatttcacacaagaagattgcaattcaattactgaagttgatgacctagcggagactagcactacggcaacagcaaacggtgcgagtgacaccgaacgtatggtcccagatgctgctgctagcttcttcgaagaagctatggagatcatgaaatctagaagaagcacaccagaattgccacaagatctcgacggcggcatcatatttgagcacgcttatcttgtggggtcgaaagagctgaaccatcttctgttcagacctgactctcagttcttcaaagacgtgcgcgagcttcaaggtaccatggactacgaggagcagccgtggacatggaagagcgcggatcctcctagcttaactaggacatgccgatacaccacaggcgcatctaataagtttatgaaagccgtcaagaccagtgaggagcagacgtaccttagagcagacggcaagagttttgtggtcacggctcgtgtccgtactcccgaagtgcccttcgggaactgtttcgcagtcgtcctgctctacaagatagtccacaggaccggcgaagaaggcgcgcatctgactgtatcatacaacgtagacttccttcagagcaccatgatgagaagcgtgatcgaggggagtgttcgagacgggctgagagaaaatttccagggtttcgctcaagtattgtctaggcatgttgttgaagtggccggttctgtcgggatgagcaaagagcagttgctggcgccattgcaggtagaacaccgccagtcagatatcaggctcgcttacaggtacttttgcaatttcactgccgtttcgacggtgctgtttgcactgtatgttcttgtgcacatctttctgtcaggaccagcaggccttgagttcagtggtctagatctacctgactcattcggagagctgatcacagctggcgtactagtcctccaattgcagcgcttactgaatatggtgacccattttgtagaggcaaggttacagagagtgatcatggggttaaagcaaatggtgacggttggctgttaactgttgccctgctagaggccacaagcttgccacctggatcggttgacccttatgttgtgctcagctgtaatggcataacaagaacaagttctgtccagcttcagactctggaacctcaatggaacgagataatggagtttggcgccatggaagaagcacctgccgtgctggacgttgaagttttcaatttcgttggtccattcggtgtggcgatttccattggacacgctgaaattaacttcctgaaacacacatcagtagagctggcagacatatgggtgccgttgcaaggaaaactcgcgcagacatgtaagagccggttacatctgagagtatttctagagaacacgaaaggaccggagacaacaatgagagaatacatgagtaagatggagaaggaggttggtaaaaagttgcatgtgcggtcgcctcacaggaattctacattccagaagctctttaatctgccacaggaagaattccttatagcggattacgcatgctctttgagaagaaagctgcctttgcaggggaggctgtttgtgtccgccagaatagttggcttctacgctaatctgtttggacacaaaacgaaattcttctttctatgggaagacgtggaggagatccaagtgctacagccatctttcacaacggtaggcaccccgtctctgctgttcattctgaagagtggccggggactcgacgcgaagagtggtgcaaagtcccaagacaaggaagggaggctcaagtttcagttccactcctttgcatcgttcagcaaggctagcaggtggtcatctctcaattcaatttttagctagccatcagtattatattagctagcctatgaagaacctataatatacatatattataggacaataattggtctgtggaaatcgaaatcgtcggccgttgaacagagggaagagcatcatgaagaagatgcgagctcacttgatcttgattgacgatgttcaagcggtgttgagcattattaatggagatgtacctctctcggaaggagtatactttggaacacccgattggtgctgatctgctcatgggtata

SEQ ID NO: 24873 - DNA, 2568 bp, Zea Mays
atgcggctctacgtgtacgtgctcgaggcgcgcgggctaccggcgccgcgtcagcgccgcggcggcgtcgtgctgttctacgcgaaggtgacggtggggaagcagcggttccggacgcgggcggtggaggcgtcggatctgggcggcgcggcagtggcggcggcgtggaacgaggagttcgtgttcgcggtggggtcggacggagctgctgggggcgaggagctcgaggtcgccgtggcgcggcggggagcgagagggagggaggtggtgggcacggtcaggctgcccgtgccggccgccaccgctgctgctggtgccccgggggagaggcggtccgtgccgccgacgtggttcacgctgcagctgcagcgacggcggaagggcgttgtcggcgtcgacggtggcgacgaagccgcggcggattgcgggaaaattctcctcagcttttcactctacggagaaaacaacgtcaactctgtcgtccacaccgatgccgaagtggagagatcacttgacatggaacattcaagttgtaacaatggtggggtggttgattctcccaggagccatgacacagataactctgagcatttcacacaagaagattgcaattcaattactgaagttgatgacctagcggagactagcactacggcaacagcaaacggtgcgagtgacaccgaacgtatggtcccagatgctgctgctagcttcttcgaagaagctatggagatcatgaaatctagaagaagcacaccagaattgccacaagatctcgacggcggcatcatatttgagcacgcttatcttgtggggtcgaaagagctgaaccatcttctgttcagacctgactctcagttcttcaaagacgtgcgcgagcttcaaggtaccatggactacgaggagcagccgtggacatggaagagcgcggatcctcctagcttaactaggacatgccgatacaccacaggcgcatctaataagtttatgaaagccgtcaagaccagtgaggagcagacgtaccttagagcagacggcaagagttttgtggtcacggctcgtgtccgtactcccgaagtgcccttcgggaactgtttcgcagtcgtcctgctctacaagatagtccacaggaccggcgaagaaggcgcgcatctgactgtatcatacaacgtagacttccttcagagcaccatgatgagaagcgtgatcgaggggagtgttcgagacgggctgagagaaaatttccagggtttcgctcaagtattgtctaggcatgttgttgaagtggccggttctgtcgggatgagcaaagagcagttgctggcgccattgcaggtagaacaccgccagtcagatatcaggctcgcttacagctggcgtactagtcctccaattgcagcgcttactgaatatggtgacccattttgtagaggcaaggttacagagaggaagtgatcatggggttaaagcaaatggtgacggttggctgttaactgttgccctgctagaggccacaagcttgccacctggatcggttgacccttatgttgtgctcagctgtaatggcataacaagaacaagttctgtccagcttcagactctggaacctcaatggaacgagataatggagtttggcgccatggaagaagcacctgccgtgctggacgttgaagttttcaatttcgttggtccattcggtgtggcgatttccattggacacgctgaaattaacttcctgaaacacacatcagtagagctggcagacatatgggtgccgttgcaaggaaaactcgcgcagacatgtaagagccggttacatctgagagtatttctagagaacacgaaaggaccggagacaacaatgagagaatacatgagtaagatggagaaggaggttggtaaaaagttgcatgtgcggtcgcctcacaggaattctacattccagaagctctttaatctgccacaggaagaattccttatagcggattacgcatgctctttgagaagaaagctgcctttgcaggggaggctgtttgtgtccgccagaatagttggcttctacgctaatctgtttggacacaaaacgaaattcttctttctatgggaagacgtggaggagatccaagtgctacagccatctttcacaacggtaggcaccccgtctctgctgttcattctgaagagtggccggggactcgacgcgaagagtggtgcaaagtcccaagacaaggaagggaggctcaagtttcagttccactcctttgcatcgttcagcaaggctagcaggtggtcatctctcaattcaatttttagctagccatcagtattatattagctagcctatgaagaacctataatatacatatattataggacaataattggtctgtggaaatcgaaatcgtcggccgttgaacagagggaagagcatcatgaagaagatgcgagctcacttgatcttgattgacgatgttcaagcggtgttgagcattattaatggagatgtacctctctcggaaggagtatactttggaacacccgattggtgctgatctgctcatgggtata

SEQ ID NO: 24874 - DNA, 2702 bp, Zea Mays
aggtccctactacttaaatagttaaattccgagccaaggtccctcctcatagctagctaccgcgatcgaccgccatgcggctctacgtgtacgtgctcgaggcgcgcgggctaccggcgccgcgtcagcgccgcggcggcgtcgtgctgttctacgcgaaggtgacggtggggaagcagcggttccggacgcgggcggtggaggcgtcggatctgggcggcgcggcagtggcggcggcgtggaacgaggagttcgtgttcgcggtggggtcggacggagctgctgggggcgaggagctcgaggtcgccgtggcgcggcggggagcgagagggagggaggtggtgggcacggtcaggctgcccgtgccggccgccaccgctgctgctggtgccccgggggagaggcggtccgtgccgccgacgtggttcacgctgcagctgcagcgacggcggaagggcgttgtcggcgtcgacggtggcgacgaagccgcggcggattgcgggaaaattctcctcagcttttcactctacggagaaaacaacgtcaactctgtcgtccacaccgatgccgaagtggagagatcacttgacatggaacattcaagttgtaacaatggtggggtggttgattctcccaggagccatgacacagataactctgagcatttcacacaagaagattgcaattcaattactgaagttgatgacctagcggagactagcactacggcaacagcaaacggtgcgagtgacaccgaacgtatggtcccagatgctgctgctagcttcttcgaagaagctatggagatcatgaaatctagaagaagcacaccagaattgccacaagatctcgacggcggcatcatatttgagcacgcttatcttgtggggtcgaaagagctgaaccatcttctgttcagacctgactctcagttcttcaaagacgtgcgcgagcttcaaggtaccatggactacgaggagcagccgtggacatggaagagcgcggatcctcctagcttaactaggacatgccgatacaccacaggcgcatctaataagtttatgaaagccgtcaagaccagtgaggagcagacgtaccttagagcagacggcaagagttttgtggtcacggctcgtgtccgtactcccgaagtgcccttcgggaactgtttcgcagtcgtcctgctctacaagatagtccacaggaccggcgaagaaggcgcgcatctgactgtatcatacaacgtagacttccttcagagcaccatgatgagaagcgtgatcgaggggagtgttcgagacgggctgagagaaaatttccagggtttcgctcaagtattgtctaggcatgttgttgaagtggccggttctgtcgggatgagcaaagagcagttgctggcgccattgcaggtagaacaccgccagtcagatatcaggctcgcttacaggtacttttgcaatttcactgccgtttcgacggtgctgtttgcactgtatgttcttgtgcacatctttctgtcaggaccagcaggccttgagttcagtggtctagatctacctgactcattcggagagctgatcacagctggcgtactagtcctccaattgcagcgcttactgaatatggtgacccattttgtagaggcaaggttacagagaggaagtgatcatggggttaaagcaaatggtgacggttggctgttaactgttgccctgctagaggccacaagcttgccacctggatcggttgacccttatgttgtgctcagctgtaatggcataacaagaacaagttctgtccagcttcagactctggaacctcaatggaacgaacattgcagagataatggagtttggcgccatggaagaagcacctgccgtgctggacgttgaagttttcaatttcgttggtccattcggtgtggcgatttccattggacacgctgaaattaacttcctgaaacacacatcagtagagctggcagacatatgggtgccgttgcaaggaaaactcgcgcagacatgtaagagccggttacatctgagagtatttctagagaacacgaaaggaccggagacaacaatgagagaatacatgagtaagatggagaaggaggttggtaaaaagttgcatgtgcggtcgcctcacaggaattctacattccagaagctctttaatctgccacaggaagaattccttatagcggattacgcatgctctttgagaagaaagctgcctttgcaggggaggctgtttgtgtccgccagaatagttggcttctacgctaatctgtttggacacaaaacgaaattcttctttctatgggaagacgtggaggagatccaagtgctacagccatctttcacaacggtaggcaccccgtctctgctgttcattctgaagagtggccggggactcgacgcgaagagtggtgcaaagtcccaagacaaggaagggaggctcaagtttcagttccactcctttgcatcgttcagcaaggctagcaggacaataattggtctgtggaaatcgaaatcgtcggccgttgaacagagggaagagcatcatgaagaagatgcgagctcacttgatcttgattgacgatgttcaagcggtgttgagcattattaatggagatgtacctctctcggaaggagtatactttggaacacccgattggtgctgatctgctcatgggtata

SEQ ID NO: 24875 - DNA, 2611 bp, Zea Mays
caaggtccctactacttaaatagttaaattccgagccaaggtccctcctcatagctagctaccgcgatcgaccgccatgcggctctacgtgtacgtgctcgaggcgcgcgggctaccggcgccgcgtcagcgccgcggcggcgtcgtgctgttctacgcgaaggtgacggtggggaagcagcggttccggacgcgggcggtggaggcgtcggatctgggcggcgcggcagtggcggcggcgtggaacgaggagttcgtgttcgcggtggggtcggacggagctgctgggggcgaggagctcgaggtcgccgtggcgcggcggggagcgagagggagggaggtggtgggcacggtcaggctgcccgtgccggccgccaccgctgctgctggtgccccgggggagaggcggtccgtgccgccgacgtggttcacgctgcagctgcagcgacggcggaagggcgttgtcggcgtcgacggtggcgacgaagccgcggcggattgcgggaaaattctcctcagcttttcactctacggagaaaacaacgtcaactctgtcgtccacaccgatgccgaagtggagagatcacttgacatggaacattcaagttgtaacaatggtggggtggttgattctcccaggagccatgacacagataactctgagcatttcacacaagaagattgcaattcaattactgaagttgatgacctagcggagactagcactacggcaacagcaaacggtgcgagtgacaccgaacgtatggtcccagatgctgctgctagcttcttcgaagaagctatggagatcatgaaatctagaagaagcacaccagaattgccacaagatctcgacggcggcatcatatttgagcacgcttatcttgtggggtcgaaagagctgaaccatcttctgttcagacctgactctcagttcttcaaagacgtgcgcgagcttcaaggtaccatggactacgaggagcagccgtggacatggaagagcgcggatcctcctagcttaactaggacatgccgatacaccacaggcgcatctaataagtttatgaaagccgtcaagaccagtgaggagcagacgtaccttagagcagacggcaagagttttgtggtcacggctcgtgtccgtactcccgaagtgcccttcgggaactgtttcgcagtcgtcctgctctacaagatagtccacaggaccggcgaagaaggcgcgcatctgactgtatcatacaacgtagacttccttcagagcaccatgatgagaagcgtgatcgaggggagtgttcgagacgggctgagagaaaatttccagggtttcgctcaagtattgtctaggcatgttgttgaagtggccggttctgtcgggatgagcaaagagcagttgctggcgccattgcaggtagaacaccgccagtcagatatcaggctcgcttacaggccttgagttcagtggtctagatctacctgactcattcggagagctgatcacagctggcgtactagtcctccaattgcagcgcttactgaatatggtgacccattttgtagaggcaaggttacagagaggaagtgatcatggggttaaagcaaatggtgacggttggctgttaactgttgccctgctagaggccacaagcttgccacctggatcggttgacccttatgttgtgctcagctgtaatggcataacaagaacaagttctgtccagcttcagactctggaacctcaatggaacgagataatggagtttggcgccatggaagaagcacctgccgtgctggacgttgaagttttcaatttcgttggtccattcggtgtggcgatttccattggacacgctgaaattaacttcctgaaacacacatcagtagagctggcagacatatgggtgccgttgcaaggaaaactcgcgcagacatgtaagagccggttacatctgagagtatttctagagaacacgaaaggaccggagacaacaatgagagaatacatgagtaagatggagaaggaggttggtaaaaagttgcatgtgcggtcgcctcacaggaattctacattccagaagctctttaatctgccacaggaagaattccttatagcggattacgcatgctctttgagaagaaagctgcctttgcaggggaggctgtttgtgtccgccagaatagttggcttctacgctaatctgtttggacacaaaacgaaattcttctttctatgggaagacgtggaggagatccaagtgctacagccatctttcacaacggtaggcaccccgtctctgctgttcattctgaagagtggccggggactcgacgcgaagagtggtgcaaagtcccaagacaaggaagggaggctcaagtttcagttccactcctttgcatcgttcagcaaggctagcaggacaataattggtctgtggaaatcgaaatcgtcggccgttgaacagagggaagagcatcatgaagaagatgcgagctcacttgatcttgattgacgatgttcaagcggtgttgagcattattaatggagatgtacctctctcggaaggagtatactttggaacacccgattggtgctgatctgctcatgggtata

SEQ ID NO: 24876 - DNA, 2673 bp, Zea Mays
ctctctgtctgcgacgactgggtggtctaccgccgttgtcttctccggcgaagagcgcccaccaggaaggattggtaattggatgaaattgagtttgcgccccagttttgggagattatgttgacctaggatcagataaccatgtgctgatgcaatggacacccttcatagcgacccttattccaggagcagcttgcaactgcaaattagggatggctccatgtcctttgagaacaacagtgcagttttggataaacatgaggttgtcagccctcgagttggcatgacctttgagacggttgatctggcatatcaattctacttagagtatggctatcgtgcaggctttggggtctcaaagagaacttcccacagtgttgatggggttaaataccgtgctacatttgtttgttacaaaggtggcatagctaggattaagcctggcctcaaagctcgaaggaggcttgttgcaaagactggttgcaaagcaatgatggtagtgaagtttaatgccagtgagaaccattgggaagtggtttttgtcgagttggaacataaccacccatgcaatcctgagatggtcagattcatgatgtgctttaaagaccttcctgactggcaaagggagcaccgcccattcaatgccaaaactcgattgaacccgaagattcactctggtagaggcaggccacccaaccaaaacaaagatttcatggtgagatccttctcccagtcaaattattccatcgatggggcagggaagactggaaagttaaggtttgcagagggtgacgttgaagcactcttagttttttttgataagatgcaagctcaaaactccaacttcttctataactgggacatggacgatgaaggtcgtctcaagaacgtttgctgggttgatgctagatccagagttgcatatcaacacttctgtgatgttatttgctttgatactgtctatttgacatatcagtttgtcattccattggtcgcatttttgggaatcaaccatcatgggcagtttgtgttgttaggatgtggtctacttggagacgagtctccagagacctttgcgtggttattcaaaaaatggctaaaatgtatgaatgataaatcacctgaagcaattgttacgactcattcaaggccagtagtcaaagcagtcagtgaagtatttccaaatactcggcacagatacaacctttggcatataatgaaagaacttcctgaaatgtctggaagagttgaggataaagaagcagtcagtctgagaatgaaaaaagtagtctatgatacaattacatcagctgattttgagagggagtgggctgaaatgatcaaccaatataatctccatgataaccagtggcttacaaccttgtttgaagagagggcaaaatgggtaccagcatatgtaaaggatactttttgggctggtatctccactgttcgccgtagtgaacgattggaggccttttttgatggatatattacaccagaaaccacaataaagacgttcattgaacaattcgatactgctatgaagctcaggtctgatcgagaagcctatgatgatttccgttcatttcaacaaaggccacaagtcctgtctggtcttctgtttgaggagcaatttgcaaatgtttatacaataaatatgttccagaaattccaggatcagttgaagcagctgatgaatgtgaattgcactgaagtcagtaggaatggttcaatagtgacatacacggtgacagtaattggaaaggagaggaagtttgactacagagtgatgtataacagtgctgagaaagaagtgtggtgcatctgcaggtcattccagtttaaaggtattttatgtagccatgctcttgctgtcttgaagcaagagcttgtgatgctaatacctcccaaatatattcttgatcgatggcgaaaggactacaaatgccctgaggaacctaaggaaacccccatttcacagaaagctgctaaagatacagggaagggctcaaaaccagaaaacattcgggaagatcaagtggacaatctctacaagcatggacaccagtactttgctgacattgtggaaatgggagctactgaccctgatgcgatggaatacgtcctttctgtgatgaaagaagctaaagagaaagtgcgcaagtttgaggagtctcgaaaagagaagaggcctggagagggtccagtttctgctggtaaaaaaggggcgaagttttcgaagccatccacacaagaagttggcaatacaacatcagtttcgactccgactgaagcagtggcttcggtcacagtggtgtcatctcctccaatggcggcagccccaacaatgatggctatggcgccaccttcagcagctgtggccggaggaatgtttttagtaccaatgcacccgcatcccttggtgttcccacccttcccccctgcagtcccaccagcggtagctcctgtagcaccacctgctgcaccagcaaccaatgttgtctccaacacctcaaagaagcgaaagaaaagaaaggggaataattgatcttctgatgctgatgaaatgatgaatgttttccagatctaaaacaagatcagatcggcgaagtagaaaatgagtttgatctcacactacgcatcaggcctcgacatgagagtgagctatcg

SEQ ID NO: 24877 - DNA, 2711 bp, Zea Mays
ctcgtccgttcgccgccgccgtctgcctcgcaccgctgactgtgccccagcccagatcgatcctccacagcagatagggggggggggggggggtctctctctctgtctgcgacgactgggtggtctaccgccgttgtcttctccggcgaagagcgcccaccagattatgttgacctaggatcagataaccatgtgctgatgcaatggacacccttcatagcgacccttattccaggagcagcttgcaactgcaaattagggatggctccatgtcctttgagaacaacagtgcagttttggataaacatgaggttgtcagccctcgagttggcatgacctttgagacggttgatctggcatatcaattctacttagagtatggctatcgtgcaggctttggggtctcaaagagaacttcccacagtgttgatggggttaaataccgtgctacatttgtttgttacaaaggtggcatagctaggattaagcctggcctcaaagctcgaaggaggcttgttgcaaagactggttgcaaagcaatgatggtagtgaagtttaatgccagtgagaaccattgggaagtggtttttgtcgagttggaacataaccacccatgcaatcctgagatggtcagattcatgatgtgctttaaagaccttcctgactggcaaagggagcaccgcccattcaatgccaaaactcgattgaacccgaagattcactctggtagaggcaggccacccaaccaaaacaaagatttcatggtgagatccttctcccagtcaaattattccatcgatggggcagggaagactggaaagttaaggtttgcagagggtgacgttgaagcactcttagttttttttgataagatgcaagctcaaaactccaacttcttctataactgggacatggacgatgaaggtcgtctcaagaacgtttgctgggttgatgctagatccagagttgcatatcaacacttctgtgatgttatttgctttgatactgtctatttgacatatcagtttgtcattccattggtcgcatttttgggaatcaaccatcatgggcagtttgtgttgttaggatgtggtctacttggagacgagtctccagagacctttgcgtggttattcaaaaaatggctaaaatgtatgaatgataaatcacctgaagcaattgttacgactcattcaaggccagtagtcaaagcagtcagtgaagtatttccaaatactcggcacagatacaacctttggcatataatgaaagaacttcctgaaatgtctggaagagttgaggataaagaagcagtcagtctgagaatgaaaaaagtagtctatgatacaattacatcagctgattttgagagggagtgggctgaaatgatcaaccaatataatctccatgataaccagtggcttacaaccttgtttgaagagagggcaaaatgggtaccagcatatgtaaaggatactttttgggctggtatctccactgttcgccgtagtgaacgattggaggccttttttgatggatatattacaccagaaaccacaataaagacgttcattgaacaattcgatactgctatgaagctcaggtctgatcgagaagcctatgatgatttccgttcatttcaacaaaggccacaagtcctgtctggtcttctgtttgaggagcaatttgcaaatgtttatacaataaatatgttccagaaattccaggatcagttgaagcagctgatgaatgtgaattgcactgaagtcagtaggaatggttcaatagtgacatacacggtgacagtaattggaaaggagaggaagtttgactacagagtgatgtataacagtgctgagaaagaagtgtggtgcatctgcaggtcattccagtttaaaggtattttatgtagccatgctcttgctgtcttgaagcaagagcttgtgatgctaatacctcccaaatatattcttgatcgatggcgaaaggactacaaatgccctgaggaacctaaggaaacccccatttcacagaaagctgctaaagatacagggaagggctcaaaaccagaaaacattcgggaagatcaagtggacaatctctacaagcatggacaccagtactttgctgacattgtggaaatgggagctactgaccctgatgcgatggaatacgtcctttctgtgatgaaagaagctaaagagaaagtgcgcaagtttgaggagtctcgaaaagagaagaggcctggagagggtccagtttctgctggtaaaaaaggggcgaagttttcgaagccatccacacaagaagttggcaatacaacatcagtttcgactccgactgaagcagtggcttcggtcacagtggtgtcatctcctccaatggcggcagccccaacaatgatggctatggcgccaccttcagcagctgtggccggaggaatgtttttagtaccaatgcacccgcatcccttggtgttcccacccttcccccctgcagtcccaccagcggtagctcctgtagcaccacctgctgcaccagcaaccaatgttgtctccaacacctcaaagaagcgaaagaaaagaaaggggaataattgatcttctgatgctgatgaaatgatgaatctaaaacaagatcagatcggcgaagtagaaaatgagtttgatctcacactacgcatcaggcctcgacatgagagtgagctatcg

SEQ ID NO: 24878 - DNA, 3069 bp, Zea Mays
actctggaaagtgcgtggtatgcactttacactagctggtaacaggaaggattggtaattggatgaaattgagtttgcgccccagttttgggagattatgttgacctaggatcagataaccatgtgctgatgcaatggacacccttcatagcgacccttattccaggagcagcttgcaactgcaaattagggatggctccatgtcctttgagaacaacagtgcagttttggataaacatgaggttgtcagccctcgagttggcatgacctttgagacggttgatctggcatatcaattctacttagagtatggctatcgtgcaggctttggggtctcaaagagaacttcccacagtgttgatggggttaaataccgtgctacatttgtttgttacaaaggtggcatagctaggattaagcctggcctcaaagctcgaaggaggcttgttgcaaagactggttgcaaagcaatgatggtagtgaagtttaatgccagtgagaaccattgggaagtggtttttgtcgagttggaacataaccacccatgcaatcctgagatggtcagattcatgatgtgctttaaagaccttcctgactggcaaagggagcaccgcccattcaatgccaaaactcgattgaacccgaagattcactctggtagaggcaggccacccaaccaaaacaaagatttcatggtgagatccttctcccagtcaaattattccatcgatggggcagggaagactggaaagttaaggtttgcagagggtgacgttgaagcactcttagttttttttgataagatgcaagctcaaaactccaacttcttctataactgggacatggacgatgaaggtcgtctcaagaacgtttgctgggttgatgctagatccagagttgcatatcaacacttctgtgatgttatttgctttgatactgtctatttgacatatcagtttgtcattccattggtcgcatttttgggaatcaaccatcatgggcagtttgtgttgttaggatgtggtctacttggagacgagtctccagagacctttgcgtggttattcaaaaaatggctaaaatgtatgaatgataaatcacctgaagcaattgttacgactcattcaaggccagtagtcaaagcagtcagtgaagtatttccaaatactcggcacagatacaacctttggcatataatgaaagaacttcctgaaatgtctggaagagttgaggataaagaagcagtcagtctgagaatgaaaaaagtagtctatgatacaattacatcagctgattttgagagggagtgggctgaaatgatcaaccaatataatctccatgataaccagtggcttacaaccttgtttgaagagagggcaaaatgggtaccagcatatgtaaaggatactttttgggctggtatctccactgttcgccgtagtgaacgattggaggccttttttgatggatatattacaccagaaaccacaataaagacgttcattgaacaattcgatactgctatgaagctcaggtctgatcgagaagcctatgatgatttccgttcatttcaacaaaggccacaagtcctgtctggtcttctgtttgaggagcaatttgcaaatgtttatacaataaatatgttccagaaattccaggatcagttgaagcagctgatgaatgtgaattgcactgaagtcagtaggaatggttcaatagtgacatacacggtgacagtaattggaaaggagaggaagtttgactacagagtgatgtataacagtgctgagaaagaagtgtggtgcatctgcaggtcattccagtttaaaggtattttatgtagccatgctcttgctgtcttgaagcaagagcttgtgatgctaatacctcccaaatatattcttgatcgatggcgaaaggactacaaatgccctgaggaacctaaggaaacccccatttcacagaaagctgctaaagatacagggaagggctcaaaaccagaaaacattcgggaagatcaagtggacaatctctacaagcatggacaccagtactttgctgacattgtggaaatgggagctactgaccctgatgcgatggaatacgtcctttctgtgatgaaagaagctaaagagaaagtgcgcaagtttgaggagtctcgaaaagagaagaggcctggagagggtccagtttctgctggtaaaaaaggggcgaagttttcgaagccatccacacaagaagttggcaatacaacatcagtttcgactccgactgaagcagtggcttcggtcacagtggtgtcatctcctccaatggcggcagccccaacaatgatggctatggcgccaccttcagcagctgtggccggaggaatgtttttagtaccaatgcacccgcatcccttggtgttcccacccttcccccctgcagtcccaccagcggtagctcctgtagcaccacctgctgcaccagcaaccaatgttgtctccaacacctcaaagaagcgaaagaaaagaaaggggaataattgatcttctgatgctgatgaaatgatgaatctaaaacaagatcagatcggcgaagtagaaaatgagtttgatctcacactacgcatcaggcctcgacatgagagtgagctatcgatttatctcttctgcgcgggttggtctttcgagaaaaatctcttctgcgcgggttggtctttcgagaaaaatctcttctgctggctgtgctactgctacctatgagactacctactgcagtctgcatattcctggggtgttggcttcactgcttcagctagatgctctgctgtggctgacgcagttcagtctaaggagagatgcattttgggctcagcacactgatcttgattactgtagattactagattagattgcctgtagtgtacattatcgtcctcagtgccggaagtaatctaacatgtagtccagcttatgaatgtaaagatctgtttctgattatggattgcatttatggggaaggatctggatcttattaagaaattctgatttacaagcatttgccgtcatttgagtttattggact

SEQ ID NO: 24879 - DNA, 3024 bp, Zea Mays
attaactctggaaagtgcgtggtatgcactttacactagctggtaacagattatgttgacctaggatcagataaccatgtgctgatgcaatggacacccttcatagcgacccttattccaggagcagcttgcaactgcaaattagggatggctccatgtcctttgagaacaacagtgcagttttggataaacatgaggttgtcagccctcgagttggcatgacctttgagacggttgatctggcatatcaattctacttagagtatggctatcgtgcaggctttggggtctcaaagagaacttcccacagtgttgatggggttaaataccgtgctacatttgtttgttacaaaggtggcatagctaggattaagcctggcctcaaagctcgaaggaggcttgttgcaaagactggttgcaaagcaatgatggtagtgaagtttaatgccagtgagaaccattgggaagtggtttttgtcgagttggaacataaccacccatgcaatcctgagatggtcagattcatgatgtgctttaaagaccttcctgactggcaaagggagcaccgcccattcaatgccaaaactcgattgaacccgaagattcactctggtagaggcaggccacccaaccaaaacaaagatttcatggtgagatccttctcccagtcaaattattccatcgatggggcagggaagactggaaagttaaggtttgcagagggtgacgttgaagcactcttagttttttttgataagatgcaagctcaaaactccaacttcttctataactgggacatggacgatgaaggtcgtctcaagaacgtttgctgggttgatgctagatccagagttgcatatcaacacttctgtgatgttatttgctttgatactgtctatttgacatatcagtttgtcattccattggtcgcatttttgggaatcaaccatcatgggcagtttgtgttgttaggatgtggtctacttggagacgagtctccagagacctttgcgtggttattcaaaaaatggctaaaatgtatgaatgataaatcacctgaagcaattgttacgactcattcaaggccagtagtcaaagcagtcagtgaagtatttccaaatactcggcacagatacaacctttggcatataatgaaagaacttcctgaaatgtctggaagagttgaggataaagaagcagtcagtctgagaatgaaaaaagtagtctatgatacaattacatcagctgattttgagagggagtgggctgaaatgatcaaccaatataatctccatgataaccagtggcttacaaccttgtttgaagagagggcaaaatgggtaccagcatatgtaaaggatactttttgggctggtatctccactgttcgccgtagtgaacgattggaggccttttttgatggatatattacaccagaaaccacaataaagacgttcattgaacaattcgatactgctatgaagctcaggtctgatcgagaagcctatgatgatttccgttcatttcaacaaaggccacaagtcctgtctggtcttctgtttgaggagcaatttgcaaatgtttatacaataaatatgttccagaaattccaggatcagttgaagcagctgatgaatgtgaattgcactgaagtcagtaggaatggttcaatagtgacatacacggtgacagtaattggaaaggagaggaagtttgactacagagtgatgtataacagtgctgagaaagaagtgtggtgcatctgcaggtcattccagtttaaaggtattttatgtagccatgctcttgctgtcttgaagcaagagcttgtgatgctaatacctcccaaatatattcttgatcgatggcgaaaggactacaaatgccctgaggaacctaaggaaacccccatttcacagaaagctgctaaagatacagggaagggctcaaaaccagaaaacattcgggaagatcaagtggacaatctctacaagcatggacaccagtactttgctgacattgtggaaatgggagctactgaccctgatgcgatggaatacgtcctttctgtgatgaaagaagctaaagagaaagtgcgcaagtttgaggagtctcgaaaagagaagaggcctggagagggtccagtttctgctggtaaaaaaggggcgaagttttcgaagccatccacacaagaagttggcaatacaacatcagtttcgactccgactgaagcagtggcttcggtcacagtggtgtcatctcctccaatggcggcagccccaacaatgatggctatggcgccaccttcagcagctgtggccggaggaatgtttttagtaccaatgcacccgcatcccttggtgttcccacccttcccccctgcagtcccaccagcggtagctcctgtagcaccacctgctgcaccagcaaccaatgttgtctccaacacctcaaagaagcgaaagaaaagaaaggggaataattgatcttctgatgctgatgaaatgatgaatctaaaacaagatcagatcggcgaagtagaaaatgagtttgatctcacactacgcatcaggcctcgacatgagagtgagctatcgatttatctcttctgcgcgggttggtctttcgagaaaaatctcttctgcgcgggttggtctttcgagaaaaatctcttctgctggctgtgctactgctacctatgagactacctactgcagtctgcatattcctggggtgttggcttcactgcttcagctagatgctctgctgtggctgacgcagttcagtctaaggagagatgcattttgggctcagcacactgatcttgattactgtagattactagattagattgcctgtagtgtacattatcgtcctcagtgccggaagtaatctaacatgtagtccagcttatgaatgtaaagatctgtttctgattatggattgcatttatggggaaggatctggatcttattaagaaattctgatttacaagcatttgccgtcatttgagtttattggact

SEQ ID NO: 24880 - DNA, 3049 bp, Zea Mays
gctgacagttgattattaactctggaaagtgcgtggtatgcactttacactagctggtaacagattatgttgacctaggatcagataaccatgtgctgatgcaatggacacccttcatagcgacccttattccaggagcagcttgcaactgcaaattagggatggctccatgtcctttgagaacaacagtgcagttttggataaacatgaggttgtcagccctcgagttggcatgacctttgagacggttgatctggcatatcaattctacttagagtatggctatcgtgcaggctttggggtctcaaagagaacttcccacagtgttgatggggttaaataccgtgctacatttgtttgttacaaaggtggcatagctaggattaagcctggcctcaaagctcgaaggaggcttgttgcaaagactggttgcaaagcaatgatggtagtgaagtttaatgccagtgagaaccattgggaagtggtttttgtcgagttggaacataaccacccatgcaatcctgagatggtcagattcatgatgtgctttaaagaccttcctgactggcaaagggagcaccgcccattcaatgccaaaactcgattgaacccgaagattcactctggtagaggcaggccacccaaccaaaacaaagatttcatggtgagatccttctcccagtcaaattattccatcgatggggcagggaagactggaaagttaaggtttgcagagggtgacgttgaagcactcttagttttttttgataagatgcaagctcaaaactccaacttcttctataactgggacatggacgatgaaggtcgtctcaagaacgtttgctgggttgatgctagatccagagttgcatatcaacacttctgtgatgttatttgctttgatactgtctatttgacatatcagtttgtcattccattggtcgcatttttgggaatcaaccatcatgggcagtttgtgttgttaggatgtggtctacttggagacgagtctccagagacctttgcgtggttattcaaaaaatggctaaaatgtatgaatgataaatcacctgaagcaattgttacgactcattcaaggccagtagtcaaagcagtcagtgaagtatttccaaatactcggcacagatacaacctttggcatataatgaaagaacttcctgaaatgtctggaagagttgaggataaagaagcagtcagtctgagaatgaaaaaagtagtctatgatacaattacatcagctgattttgagagggagtgggctgaaatgatcaaccaatataatctccatgataaccagtggcttacaaccttgtttgaagagagggcaaaatgggtaccagcatatgtaaaggatactttttgggctggtatctccactgttcgccgtagtgaacgattggaggccttttttgatggatatattacaccagaaaccacaataaagacgttcattgaacaattcgatactgctatgaagctcaggtctgatcgagaagcctatgatgatttccgttcatttcaacaaaggccacaagtcctgtctggtcttctgtttgaggagcaatttgcaaatgtttatacaataaatatgttccagaaattccaggatcagttgaagcagctgatgaatgtgaattgcactgaagtcagtaggaatggttcaatagtgacatacacggtgacagtaattggaaaggagaggaagtttgactacagagtgatgtataacagtgctgagaaagaagtgtggtgcatctgcaggtcattccagtttaaaggtattttatgtagccatgctcttgctgtcttgaagcaagagcttgtgatgctaatacctcccaaatatattcttgatcgatggcgaaaggactacaaatgccctgaggaacctaaggaaacccccatttcacagaaagctgctaaagatacagggaagggctcaaaaccagaaaacattcgggaagatcaagtggacaatctctacaagcatggacaccagtactttgctgacattgtggaaatgggagctactgaccctgatgcgatggaatacgtcctttctgtgatgaaagaagctaaagagaaagtgcgcaagtttgaggagtctcgaaaagagaagaggcctggagagggtccagtttctgctggtaaaaaaggggcgaagttttcgaagccatccacacaagaagttggcaatacaacatcagtttcgactccgactgaagcagtggcttcggtcacagtggtgtcatctcctccaatggcggcagccccaacaatgatggctatggcgccaccttcagcagctgtggccggaggaatgtttttagtaccaatgcacccgcatcccttggtgttcccacccttcccccctgcagtcccaccagcggtagctcctgtagcaccacctgctgcaccagcaaccaatgttgtctccaacacctcaaagaagcgaaagaaaagaaaggggaataattgatcttctgatgctgatgaaatgatgaatgttttccagatctaaaacaagatcagatcggcgaagtagaaaatgagtttgatctcacactacgcatcaggcctcgacatgagagtgagctatcgatttatctcttctgcgcgggttggtctttcgagaaaaatctcttctgcgcgggttggtctttcgagaaaaatctcttctgctggctgtgctactgctacctatgagactacctactgcagtctgcatattcctggggtgttggcttcactgcttcagctagatgctctgctgtggctgacgcagttcagtctaaggagagatgcattttgggctcagcacactgatcttgattactgtagattactagattagattgcctgtagtgtacattatcgtcctcagtgccggaagtaatctaacatgtagtccagcttatgaatgtaaagatctgtttctgattatggattgcatttatggggaaggatctggatcttattaagaaattctgatttacaagcatttgccgtcatttgagtttattggact

SEQ ID NO: 24881 - DNA, 3100 bp, Zea Mays
ctctctgtctgcgacgactgggtggtctaccgccgttgtcttctccggcgaagagcgcccaccaggaaggattggtaattggatgaaattgagtttgcgccccagttttgggagattatgttgacctaggatcagataaccatgtgctgatgcaatggacacccttcatagcgacccttattccaggagcagcttgcaactgcaaattagggatggctccatgtcctttgagaacaacagtgcagttttggataaacatgaggttgtcagccctcgagttggcatgacctttgagacggttgatctggcatatcaattctacttagagtatggctatcgtgcaggctttggggtctcaaagagaacttcccacagtgttgatggggttaaataccgtgctacatttgtttgttacaaaggtggcatagctaggattaagcctggcctcaaagctcgaaggaggcttgttgcaaagactggttgcaaagcaatgatggtagtgaagtttaatgccagtgagaaccattgggaagtggtttttgtcgagttggaacataaccacccatgcaatcctgagatggtcagattcatgatgtgctttaaagaccttcctgactggcaaagggagcaccgcccattcaatgccaaaactcgattgaacccgaagattcactctggtagaggcaggccacccaaccaaaacaaagatttcatggtgagatccttctcccagtcaaattattccatcgatggggcagggaagactggaaagttaaggtttgcagagggtgacgttgaagcactcttagttttttttgataagatgcaagctcaaaactccaacttcttctataactgggacatggacgatgaaggtcgtctcaagaacgtttgctgggttgatgctagatccagagttgcatatcaacacttctgtgatgttatttgctttgatactgtctatttgacatatcagtttgtcattccattggtcgcatttttgggaatcaaccatcatgggcagtttgtgttgttaggatgtggtctacttggagacgagtctccagagacctttgcgtggttattcaaaaaatggctaaaatgtatgaatgataaatcacctgaagcaattgttacgactcattcaaggccagtagtcaaagcagtcagtgaagtatttccaaatactcggcacagatacaacctttggcatataatgaaagaacttcctgaaatgtctggaagagttgaggataaagaagcagtcagtctgagaatgaaaaaagtagtctatgatacaattacatcagctgattttgagagggagtgggctgaaatgatcaaccaatataatctccatgataaccagtggcttacaaccttgtttgaagagagggcaaaatgggtaccagcatatgtaaaggatactttttgggctggtatctccactgttcgccgtagtgaacgattggaggccttttttgatggatatattacaccagaaaccacaataaagacgttcattgaacaattcgatactgctatgaagctcaggtctgatcgagaagcctatgatgatttccgttcatttcaacaaaggccacaagtcctgtctggtcttctgtttgaggagcaatttgcaaatgtttatacaataaatatgttccagaaattccaggatcagttgaagcagctgatgaatgtgaattgcactgaagtcagtaggaatggttcaatagtgacatacacggtgacagtaattggaaaggagaggaagtttgactacagagtgatgtataacagtgctgagaaagaagtgtggtgcatctgcaggtcattccagtttaaaggtattttatgtagccatgctcttgctgtcttgaagcaagagcttgtgatgctaatacctcccaaatatattcttgatcgatggcgaaaggactacaaatgccctgaggaacctaaggaaacccccatttcacagaaagctgctaaagatacagggaagggctcaaaaccagaaaacattcgggaagatcaagtggacaatctctacaagcatggacaccagtactttgctgacattgtggaaatgggagctactgaccctgatgcgatggaatacgtcctttctgtgatgaaagaagctaaagagaaagtgcgcaagtttgaggagtctcgaaaagagaagaggcctggagagggtccagtttctgctggtaaaaaaggggcgaagttttcgaagccatccacacaagaagttggcaatacaacatcagtttcgactccgactgaagcagtggcttcggtcacagtggtgtcatctcctccaatggcggcagccccaacaatgatggctatggcgccaccttcagcagctgtggccggaggaatgtttttagtaccaatgcacccgcatcccttggtgttcccacccttcccccctgcagtcccaccagcggtagctcctgtagcaccacctgctgcaccagcaaccaatgttgtctccaacacctcaaagaagcgaaagaaaagaaaggggaataattgatcttctgatgctgatgaaatgatgaatgttttccagatctaaaacaagatcagatcggcgaagtagaaaatgagtttgatctcacactacgcatcaggcctcgacatgagagtgagctatcgatttatctcttctgcgcgggttggtctttcgagaaaaatctcttctgcgcgggttggtctttcgagaaaaatctcttctgctggctgtgctactgctacctatgagactacctactgcagtctgcatattcctggggtgttggcttcactgcttcagctagatgctctgctgtggctgacgcagttcagtctaaggagagatgcattttgggctcagcacactgatcttgattactgtagattactagattagattgcctgtagtgtacattatcgtcctcagtgccggaagtaatctaacatgtagtccagcttatgaatgtaaagatctgtttctgattatggattgcatttatggggaaggatctggatcttattaagaaattctgatttacaagcatttgccgtcatttgagtttattggact

SEQ ID NO: 24882 - DNA, 3143 bp, Zea Mays
cgttcctcgtccgttcgccgccgccgtctgcctcgcaccgctgactgtgccccagcccagatcgatcctccacagcagatagggggggggggggggggtctctctctctgtctgcgacgactgggtggtctaccgccgttgtcttctccggcgaagagcgcccaccagattatgttgacctaggatcagataaccatgtgctgatgcaatggacacccttcatagcgacccttattccaggagcagcttgcaactgcaaattagggatggctccatgtcctttgagaacaacagtgcagttttggataaacatgaggttgtcagccctcgagttggcatgacctttgagacggttgatctggcatatcaattctacttagagtatggctatcgtgcaggctttggggtctcaaagagaacttcccacagtgttgatggggttaaataccgtgctacatttgtttgttacaaaggtggcatagctaggattaagcctggcctcaaagctcgaaggaggcttgttgcaaagactggttgcaaagcaatgatggtagtgaagtttaatgccagtgagaaccattgggaagtggtttttgtcgagttggaacataaccacccatgcaatcctgagatggtcagattcatgatgtgctttaaagaccttcctgactggcaaagggagcaccgcccattcaatgccaaaactcgattgaacccgaagattcactctggtagaggcaggccacccaaccaaaacaaagatttcatggtgagatccttctcccagtcaaattattccatcgatggggcagggaagactggaaagttaaggtttgcagagggtgacgttgaagcactcttagttttttttgataagatgcaagctcaaaactccaacttcttctataactgggacatggacgatgaaggtcgtctcaagaacgtttgctgggttgatgctagatccagagttgcatatcaacacttctgtgatgttatttgctttgatactgtctatttgacatatcagtttgtcattccattggtcgcatttttgggaatcaaccatcatgggcagtttgtgttgttaggatgtggtctacttggagacgagtctccagagacctttgcgtggttattcaaaaaatggctaaaatgtatgaatgataaatcacctgaagcaattgttacgactcattcaaggccagtagtcaaagcagtcagtgaagtatttccaaatactcggcacagatacaacctttggcatataatgaaagaacttcctgaaatgtctggaagagttgaggataaagaagcagtcagtctgagaatgaaaaaagtagtctatgatacaattacatcagctgattttgagagggagtgggctgaaatgatcaaccaatataatctccatgataaccagtggcttacaaccttgtttgaagagagggcaaaatgggtaccagcatatgtaaaggatactttttgggctggtatctccactgttcgccgtagtgaacgattggaggccttttttgatggatatattacaccagaaaccacaataaagacgttcattgaacaattcgatactgctatgaagctcaggtctgatcgagaagcctatgatgatttccgttcatttcaacaaaggccacaagtcctgtctggtcttctgtttgaggagcaatttgcaaatgtttatacaataaatatgttccagaaattccaggatcagttgaagcagctgatgaatgtgaattgcactgaagtcagtaggaatggttcaatagtgacatacacggtgacagtaattggaaaggagaggaagtttgactacagagtgatgtataacagtgctgagaaagaagtgtggtgcatctgcaggtcattccagtttaaaggtattttatgtagccatgctcttgctgtcttgaagcaagagcttgtgatgctaatacctcccaaatatattcttgatcgatggcgaaaggactacaaatgccctgaggaacctaaggaaacccccatttcacagaaagctgctaaagatacagggaagggctcaaaaccagaaaacattcgggaagatcaagtggacaatctctacaagcatggacaccagtactttgctgacattgtggaaatgggagctactgaccctgatgcgatggaatacgtcctttctgtgatgaaagaagctaaagagaaagtgcgcaagtttgaggagtctcgaaaagagaagaggcctggagagggtccagtttctgctggtaaaaaaggggcgaagttttcgaagccatccacacaagaagttggcaatacaacatcagtttcgactccgactgaagcagtggcttcggtcacagtggtgtcatctcctccaatggcggcagccccaacaatgatggctatggcgccaccttcagcagctgtggccggaggaatgtttttagtaccaatgcacccgcatcccttggtgttcccacccttcccccctgcagtcccaccagcggtagctcctgtagcaccacctgctgcaccagcaaccaatgttgtctccaacacctcaaagaagcgaaagaaaagaaaggggaataattgatcttctgatgctgatgaaatgatgaatctaaaacaagatcagatcggcgaagtagaaaatgagtttgatctcacactacgcatcaggcctcgacatgagagtgagctatcgatttatctcttctgcgcgggttggtctttcgagaaaaatctcttctgcgcgggttggtctttcgagaaaaatctcttctgctggctgtgctactgctacctatgagactacctactgcagtctgcatattcctggggtgttggcttcactgcttcagctagatgctctgctgtggctgacgcagttcagtctaaggagagatgcattttgggctcagcacactgatcttgattactgtagattactagattagattgcctgtagtgtacattatcgtcctcagtgccggaagtaatctaacatgtagtccagcttatgaatgtaaagatctgtttctgattatggattgcatttatggggaaggatctggatcttattaagaaattctgatttacaagcatttgccgtcatttgagtttattggact

SEQ ID NO: 24883 - DNA, 3192 bp, Zea Mays
cgttcctcgtccgttcgccgccgccgtctgcctcgcaccgctgactgtgccccagcccagatcgatcctccacagcagatagggggggggggggggggtctctctctctgtctgcgacgactgggtggtctaccgccgttgtcttctccggcgaagagcgcccaccaggaaggattggtaattggatgaaattgagtttgcgccccagttttgggagattatgttgacctaggatcagataaccatgtgctgatgcaatggacacccttcatagcgacccttattccaggagcagcttgcaactgcaaattagggatggctccatgtcctttgagaacaacagtgcagttttggataaacatgaggttgtcagccctcgagttggcatgacctttgagacggttgatctggcatatcaattctacttagagtatggctatcgtgcaggctttggggtctcaaagagaacttcccacagtgttgatggggttaaataccgtgctacatttgtttgttacaaaggtggcatagctaggattaagcctggcctcaaagctcgaaggaggcttgttgcaaagactggttgcaaagcaatgatggtagtgaagtttaatgccagtgagaaccattgggaagtggtttttgtcgagttggaacataaccacccatgcaatcctgagatggtcagattcatgatgtgctttaaagaccttcctgactggcaaagggagcaccgcccattcaatgccaaaactcgattgaacccgaagattcactctggtagaggcaggccacccaaccaaaacaaagatttcatggtgagatccttctcccagtcaaattattccatcgatggggcagggaagactggaaagttaaggtttgcagagggtgacgttgaagcactcttagttttttttgataagatgcaagctcaaaactccaacttcttctataactgggacatggacgatgaaggtcgtctcaagaacgtttgctgggttgatgctagatccagagttgcatatcaacacttctgtgatgttatttgctttgatactgtctatttgacatatcagtttgtcattccattggtcgcatttttgggaatcaaccatcatgggcagtttgtgttgttaggatgtggtctacttggagacgagtctccagagacctttgcgtggttattcaaaaaatggctaaaatgtatgaatgataaatcacctgaagcaattgttacgactcattcaaggccagtagtcaaagcagtcagtgaagtatttccaaatactcggcacagatacaacctttggcatataatgaaagaacttcctgaaatgtctggaagagttgaggataaagaagcagtcagtctgagaatgaaaaaagtagtctatgatacaattacatcagctgattttgagagggagtgggctgaaatgatcaaccaatataatctccatgataaccagtggcttacaaccttgtttgaagagagggcaaaatgggtaccagcatatgtaaaggatactttttgggctggtatctccactgttcgccgtagtgaacgattggaggccttttttgatggatatattacaccagaaaccacaataaagacgttcattgaacaattcgatactgctatgaagctcaggtctgatcgagaagcctatgatgatttccgttcatttcaacaaaggccacaagtcctgtctggtcttctgtttgaggagcaatttgcaaatgtttatacaataaatatgttccagaaattccaggatcagttgaagcagctgatgaatgtgaattgcactgaagtcagtaggaatggttcaatagtgacatacacggtgacagtaattggaaaggagaggaagtttgactacagagtgatgtataacagtgctgagaaagaagtgtggtgcatctgcaggtcattccagtttaaaggtattttatgtagccatgctcttgctgtcttgaagcaagagcttgtgatgctaatacctcccaaatatattcttgatcgatggcgaaaggactacaaatgccctgaggaacctaaggaaacccccatttcacagaaagctgctaaagatacagggaagggctcaaaaccagaaaacattcgggaagatcaagtggacaatctctacaagcatggacaccagtactttgctgacattgtggaaatgggagctactgaccctgatgcgatggaatacgtcctttctgtgatgaaagaagctaaagagaaagtgcgcaagtttgaggagtctcgaaaagagaagaggcctggagagggtccagtttctgctggtaaaaaaggggcgaagttttcgaagccatccacacaagaagttggcaatacaacatcagtttcgactccgactgaagcagtggcttcggtcacagtggtgtcatctcctccaatggcggcagccccaacaatgatggctatggcgccaccttcagcagctgtggccggaggaatgtttttagtaccaatgcacccgcatcccttggtgttcccacccttcccccctgcagtcccaccagcggtagctcctgtagcaccacctgctgcaccagcaaccaatgttgtctccaacacctcaaagaagcgaaagaaaagaaaggggaataattgatcttctgatgctgatgaaatgatgaatctaaaacaagatcagatcggcgaagtagaaaatgagtttgatctcacactacgcatcaggcctcgacatgagagtgagctatcgatttatctcttctgcgcgggttggtctttcgagaaaaatctcttctgcgcgggttggtctttcgagaaaaatctcttctgctggctgtgctactgctacctatgagactacctactgcagtctgcatattcctggggtgttggcttcactgcttcagctagatgctctgctgtggctgacgcagttcagtctaaggagagatgcattttgggctcagcacactgatcttgattactgtagattactagattagattgcctgtagtgtacattatcgtcctcagtgccggaagtaatctaacatgtagtccagcttatgaatgtaaagatctgtttctgattatggattgcatttatggggaaggatctggatcttattaagaaattctgatttacaagcatttgccgtcatttgagtttattggact

SEQ ID NO: 24884 - DNA, 1406 bp, Zea Mays
gcggcaaaaccctacgactgcaggactacgcccactgacttcccgcgcgcgcgctcccgctcccgctgccgggccggtttcagccccatcaggcaatcccctctccccctccgccccccagccgaagcagacccaatgtcctgcggtagaggcagcaccggcgaagtcgaaggaggcaaatcggtcgccgcgatgacgccgtggcacgacagcttggcgccgccgcctcgcgtcctcatttcccaccgcccttctgatgccagcggtcaagggattgttctgtcacttcaacatccaagatcaggagatgaagtagggtatctatttattgatggccaactacaagagatcaactggtttaaggagcgttatggtgcttggttcttgggagattatgtttgtgaagatggtggcctttattattgcacccctgttgatcccatcttcattttcctaccaacttttgaagctgcacgtatgtcgaacgataaggatccaggaaaattcagacaattggatgaaatattgtatgttgagggatatcctggttatcagcagctaatgaatgtagctaaccaccatatggaattggtttgtgaagtaaaaggctggacaactccaaggtcttatcttggttgtgctgcaaggtatacgacctaaaggaggtcttccccaagttgggtaaaaattatgccgcccaaacagaaaaagaaaaattgaaggaggctgtccaaatgatccgtgaatatctgaaggacgaaccatggttagcattactatgcaagaagctgcagctggatatcaatgcgatcactgttgatgcgaccaccaaaactgctgaagcttcggtttatgcggacagttgtccggcacctgccctcccctctgagagtaagactgcgaatggtggtgccaagtcaagcaaagggaggccagcgaagaaagcaaagacagaggtaggatccaagaacatcaaagatatgttccgaagggtcacgaggagtggatcaggatcatgatgccttcctggaactttcgtgtgactgacgcctgttttgatgcatttggtccagcattcccttgttgaaaatctatgtatctgagttgctgtgtctaacaacagattgggattatattgtagcgttaattgttgattcaggcagtgaactctgctagtgtacaaccctccctcccgtcccggatgtatttgtaccacagttgcttgtagtgccgttgtctgcagtagtctatccaaagtttattaaaaaacatctgttctacattttagactgcactgttcggagagtataagctgctgaagatgacctaagcggcttgtattgcttgagtcgagaccaaatgggagagcatctctgagaaaattctcttttcctatatctctactg

SEQ ID NO: 24885 - DNA, 2095 bp, Zea Mays
gcggcaaaaccctacgactgcaggactacgcccactgacttcccgcgcgcgcgctcccgctcccgctgccgggccggtttcagccccatcaggcaatcccctctccccctccgccccccagccgaagcagacccaatgtcctgcggtagaggcagcaccggcgaagtcgaaggaggcaaatcggtcgccgcgatgacgccgtggcacgacagcttggcgccgccgcctcgcgtcctcatttcccaccgcccttctgatgccagcggtcaagggattgttctgtcacttcaacatccaagatcaggagatgaagtagggtatctatttattgatggccaactacaagagatcaactggtttaaggagcgttatggtgcttggttcttgggagattatgtttgtgaagatggtggcctttattattgcacccctgttgatcccatcttcattttcctaccaacttttgaagctgcacgtatgtcgaacgataaggatccaggaaaattcagacaattggatgaaatattgtatgttgagggatatcctggttatcagcagctaatgaatgtagctaaccaccatatggaattggtttgtgaagtaaaagtatctaacatgaagttctttaggctggacaactccaaggtcttatcttggttgtgctgcaaggtatacgacctaaaggaggtcttccccaagttgggtaaaaattatgccgcccaaacagaaaaagaaaaatgtatgtcctagataatcttcattttattcagtatatagtacttgggtagtttactatggccggtgttaatctccatttattcagtatatagtacttgggtagtttaatatggcaggaagtatgtagattcttgtttgctgtttatgttttcaaaaaggatttgtgatcatcacacttgtgcatctaaccaaactgttgaatattgccaactcaattctatagtcaaactgttgattctttatgttgcagtgcattccttatacaataagctaaaatgccttaaactacaccaaccagtacttgcatacagtgaattatagaagaattgtttgattgaaggtagcaatggttggtaatttggatttgtgcctggtactaggacagactataatttcatatttcaaggggagagaggtacaatagacaccttgtatttttttctactttttttttgtgagggaacttgtatttatgcatgagattgttctactttgtttttgccattgtttcttggagacttgttgtgtagcttggtactagcagcaaccaaagaagaatagagtcaatgatccgatatatgaatgaaaggcagtatcctgattatgtatgtgtgcgcacaaatgttcctgatagggctgcttgcctgcttctattgtttcgtctacagtgaaggaggctgtccaaatgatccgtgaatatctgaaggacgaaccatggttagcattactatgcaagaagctgcagctggatatcaatgcgatcactgttgatgcgaccaccaaaactgctgaagcttcggtttatgcggacagttgtccggcacctgccctcccctctgagagtaagactgcgaatggtggtgccaagtcaagcaaagggaggccagcgaagaaagcaaagacagaggtaggatccaagaacatcaaagatatgttccgaagggtcacgaggagtggatcaggatcatgatgccttcctggaactttcgtgtgactgacgcctgttttgatgcatttggtccagcattcccttgttgaaaatctatgtatctgagttgctgtgtctaacaacagattgggattatattgtagcgttaattgttgattcaggcagtgaactctgctagtgtacaaccctccctcccgtcccggatgtatttgtaccacagttgcttgtagtgccgttgtctgcagtagtctatccaaagtttattaaaaaacatctgttctacattttagactgcactgttcggagagtataagctgctgaagatgacctaagcggcttgtattgcttgagtcgagaccaaatgggagagcatctctgagaaaattctcttttcctatatctctactg

SEQ ID NO: 24886 - DNA, 1423 bp, Zea Mays
gcggcaaaaccctacgactgcaggactacgcccactgacttcccgcgcgcgcgctcccgctcccgctgccgggccggtttcagccccatcaggcaatcccctctccccctccgccccccagccgaagcagacccaatgtcctgcggtagaggcagcaccggcgaagtcgaaggaggcaaatcggtcgccgcgatgacgccgtggcacgacagcttggcgccgccgcctcgcgtcctcatttcccaccgcccttctgatgccagcggtcaagggattgttctgtcacttcaacatccaagatcaggagatgaagtagggtatctatttattgatggccaactacaagagatcaactggtttaaggagcgttatggtgcttggttcttgggagattatgtttgtgaagatggtggcctttattattgcacccctgttgatcccatcttcattttcctaccaacttttgaagctgcacaacgataaggatccaggaaaattcagacaattggatgaaatattgtatgttgagggatatcctggttatcagcagctaatgaatgtagctaaccaccatatggaattggtttgtgaagtaaaagaagtatctaacatgaagttctttaggctggacaactccaaggtcttatcttggttgtgctgcaaggtatacgacctaaaggaggtcttccccaagttgggtaaaaattatgccgcccaaacagaaaaagaaaaattgaaggaggctgtccaaatgatccgtgaatatctgaaggacgaaccatggttagcattactatgcaagaagctgcagctggatatcaatgcgatcactgttgatgcgaccaccaaaactgctgaagcttcggtttatgcggacagttgtccggcacctgccctcccctctgagagtaagactgcgaatggtggtgccaagtcaagcaaagggaggccagcgaagaaagcaaagacagaggtaggatccaagaacatcaaagatatgttccgaagggtcacgaggagtggatcaggatcatgatgccttcctggaactttcgtgtgactgacgcctgttttgatgcatttggtccagcattcccttgttgaaaatctatgtatctgagttgctgtgtctaacaacagattgggattatattgtagcgttaattgttgattcaggcagtgaactctgctagtgtacaaccctccctcccgtcccggatgtatttgtaccacagttgcttgtagtgccgttgtctgcagtagtctatccaaagtttattaaaaaacatctgttctacattttagactgcactgttcggagagtataagctgctgaagatgacctaagcggcttgtattgcttgagtcgagaccaaatgggagagcatctctgagaaaattctcttttcctatatctctactg

SEQ ID NO: 24887 - DNA, 1354 bp, Zea Mays
gcggcaaaaccctacgactgcaggactacgcccactgacttcccgcgcgcgcgctcccgctcccgctgccgggccggtttcagccccatcaggcaatcccctctccccctccgccccccagccgaagcagacccaatgtcctgcggtagaggcagcaccggcgaagtcgaaggaggcaaatcggtcgccgcgatgacgccgtggcacgacagcttggcgccgccgcctcgcgtcctcatttcccaccgcccttctgatgccagcggtcaagggattgttctgtcacttcaacatccaagatcaggagatgaagtagggtatctatttattgatggccaactacaagagatcaactggtttaaggagcgttatggtgcttggttcttgggagattatgtttgtgaagaacgataaggatccaggaaaattcagacaattggatgaaatattgtatgttgagggatatcctggttatcagcagctaatgaatgtagctaaccaccatatggaattggtttgtgaagtaaaagaagtatctaacatgaagttctttaggctggacaactccaaggtcttatcttggttgtgctgcaaggtatacgacctaaaggaggtcttccccaagttgggtaaaaattatgccgcccaaacagaaaaagaaaaattgaaggaggctgtccaaatgatccgtgaatatctgaaggacgaaccatggttagcattactatgcaagaagctgcagctggatatcaatgcgatcactgttgatgcgaccaccaaaactgctgaagcttcggtttatgcggacagttgtccggcacctgccctcccctctgagagtaagactgcgaatggtggtgccaagtcaagcaaagggaggccagcgaagaaagcaaagacagaggtaggatccaagaacatcaaagatatgttccgaagggtcacgaggagtggatcaggatcatgatgccttcctggaactttcgtgtgactgacgcctgttttgatgcatttggtccagcattcccttgttgaaaatctatgtatctgagttgctgtgtctaacaacagattgggattatattgtagcgttaattgttgattcaggcagtgaactctgctagtgtacaaccctccctcccgtcccggatgtatttgtaccacagttgcttgtagtgccgttgtctgcagtagtctatccaaagtttattaaaaaacatctgttctacattttagactgcactgttcggagagtataagctgctgaagatgacctaagcggcttgtattgcttgagtcgagaccaaatgggagagcatctctgagaaaattctcttttcctatatctctactg

SEQ ID NO: 24888 - DNA, 1404 bp, Zea Mays
gcggcaaaaccctacgactgcaggactacgcccactgacttcccgcgcgcgcgctcccgctcccgctgccgggccggtttcagccccatcaggcaatcccctctccccctccgccccccagccgaagcagacccaatgtcctgcggtagaggcagcaccggcgaagtcgaaggaggcaaatcggtcgccgcgatgacgccgtggcacgacagcttggcgccgccgcctcgcgtcctcatttcccaccgcccttctgatgccagcggtcaagggattgttctgtcacttcaacatccaagatcaggagatgaagtagggtatctatttattgatggccaactacaagagatcaactggtttaaggagcgttatggtgcttggttcttgggagattatgtttgtgaagatggtggcctttattattgcacccctgttgatcccatcttcattttcctaccaacttttgaagctgcacgtatgtcgaacgataaggatccaggaaaattcagacaattggatgaaatattgtatgttgagggatatcctggttatcagcagctaatgaatgtagctaaccaccatatggaattggtttgtgaagtaaaagaagtatctaacatgaagttctttaggctggacaactccaaggtcttatcttggttgtgctgcaaggtatacgacctaaaggaggtcttccccaagttgggtaaaaattatgccgcccaaacagaaaaagaaaaattgaaggaggctgtccaaatgatccgtgaatatctgaaggacgaaccatggctggatatcaatgcgatcactgttgatgcgaccaccaaaactgctgaagcttcggtttatgcggacagttgtccggcacctgccctcccctctgagagtaagactgcgaatggtggtgccaagtcaagcaaagggaggccagcgaagaaagcaaagacagaggtaggatccaagaacatcaaagatatgttccgaagggtcacgaggagtggatcaggatcatgatgccttcctggaactttcgtgtgactgacgcctgttttgatgcatttggtccagcattcccttgttgaaaatctatgtatctgagttgctgtgtctaacaacagattgggattatattgtagcgttaattgttgattcaggcagtgaactctgctagtgtacaaccctccctcccgtcccggatgtatttgtaccacagttgcttgtagtgccgttgtctgcagtagtctatccaaagtttattaaaaaacatctgttctacattttagactgcactgttcggagagtataagctgctgaagatgacctaagcggcttgtattgcttgagtcgagaccaaatgggagagcatctctgagaaaattctcttttcctatatctctactg

SEQ ID NO: 24889 - DNA, 1427 bp, Zea Mays
gcggcaaaaccctacgactgcaggactacgcccactgacttcccgcgcgcgcgctcccgctcccgctgccgggccggtttcagccccatcaggcaatcccctctccccctccgccccccagccgaagcagacccaatgtcctgcggtagaggcagcaccggcgaagtcgaaggaggcaaatcggtcgccgcgatgacgccgtggcacgacagcttggcgccgccgcctcgcgtcctcatttcccaccgcccttctgatgccagcggtcaagggattgttctgtcacttcaacatccaagatcaggagatgaagtagggtatctatttattgatggccaactacaagagatcaactggtttaaggagcgttatggtgcttggttcttgggagattatgtttgtgaagatggtggcctttattattgcacccctgttgatcccatcttcattttcctaccaacttttgaagctgcacgtataacgataaggatccaggaaaattcagacaattggatgaaatattgtatgttgagggatatcctggttatcagcagctaatgaatgtagctaaccaccatatggaattggtttgtgaagtaaaagaagtatctaacatgaagttctttaggctggacaactccaaggtcttatcttggttgtgctgcaaggtatacgacctaaaggaggtcttccccaagttgggtaaaaattatgccgcccaaacagaaaaagaaaaattgaaggaggctgtccaaatgatccgtgaatatctgaaggacgaaccatggttagcattactatgcaagaagctgcagctggatatcaatgcgatcactgttgatgcgaccaccaaaactgctgaagcttcggtttatgcggacagttgtccggcacctgccctcccctctgagagtaagactgcgaatggtggtgccaagtcaagcaaagggaggccagcgaagaaagcaaagacagaggtaggatccaagaacatcaaagatatgttccgaagggtcacgaggagtggatcaggatcatgatgccttcctggaactttcgtgtgactgacgcctgttttgatgcatttggtccagcattcccttgttgaaaatctatgtatctgagttgctgtgtctaacaacagattgggattatattgtagcgttaattgttgattcaggcagtgaactctgctagtgtacaaccctccctcccgtcccggatgtatttgtaccacagttgcttgtagtgccgttgtctgcagtagtctatccaaagtttattaaaaaacatctgttctacattttagactgcactgttcggagagtataagctgctgaagatgacctaagcggcttgtattgcttgagtcgagaccaaatgggagagcatctctgagaaaattctcttttcctatatctctactg

SEQ ID NO: 24890 - DNA, 1351 bp, Zea Mays
gcggcaaaaccctacgactgcaggactacgcccactgacttcccgcgcgcgcgctcccgctcccgctgccgggccggtttcagccccatcaggcaatcccctctccccctccgccccccagccgaagcagacccaatgtcctgcggtagaggcagcaccggcgaagtcgaaggaggcaaatcggtcgccgcgatgacgccgtggcacgacagcttggcgccgccgcctcgcgtcctcatttcccaccgcccttctgatgccagcggtcaagggattgttctgtcacttcaacatccaagatcaggagatgaagtagggtatctatttattgatggccaactacaagagatcaactggtttaaggagcgttatggtgcttggttcttgggagattatgtttgtgaagaacgataaggatccaggaaaattcagacaattggatgaaatattgtatgttgagggatatcctggttatcagcagctaatgaatgtagctaaccaccatatggaattggtttgtgaagtaaaagtatctaacatgaagttctttaggctggacaactccaaggtcttatcttggttgtgctgcaaggtatacgacctaaaggaggtcttccccaagttgggtaaaaattatgccgcccaaacagaaaaagaaaaattgaaggaggctgtccaaatgatccgtgaatatctgaaggacgaaccatggttagcattactatgcaagaagctgcagctggatatcaatgcgatcactgttgatgcgaccaccaaaactgctgaagcttcggtttatgcggacagttgtccggcacctgccctcccctctgagagtaagactgcgaatggtggtgccaagtcaagcaaagggaggccagcgaagaaagcaaagacagaggtaggatccaagaacatcaaagatatgttccgaagggtcacgaggagtggatcaggatcatgatgccttcctggaactttcgtgtgactgacgcctgttttgatgcatttggtccagcattcccttgttgaaaatctatgtatctgagttgctgtgtctaacaacagattgggattatattgtagcgttaattgttgattcaggcagtgaactctgctagtgtacaaccctccctcccgtcccggatgtatttgtaccacagttgcttgtagtgccgttgtctgcagtagtctatccaaagtttattaaaaaacatctgttctacattttagactgcactgttcggagagtataagctgctgaagatgacctaagcggcttgtattgcttgagtcgagaccaaatgggagagcatctctgagaaaattctcttttcctatatctctactg

SEQ ID NO: 24891 - DNA, 2716 bp, Zea Mays
gagtgtctgtcacctaccctaccctgctcgacaaggcaatctgaaaatgctctccgcaatctccacctccgcaatctccacctccctactagtagtactcttcggtgcagtccgcatccccacatctgaccgactctcaaagttcacagctccaatcctggtgcaagcgcacagtagcggagcaagatgcggggaggagaccggccatcggcgtcgctccagctcctctcgctgggcctcgtgctcctctacttcttcacctcaggcagcaccgttggtctcgtggagggacaggtacggcctttggctcttgacgctctatctatctataagacgtggtgcatcgcgaagccgtcggcgtcgaacgagatcctggcgcagaacctggactacgcgtgctcccaggtgagctgcgccgtgatccagaagggcgggccgtgctactacccggacagccccgtgtcccgcgccgccgtcgccatgaacctctactacgcctacagcggcaggcacccctggaactgctacttcaacaactccgcgctcgtcgtgcagtccgacccaagctatggctcctgcacatactactgaggaggagtgtgaggaggagtggagagacgaggagaggagagagatccattcgtgcctggcggtggcggctccactgcatctgtatgcagagtcttggttttctagtctcgactgccaatttaccaaatgcacattgttgtgttgtgttgtgttgtgtagccgtgctgcagctgacatttcgcagcgaactcgtggatactccgtttcgcattcatgtgctttgaagtacattgcagcggcgctgcacaaatttccccccttgtttttctcgccacttgcgttcaaacgttggaatcgatggatctgatctgcctgcgtgtgatttgttcattccagcggccgtagaaacaaaacaacacaaacgatctacgatccactctcattctcgtctcgtactcgttcaccgtgacctacctaaacgcgtcgccgccagaaaaactaaaagcaacccccaacccacgcggcgcggcgccgcccgacaccaccgctccggtccccggcgacggcacgatgcggcggcagcctttctcgcggcacgccggcttcttctcctgcctccagcgggtggaagaccggctggcgtcggagtcggagcagcaacatcaggagcagaaggagagcccgccgccgccagctacagcaaaggcaacggcaacgacgcgccaaaccgaggcgtcgccattctcggacaccatgaccgcctccccactcctcttcctcgacccagcagcacccgcaccagcgcccggcagcagcagcggcccggcgctggacttcctcaccgccgccacccaggagggcaagcacatccaacaggaagacgacgacaacgatggcggcggcgacggcgatgaggaggacatcgcgcggctcatggagctgctcggcctgtcatccggcggcggtggcagcagccgccgcgacgacgacggaggcgggtgcgactgcagcggcgccgacgggttcctggccaaggtcgtgggcgtggtcggccccaagtgcgacagggagaaggggaggctggacgcctggatccgccattaccaccgtgggggaggcagggagcccgcgaggctggcgcacctgctgctcgccagggctgccgccgacacggcagccgttgcgttcccggccagcgtgaaggacttcttggaccacgatccgccacggcagttgacggacgagtcggagtggagtgatgcaaacggagacaataatagagattgacagacatgttttctggaactgattgaaaaggcaggcaataatagagattgacagacatgttactgttcgcatttttgtgcacaaaggtggagacattcaaataataggtcggcgaaatgtaactgaacgcacgaacagggaggcaaaatatatgcaatgtggtgttaagcaagtccaaacagtactttattagaacgcgagcaatgtaaacagtacttcacatcccgctgatcgataattatagcaaacagaacggtattaccaagcaacaaacaaaaggacatcgagcagttttcctttttactcgcggaatacgataaaaaaatagtagggagagcagccgcgcgcggatcctttttcctcggcagaacagcaaagctcacagcttcgatatgaggctattctggatggccttgggcgactcggcttccttgacatccgcatcggacgagctgggaggcacgtcgaccgcaggcgagcagttgaagaatccatgtggctgcagggcagaaacatcattagccattagaaacgaccaaagttaggctaaccatctctttgcgaagaagcaacaaagggtcccgatggttcactgcctatgacaggatatactgaaaaaaaaaaagtaaagctgataccatgagcatgaagcctatgtgctccaccggcatgactggccaatcttctagcctggggatatgggtgagcccgaacacgtacctgcagatgcagaacaaggttttatcagtttttgtaagatgtaatctgaacagcagttccaaattcttcataacagcaaatggtctgttatgaagtaccagagaacaatgtcggtttcctccagaggcctatcattcttgacccatgttggcagaccctcatggatgcgaggattctg

SEQ ID NO: 24892 - DNA, 2763 bp, Zea Mays
cggagagccattaaacaaattcacgctgtcacatgcgtgtaacgtgcacgcgcatgcatcccagcaagcaatctgtgtggtgtgagtgtctgtcacctaccctaccctgctcgacaaggcaatctgaaaatgctctccgcaatctccacctccgcaatctccacctccctactagtagtactcttcggtgcagtccgcatccccacatctgaccgactctcaaagttcacagctccaatcctggtgcaagcgcacagtagcggagcaagatgcggggaggagaccggccatcggcgtcgctccagctcctctcgctgggcctcgtgctcctctacttcttcacctcaggcagcaccgttggtctcgtggagggacagaagacgtggtgcatcgcgaagccgtcggcgtcgaacgagatcctggcgcagaacctggactacgcgtgctcccaggtgagctgcgccgtgatccagaagggcgggccgtgctactacccggacagccccgtgtcccgcgccgccgtcgccatgaacctctactacgcctacagcggcaggcacccctggaactgctacttcaacaactccgcgctcgtcgtgcagtccgacccaagctatggctcctgcacatactactgaggaggagtgtgaggaggagtggagagacgaggagaggagagagatccattcgtgcctggcggtggcggctccactgcatctgtatgcagagtcttggttttctagtctcgactgccaatttaccaaatgcacattgttgtgttgtgttgtgttgtgtagccgtgctgcagctgacatttcgcagcgaactcgtggatactccgtttcgcattcatgtgctttgaagtacattgcagcggcgctgcacaaatttccccccttgtttttctcgccacttgcgttcaaacgttggaatcgatggatctgatctgcctgcgtgtgatttgttcattccagcggccgtagaaacaaaacaacacaaacgatctacgatccactctcattctcgtctcgtactcgttcaccgtgacctacctaaacgcgtcgccgccagaaaaactaaaagcaacccccaacccacgcggcgcggcgccgcccgacaccaccgctccggtccccggcgacggcacgatgcggcggcagcctttctcgcggcacgccggcttcttctcctgcctccagcgggtggaagaccggctggcgtcggagtcggagcagcaacatcaggagcagaaggagagcccgccgccgccagctacagcaaaggcaacggcaacgacgcgccaaaccgaggcgtcgccattctcggacaccatgaccgcctccccactcctcttcctcgacccagcagcacccgcaccagcgcccggcagcagcagcggcccggcgctggacttcctcaccgccgccacccaggagggcaagcacatccaacaggaagacgacgacaacgatggcggcggcgacggcgatgaggaggacatcgcgcggctcatggagctgctcggcctgtcatccggcggcggtggcagcagccgccgcgacgacgacggaggcgggtgcgactgcagcggcgccgacgggttcctggccaaggtcgtgggcgtggtcggccccaagtgcgacagggagaaggggaggctggacgcctggatccgccattaccaccgtgggggaggcagggagcccgcgaggctggcgcacctgctgctcgccagggctgccgccgacacggcagccgttgcgttcccggccagcgtgaaggacttcttggaccacgatccgccacggcagttgacggacgagtcggagtggagtgatgcaaacggagacaataatagagattgacagacatgttttctggaactgattgaaaaggcaggcaataatagagattgacagacatgttactgttcgcatttttgtgcacaaaggtggagacattcaaataataggtcggcgaaatgtaactgaacgcacgaacagggaggcaaaatatatgcaatgtggtgttaagcaagtccaaacagtactttattagaacgcgagcaatgtaaacagtacttcacatcccgctgatcgataattatagcaaacagaacggtattaccaagcaacaaacaaaaggacatcgagcagttttcctttttactcgcggaatacgataaaaaaatagtagggagagcagccgcgcgcggatcctttttcctcggcagaacagcaaagctcacagcttcgatatgaggctattctggatggccttgggcgactcggcttccttgacatccgcatcggacgagctgggaggcacgtcgaccgcaggcgagcagttgaagaatccatgtggctgcagggcagaaacatcattagccattagaaacgaccaaagttaggctaaccatctctttgcgaagaagcaacaaagggtcccgatggttcactgcctatgacaggatatactgaaaaaaaaaaagtaaagctgataccatgagcatgaagcctatgtgctccaccggcatgactggccaatcttctagcctggggatatgggtgagcccgaacacgtacctgcagatgcagaacaaggttttatcagtttttgtaagatgtaatctgaacagcagttccaaattcttcataacagcaaatggtctgttatgaagtaccagagaacaatgtcggtttcctccagaggcctatcattcttgacccatgttggcagaccctcatggatgcgaggattctg

SEQ ID NO: 24893 - DNA, 1842 bp, Zea Mays
aattagatcccccgccaccacagcctgaagcacccaaatccatgagatttgccctaggtctattactggatagcaagtgctagttccatcaggggtcccaggtgcctaggttggatatccagacgacctaatcgtgaggaagttttaggattcagccccttcccctcccatttcttggtgttctgatgcgattcagggtgctgcttcccgtgaacctagtggcaggagcagtagtagtatttggaccagagccccgagatgcctgagtccagggacggcaggagtgaggacctagctgacctttctggtggtgttggtggtggagggttctttatcaggagggtggcctcgccgggagccctagcggtgaggggtgtcaggaagccgttggcgcggcgttatatttcaccctcgaggaacaaggagaacctgctgccggtttgggcgttgagggtcacaccgacaaagaggagcccgcttcctggatggtaccccaggacgccgctccgtgatattacggccattgcaaaggctattcagagaagtcgttcaaggattgctgcagctcagcagcgaagccaaaggatcgagcagtcttcacaatctgtgaacgtgactactccagcacaagcagagcaggatgctcacattgctgaagcctcccatgctgttgcatctggctccggctcaactgaaagagaagctgtagcaaaccctgctactgttttggctgatgacaatttgaatgtgtcttctttggcagcagaaggctcattgaatactccatccaaaccaatggatcctgcccttgctgacaagaaactttccggttcaatagagaaggtagagaagttggtgaggaaaaacctgaagcgaacatcgagggctgcccaggcctccaggagggccacccaaaggcgcaatcttatgtccatgcgatgaatttattgctgtactttgctgggggaagagaaagtccacctcaggcttgtcctccttcctcttgtctgtgctgctcttcttccaatacttgccgtggcgtgatgctcacggtcattccttgttcccttctcgaggacaagaatatggaagccattggctctctgcttgaggttctaggactgcagctactagtgtgagtgcattctaggctggtagcccttgtacaacagaagctcaatggcaccaacgaggactgagaatcctgaccaattcaccttcctgtcgtgcacatgatagctcagaagatcgacgggacatcaggaagcacagcaaatgatgggccgtgctgttatgacttaaaagggaagaccagagcaagcaatcgcttgcagaacaaaacattcagttttgcaatttgaaacatagcccggttgtttttctcatgtccccgtcaggactcaggaggatttaacatggcgactcgcgagaacgagcccgagtcgaaccacttttttccatctcgcaattgaccgagccgagctcgttggtttaccgagctgagcatggctcgtttccagccctaaatgggagcatgtaacctttgtaaagcaggcataaactatactaagagcagtgagcaaaacgagaggaaaagaggctccttgccatgctgaaacattaagaaagaaccaagaaaccaagggaccagcaaggtcccaaggcggcaaggcctgaatgaagatcgctttttttttctttttgaaaaaaagaaaacaagaccctacactgagctggggtttgctgccgaacgtgagcgaacaaaatgtaaatgccgtaagcccacagcacaccgtcattgccaccggtcaatagtatacttcaattgcaacgaggagatta

SEQ ID NO: 24894 - DNA, 1413 bp, Zea Mays
ggaagtgaaaacgttcaagtcacccgcctcctcccaaaatcgcctccatctcccctcaaaatcctctgctcctccctccattccaaatcctccgggaaccatttgcgcggctaccatcccgatccggtggcgccccggccttgctcgattcctacagctgctatccttttctacctgcggcgccctgctccactctagtggctgctcccctcccaatctggctattcagagaagtcgttcaaggattgctgcagctcagcagcgaagccaaaggatcgagcagtcttcacaatctgtgaacgtgactactccagcacaagcagagcaggatgctcacattgctgaagcctcccatgctgttgcatctggctccggctcaactgaaagagaagctgtagcaaaccctgctactgttttggctgatgacaatttgaatgtgtcttctttggcagcagaaggctcattgaatactccatccaaaccaatggatcctgcccttgctgacaagaaactttccggttcaatagagaaggtagagaagttggtgaggaaaaacctgaagcgaacatcgagggctgcccaggcctccaggagggccacccaaaggcgcaatcttatgtccatgcgatgaatttattgctgtactttgctgggggaagagaaagtccacctcaggcttgtcctccttcctcttgtctgtgctgctcttcttccaatacttgccgtggcgtgatgctcacggtcattccttgttcccttctcgaggacaagaatatggaagccattggctctctgcttgaggttctaggactgcagctactagtgtgagtgcattctaggctggtagcccttgtacaacagaagctcaatggcaccaacgaggactgagaatcctgaccaattcaccttcctgtcgtgcacatgatagctcagaagatcgacgggacatcaggaagcacagcaaatgatgggccgtgctgttatgacttaaaagggaagaccagagcaagcaatcgcttgcagaacaaaacattcagttttgcaatttgaaacatagcccggttgtttttctcatgtccccgtcaggactcaggaggtaacagaagcccatttaaattagaggaaaaacatccgaataccgttaatatgatctatcactaaactaccgcactgtagagtctgtagtgcagagagaacgtgtgctctgattcacatggtacaccctaagctggtcgttgttaaacgccaaaagtggtggacagtccgtgcctcccttatcagattgacttgggcgattattcttattttgtgtgtggttatctatctaattatgtaagtctatcgtatagaaatgggtctagaccttccctacatatatgaatgagtatgattgattgagaatctctgaacata

SEQ ID NO: 24895 - DNA, 1695 bp, Zea Mays
ggaagtgaaaacgttcaagtcacccgcctcctcccaaaatcgcctccatctcccctcaaaatcctctgctcctccctccattccaaatcctccgggaaccatttgcgcggctaccatcccgatccggtggcgccccggccttgctcgattcctacagctgctatccttttctacctgcggcgccctgctccactctagtggctgctcccctcccaatctgagccccgagatgcctgagtccagggacggcaggagtgaggacctagctgacctttctggtggtgttggtggtggagggttctttatcaggagggtggcctcgccgggagccctagcggtgaggggtgtcaggaagccgttggcgcggcgttatatttcaccctcgaggaacaaggagaacctgctgccggtttgggcgttgagggtcacaccgacaaagaggagcccgcttcctggatggtaccccaggacgccgctccgtgatattacggccattgcaaaggctattcagagaagtcgttcaaggattgctgcagctcagcagcgaagccaaaggatcgagcagtcttcacaatctgtgaacgtgactactccagcacaagcagagcaggatgctcacattgctgaagcctcccatgctgttgcatctggctccggctcaactgaaagagaagctgtagcaaaccctgctactgttttggctgatgacaatttgaatgtgtcttctttggcagcagaaggctcattgaatactccatccaaaccaatggatcctgcccttgctgacaagaaactttccggttcaatagagaaggtagagaagttggtgaggaaaaacctgaagcgaacatcgagggctgcccaggcctccaggagggccacccaaaggcgcaatcttatgtccatgcgatgaatttattgctgtactttgctgggggaagagaaagtccacctcaggcttgtcctccttcctcttgtctgtgctgctcttcttccaatacttgccgtggcgtgatgctcacggtcattccttgttcccttctcgaggacaagaatatggaagccattggctctctgcttgaggttctaggactgcagctactagtgtgagtgcattctaggctggtagcccttgtacaacagaagctcaatggcaccaacgaggactgagaatcctgaccaattcaccttcctgtcgtgcacatgatagctcagaagatcgacgggacatcaggaagcacagcaaatgatgggccgtgctgttatgacttaaaagggaagaccagagcaagcaatcgcttgcagaacaaaacattcagttttgcaatttgaaacatagcccggttgtttttctcatgtccccgtcaggactcaggaggtaacagaagcccatttaaattagaggaaaaacatccgaataccgttaatatgatctatcactaaactaccgcactgtagagtctgtagtgcagagagaacgtgtgctctgattcacatggtacaccctaagctggtcgttgttaaacgccaaaagtggtggacagtccgtgcctcccttatcagattgacttgggcgattattcttattttgtgtgtggttatctatctaattatgtaagtctatcgtatagaaatgggtctagaccttccctacatatatgaatgagtatgattgattgagaatctctgaacata

SEQ ID NO: 24896 - DNA, 1199 bp, Zea Mays
aactgctcagcgtatattgagttcttgcacaaagaatcagcagagcaggcgttaaccctgaacggggcatcatttatgttacgcattttgaaggtcgttcggaaaaactccactgaagcaacccgatcgcctggcttgcttcgtgtttcgcggggatcaccatttgcttcaaggctcattagaactgcatacccaaggccaacgtttcctggtgcaatccgtggacgactgccactcaggggtgttgcccagagcttacagtggaagcgcagtgccacagattcctcaaatgctgtaaaaccaagtcaggctgcaccttcagctcctgggaatcagttggtcaccccgaccccacgaagcttcacctacacacgcacggagccaaaaccaaatgacggtgcgatggcttgactgctcagctgcagcatgccgcagctcctgatgaatctcgcagaaagagttcgtgatactgttacgtggttcattcagctgcttttggtaaatatttaagtagctgcagatgttagtttgtagcaggctggtttttgtggaccaaaacctttgagcgatattctgtgaggttttctgtgctgtttttcaccgtcagcacatattctgtgctggctggctgttcggagttcgtggatggagagtaaaatatatataaaaaaagtggtagtaaaggaaaacacggacgcgataaaaacgttgcaacatttgttattattttttgatggattatttagcctccacggtttccttgtcaaggggggtgatctgtgagattgatcataatatccaaactaccggatggtcttgctgtctcagttttgtaaatagaaaaaccttcacctgtggggtatggttgcctactgcacgtctgcacattagcaagtgatggtgcgtgtttcgactcaaatgtttttttgcatcctgtcttgtgtagaaaaagaaaactgaagacctgtctgttctgggtgtctgctgtatctattttctcagagagaagtgcattttatcttggaatcagcgggactcacgggtggctgaagtccaagtactgttcgcattcaccattgagccatgaaaatcaagtgattggagaatcagaagaggacaacagctctgtggtagcccctaatctatcaatgtccccctgcgtacttcgtccaataatacaataatagttgtcgttttag

SEQ ID NO: 24897 - DNA, 3008 bp, Zea Mays
cgaactgtcttgtttccattttgccaattgccgcggcttaccttccattttggtgaaaccagagtatgttgtagtattgctaaggaacgggaggcacaaggatgaggctgcaaaggagctacatgtttttttaggcgatgacaatgatgcatttgtatcctggttgtgggatcatctgtcctcaaatttgcacctttatgttcaacctaaagctgcctcttctaaggatgacactagaagcagtcacaatgctgccagaggattgcctgttcacagtgtgataagcagcacacaagttaatcatgaacctgaagctgaaacccagaagacagtgataactcataaaaaaaaagattggggtcatcgaaaaagagattggggaacaatcggtcgaggtcaatcagaaacagttcctcttagaagcgttgtcgacaatgtttctcttgcaaaggagaaggatcttcatgagtcacatgcagatgaaaaggcttttcataaatcacattctgtaagacgaacccgctctcctgacatgcataaccacagaaagaggagcagagaggcagatgtgcggtctactaagagtgcaacacacccagttaatggtgcaccacgtcggcttcttcagtttgctgttcgtgatgctgtcagaactgtgcccccagttacttctggttcagaatcagcttccaagcgactttgttctgtagtgtctacattggcttcagattccacacttgatattactcatattaggttacagaaaacaaattcagatttgagaataccagttgccacagcagcactaagagctgcagctgaggctgctgaagatgctctcaaggatagcttttgtggaagtgtttttagtagattgggcagaatgcccacaataaattctagtgaacaatcacctgatcgtagatcacaagatcttgaaggcaaagaatatgagaatatagataacatacaagctgaaaatcaagttgaattttatggaagaaatcaacatggtggcagtgatgtttacatgcgtgatcggagaacagaggaagccacaggttctctttctaatattgatgagtatggtcacaacagttctgttaggtataatggattgggttctctccgaagtgcattgcctgctagtggaggtaaagagtcattagtactggggtacgtaagaggagcttctgaagtacgaagcggaagattgatagctcaggggccacctgctggttcaggaccaagatcatctgaaaagatcctaaatgtttctggtaacactaagacacagaagcttcgaactcatgtaactagggatgcccttgcatttgaccctcaagtgccaatggagaaggtttctggtgcaaggaagtcgataggtcaggggccacatgctggttcaggaccaagaccatctgaaaggattctaaatgtttctggtaacactaacacacagaagcttccaactcatgtaactagggatgaccttgcatttgaccctcaagtgccaatggagaaggttgctgatgcaaggaaatcacatgtgaagattgcacatgctaacgatatgtccatgacaactgataagtccaaagatttgatacagtcaagttcaatgctggaggcacaaaaggctacatcaggtgctgctggatcaaatactacaggtcaacccgaaggtggctctgattctagaactgtctttgttagcaacgtacattttggtgcaacaaaagatgctctttctcgacacttcaataagtttggagcgatcttgaagacccatattgtgaccgatggtgtcactgctcagcgtatattgagttcttgcacaaagaatcagcagagcaggcgttaaccctgaacggggcatcatttatgttacgcattttgaaggtcgttcggaaaaactccactgaagcaacccgatcgcctggcttgcttcgtgtttcgcggggatcaccatttgcttcaaggctcattagaactgcatacccaaggccaacgtttcctggtgcaatccgtggacgactgccactcaggggtgttgcccagagcttacagtggaagcgcagtgccacagattcctcaaatgctgtaaaaccaagtcaggctgcaccttcagctcctgggaatcagttggtcaccccgaccccacgaagcttcacctacacacgcacggagccaaaaccaaatgacggtgcgatggcttgactgctcagctgcagcatgccgcagctcctgatgaatctcgcagaaagagttcgtgatactgttacgtggttcattcagctgcttttggtaaatatttaagtagctgcagatgttagtttgtagcaggctggtttttgtggaccaaaacctttgagcgatattctgtgaggttttctgtgctgtttttcaccgtcagcacatattctgtgctggctggctgttcggagttcgtggatggagagtaaaatatatataaaaaaagtggtagtaaaggaaaacacggacgcgataaaaacgttgcaacatttgttattattttttgatggattatttagcctccacggtttccttgtcaaggggggtgatctgtgagattgatcataatatccaaactaccggatggtcttgctgtctcagttttgtaaatagaaaaaccttcacctgtggggtatggttgcctactgcacgtctgcacattagcaagtgatggtgcgtgtttcgactcaaatgtttttttgcatcctgtcttgtgtagaaaaagaaaactgaagacctgtctgttctgggtgtctgctgtatctattttctcagagagaagtgcattttatcttggaatcagcgggactcacgggtggctgaagtccaagtactgttcgcattcaccattgagccatgaaaatcaagtgattggagaatcagaagaggacaacagctctgtggtagcccctaatctatcaatgtccccctgcgtacttcgtccaataatacaataatagttgtcgttttag

SEQ ID NO: 24898 - DNA, 3197 bp, Zea Mays
cacacaccctccctccccgccgcttccgcccggtatcccccactcgcgcggccgtaggacacggccacgtgcgccgcctcaaactgggggctgtggctggggcgggaggagcggcggcgttagggtttccccatggacggtggcgaggatcggacgttcaaggcgaactttaccagcgagggggtgacgatgctgcaggaccgcgtcaaggagaagctcagtgagctcatgggcgactactccgacgacactcttgccgagtatgttgtagtattgctaaggaacgggaggcacaaggatgaggctgcaaaggagctacatgtttttttaggcgatgacaatgatgcatttgtatcctggttgtgggatcatctgtcctcaaatttgcacctttatgttcaacctaaagctgcctcttctaaggatgacactagaagcagtcacaatgctgccagaggattgcctgttcacagtgtgataagcagcacacaagttaatcatgaacctgaagctgaaacccagaagacagtgataactcataaaaaaaaagattggggtcatcgaaaaagagattggggaacaatcggtcgaggtcaatcagaaacagttcctcttagaagcgttgtcgacaatgtttctcttgcaaaggagaaggatcttcatgagtcacatgcagatgaaaaggcttttcataaatcacattctgtaagacgaacccgctctcctgacatgcataaccacagaaagaggagcagagaggcagatgtgcggtctactaagagtgcaacacacccagttaatggtgcaccacgtcggcttcttcagtttgctgttcgtgatgctgtcagaactgtgcccccagttacttctggttcagaatcagcttccaagcgactttgttctgtagtgtctacattggcttcagattccacacttgatattactcatattaggttacagaaaacaaattcagatttgagaataccagttgccacagcagcactaagagctgcagctgaggctgctgaagatgctctcaaggatagcttttgtggaagtgtttttagtagattgggcagaatgcccacaataaattctagtgaacaatcacctgatcgtagatcacaagatcttgaaggcaaagaatatgagaatatagataacatacaagctgaaaatcaagttgaattttatggaagaaatcaacatggtggcagtgatgtttacatgcgtgatcggagaacagaggaagccacaggttctctttctaatattgatgagtatggtcacaacagttctgttaggtataatggattgggttctctccgaagtgcattgcctgctagtggaggtaaagagtcattagtactggggtacgtaagaggagcttctgaagtacgaagcggaagattgatagctcaggggccacctgctggttcaggaccaagatcatctgaaaagatcctaaatgtttctggtaacactaagacacagaagcttcgaactcatgtaactagggatgcccttgcatttgaccctcaagtgccaatggagaaggtttctggtgcaaggaagtcgataggtcaggggccacatgctggttcaggaccaagaccatctgaaaggattctaaatgtttctggtaacactaacacacagaagcttccaactcatgtaactagggatgaccttgcatttgaccctcaagtgccaatggagaaggttgctgatgcaaggaaatcacatgtgaagattgcacatgctaacgatatgtccatgacaactgataagtccaaagatttgatacagtcaagttcaatgctggaggcacaaaaggctacatcaggtggtcaacccgaaggtggctctgattctagaactgtctttgttagcaacgtacattttggtgcaacaaaagatgctctttctcgacacttcaataagtttggagcgatcttgaagacccatattgtgaccgatggtgtcactggtcagtcaactggctcagcgtatattgagttcttgcacaaagaatcagcagagcaggcgttaaccctgaacggggcatcatttatgttacgcattttgaaggtcgttcggaaaaactccactgaagcaacccgatcgcctggcttgcttcgtgtttcgcggggatcaccatttgcttcaaggctcattagaactgcatacccaaggccaacgtttcctggtgcaatccgtggacgactgccactcaggggtgttgcccagagcttacagtggaagcgcagtgccacagattcctcaaatgctgtaaaaccaagtcaggctgcaccttcagctcctgggaatcagttggtcaccccgaccccacgaagcttcacctacacacgcacggagccaaaaccaaatgacggtgcgatggcttgactgctcagctgcagcatgccgcagctcctgatgaatctcgcagaaagagttcgtgatactgttacgtggttcattcagctgcttttggtaaatatttaagtagctgcagatgttagtttgtagcaggctggtttttgtggaccaaaacctttgagcgatattctgtgaggttttctgtgctgtttttcaccgtcagcacatattctgtgctggctggctgttcggagttcgtggatggagagtaaaatatatataaaaaaagtggtagtaaaggaaaacacggacgcgataaaaacgttgcaacatttgttattattttttgatggattatttagcctccacggtttccttgtcaaggggggtgatctgtgagattgatcataatatccaaactaccggatggtcttgctgtctcagttttgtaaatagaaaaaccttcacctgtggggtatggttgcctactgcacgtctgcacattagcaagtgatggtgcgtgtttcgactcaaatgtttttttgcatcctgtcttgtgtagaaaaagaaaactgaagacctgtctgttctgggtgtctgctgtatctattttctcagagagaagtgcattttatcttggaatcagcgggactcacgggtggctgaagtccaagtactgttcgcattcaccattgagccatgaaaatcaagtgattggagaatcagaagaggacaacagctctgtggtagcccctaatctatcaatgtccccctgcgtacttcgtccaataatacaataatagttgtcgttttag

SEQ ID NO: 24899 - DNA, 3390 bp, Zea Mays
ccagactccagagcctgcagaccccgacgccgctcgcgttcgggaccgtaccgccctcccctgccgtatccgcccacacaccctccctccccgccgcttccgcccggtatcccccactcgcgcggccgtaggacacggccacgtgcgccgcctcaaactgggggctgtggctggggcgggaggagcggcggcgttagggtttccccatggacggtggcgaggatcggacgttcaaggcgaactttaccagcgagggggtgacgatgctgcaggaccgcgtcaaggagaagctcagtgagctcatgggcgactactccgacgacactcttgcctgagaaatgatgaaggttttccattcgagcgaggagacgaactgtcttgtttccattttgccaattgccgcggcttaccttccattttggtgaaaccagagtatgttgtagtattgctaaggaacgggaggcacaaggatgaggctgcaaaggagctacatgtttttttaggcgatgacaatgatgcatttgtatcctggttgtgggatcatctgtcctcaaatttgcacctttatgttcaacctaaagctgcctcttctaaggatgacactagaagcagtcacaatgctgccagaggattgcctgttcacagtgtgataagcagcacacaagttaatcatgaacctgaagctgaaacccagaagacagtgataactcataaaaaaaaagattggggtcatcgaaaaagagattggggaacaatcggtcgaggtcaatcagaaacagttcctcttagaagcgttgtcgacaatgtttctcttgcaaaggagaaggatcttcatgagtcacatgcagatgaaaaggcttttcataaatcacattctgtaagacgaacccgctctcctgacatgcataaccacagaaagaggagcagagaggcagatgtgcggtctactaagagtgcaacacacccagttaatggtgcaccacgtcggcttcttcagtttgctgttcgtgatgctgtcagaactgtgcccccagttacttctggttcagaatcagcttccaagcgactttgttctgtagtgtctacattggcttcagattccacacttgatattactcatattaggttacagaaaacaaattcagatttgagaataccagttgccacagcagcactaagagctgcagctgaggctgctgaagatgctctcaaggatagcttttgtggaagtgtttttagtagattgggcagaatgcccacaataaattctagtgaacaatcacctgatcgtagatcacaagatcttgaaggcaaagaatatgagaatatagataacatacaagctgaaaatcaagttgaattttatggaagaaatcaacatggtggcagtgatgtttacatgcgtgatcggagaacagaggaagccacaggttctctttctaatattgatgagtatggtcacaacagttctgttaggtataatggattgggttctctccgaagtgcattgcctgctagtggaggtaaagagtcattagtactggggtacgtaagaggagcttctgaagtacgaagcggaagattgatagctcaggggccacctgctggttcaggaccaagatcatctgaaaagatcctaaatgtttctggtaacactaagacacagaagcttcgaactcatgtaactagggatgcccttgcatttgaccctcaagtgccaatggagaaggtttctggtgcaaggaagtcgataggtcaggggccacatgctggttcaggaccaagaccatctgaaaggattctaaatgtttctggtaacactaacacacagaagcttccaactcatgtaactagggatgaccttgcatttgaccctcaagtgccaatggagaaggttgctgatgcaaggaaatcacatgtgaagattgcacatgctaacgatatgtccatgacaactgataagtccaaagatttgatacagtcaagttcaatgctggaggcacaaaaggctacatcaggtgctgctggatcaaatactacaggtcaacccgaaggtggctctgattctagaactgtctttgttagcaacgtacattttggtgcaacaaaagatgctctttctcgacacttcaataagtttggagcgatcttgaagacccatattgtgaccgatggtgtcactggtcagtcaactggctcagcgtatattgagttcttgcacaaagaatcagcagagcaggcgttaaccctgaacggggcatcatttatgttacgcattttgaaggtcgttcggaaaaactccactgaagcaacccgatcgcctggcttgcttcgtgtttcgcggggatcaccatttgcttcaaggctcattagaactgcatacccaaggccaacgtttcctggtgcaatccgtggacgactgccactcaggggtgttgcccagagcttacagtggaagcgcagtgccacagattcctcaaatgctgtaaaaccaagtcaggctgcaccttcagctcctgggaatcagttggtcaccccgaccccacgaagcttcacctacacacgcacggagccaaaaccaaatgacggtgcgatggcttgactgctcagctgcagcatgccgcagctcctgatgaatctcgcagaaagagttcgtgatactgttacgtggttcattcagctgcttttggtaaatatttaagtagctgcagatgttagtttgtagcaggctggtttttgtggaccaaaacctttgagcgatattctgtgaggttttctgtgctgtttttcaccgtcagcacatattctgtgctggctggctgttcggagttcgtggatggagagtaaaatatatataaaaaaagtggtagtaaaggaaaacacggacgcgataaaaacgttgcaacatttgttattattttttgatggattatttagcctccacggtttccttgtcaaggggggtgatctgtgagattgatcataatatccaaactaccggatggtcttgctgtctcagttttgtaaatagaaaaaccttcacctgtggggtatggttgcctactgcacgtctgcacattagcaagtgatggtgcgtgtttcgactcaaatgtttttttgcatcctgtcttgtgtagaaaaagaaaactgaagacctgtctgttctgggtgtctgctgtatctattttctcagagagaagtgcattttatcttggaatcagcgggactcacgggtggctgaagtccaagtactgttcgcattcaccattgagccatgaaaatcaagtgattggagaatcagaagaggacaacagctctgtggtagcccctaatctatcaatgtccccctgcgtacttcgtccaataatacaataatagttgtcgttttag

SEQ ID NO: 24900 - DNA, 3418 bp, Zea Mays
gacggtccagactccagagcctgcagaccccgacgccgctcgcgttcgggaccgtaccgccctcccctgccgtatccgcccacacaccctccctccccgccgcttccgcccggtatcccccactcgcgcggccgtaggacacggccacgtgcgccgcctcaaactgggggctgtggctggggcgggaggagcggcggcgttagggtttccccatggacggtggcgaggatcggacgttcaaggcgaactttaccagcgagggggtgacgatgctgcaggaccgcgtcaaggagaagctcagtgagctcatgggcgactactccgacgacactcttgcctgagaaatgatgaaggttttccattcgagcgaggagacgaactgtcttgtttccattttgccaattgccgcggcttaccttccattttggtgaaaccagtgtgtggctttccataattccaaaaatctcgttggagtatgttgtagtattgctaaggaacgggaggcacaaggatgaggctgcaaaggagctacatgtttttttaggcgatgacaatgatgcatttgtatcctggttgtgggatcatctgtcctcaaatttgcacctttatgttcaacctaaagctgcctcttctaaggatgacactagaagcagtcacaatgctgccagaggattgcctgttcacagtgtgataagcagcacacaagttaatcatgaacctgaagctgaaacccagaagacagtgataactcataaaaaaaaagattggggtcatcgaaaaagagattggggaacaatcggtcgaggtcaatcagaaacagttcctcttagaagcgttgtcgacaatgtttctcttgcaaaggagaaggatcttcatgagtcacatgcagatgaaaaggcttttcataaatcacattctgtaagacgaacccgctctcctgacatgcataaccacagaaagaggagcagagaggcagatgtgcggtctactaagagtgcaacacacccagttaatggtgcaccacgtcggcttcttcagtttgctgttcgtgatgctgtcagaactgtgcccccagttacttctggttcagaatcagcttccaagcgactttgttctgtagtgtctacattggcttcagattccacacttgatattactcatattaggttacagaaaacaaattcagatttgagaataccagttgccacagcagcactaagagctgcagctgaggctgctgaagatgctctcaaggatagcttttgtggaagtgtttttagtagattgggcagaatgcccacaataaattctagtgaacaatcacctgatcgtagatcacaagatcttgaaggcaaagaatatgagaatatagataacatacaagctgaaaatcaagttgaattttatggaagaaatcaacatggtggcagtgatgtttacatgcgtgatcggagaacagaggaagccacaggttctctttctaatattgatgagtatggtcacaacagttctgttaggtataatggattgggttctctccgaagtgcattgcctgctagtggaggtaaagagtcattagtactggggtacgtaagaggagcttctgaagtacgaagcggaagattgatagctcaggggccacctgctggttcaggaccaagatcatctgaaaagatcctaaatgtttctggtaacactaagacacagaagcttcgaactcatgtaactagggatgcccttgcatttgaccctcaagtgccaatggagaaggtttctggtgcaaggaagtcgataggtcaggggccacatgctggttcaggaccaagaccatctgaaaggattctaaatgtttctggtaacactaacacacagaagcttccaactcatgtaactagggatgaccttgcatttgaccctcaagtgccaatggagaaggttgctgatgcaaggaaatcacatgtgaagattgcacatgctaacgatatgtccatgacaactgataagtccaaagatttgatacagtcaagttcaatgctggaggcacaaaaggctacatcaggtgctgctggatcaaatactacaggtcaacccgaaggtggctctgattctagaactgtctttgttagcaacgtacattttggtgcaacaaaagatgctctttctcgacacttcaataagtttggagcgatcttgaagacccatattgtgaccgatggtgtcactgctcagcgtatattgagttcttgcacaaagaatcagcagagcaggcgttaaccctgaacggggcatcatttatgttacgcattttgaaggtcgttcggaaaaactccactgaagcaacccgatcgcctggcttgcttcgtgtttcgcggggatcaccatttgcttcaaggctcattagaactgcatacccaaggccaacgtttcctggtgcaatccgtggacgactgccactcaggggtgttgcccagagcttacagtggaagcgcagtgccacagattcctcaaatgctgtaaaaccaagtcaggctgcaccttcagctcctgggaatcagttggtcaccccgaccccacgaagcttcacctacacacgcacggagccaaaaccaaatgacggtgcgatggcttgactgctcagctgcagcatgccgcagctcctgatgaatctcgcagaaagagttcgtgatactgttacgtggttcattcagctgcttttggtaaatatttaagtagctgcagatgttagtttgtagcaggctggtttttgtggaccaaaacctttgagcgatattctgtgaggttttctgtgctgtttttcaccgtcagcacatattctgtgctggctggctgttcggagttcgtggatggagagtaaaatatatataaaaaaagtggtagtaaaggaaaacacggacgcgataaaaacgttgcaacatttgttattattttttgatggattatttagcctccacggtttccttgtcaaggggggtgatctgtgagattgatcataatatccaaactaccggatggtcttgctgtctcagttttgtaaatagaaaaaccttcacctgtggggtatggttgcctactgcacgtctgcacattagcaagtgatggtgcgtgtttcgactcaaatgtttttttgcatcctgtcttgtgtagaaaaagaaaactgaagacctgtctgttctgggtgtctgctgtatctattttctcagagagaagtgcattttatcttggaatcagcgggactcacgggtggctgaagtccaagtactgttcgcattcaccattgagccatgaaaatcaagtgattggagaatcagaagaggacaacagctctgtggtagcccctaatctatcaatgtccccctgcgtacttcgtccaataatacaataatagttgtcgttttag

SEQ ID NO: 24901 - DNA, 3224 bp, Zea Mays
cgcgacggcacaagcgaccgtccccacgacggtccagactccagagcctgcagaccccgacgccgctcgcgttcgggaccgtaccgccctcccctgccgtatccgcccacacaccctccctccccgccgcttccgcccggtatcccccactcgcgcggccgtaggacacggccacgtgcgccgcctcaaactgggggctgtggctggggcgggaggagcggcggcgttagggtttccccatggacggtggcgaggatcggacgttcaaggcgaactttaccagcgagggggtgacgatgctgcaggaccgcgtcaaggagaagctcagtgagctcatgggcgactactccgacgacactcttgccgttgtgggatcatctgtcctcaaatttgcacctttatgttcaacctaaagctgcctcttctaaggatgacactagaagcagtcacaatgctgccagaggattgcctgttcacagtgtgataagcagcacacaagttaatcatgaacctgaagctgaaacccagaagacagtgataactcataaaaaaaaagattggggtcatcgaaaaagagattggggaacaatcggtcgaggtcaatcagaaacagttcctcttagaagcgttgtcgacaatgtttctcttgcaaaggagaaggatcttcatgagtcacatgcagatgaaaaggcttttcataaatcacattctgtaagacgaacccgctctcctgacatgcataaccacagaaagaggagcagagaggcagatgtgcggtctactaagagtgcaacacacccagttaatggtgcaccacgtcggcttcttcagtttgctgttcgtgatgctgtcagaactgtgcccccagttacttctggttcagaatcagcttccaagcgactttgttctgtagtgtctacattggcttcagattccacacttgatattactcatattaggttacagaaaacaaattcagatttgagaataccagttgccacagcagcactaagagctgcagctgaggctgctgaagatgctctcaaggatagcttttgtggaagtgtttttagtagattgggcagaatgcccacaataaattctagtgaacaatcacctgatcgtagatcacaagatcttgaaggcaaagaatatgagaatatagataacatacaagctgaaaatcaagttgaattttatggaagaaatcaacatggtggcagtgatgtttacatgcgtgatcggagaacagaggaagccacaggttctctttctaatattgatgagtatggtcacaacagttctgttaggtataatggattgggttctctccgaagtgcattgcctgctagtggaggtaaagagtcattagtactggggtacgtaagaggagcttctgaagtacgaagcggaagattgatagctcaggggccacctgctggttcaggaccaagatcatctgaaaagatcctaaatgtttctggtaacactaagacacagaagcttcgaactcatgtaactagggatgcccttgcatttgaccctcaagtgccaatggagaaggtttctggtgcaaggaagtcgataggtcaggggccacatgctggttcaggaccaagaccatctgaaaggattctaaatgtttctggtaacactaacacacagaagcttccaactcatgtaactagggatgaccttgcatttgaccctcaagtgccaatggagaaggttgctgatgcaaggaaatcacatgtgaagattgcacatgctaacgatatgtccatgacaactgataagtccaaagatttgatacagtcaagttcaatgctggaggcacaaaaggctacatcaggtgctgctggatcaaatactacaggtcaacccgaaggtggctctgattctagaactgtctttgttagcaacgtacattttggtgcaacaaaagatgctctttctcgacacttcaataagtttggagcgatcttgaagacccatattgtgaccgatggtgtcactggtcagtcaactggctcagcgtatattgagttcttgcacaaagaatcagcagagcaggcgttaaccctgaacggggcatcatttatgttacgcattttgaaggtcgttcggaaaaactccactgaagcaacccgatcgcctggcttgcttcgtgtttcgcggggatcaccatttgcttcaaggctcattagaactgcatacccaaggccaacgtttcctggtgcaatccgtggacgactgccactcaggggtgttgcccagagcttacagtggaagcgcagtgccacagattcctcaaatgctgtaaaaccaagtcaggctgcaccttcagctcctgggaatcagttggtcaccccgaccccacgaagcttcacctacacacgcacggagccaaaaccaaatgacggtgcgatggcttgactgctcagctgcagcatgccgcagctcctgatgaatctcgcagaaagagttcgtgatactgttacgtggttcattcagctgcttttggtaaatatttaagtagctgcagatgttagtttgtagcaggctggtttttgtggaccaaaacctttgagcgatattctgtgaggttttctgtgctgtttttcaccgtcagcacatattctgtgctggctggctgttcggagttcgtggatggagagtaaaatatatataaaaaaagtggtagtaaaggaaaacacggacgcgataaaaacgttgcaacatttgttattattttttgatggattatttagcctccacggtttccttgtcaaggggggtgatctgtgagattgatcataatatccaaactaccggatggtcttgctgtctcagttttgtaaatagaaaaaccttcacctgtggggtatggttgcctactgcacgtctgcacattagcaagtgatggtgcgtgtttcgactcaaatgtttttttgcatcctgtcttgtgtagaaaaagaaaactgaagacctgtctgttctgggtgtctgctgtatctattttctcagagagaagtgcattttatcttggaatcagcgggactcacgggtggctgaagtccaagtactgttcgcattcaccattgagccatgaaaatcaagtgattggagaatcagaagaggacaacagctctgtggtagcccctaatctatcaatgtccccctgcgtacttcgtccaataatacaataatagttgtcgttttag

SEQ ID NO: 24902 - DNA, 3390 bp, Zea Mays
ggcacgagagaacccctcctaggctcctactctctccctagtccccgcgacggcacaagcgaccgtccccacgacggtccagactccagagcctgcagaccccgacgccgctcgcgttcgggaccgtaccgccctcccctgccgtatccgcccacacaccctccctccccgccgcttccgcccggtatcccccactcgcgcggccgtaggacacggccacgtgcgccgcctcaaactgggggctgtggctggggcgggaggagcggcggcgttagggtttccccatggacggtggcgaggatcggacgttcaaggcgaactttaccagcgagggggtgacgatgctgcaggaccgcgtcaaggagaagctcagtgagctcatgggcgactactccgacgacactcttgccgagtatgttgtagtattgctaaggaacgggaggcacaaggatgaggctgcaaaggagctacatgtttttttaggcgatgacaatgatgcatttgtatcctggttgtgggatcatctgtcctcaaatttgcacctttatgttcaacctaaagctgcctcttctaaggatgacactagaagcagtcacaatgctgccagaggattgcctgttcacagtgtgataagcagcacacaagttaatcatgaacctgaagctgaaacccagaagacagtgataactcataaaaaaaaagattggggtcatcgaaaaagagattggggaacaatcggtcgaggtcaatcagaaacagttcctcttagaagcgttgtcgacaatgtttctcttgcaaaggagaaggatcttcatgagtcacatgcagatgaaaaggcttttcataaatcacattctgtaagacgaacccgctctcctgacatgcataaccacagaaagaggagcagagaggcagatgtgcggtctactaagagtgcaacacacccagttaatggtgcaccacgtcggcttcttcagtttgctgttcgtgatgctgtcagaactgtgcccccagttacttctggttcagaatcagcttccaagcgactttgttctgtagtgtctacattggcttcagattccacacttgatattactcatattaggttacagaaaacaaattcagatttgagaataccagttgccacagcagcactaagagctgcagctgaggctgctgaagatgctctcaaggatagcttttgtggaagtgtttttagtagattgggcagaatgcccacaataaattctagtgaacaatcacctgatcgtagatcacaagatcttgaaggcaaagaatatgagaatatagataacatacaagctgaaaatcaagttgaattttatggaagaaatcaacatggtggcagtgatgtttacatgcgtgatcggagaacagaggaagccacaggttctctttctaatattgatgagtatggtcacaacagttctgttaggtataatggattgggttctctccgaagtgcattgcctgctagtggaggtaaagagtcattagtactggggtacgtaagaggagcttctgaagtacgaagcggaagattgatagctcaggggccacctgctggttcaggaccaagatcatctgaaaagatcctaaatgtttctggtaacactaagacacagaagcttcgaactcatgtaactagggatgcccttgcatttgaccctcaagtgccaatggagaaggtttctggtgcaaggaagtcgataggtcaggggccacatgctggttcaggaccaagaccatctgaaaggattctaaatgtttctggtaacactaacacacagaagcttccaactcatgtaactagggatgaccttgcatttgaccctcaagtgccaatggagaaggttgctgatgcaaggaaatcacatgtgaagattgcacatgctaacgatatgtccatgacaactgataagtccaaagatttgatacagtcaagttcaatgctggaggcacaaaaggctacatcaggtgctgctggatcaaatactacaggtcaacccgaaggtggctctgattctagaactgtctttgttagcaacgtacattttggtgcaacaaaagatgctctttctcgacacttcaataagtttggagcgatcttgaagacccatattgtgaccgatggtgtcactggtcagtcaactggatctcctttcgattgatcagctcagcgtatattgagttcttgcacaaagaatcagcagagcaggcgttaaccctgaacggggcatcatttatgttacgcattttgaaggtcgttcggaaaaactccactgaagcaacccgatcgcctggcttgcttcgtgtttcgcggggatcaccatttgcttcaaggctcattagaactgcatacccaaggccaacgtttcctggtgcaatccgtggacgactgccactcaggggtgttgcccagagcttacagtggaagcgcagtgccacagattcctcaaatgctgtaaaaccaagtcaggctgcaccttcagctcctgggaatcagttggtcaccccgaccccacgaagcttcacctacacacgcacggagccaaaaccaaatgacggtgcgatggcttgactgctcagctgcagcatgccgcagctcctgatgaatctcgcagaaagagttcgtgatactgttacgtggttcattcagctgcttttggtaaatatttaagtagctgcagatgttagtttgtagcaggctggtttttgtggaccaaaacctttgagcgatattctgtgaggttttctgtgctgtttttcaccgtcagcacatattctgtgctggctggctgttcggagttcgtggatggagagtaaaatatatataaaaaaagtggtagtaaaggaaaacacggacgcgataaaaacgttgcaacatttgttattattttttgatggattatttagcctccacggtttccttgtcaaggggggtgatctgtgagattgatcataatatccaaactaccggatggtcttgctgtctcagttttgtaaatagaaaaaccttcacctgtggggtatggttgcctactgcacgtctgcacattagcaagtgatggtgcgtgtttcgactcaaatgtttttttgcatcctgtcttgtgtagaaaaagaaaactgaagacctgtctgttctgggtgtctgctgtatctattttctcagagagaagtgcattttatcttggaatcagcgggactcacgggtggctgaagtccaagtactgttcgcattcaccattgagccatgaaaatcaagtgattggagaatcagaagaggacaacagctctgtggtagcccctaatctatcaatgtccccctgcgtacttcgtccaataatacaataatagttgtcgttttag

SEQ ID NO: 24903 - DNA, 3373 bp, Zea Mays
ccgaaggcaatgccaagcctgctggcccgcgacgaacccgcccggatgtcgccgtacgcgcctgcgttgcatcggttcgtgcacggatgaggcccaacatcgcacggcacgagagaacccctcctaggctcctactctctccctagtccccgcgacggcacaagcgaccgtccccacgacggtccagactccagagcctgcagaccccgacgccgctcgcgttcgggaccgtaccgccctcccctgccgtatccgcccacacaccctccctccccgccgcttccgcccggtatcccccactcgcgcggccgtaggacacggccacgtgcgccgcctcaaactgggggctgtggctggggcgggaggagcggcggcgttagggtttccccatggacggtggcgaggatcggacgttcaaggcgaactttaccagcgagggggtgacgatgctgcaggaccgcgtcaaggagaagctcagtgagctcatgggcgactactccgacgacactcttgccgagtatgttgtagtattgctaaggaacgggaggcacaaggatgaggctgcaaaggagctacatgtttttttaggcgatgacaatgatgcatttgtatcctggttgtgggatcatctgtcctcaaatttgcacctttatgttcaacctaaagctgcctcttctaaggatgacactagaagcagtcacaatgctgccagaggattgcctgttcacagtgtgataagcagcacacaagttaatcatgaacctgaagctgaaacccagaagacagtgataactcataaaaaaaaagattggggtcatcgaaaaagagattggggaacaatcggtcgaggtcaatcagaaacagttcctcttagaagcgttgtcgacaatgtttctcttgcaaaggagaaggatcttcatgagtcacatgcagatgaaaaggcttttcataaatcacattctgtaagacgaacccgctctcctgacatgcataaccacagaaagaggagcagagaggcagatgtgcggtctactaagagtgcaacacacccagttaatggtgcaccacgtcggcttcttcagtttgctgttcgtgatgctgtcagaactgtgcccccagttacttctggttcagaatcagcttccaagcgactttgttctgtagtgtctacattggcttcagattccacacttgatattactcatattaggttacagaaaacaaattcagatttgagaataccagttgccacagcagcactaagagctgcagctgaggctgctgaagatgctctcaaggatagcttttgtggaagtgtttttagtagattgggcagaatgcccacaataaattctagtgaacaatcacctgatcgtagatcacaagatcttgaaggcaaagaatatgagaatatagataacatacaagctgaaaatcaagttgaattttatggaagaaatcaacatggtggcagtgatgtttacatgcgtgatcggagaacagaggaagccacaggttctctttctaatattgatgagtatggtcacaacagttctgttaggtataatggattgggttctctccgaagtgcattgcctgctagtggaggtaaagagtcattagtactggggtacgtaagaggagcttctgaagtacgaagcggaagattgatagctcaggggccacctgctggttcaggaccaagatcatctgaaaagatcctaaatgtttctggtaacactaagacacagaagcttcgaactcatgtaactagggatgcccttgcatttgaccctcaagtgccaatggagaaggtttctggtgcaaggaagtcgataggtcaggggccacatgctggttcaggaccaagaccatctgaaaggattctaaatgtttctggtaacactaacacacagaagcttccaactcatgtaactagggatgaccttgcatttgaccctcaagtgccaatggagaaggttgctgatgcaaggaaatcacatgtgaagattgcacatgctaacgatatgtccatgacaactgataagtccaaagatttgatacagtcaagttcaatgctggaggcacaaaaggctacatcaggtgctgctggatcaaatactacaggtcaacccgaaggtggctctgattctagaactgtctttgttagcaacgtacattttggtgcaacaaaagatgctctttctcgacacttcaataagtttggagcgatcttgaagacccatattgtgaccgatggtgtcactggtcagtcaactggctcagcgtatattgagttcttgcacaaagaatcagcagagcaggcgttaaccctgaacggggcatcatttatgttacgcattttgaaggtcgttcggaaaaactccactgaagcaacccgatcgcctggcttgcttcgtgtttcgcggggatcaccatttgcttcaaggctcattagaactgcatacccaaggccaacgtttcctggtgcaatccgtggacgactgccactcaggggtgttgcccagagcttacagtggaagcgcagtgccacagattcctcaaatgctgtaaaaccaagtcaggctgcaccttcagctcctgggaatcagttggtcaccccgaccccacgaagcttcacctacacacgcacggagccaaaaccaaatgacggtgcgatggcttgactgctcagctgcagcatgccgcagctcctgatgaatctcgcagaaagagttcgtgatactgttacgtggttcattcagctgcttttggtaaatatttaagtagctgcagatgttagtttgtagcaggctggtttttgtggaccaaaacctttgagcgatattctgtgaggttttctgtgctgtttttcaccgtcagcacatattctgtgctggctggctgttcggagttcgtggatggagagtaaaatatatataaaaaaagtggtagtaaaggaaaacacggacgcgataaaaacgttgcaacatttgttattattttttgatggattatttagcctccacggtttccttgtcaaggggggtgatctgtgagattgatcataatatccaaactaccggatggtcttgctgtctcagttttgtaaatagaaaaaccttcacctgtggggtatggttgcctactgcacgtctgcacattagcaagtgatgagagaagtgcattttatcttggaatcagcgggactcacgggtggctgaagtccaagtactgttcgcattcaccattgagccatgaaaatcaagtgattggagaatcagaagaggacaacagctctgtggtagcccctaatctatcaatgtccccctgcgtacttcgtccaataatacaataatagttgtcgttttag

SEQ ID NO: 24904 - DNA, 2185 bp, Zea Mays
ctctccttcccctgccttctgctactatatagctccccctcaccttccgttctagagagagagaagggagaggcgagggagctcaccaggagagaggggcctgtgtgagcattgagcaaagcaaacgaagcagtacatacatctctcgctcgcagaggcccggccggccggctccatgcaacaagggacgacgagcggtggcggtgggcgatgatgatgatgatggcgggggagcacgtgctggccgctctggccaccctgcttctggcctcgctcctgaccctggtgctgaaccacttcctgcccttgcttctgaaccccaaggcccccaggggaagcttcgggtggccgctcctcggcgagacgctcaggttcctcacgccgcacgcctccaacacgctgggcggcttcctcgaggatcactgctccaggtatgggcgggtgttcaagtcccacctgttctgcaccccgacggtggtgtcctgcgaccaggacctcaaccacttcatcctgcagaacgaggagcggctgttccagtgcagctacccgaggccgatccatggcatcctgggcaagtcctccatgctcgtcgtcctgggcgaggaccacaagcgcctcaggaacctcgccctcgccctcgtcacctccaccaagctcaagcccagctacctaggcgacatcgagaagatcgcgctgcacgtcgtcggcgcatggcgacggcacggcggcgtcagggtcgtcgcattctgcgaggaggcaagaaagttcgcattcagtgtgatagtgaagcaggtgctggggctgtcgccagaggagccggtcactgcaaggatactcgaggacttcctggccttcatgaagggcctcatctccttccccctctacatcccagggaccccatatgccaaggctgtccgggcgagagagaggatatccagcactgtgaagggcatcatcaaggagcggaggagcgctgggtcatggaacaagcagggcgacttccttgacgtgctgctgtcaagcaacgagctatctgacgaggagaaagtgagctttgtgctggactccctgctgggagggtatgagaccacctcgctcctcatctccatggtcgtttatttccttggccagtctgctcaagatctggacctggttaagagggagcacgacagcataagatccaacaaaggcaaggaggagtgcttgacttcagaagactacaagaagatggaatatacccaacaagtcatcaacgaggcgctgagatgcggcaacatcgtcaagttcgtccaccggaaggcgctgaaagacgtcaaatacaaaggtgatgtagctagatgagccccccggccccagtcctgctcctgcatcgagagactttcgctgcagattccatctgtgctcatcacatgacagtggatcaggcagaggggatggccgcgcctttaagcctgatttttaagcgattgttttatgcccagaataacctcctatagcttttgctaaacgaagatgctcaaaaagcaagtggctctgccttttgctctgttgcagagtatctgattccatctggctggaaggtcctaccggtcttcactgccgttcatctgaacccctcacttcatggagacgcgcagcagtttcagccctgtaggtgggagggcacaagccaagggacaagcaagaggtttacaccgttcggtggtggcccccggctctgcccaggatcagagctcgctaaagtggagactgctttcttcctccatcaccttgtcctcaattatagatggagaattgatggcgatgacattccaatggcatacccgtatgtggagtttcagagaggtctgccaatagaaatcgagccaacgtcccctgaatcttgactgtcctggagctacagccatcagttatcacaccagagagaaaaggggaaggtgcatggagtatacatgaatggtcagtgacagatctcacaagtgaaggaacactgagggcgcgtgctagtagctagcatatgaggcagctgagactgtaatttaatgtacatggtgtagatatattttgtccatggcaattgcttgaagtggctgattcacttcaccctgtaaaacattctccagtggtttcaactgctatcctataaaaaagaagggcccctgtgtttaatgaaaaaagtaaaaaa

SEQ ID NO: 24905 - DNA, 2032 bp, Zea Mays
agtttatggattcttttcccggttgaaggaggtttggactaggctgaaacgagacggcggggccccatcgttgtcacagccagtctactccggcggcccagcccacgtacagtcgagcaggcgatctcgcacccctggtcgcctggtcagcagtgagcagtcagcggctgcgcgccgcctcgtcgggactcgggggcagagctggggctatctcttgagctggtggtcaggtactcaggaggtcatccatgatccatcctgattctccctcgtcctgctcccctttccttggccggccggcgcgcggagtggaggtcgaccgacattgaattccctctttccttctttgccgctcaattgcccccttgctccgcgggaagctggccaccggtcctgcctgcgcaatccattttgttcgtactattattgtgtaaccattgtgctccgtggagccgtagaggtggagatctgggttgccatttccagatttcacaggaccctggccgcgtccgctgcgatgggtcgaagcgtctgggcggttccgttggcttcccttcttgcgtttggtttggtgctcggctccgtcgaggccagcctcggggatgttgatccgcgttacagaacttgtgtgagggagtgtcaaactacagggattattggggagaacgtgatcagccattgtcagttcaaagaggacaacacttctgttggaggctcttggtataaccaggagcaaatttatatccagtggaaagaactgaactgtatgacagactgtcgctacttttgcatgacgcggagagaaggggaacggcaggcacttggtctgagccccgttaaatatcatggaaagtggccgttcttacgcgtttctgtgttccaggaacccctttcagctgcactttctgctgtcaacctactgatgcacttcactggctggctttcattttttcttctagtgaattaccaattgcctcttagaccccaggccaagagaacttactatgaatatactagcttgtggcatatctatgcaatcttatcaatgaacgcatggttctggagctctattttccatactcgagacattgacttgactgagaaattggactattcttcagctgtggccctgcttggctactcgttgatcctttcgttgctaagggctttcaatgtcaaggatgaggctagcagggtgatgtttgcagcccctattttggcattcgttacgacgcacatcttgtatcttaacttctatgagcttgactatgggtggaacatgaaagtttgtgtggtgatggccgcggttcaacttctgacgtgggcagtctgggctggtgtaagccggcatccgtcgcggctgaaggtctggacagttgttttcggaggagcactcgccatgctacttgaactctacgacttccctccatacatgggttacgccgacgcccattcgctgtggcacgcaagcaccattccgctcacctgtctcttgtggagcttcatcaaggacgatgccaagttccgcacggcaacactcgtcaagaaggcaaagtaattaagcaaagggccacactgttaagatatagggtctgggacccatcgtgtacacgaggagcggtttggggcacacgtgttataccggacatcatgaaacctccagtatatttgctcccccccccccccatgatgctcctgtgtcctgtcctgtctcccctccactcacgaattttgtccacaaactcagcgtattctttagggcgcatgttctgccattacgatccgccttcttacctgaatgtgtaaaactcagggaattttagaatgtgttggtgggctttgctagattttgtcatcgccgaatcagttttgcattgtggaatcagacaggacaatggacatcatcggtgtgtttgagtgtttcctgtgacgtgtggacttgtggaaattcctgaagcccatttttgtaggacatttgagttccaacgttacgaaagttactgaacaatacaatgaacacgtgctaggtttg

SEQ ID NO: 24906 - DNA, 2529 bp, Zea Mays
agtttatggattcttttcccggttgaaggaggtttggactaggctgaaacgagacggcggggccccatcgttgtcacagccagtctactccggcggcccagcccacgtacagtcgagcaggcgatctcgcacccctggtcgcctggtcagcagtgagcagtcagcggctgcgcgccgcctcgtcgggactcgggggcagagctggggctatctcttgagctggtggtcaggtactcaggaggtcatccatgatccatcctgattctccctcgtcctgctcccctttccttggccggccggcgcgcggagtggaggtcgaccgacattgaattccctctttccttctttgccgctcaattgcccccttgctccgcgggaagctggccaccggtcctgcctgcgcaatccattttgttcgtactattattgtgtaaccattgtgctccgtggagccgtagaggtggagatctgggttgccatttccagaccctggccgcgtccgctgcgatgggtcgaagcgtctgggcggttccgttggcttcccttcttgcgtttggtttggtgctcggctccgtcgaggccagcctcggggatgttgatccgcgttacagataaatttggggatcggggtgagcaaatgtctcatcgaagaactggcaccgccaacaaaaggttctgggtgaagtggcatctctgaactggttgcatggactttggaaccttttggctatctagggcttgtttggattcagcatttcagcctccacatgtcctgtcattagatatacaaatcaaggtccatgtcgattatgttttgacacaagatgtaatgatatattgggcccacatgtcatatatattcaaggtacttttggcaggcatgattacaatgcaaacagccctccgttgccaaaatcgtagatatggctagtcttggtcatgaccaaatcttggaaggattaattggggctcaagaccaaacatgcctgtgacctaaggcgcaatgcttgtgaccaagaattttgaaaactttggtcaatgttatattcttacaatctccagatttagtttctctaagaagatatatgtcatatgttgtggggcaggcatattgtaagaacttgtgtgagggagtgtcaaactacagggattattggggagaacgtgatcagccattgtcagttcaaagaggacaacacttctgttggaggctcttggtataaccaggagcaaatttatatccagtggaaagaactgaactgtatgacagactgtcgctacttttgcatgacgcggagagaaggggaacggcaggcacttggtctgagccccgttaaatatcatggaaagtggccgttcttacgcgtttctgtgttccaggaacccctttcagctgcactttctgctgtcaacctactgatgcacttcactggctggctttcattttttcttctagtgaattaccaattgcctcttagaccccaggccaagagaacttactatgaatatactagcttgtggcatatctatgcaatcttatcaatgaacgcatggttctggagctctattttccatactcgagacattgacttgactgagaaattggactattcttcagctgtggccctgcttggctactcgttgatcctttcgttgctaagggctttcaatgtcaaggatgaggctagcagggtgatgtttgcagcccctattttggcattcgttacgacgcacatcttgtatcttaacttctatgagcttgactatgggtggaacatgaaagtttgtgtggtgatggccgcggttcaacttctgacgtgggcagtctgggctggtgtaagccggcatccgtcgcggctgaaggtctggacagttgttttcggaggagcactcgccatgctacttgaactctacgacttccctccatacatgggttacgccgacgcccattcgctgtggcacgcaagcaccattccgctcacctgtctcttgtggagcttcatcaaggacgatgccaagttccgcacggcaacactcgtcaagaaggcaaagtaattaagcaaagggccacactgttaagatatagggtctgggacccatcgtgtacacgaggagcggtttggggcacacgtgttataccggacatcatgaaacctccagtatatttgctcccccccccccccatgatgctcctgtgtcctgtcctgtctcccctccactcacgaattttgtccacaaactcagcgtattctttagggcgcatgttctgccattacgatccgccttcttacctgaatgtgtaaaactcagggaattttagaatgtgttggtgggctttgctagattttgtcatcgccgaatcagttttgcattgtggaatcagacaggacaatggacatcatcggtgtgtttgagtgtttcctgtgacgtgtggacttgtggaaattcctgaagcccatttttgtaggacatttgagttccaacgttacgaaagttactgaacaatacaatgaacacgtgctaggtttg

SEQ ID NO: 24907 - DNA, 1934 bp, Zea Mays
agtttatggattcttttcccggttgaaggaggtttggactaggctgaaacgagacggcggggccccatcgttgtcacagccagtctactccggcggcccagcccacgtacagtcgagcaggcgatctcgcacccctggtcgcctggtcagcagtgagcagtcagcggctgcgcgccgcctcgtcgggactcgggggcagagctggggctatctcttgagctggtggtcaggtactcaggaggtcatccatgatccatcctgattctccctcgtcctgctcccctttccttggccggccggcgcgcggagtggaggtcgaccgacattgaattccctctttccttctttgccgctcaattgcccccttgctccgcgggaagctggccaccggtcctgcctgcgcaatccattttgttcgtactattattgtgtaaccattgtgctccgtggagccgtagaggtggagatctgggttgccatttccagaccctggccgcgtccgctgcgatgggtcgaagcgtctgggcggttccgttggcttcccttcttgcgtttggtttggtgctcggctccgtcgaggccagcctcggggatgttgatccgcgttacagggagtgtcaaactacagggattattggggagaacgtgatcagccattgtcagttcaaagaggacaacacttctgttggaggctcttggtataaccaggagcaaatttatatccagtggaaagaactgaactgtatgacagactgtcgctacttttgcatgacgcggagagaaggggaacggcaggcacttggtctgagccccgttaaatatcatggaaagtggccgttcttacgcgtttctgtgttccagtgaattaccaattgcctcttagaccccaggccaagagaacttactatgaatatactagcttgtggcatatctatgcaatcttatcaatgaacgcatggttctggagctctattttccatactcgagacattgacttgactgagaaattggactattcttcagctgtggccctgcttggctactcgttgatcctttcgttgctaagggctttcaatgtcaaggatgaggctagcagggtgatgtttgcagcccctattttggcattcgttacgacgcacatcttgtatcttaacttctatgagcttgactatgggtggaacatgaaagtttgtgtggtgatggccgcggttcaacttctgacgtgggcagtctgggctggtgtaagccggcatccgtcgcggctgaaggtctggacagttgttttcggaggagcactcgccatgctacttgaactctacgacttccctccatacatgggttacgccgacgcccattcgctgtggcacgcaagcaccattccgctcacctgtctcttgtggagcttcatcaaggacgatgccaagttccgcacggcaacactcgtcaagaaggcaaagtaattaagcaaagggccacactgttaagatatagggtctgggacccatcgtgtacacgaggagcggtttggggcacacgtgttataccggacatcatgaaacctccagtatatttgctcccccccccccccatgatgctcctgtgtcctgtcctgtctcccctccactcacgaattttgtccacaaactcagcgtattctttagggcgcatgttctgccattacgatccgccttcttacctgaatgtgtaaaactcagggaattttagaatgtgttggtgggctttgctagattttgtcatcgccgaatcagttttgcattgtggaatcagacaggacaatggacatcatcggtgtgtttgagtgtttcctgtgacgtgtggacttgtggaaattcctgaagcccatttttgtaggacatttgagttccaacgttacgaaagttactgaacaatacaatgaacacgtgctaggtttg

SEQ ID NO: 24908 - DNA, 1946 bp, Zea Mays
agtttatggattcttttcccggttgaaggaggtttggactaggctgaaacgagacggcggggccccatcgttgtcacagccagtctactccggcggcccagcccacgtacagtcgagcaggcgatctcgcacccctggtcgcctggtcagcagtgagcagtcagcggctgcgcgccgcctcgtcgggactcgggggcagagctggggctatctcttgagctggtggtcaggtactcaggaggtcatccatgatccatcctgattctccctcgtcctgctcccctttccttggccggccggcgcgcggagtggaggtcgaccgacattgaattccctctttccttctttgccgctcaattgcccccttgctccgcgggaagctggccaccggtcctgcctgcgcaatccattttgttcgtactattattgtgtaaccattgtgctccgtggagccgtagaggtggagatctgggttgccatttccagaccctggccgcgtccgctgcgatgggtcgaagcgtctgggcggttccgttggcttcccttcttgcgtttggtttggtgctcggctccgtcgaggccagcctcggggatgttgatccgcgttacagaacttgtgtgagggagtgtcaaactacagggattattggggagaacgtgatcagccattgtcagttcaaagaggacaacacttctgttggaggctcttggtataaccaggagcaaatttatatccagtggaaagaactgaactgtatgacagactgtcgctacttttgcatgacgcggagagaaggggaacggcaggcacttggtctgagccccgttaaatatcatggaaagtggccgttcttacgcgtttctgtgttccagtgaattaccaattgcctcttagaccccaggccaagagaacttactatgaatatactagcttgtggcatatctatgcaatcttatcaatgaacgcatggttctggagctctattttccatactcgagacattgacttgactgagaaattggactattcttcagctgtggccctgcttggctactcgttgatcctttcgttgctaagggctttcaatgtcaaggatgaggctagcagggtgatgtttgcagcccctattttggcattcgttacgacgcacatcttgtatcttaacttctatgagcttgactatgggtggaacatgaaagtttgtgtggtgatggccgcggttcaacttctgacgtgggcagtctgggctggtgtaagccggcatccgtcgcggctgaaggtctggacagttgttttcggaggagcactcgccatgctacttgaactctacgacttccctccatacatgggttacgccgacgcccattcgctgtggcacgcaagcaccattccgctcacctgtctcttgtggagcttcatcaaggacgatgccaagttccgcacggcaacactcgtcaagaaggcaaagtaattaagcaaagggccacactgttaagatatagggtctgggacccatcgtgtacacgaggagcggtttggggcacacgtgttataccggacatcatgaaacctccagtatatttgctcccccccccccccatgatgctcctgtgtcctgtcctgtctcccctccactcacgaattttgtccacaaactcagcgtattctttagggcgcatgttctgccattacgatccgccttcttacctgaatgtgtaaaactcagggaattttagaatgtgttggtgggctttgctagattttgtcatcgccgaatcagttttgcattgtggaatcagacaggacaatggacatcatcggtgtgtttgagtgtttcctgtgacgtgtggacttgtggaaattcctgaagcccatttttgtaggacatttgagttccaacgttacgaaagttactgaacaatacaatgaacacgtgctaggtttg

SEQ ID NO: 24909 - DNA, 2276 bp, Zea Mays
agtttatggattcttttcccggttgaaggaggtttggactaggctgaaacgagacggcggggccccatcgttgtcacagccagtctactccggcggcccagcccacgtacagtcgagcaggcgatctcgcacccctggtcgcctggtcagcagtgagcagtcagcggctgcgcgccgcctcgtcgggactcgggggcagagctggggctatctcttgagctggtggtcaggtactcaggaggtcatccatgatccatcctgattctccctcgtcctgctcccctttccttggccggccggcgcgcggagtggaggtcgaccgacattgaattccctctttccttctttgccgctcaattgcccccttgctccgcgggaagctggccaccggtcctgcctgcgcaatccattttgttcgtactattattgtgtaaccattgtgctccgtggagccgtagaggtggagatctgggttgccatttccagaccctggccgcgtccgctgcgatgggtcgaagcgtctgggcggttccgttggcttcccttcttgcgtttggtttggtgctcggctccgtcgaggccagcctcggggatgttgatccgcgttacagataaatttggggatcggggtgagcaaatgtctcatcgaagaactggcaccgccaacaaaaggttctgggtgaagtggcatctctgaactggttgcatggactttggaaccttttggctatctagggcttgtttggattcagcatttcagcctccacatgtcctgtcattagatatacaaatcaaggtccatgtcgattatgttttgacacaagatgtaatgatatattgggcccacatgtcatatatattcaagaacttgtgtgagggagtgtcaaactacagggattattggggagaacgtgatcagccattgtcagttcaaagaggacaacacttctgttggaggctcttggtataaccaggagcaaatttatatccagtggaaagaactgaactgtatgacagactgtcgctacttttgcatgacgcggagagaaggggaacggcaggcacttggtctgagccccgttaaatatcatggaaagtggccgttcttacgcgtttctgtgttccaggaacccctttcagctgcactttctgctgtcaacctactgatgcacttcactggctggctttcattttttcttctagtgaattaccaattgcctcttagaccccaggccaagagaacttactatgaatatactagcttgtggcatatctatgcaatcttatcaatgaacgcatggttctggagctctattttccatactcgagacattgacttgactgagaaattggactattcttcagctgtggccctgcttggctactcgttgatcctttcgttgctaagggctttcaatgtcaaggatgaggctagcagggtgatgtttgcagcccctattttggcattcgttacgacgcacatcttgtatcttaacttctatgagcttgactatgggtggaacatgaaagtttgtgtggtgatggccgcggttcaacttctgacgtgggcagtctgggctggtgtaagccggcatccgtcgcggctgaaggtctggacagttgttttcggaggagcactcgccatgctacttgaactctacgacttccctccatacatgggttacgccgacgcccattcgctgtggcacgcaagcaccattccgctcacctgtctcttgtggagcttcatcaaggacgatgccaagttccgcacggcaacactcgtcaagaaggcaaagtaattaagcaaagggccacactgttaagatatagggtctgggacccatcgtgtacacgaggagcggtttggggcacacgtgttataccggacatcatgaaacctccagtatatttgctcccccccccccccatgatgctcctgtgtcctgtcctgtctcccctccactcacgaattttgtccacaaactcagcgtattctttagggcgcatgttctgccattacgatccgccttcttacctgaatgtgtaaaactcagggaattttagaatgtgttggtgggctttgctagattttgtcatcgccgaatcagttttgcattgtggaatcagacaggacaatggacatcatcggtgtgtttgagtgtttcctgtgacgtgtggacttgtggaaattcctgaagcccatttttgtaggacatttgagttccaacgttacgaaagttactgaacaatacaatgaacacgtgctaggtttg

SEQ ID NO: 24910 - DNA, 2448 bp, Zea Mays
agtttatggattcttttcccggttgaaggaggtttggactaggctgaaacgagacggcggggccccatcgttgtcacagccagtctactccggcggcccagcccacgtacagtcgagcaggcgatctcgcacccctggtcgcctggtcagcagtgagcagtcagcggctgcgcgccgcctcgtcgggactcgggggcagagctggggctatctcttgagctggtggtcaggtactcaggaggtcatccatgatccatcctgattctccctcgtcctgctcccctttccttggccggccggcgcgcggagtggaggtcgaccgacattgaattccctctttccttctttgccgctcaattgcccccttgctccgcgggaagctggccaccggtcctgcctgcgcaatccattttgttcgtactattattgtgtaaccattgtgctccgtggagccgtagaggtggagatctgggttgccatttccagaccctggccgcgtccgctgcgatgggtcgaagcgtctgggcggttccgttggcttcccttcttgcgtttggtttggtgctcggctccgtcgaggccagcctcggggatgttgatccgcgttacagataaatttggggatcggggtgagcaaatgtctcatcgaagaactggcaccgccaacaaaaggttctgggtgaagtggcatctctgaactggttgcatggactttggaaccttttggctatctagggcttgtttggattcagcatttcagcctccacatgtcctgtcattagatatacaaatcaaggtccatgtcgattatgttttgacacaagatgtaatgatatattgggcccacatgtcatatatattcaaggtacttttggcaggcatgattacaatgcaaacagccctccgttgccaaaatcgtagatatggctagtcttggtcatgaccaaatcttggaaggattaattggggctcaagaccaaacatgcctgtgacctaaggcgcaatgcttgtgaccaagaattttgaaaactttggtcaatgttatattcttacaatctccagatttagtttctctaagaagatatatgtcatatgttgtggggcaggcatattaacttgtgtgagggagtgtcaaactacagggattattggggagaacgtgatcagccattgtcagttcaaagaggacaacacttctgttggaggctcttggtataaccaggagcaaatttatatccagtggaaagaactgaactgtatgacagactgtcgctacttttgcatgacgcggagagaaggggaacggcaggcacttggtctgagccccgttaaatatcatggaaagtggccgttcttacgcgtttctgtgttccagtgaattaccaattgcctcttagaccccaggccaagagaacttactatgaatatactagcttgtggcatatctatgcaatcttatcaatgaacgcatggttctggagctctattttccatactcgagacattgacttgactgagaaattggactattcttcagctgtggccctgcttggctactcgttgatcctttcgttgctaagggctttcaatgtcaaggatgaggctagcagggtgatgtttgcagcccctattttggcattcgttacgacgcacatcttgtatcttaacttctatgagcttgactatgggtggaacatgaaagtttgtgtggtgatggccgcggttcaacttctgacgtgggcagtctgggctggtgtaagccggcatccgtcgcggctgaaggtctggacagttgttttcggaggagcactcgccatgctacttgaactctacgacttccctccatacatgggttacgccgacgcccattcgctgtggcacgcaagcaccattccgctcacctgtctcttgtggagcttcatcaaggacgatgccaagttccgcacggcaacactcgtcaagaaggcaaagtaattaagcaaagggccacactgttaagatatagggtctgggacccatcgtgtacacgaggagcggtttggggcacacgtgttataccggacatcatgaaacctccagtatatttgctcccccccccccccatgatgctcctgtgtcctgtcctgtctcccctccactcacgaattttgtccacaaactcagcgtattctttagggcgcatgttctgccattacgatccgccttcttacctgaatgtgtaaaactcagggaattttagaatgtgttggtgggctttgctagattttgtcatcgccgaatcagttttgcattgtggaatcagacaggacaatggacatcatcggtgtgtttgagtgtttcctgtgacgtgtggacttgtggaaattcctgaagcccatttttgtaggacatttgagttccaacgttacgaaagttactgaacaatacaatgaacacgtgctaggtttg

SEQ ID NO: 24911 - DNA, 3933 bp, Zea Mays
agaaacaacattctgagacactcgtccttgcttggaactgccttataattatcgctgatatgaacaagggttacatacttctctacccttagaagtctttcgctccgaatctcgggacgagattcttttaaggggggaggactgtaacaccctggtgtttatcgtccgctcgacagcgagtacggatttaagcacgtgatatcagtaaataagatggacactaaggtctaattatttttgcctatcacgattttaatatcgcatctgcttcgtttgtcgcgagtgcgacatcgttattatttttatttgtccgggctcttcctgaattttcttgctgttcggaacatatttgttctgaaaatcggtgcgtccggtgattatttaaaattcatcgctcgcgaacacgaattcggaagctcgactcactcggatgatttttatcccgggcaaattaattcaaactcgacgactaaggttttcggtgcaaataattttgttcccactcgtcaaccgagacagctcatccgaggatttataattgaaatttattcgtctagtaaattatctgtcctaaattaaatcaagcacagtctaaatttgtcgaagccgaaatcaatttgatccggtccgtgcgtttcttgtctcgatctaattttcttcaaatagaaataatggatacgaattaatctgactccgaagtattcattaaatcctgtctaaatatttttgtggatcttgttttggctcaactcatttatacatcttttagaccttaatgtttgagccaaccaaatatctacattttgattatttttaagtagatgaaaggaaattccaatttttcctagctgatttcattccaccgcttaaacgtccagctcttgtgcaaatatctcctacgtacatctctcctccctctccttatcctctctctcagtctctctccatgttcttatctgcaatgggcaatttattaacgccggcttgggtggtcggcatcttctctgctcgatctctatccccatcgccagccacgcgtctctctcccgtaggcttcaatcttcagccgtgaatctccagcgtgctctggattcagccatggagcttatctcccaccgccgatcgctgatcttcctggccgtgccgctcaacgtgtgaagaaaaatcccaccgcccggccgtcgttatttccagtgcgcgctgctcttcttccagccggcgctcgccctgggtcacgccctcgactccgcccggcgcccggcgctcggaccacgcccctctgctcgcttgttccagatcacccatgccgcgacccccagtttcctcccatgccagcgcatctcccatcccctgtgtttcctctctgctgagctcccatggcagttctctagagcttcctcgccgcgcgcagccactcccttctctctcctgctccctcgccggcgtacctccctgcgtgctcctcccgtgcagctcgcctagctccctcaagcttcttagttcgtccgcccgcgaacgcccatggcgcggtcgcttctctgtgcacgcgccgtcgccctgatttcctgctccctggctccaactcaagttcgcttgaccgcgcgtgtccctgcgccgcaccctgaagcctcctgctctggcgcccagctccctgcgccgagcgcttcttctttccctgcgccctccccttgcttctctcttccagctcgttcagccagcgaggtccctcccaggtctacctgctcgcagtgcctctggttccggctgcagttcggtgcttggagctccctgtccgtcctttctgccgagcgattttcttgcgcgcgcgcgcagctctggctcgttccccatggtggccgcggtgcctctctgcctgctggaacttccttgtccgcgaactcctcccgtccgtgccagtcgccgtttctaagatcggttccaagccgcagtgtgcccagctgcttcttcctcttcccatggcgtccatcttcctcggctcctttcagctcggatccctgcgcgcggagtttttcccctagccaagatcgtccttgcgcgctgccgtcgcctagttcgcgtcccgctcttgctccagctatggcgtttcgtcgtcgcagttccctgtcctctgcgcgccctgctttttgtgcgcgcgtgctcgccgtctctgttccagccgtccgcacaattttctctgctcccttgccatggtcgtcgcgtgtctgcgcgcagctcgctgagttcggtctctgttcttcctgcgcccaatccatgcccgcgctttgctttctacgcgctggccacagctcagagtttccctgcgtgatgtcacaaaaaccgcttattgttgatgtcgcgcttcgtgcatcgtgtgctcgacggaggtcccaagcctgttgacagcacacgcgcaagctgacgcgtgagttgcagaatcgggtgcgatcctgcgctatgaatccgtcatgacgtcgggtggcgaggagatgggaagtcggtcagttttcagtcagatccaatggtggaacagcaaggctcgtgcgacactcgtcagacgctcgaccataaagcctaattcaggagtggctactccgtcttcttcgccatatggaaatcgtcgcgctgacacgtcgaggtcgtcgatcgtcatcctcgtctacgccaagtccccaagccgtgaagacgctctagtattggccacacgtcaccagctcgacaaaaaaaagaatcccacggatattcggtcaagaatggaaactgtgtgcctcgctcgccgaacgtgtatgatcaacggcgtcagccagaactcgtagtcgtgcttgcgactatcgcgtcaaattagatagggtaagcaaatttattattcgtgcgagtggattaatgaatgatctaaactaggtctataaatagaattgtggtcacaataaatgttagtaatttactaatttagcatgcctatattgtgataatcgatttaggtaaatcggtaaatcaagtaattaagatacatagtttaaagagttaataaaaagctaggaataaaaatagatctagtgtaatatgtcaatttggttaatggatgtagtcgatgctctgctatgatatccatgatgcttaatgcttggttttaaatgtttcatcctttttagcgtagattatctatctcatactatgtatactcgtgctcatacatatgcatcgtgcatctcatgaggtacgataattaatcgcgtgatgcggaagaagacccaagtcgaccccaagcatgggctaatccgcaggatgaagctgatggaccaacctgaagatggttaaatcaagcaagtactcggtcgagggatactcgtcaagcggacatcgcctaacaaacactaatctagtgttacccaggcaagccccggtgcacgcaacccctttccttgtgttttaaatacttttcgcacactttaagtctagtgaaatgtgcattaggttcataggagttgcttggaaccctttgatgcattgctttccttgatatccatacctttatagatacttctgtgaagtatcaaaatatgatttacaaaaatgcttagccttgcttagatcttgtggatagaggttgtcctcaatttaacccgggagaggatgacttctacctgcaagaatattttcatttggagcaatggtgggatcttactgcaaagttccctgtgatgctcttttcatcctaaggaacagaaacaatcctaaggatggaagtacttaaatcgagacttgggctaggaacaggtgatgctccgcccgggtcaattaaggattggatgcgtatgtaggcctgttgatcaaggactatcttatctagccacatgccctgagaatgggacagggtaagcttgaacccggctattccatacatgaaaagacaatcgcgcactgggcgtggagaga

SEQ ID NO: 24912 - DNA, 2692 bp, Zea Mays
aaaaaactataatgctagcgacatcctcttttaagccctaaaactaaggactatcaggtggcttatttgaaaaccactaacccacaaccgggtgggtattgcatacatgtgtattgttatttttaaggccattcagttttgaatggatcgacgcccaaggtaaggtgagatgtgagagcaagaccgaacaaacgtcggtctagggaagtgcttaattgtagcgcttgattatatacatgttttatatatgtatatatgaaggttgcgaggtggagtaattacttttctgggaattcggtaccccatggatgtgtatgggtatacagacatgggaatactgagaagtgtaatgtacttgtaacgacgcacctacgttcaggtaagaaggtgagttaccataatgggttgccctatggttaaagtgtggcaatggcgcctatgcgtggctcggcgcttaatgatgagctggcctccatatagcaatatatggagtataaactatgataaactgtcatgtgtgaactgcatcattgggaattgggttgtgatggatttttctgcaggtacactaacctcgaaaacgtatgtgtagttgacgactagcaaaataccgtgagaatcgtacatatgccaccgatatagaacgctattgccacattatgttggcaaaaactcagtgaggacggataagacgagcatgcatcttgattgttgcattatgtttgtcacctatacacccaaaatgcttctctcgtctttattccagtaaccattgattgtagataatatggtgtaatgctaaattatgaacttcgatgaaataggtgtcctccattctttaggtgacctcttagagtgctctatgtgtgctcttttgttgatgtgccgatagagggttagtagtttggttgcttaaacccaaaattaggccatgttcttagttggtgaaccgagacccaaatttgaatttaccattatcactctgtgaccaagcccatacaaataaatgcttgataatttctttgttggacataaagtgtacccaagcttaaaaaaaatctcaagtcatgtctccttctagaaccattcccttgttcagttgatgcaggttgaggtctccattatatttggcctctccttgcggatcgccatgttgctttgtcaacccaacctaggaaagacatgtccaaccatttttctagaatttgatgcctttggtttcccatatctatcgaaggcataccaacttaatcttatgattgttttcccctgtatctagtcagatactgatccttgaccttgtgatctctgcgatgggcatagaaatatgcttggggctgaattaacaatctcccatcgtacttctctcatcaagtttaggttatggccatgccttgttcacttccttgggccatgatctatttggatctctacttgtaatcattctacaggtggagtctcttttgtaccttgtcatccttgaccaatctattggtgtcacgtgagatttcttattggttatgtctggtaatggtgttatgactaaaatcggtgataccacgctgaaaccgagggccttcggtgggtgctcacacatggttgtgctactcggcacgcgttggtatcacagttaatagtcgtaatccattatgagattatatcaatatgttatcttccgtaggcttcttccttgaaacaatttctatgttgtttgtgaagagatcaagcaacatctgtcatctctgttggatcaaaagggcataccactttcatgtgtggtcttatttcttttgatcttggtagtgactactcatacaagttccctttacatcctttgtgtaaaggtggagccttggagctttttaatgtcgagagacaactgattagctctcaaaatgaagattgattttccctgctgttgtgatgcaggagtttgttcattcgctctcttatttaatccaagtattccctaaccaagcggataattcatctcacatgaagaaacggatgaacaacatgaccaaatagatttctgcccaagtgcatgatcaactgttagtatgagtgagctctcgaccgttggcttaccgatggtactgagaggacttgctcaatgtcaaaagtagttcaacaagttggttttactaacttgtaactgctcaatgaacaaagattgagtttagagatcgttttatcgatttgcctgaactcattttggttcaacccatactgaggaagtacttataaaaatcaagattaaggcgaccaataaccacctagccatcgctctagtcgtgtctcgatcgcctcacgtgtgcttttctagcatgtatgaccaggtcgagtcatgcctagtgcttgataaaatggactagttgtaaagtccgtatctacagacccctttgctggtgatgttctcgaatctatatcacctttcagggacttggattctttggctaacacgagttaactgtgatgttattcgacattcacagccgtcacgtgtgctatgagtttactgtaaccacttgttggtaaacctctttctgtgtgttttacccaagatggtgtatctgattctgtttgggtaaaatcgtgtatttgccgctcgctcaacagactcagatagtacagtgtcataaaaaaaaagcaaactgcacacatggaaccttatgtgttcttctggcagaca

SEQ ID NO: 24913 - DNA, 3557 bp, Zea Mays
gagcttttcaaacgcccctggctctgtggaccgctcgtccctgccgttgcgagcgcgagcgcccgagctagtgagctgcgtctgcgtgcgagatccgcgaggggcgggcgaggacggcggagtcgccggcgcgagcgaataaggcgaccggcttgcgcgcgacgagggcgatggcccgcccggctgccggagcgcacgacgtggggatggcgctgcgcaaggccgaggaagccgctgcgcggaggtgcgaggcggcgcgatggctgcggcagatggagcccgccgcagcagagtccctgccggagaggccttccgaggaggacttctgcgcggcactgcgcaacggcctcgtcctctgcaaggttctcaaccgcgtcaatcctggcgccgtccccaaggtcgtggagaatcctgtcatcacggtccagacgttcgatgggccggcacagtctgcgatacagtacttcgagaacatgaggaacttccttgtcgcagttagtgcgatgaacctgttgacgtttgaaacctctgatatagagaagggaggttcgtcaatgaaagttgtcgactgcatactctgcctcaagggataccacgagtggaagatctcaggtggcattggtatatggcggtatggtggcatcgtgaaaattgcatcctccagtaaaaggcctgcttcacatttaaacagaggtggaggctcagaccaacaaatgctggaatttgtgcatcttctctctgaggtctctcttgaggaatcaagagttgaagaagcccagcattctctttttcagcgctttgttcttcaagttgtacgagcattccttctggaatggggtgaagctgaagatttgcctcttgatgatatggtcatcgaaacagtactcgaacaagcttgtaaagaatttaccattttgcttgcttctcacagaaatcaggtgaggtcacttctaaggaagatgatgaaggatgacaatggaactctttctaaaatggatttgatcgaaactattacaaaatgtcttaaggagaatggtgagtgcatgtcctcttcattgcgattgcctcgtggcagccatggacacttggatgatgtgggattacttgaaaaccaacaagaaggactggagaagttaaagatgtcattcaatgaaatgaagcttcaagttgaatcgactcgtgctgagtgggaggaagacttgaggaggctagaaagctactttgaggctcagaatcataatgcttaccaaaagttgctggaggaaaatcgtaagctctataatcaagtacaagatcttaaaggtagcattagagtttactgcagagtgaaacctttcccaaaggcacaatctgatcaaaggtctactgttgatcatattggggaaaacggagaaatcctgattgcgaatcctcaaaagcaagggaaggatggacggaaaatattcacattcaacaaaatatttggacctagtacttcacaatctgaagtttttgctgatacccaaccattaattagatctgtcatggatggatataatgtatgcatatttgcatatggtcaaacgggatctgggaaaacttacacaatgagtggtccagatgtaacagcagaggaaacctggggtgtaaactacaggtcgttgaatgatctgtttgaaatttctcaaacaagagcagattccattacatatgatgttaaagttcagatgattgaaatatacaatgagcaagtgagggatttattaatgactgatggtgcaaacaaaagattagagatacgcaataattctcatgtaaatggactcaacatcccagatgccaatattgtgccagtcaagtgcgcacaagatgttttggatctgatgaaagttggccagagaaaccgagcagttggatcaactgctcttaatgaacgaagtagccgctcacacagttcatgtacaaggaaaggaggtaatttcaggctcaactctaagagggtgtcttcatctagtggatctcgcgggaagtgagagggtagacaaatctgaagcgactggagaaagactaactgaagccaagcacataaacaaatctctgtcagcacttggtgatgttatatctgcacttgcccaaaagagttcccatgttccatatagaaatagcaagttaacacaagtgctgcaggatgccttaggtggtcaagcaaaaacattgatgtttgtgcatgtgaaccctgaaacagactcttttagtgaaacaatgagcactctcaaattcgctgagcgtgtagctacaatagaacttggtgccgcccgtgcaaacaaggaagcaggccaggtcaaagacctaaaggaagagatcgccaagcttaaattggcattagatgaaaaggaaaatgaagtggcacagtttaaagatcttgctaaccgtgtgacttctgagatgagaaatgcaagaacaagatcacctttaaccgccagcatgtccttgaaacctgaagtcagtcaagaatccagtgtagacacctgtacaagtgagataagaagttcatcatctggcaagcaaagaaggttccgttcaccgttgtcagtgagagagctagacgataagtcacctgtcatcagcagggaactgtacctgagtgcgcgaaagtacaagactccctctcctccggttagaagctcactctctgtcgagagaggcagctttgccaaaatcgtggagaacactggaagcatcgactgcacaccgatatccaaggtcgaagtgcctccaaaagtgtggtccagcaactcgaagaccacaccttcatctgtcctgacagctcagagcctacggaaattccgggactccgaggagaacagaaccaaaattccgcccgctgtccggcagagcatggcgaagaacaggtctgagagtacgccaaagactcacaatgaagagaaaccggcgaacaggcaccactcgggtaccaaagcgaggtcagaggccaggaacacgagggactcgtccgaaatcgagaacgagtttgcgggcgatgaacctactttccacttcaaccgaactgcgaagaagttaccgacaaaggtgatgtcaagacagtcccagaacatagatgtcagtgtcagggcctctgtccggggggagatggagcctctgaccgaaggaaggcaacgccggaactggagcaagccgccgcacgccgagaggaccaatatgccgttgccggacatccggcgcagtgtctccctgccgcgcgggaagaaccctcttgtgtgaatctagctcgtttcgccaaccaggcattctttcattggttgtttgtttctttatcctgcggttcgatccgaatgtaggctctacggctgtgtagaacacttcatccggatgcataacacaaagtctgtcgagttgcttccaccaggctcccatgaaaacgcaaagttcacgctcttatacgcgatgtaaaaatgtatgggttaatgttgcactgcaggctgcagcatctcgttccagtggtgattccgtaccaattttgttcttatattattatatagaccaacaaatatattatt

SEQ ID NO: 24914 - DNA, 3577 bp, Zea Mays
ggtcggagcttttcaaacgcccctggctctgtggaccgctcgtccctgccgttgcgagcgcgagcgcccgagctagtgagctgcgtctgcgtgcgagatccgcgaggggcgggcgaggacggcggagtcgccggcgcgagcgaataaggcgaccggcttgcgcgcgacgagggcgatggcccgcccggctgccggagcgcacgacgtggggatggcgctgcgcaaggccgaggaagccgctgcgcggaggtgcgaggcggcgcgatggctgcggcagatggagcccgccgcagcagagtccctgccggagaggccttccgaggaggacttctgcgcggcactgcgcaacggcctcgtcctctgcaaggttctcaaccgcgtcaatcctggcgccgtccccaaggtcgtggagaatcctgtcatcacggtccagacgttcgatgggccggcacagtctgcgatacagtacttcgagaacatgaggaacttccttgtcgcagttagtgcgatgaacctgttgacgtttgaaacctctgatatagagaagggaggttcgtcaatgaaagttgtcgactgcatactctgcctcaagggataccacgagtggaagatctcaggtggcattggtatatggcggtatggtggcatcgtgaaaattgcatcctccagtaaaaggcctgcttcacatttaaacagaggtggaggctcagaccaacaaatgctggaatttgtgcatcttctctctgaggtctctcttgaggaatcaagagttgaagaagcccagcattctctttttcagcgctttgttcttcaagttgtacgagcattccttctggaatggggtgaagctgaagatttgcctcttgatgatatggtaggtcatcgaaacagtactcgaacaagcttgtaaagaatttaccattttgcttgcttctcacagaaatcaggtgaggtcacttctaaggaagatgatgaaggatgacaatggaactctttctaaaatggatttgatcgaaactattacaaaatgtcttaaggagaatggtgagtgcatgtcctcttcattgcgattgcctcgtggcagccatggacacttggatgatgtgggattacttgaaaaccaacaagaaggactggagaagttaaagatgtcattcaatgaaatgaagcttcaagttgaatcgactcgtgctgagtgggaggaagacttgaggaggctagaaagctactttgaggctcagaatcataatgcttaccaaaagttgctggaggaaaatcgtaagctctataatcaagtacaagatcttaaaggtagcattagagtttactgcagagtgaaacctttcccaaaggcacaatctgatcaaaggtctactgttgatcatattggggaaaacggagaaatcctgattgcgaatcctcaaaagcaagggaaggatggacggaaaatattcacattcaacaaaatatttggacctagtacttcacaatctgaagtttttgctgatacccaaccattaattagatctgtcatggatggatataatgtatgcatatttgcatatggtcaaacgggatctgggaaaacttacacaatgagtggtccagatgtaacagcagaggaaacctggggtgtaaactacaggtcgttgaatgatctgtttgaaatttctcaaacaagagcagattccattacatatgatgttaaagttcagatgattgaaatatacaatgagcaagtgagggatttattaatgactgatggtgcaaacaaaagattagagatacgcaataattctcatgtaaatggactcaacatcccagatgccaatattgtgccagtcaagtgcgcacaagatgttttggatctgatgaaagttggccagagaaaccgagcagttggatcaactgctcttaatgaacgaagtagccgctcacacagtgtgttgacagttcatgtacaaggaaaggaggtaatttcaggctcaactctaagagggtgtcttcatctagtggatctcgcgggaagtgagagggtagacaaatctgaagcgactggagaaagactaactgaagccaagcacataaacaaatctctgtcagcacttggtgatgttatatctgcacttgcccaaaagagttcccatgttccatatagaaatagcaagttaacacaagtgctgcaggatgccttaggtggtcaagcaaaaacattgatgtttgtgcatgtgaaccctgaaacagactcttttagtgaaacaatgagcactctcaaattcgctgagcgtgtagctacaatagaacttggtgccgcccgtgcaaacaaggaagcaggccaggtcaaagacctaaaggaagagatcgccaagcttaaattggcattagatgaaaaggaaaatgaagtggcacagtttaaagatcttgctaaccgtgtgacttctgagatgagaaatgcaagaacaagatcacctttaaccgccagcatgtccttgaaacctgaagtcagtcaagaatccagtgtagacacctgtacaagtgagataagaagttcatcatctggcaagcaaagaaggttccgttcaccgttgtcagtgagagagctagacgataagtcacctgtcatcagcagggaactgtacctgagtgcgcgaaagtacaagactccctctcctccggttagaagctcactctctgtcgagagaggcagctttgccaaaatcgtggagaacactggaagcatcgactgcacaccgatatccaaggtcgaagtgcctccaaaagtgtggtccagcaactcgaagaccacaccttcatctgtcctgacagctcagagcctacggaaattccgggactccgaggagaacagaaccaaaattccgcccgctgtccggcagagcatggcgaagaacaggtctgagagtacgccaaagactcacaatgaagagaaaccggcgaacaggcaccactcgggtaccaaagcgaggtcagaggccaggaacacgagggactcgtccgaaatcgagaacgagtttgcgggcgatgaacctactttccacttcaaccgaactgcgaagaagttaccgacaaaggtgatgtcaagacagtcccagaacatagatgtcagtgtcagggcctctgtccggggggagatggagcctctgaccgaaggaaggcaacgccggaactggagcaagccgccgcacgccgagaggaccaatatgccgttgccggacatccggcgcagtgtctccctgccgcgcgggaagaaccctcttgtgtgaatctagctcgtttcgccaaccaggcattctttcattggttgtttgtttctttatcctgcggttcgatccgaatgtaggctctacggctgtgtagaacacttcatccggatgcataacacaaagtctgtcgagttgcttccaccaggctcccatgaaaacgcaaagttcacgctcttatacgcgatgtaaaaatgtatgggttaatgttgcactgcaggctgcagcatctcgttccagtggtgattccgtaccaattttgttcttatattattatatagaccaacaaatatattatt

SEQ ID NO: 24915 - DNA, 1892 bp, Zea Mays
ctccagagaagcagaaaatcgtgtcccgagtccgccgccctacgcctactgctcctcccaccaccaccaaacaaacaccacaccgcgcgccacgcctccgtctgccggcggtgaccgagccagctcatcagcggccaaggagcgggatgccggggccaggagcgcacctgctgtacgctctgtcgggcggtgcggcgctgtctcggctcgccggcccggaccgccgcttcgggccgcaccactgcgccgtctacgcagcgaacgcgttcctcggcccggacctcggctccttcgccgagtggctctgctccttcctcccctcggcctccgccgcgggggacctcgccatggccgccgtgcaccaccccttctactacccgctcctcctcggcctcccgctcgcctgggcctacgcctggctctcccgccgtctgcttcgcgccggcgtcctcgactctccctccggggtaccattaagaaagaggcagtgtttcttgctgatctctgccggctcgctctcccactttttcttggatcacttgtttgaggagaatgggcattctacaatgtacacttggatactgagcactggttggtggaaaggtcgtgctcctatcaatccagatgcagtgctcgtcgtaggacttctttgcacttgcctcatggggggatatgtgtacatcaacagagtgaatcatggaaggtctgcagcagaaaaatcaaaaccaatctttctttctcattctgatgatagccaccctgtactgtatgtggtgtgccagtcagatatacctgcggcaaccccctcaacctgccatagagccttctcaagtcttgacacaacttgctccatggatggccgttgcttcttgtggccagtgcataacagagcaagcttcaaactgaggtcaaatgcctccgttgaatactctccattcaacctaggatcagcaaactctgatacattgccatcttggataagtgtagaagcctgggaacaaaagtgacattggcatagcagtattcatgatgttgattgctcgtcttcctgagaggagttggaggagcaccatgccgaagctgtacacatcccctgcagcattcaccctgtggttgtggcggtattctggatcaacatagccaaatgttcctctgacttcagagcttacgtgcgacacacctaagtcgatgactctagagagtccaaaatctgacagcttgggttccatatcaaccccaagaagtatattggttggctgtcatagaaagtccttcagggtatatgtgcaggaaccaaaggccacaagcacttccaagtgctatctgaagcctctgaatccatggaaggttaccgttgatgcacagctcatacacaagaaaacactcctcctgcccgtcacagtaacctcttaatgacacaaggccagccatttgtcagcactcctctgtataccttgcctggaaccacaagatgaaccagttgcacaccataaaggacaacatatacttgaacagttaggtttctaagtctcgtgttcttggatgaaaaatatactttctcttgatttatggtatagataccataactgtgaatcaggtagtctcctcatactcaagggatgccaacgcgacctctgcaagaaaaaaaaacatgtgcaacttcgtattgctattagtggaaaacagctatggccccaattatcaccccagcacagaggcatcctagcaacgcttcgtatcctgttgataaattttgaggagctcaaagcttgaaagatcaagtagaaaggcacactttgtcttcaactgtctgttggtttttactgctgttcagcctgtccttatgttgattgttttgttggatatgtggatgttaagttgttataatcgac

SEQ ID NO: 24916 - DNA, 1903 bp, Zea Mays
ctccagagaagcagaaaatcgtgtcccgagtccgccgccctacgcctactgctcctcccaccaccaccaaacaaacaccacaccgcgcgccacgcctccgtctgccggcggtgaccgagccagctcatcagcggccaaggagcgggatgccggggccaggagcgcacctgctgtacgctctgtcgggcggtgcggcgctgtctcggctcgccggcccggaccgccgcttcgggccgcaccactgcgccgtctacgcagcgaacgcgttcctcggcccggacctcggctccttcgccgagtggctctgctccttcctcccctcggcctccgccgcgggggacctcgccatggccgccgtgcaccaccccttctactacccgctcctcctcggcctcccgctcgcctgggcctacgcctggctctcccgccgtctgcttcgcgccggcgtcctcgactctccctccggggtaccattaagaaagaggcagtgtttcttgctgatctctgccggctcgctctcccactttttcttggatcacttgtttgaggagaatgggcattctacaatgtacacttggatactgagcactggttggtggaaaggtcgtgctcctatcaatccagatgcagtgctcgtcgtaggacttctttgcacttgcctcatggggggatatgtgtacatcaacagagtgaatcatggaaggtctgcagcagaaaaatcaaaaccaatctttctttctcattctgatgatagccaccctgtactgtatgtggtgtgccagtcagatatacctgcggcaaccccctcaacctgccatagagccttctcaagtcttgacacaacttgctccatggatggccgttgcttcttgtggccagtgcataacagagcaagcttcaaactgaggtcaaatgcctccgttgaatactctccattcaacctaggatcagcaaactctgatacattgccatcttggataagtgtagaagcctgggaacaaaagtgacattggcatagcagtattcatgatgttgattgctcgtcttcctgagaggagttggaggagcaccatgccgaagctgtacacatcccctgcagcattcaccctgtggttgtggcggtattctggatcaacatagccaaatgttcctctgacttcagagcttacgtgcgacacacctaagtcgatgactctagagagtccaaaatctgacagcttgggttccatatcaaccccaagaagtatattggttggctgtcatagaaagtgtgagtttgactaaacatgaatctatagatgcactgaagactttcagatcatgcaacaaaccttgatgtcacggtgaacgatgcagccttcagggtatatgtgcaggaaccaaaggccacaagcacttccaagtgctatctgaagcctctgaatccatggaaggccagccatttgtcagcactcctctgtataccttgcctggaaccacaagatgaaccagttgcacaccataaaggacaacatatacttgaacagttaggtttctaagtctcgtgttcttggatgaaaaatatactttctcttgatttatggtatagataccataactgtgaatcaggtagtctcctcatactcaagggatgccaacgcgacctctgcaagaaaaaaaaacatgtgcaacttcgtattgctattagtggaaaacagctatggccccaattatcaccccagcacagaggcatcctagcaacgcttcgtatcctgttgataaattttgaggagctcaaagcttgaaagatcaagtagaaaggcacactttgtcttcaactgtctgttggtttttactgctgttcagcctgtccttatgttgattgttttgttggatatgtggatgttaagttgttataatcgac

SEQ ID NO: 24917 - DNA, 1809 bp, Zea Mays
ctccagagaagcagaaaatcgtgtcccgagtccgccgccctacgcctactgctcctcccaccaccaccaaacaaacaccacaccgcgcgccacgcctccgtctgccggcggtgaccgagccagctcatcagcggccaaggagcgggatgccggggccaggagcgcacctgctgtacgctctgtcgggcggtgcggcgctgtctcggctcgccggcccggaccgccgcttcgggccgcaccactgcgccgtctacgcagcgaacgcgttcctcggcccggacctcggctccttcgccgagtggctctgctccttcctcccctcggcctccgccgcgggggacctcgccatggccgccgtgcaccaccccttctactacccgctcctcctcggcctcccgctcgcctgggcctacgcctggctctcccgccgtctgcttcgcgccggcgtcctcgactctccctccggggtaccattaagaaagaggcagtgtttcttgctgatctctgccggctcgctctcccactttttcttggatcacttgtttgaggagaatgggcattctacaatgtacacttggatactgagcactggttggtggaaaggtcgtgctcctatcaatccagatgcagtgctcgtcgtaggacttctttgcacttgcctcatggggggatatgtgtacatcaacagagtgaatcatggaaggtctgcagcagaaaaatcaaaaccaatctttctttctcattctgatgatagccaccctgtactgtatgtggtgtgccagtcagatatacctgcggcaaccccctcaacctgccatagagccttctcaagtcttgacacaacttgctccatggatggccgttgcttcttgtggccagtgcataacagagcaagcttcaaactgaggtcaaatgcctccgttgaatactctccattcaacctaggatcagcaaactctgatacattgccatcttggataagtgtagaagcctgggaacaaaagtgacattggcatagcagtattcatgatgttgattgctcgtcttcctgagaggagttggaggagcaccatgccgaagctgtacacatcccctgcagcattcaccctgtggttgtggcggtattctggatcaacatagccaaatgttcctctgacttcagagcttacgtgcgacacacctaagtcgatgactctagagagtccaaaatctgacagcttgggttccatatcaaccccaagaagtatattggttggctgtcatagaaagtccttcagggtatatgtgcaggaaccaaaggccacaagcacttccaagtgctatctgaagcctctgaatccatggaaggttaccgttgatgcacagctcatacacaagaaaacactcctcctgcccgtcacagtaacctcttaatgacacaaggccagccatttgtcagcactcctctgtataccttgcctggaaccacaagatgaaccagttgcacaccataaaggacaacatatacttgaacagtagtctcctcatactcaagggatgccaacgcgacctctgcaagaaaaaaaaacatgtgcaacttcgtattgctattagtggaaaacagctatggccccaattatcaccccagcacagaggcatcctagcaacgcttcgtatcctgttgataaattttgaggagctcaaagcttgaaagatcaagtagaaaggcacactttgtcttcaactgtctgttggtttttactgctgttcagcctgtccttatgttgattgttttgttggatatgtggatgttaagttgttataatcgac

SEQ ID NO: 24918 - DNA, 2946 bp, Zea Mays
ccgcgagacgactacggagtacggacaggagaaggcgagaagctcgcaaagaaaaccaaaccagaacccaccctcgtcgtccgcctccagagaagcagaaaatcgtgtcccgagtccgccgccctacgcctactgctcctcccaccaccaccaaacaaacaccacaccgcgcgccacgcctccgtctgccggcggtgaccgagccagctcatcagcggccaaggagcgggatgccggggccaggagcgcacctgctgtacgctctgtcgggcggtgcggcgctgtctcggctcgccggcccggaccgccgcttcgggccgcaccactgcgccgtctacgcagcgaacgcgttcctcggcccggacctcggctccttcgccgagtggctctgctccttcctcccctcggcctccgccgcgggggacctcgccatggccgccgtgcaccaccccttctactacccgctcctcctcggcctcccgctcgcctgggcctacgcctggctctcccgccgtctgcttcgcgccggcgtcctcgactctccctccggggtaccattaagaaagaggcagtgtttcttgctgatctctgccggctcgctctcccactttttcttggatcacttgtttgaggagaatgggcattctacaatgtacacttggatactgagcactggttggtggaaaggtcgtgctcctatcaatccagatgcagtgctcgtcgtaggacttctttgcacttgcctcatggggggatatgtgtacatcaacagagtgaatcatggaaggtctgcagcagaaaaatcaaaaccaatctttctttctcattctgatgatagccaccctgtactgtatgtggtgtgccagtcagatatacctgcggcaaccccctcaacctgccataggtgaagaagctgatctcggagtgataatatttcttgcgatttatctttttctcccacatggcctgtgcgccctttcgatgaatcaaaaggattatacagatgcactgaatgaattgccacttcaataatgcgtgtcgttattattcatttttcttccagtctgtgcagaatatcagtttggtaacagtctggtttctgcattatgttgtaattagatttagttactacctgaatgattactagtgcacttatgtatagccctgtaattctggaagcatatattattgtggaacaaagctgtatggatggtgctgacttctggtgaaaaagaatttcatctttttcattggtcgcagaggtggatcatatggatttgtattcaaggcacacatgactatatttttcatttggcactagttggtatatgctataaagtgatgatgtctgtcaagctagttatcgtgccttgtacacttaccagcgtttcctttttatagtaagttgaaagatagcatattcacttggaccatcacagtgaattcaagtgctgcattaaactcattatactaagaggtatcatgcttgacacctttagggctagtttggtgacaaagcaattgaggaggattgggcgggattgaggaggaaatggactaatttcctcctcaatcccccacaattcccttgtcaccaaactagcccttataggtttttctctactgtagctatacttctctgtatagtgtgacagaaaaggtgctgaaatattcaagcctgtgctctaatagaagtctagatcgtagtactgtccctagatttggtctttcagtatctctggttataggtgtgaactaattctattggtttgtcttaacttttctgatgtaaatttctcatcactcgaatggtttttcgttcacttagcgcacaaaaatgcttaagcatggtcatgtaaacatcaagggtcttaaggattacacataatagctatgcaagggattcgacaatgctaatgttgttgtgttttgcatcatctctcatggatatctcaagagccttctcaagtcttgacacaacttgctccatggatggccgttgcttcttgtggccagtgcataacagagcaagcttcaaactgaggtcaaatgcctccgttgaatactctccattcaacctaggatcagcaaactctgatacattgccatcttggataagtgtagaagcctgggaacaaaagtgacattggcatagcagtattcatgatgttgattgctcgtcttcctgagaggagttggaggagcaccatgccgaagctgtacacatcccctgcagcattcaccctgtggttgtggcggtattctggatcaacatagccaaatgttcctctgacttcagagcttacgtgcgacacacctaagtcgatgactctagagagtccaaaatctgacagcttgggttccatatcaaccccaagaagtatattggttggctgtcatagaaagtccttcagggtatatgtgcaggaaccaaaggccacaagcacttccaagtgctatctgaagcctctgaatccatggaaggttaccgttgatgcacagctcatacacaagaaaacactcctcctgcccgtcacagtaacctcttaatgacacaaggccagccatttgtcagcactcctctgtataccttgcctggaaccacaagatgaaccagttgcacaccataaaggacaacatatacttgaacagtagtctcctcatactcaagggatgccaacgcgacctctgcaagaaaaaaaaacatgtgcaacttcgtattgctattagtggaaaacagctatggccccaattatcaccccagcacagaggcatcctagcaacgcttcgtatcctgttgataaattttgaggagctcaaagcttgaaagatcaagtagaaaggcacactttgtcttcaactgtctgttggtttttactgctgttcagcctgtccttatgttgattgttttgttggatatgtggatgttaagttgttataatcgac

SEQ ID NO: 24919 - DNA, 3237 bp, Zea Mays
gcagaaaatcgtgtcccgagtccgccgccctacgcctactgctcctcccaccaccaccaaacaaacaccacaccgcgcgccacgcctccgtctgccggcggtgaccgagccagctcatcagcggccaaggagcgggatgccggggccaggagcgcacctgctgtacgctctgtcgggcggtgcggcgctgtctcggctcgccggcccggaccgccgcttcgggccgcaccactgcgccgtctacgcagcgaacgcgttcctcggcccggacctcggctccttcgccgagtggctctgctccttcctcccctcggcctccgccgcgggggacctcgccatggccgccgtgcaccaccccttctactacccgctcctcctcggcctcccgctcgcctgggcctacgcctggctctcccgccgtctgcttcgcgccggcgtcctcgactctccctccggggtaccattaagaaagaggcagtgtttcttgctgatctctgccggctcgctctcccactttttcttggatcacttgtttgaggagaatgggcattctacaatgtacacttggatactgagcactggttggtggaaaggtcgtgctcctatcaatccagatgcagtgctcgtcgtaggacttctttgcacttgcctcatggggggatatgtgtacatcaacagagtgaatcatggaaggtctgcagcagaaaaatcaaaaccaatctttctttctcattctgatgatagccaccctgtactgtatgtggtgtgccagtcagatatacctgcggcaaccccctcaacctgccataggtgaagaagctgatctcggagtgataatatttcttgcgatttatctttttctcccacatggcctgtgcgccctttcgatgaatcaaaaggattatacagatgcactgaatgaattgccacttcaataatgcgtgtcgttattattcatttttcttccagtctgtgcagaatatcagtttggtaacagtctggtttctgcattatgttgtaattagatttagttactacctgaatgattactagtgcacttatgtatagccctgtaattctggaagcatatattattgtggaacaaagctgtatggatggtgctgacttctggtgaaaaagaatttcatctttttcattggtcgcagaggtggatcatatggatttgtattcaaggcacacatgactatatttttcatttggcactagttggtatatgctataaagtgatgatgtctgtcaagctagttatcgtgccttgtacacttaccagcgtttcctttttatagtaagttgaaagatagcatattcacttggaccatcacagtgaattcaagtgctgcattaaactcattatactaagaggtatcatgcttgacacctttagggctagtttggtgacaaagcaattgaggaggattgggcgggattgaggaggaaatggactaatttcctcctcaatcccccacaattcccttgtcaccaaactagcccttataggtttttctctactgtagctatacttctctgtatagtgtgacagaaaaggtgctgaaatattcaagcctgtgctctaatagaagtctagatcgtagtactgtccctagatttggtctttcagtatctctggttataggtgtgaactaattctattggtttgtcttaacttttctgatgtaaatttctcatcactcgaatggtttttcgttcacttagcgcacaaaaatgcttaagcatggtcatgtaaacatcaagggtcttaaggattacacataatagctatgcaagggattcgacaatgctaatgttgttgtgttttgcatcatctctcatggatatctcaagagccttctcaagtcttgacacaacttgctccatggatggccgttgcttcttgtggccagtgcataacagagcaagcttcaaactgaggtcaaatgcctccgttgaatactctccattcaacctaggatcagcaaactctgatacattgccatcttggataagtgtagaagcctgggaacaaaagtgacattggcatagcagtattcatgatgttgattgctcgtcttcctgagaggagttggaggagcaccatgccgaagctgtacacatcccctgcagcattcaccctgtggttgtggcggtattctggatcaacatagccaaatgttcctctgacttcagagcttacgtgcgacacacctaagtcgatgactctagagagtccaaaatctgacagcttgggttccatatcaaccccaagaagtatattggttggctgtcatagaaagtccttcagggtatatgtgcaggaaccaaaggccacaagcacttccaagtgctatctgaagcctctgaatccatggaagctcatacacaagaaaacactcctcctgcccgtcacagtaacctcttaatgacacaaggccagccatttgtcagcactcctctgtataccttgcctggaaccacaagatgaaccagttgcacaccataaaggacaacatatacttgaacagttaggtttctaagtctcgtgttcttggatgaaaaatatactttctcttgatttatggtatagataccataactgtgaatcaggtagtctcctcatactcaagggatgccaacgcgacctctgcaagaaaaaaaaacatgtgcaacttcgtattgctattagtgggtaaaaaaacatctatctcagtaacttctatatgcatatggatgtgcaattaattagtgaaattaccaatatcgtttcttgatggttgggacttgctggctcttcttctcctaacactgcagaaaacagctatggccccaattatcaccccagcacagaggcatcctagcaacgcttcgtatcctgttgataaattttgaggagctcaaagcttgaaagatcaagtagaaaggtatgtgcaagagaagtaaaataaaccaacctctctgcatcccctttagcttatggcacttaccggaagaacacaagaatgcttctcgctcaccttgttgttgttctaataatgaagacaagtatgtctccatggacaatctataaccagtcgatgttaccaatgaagcgtgtagtgactgaccattgccgtccaatgcataggcatggaagaagccaaaaacacaaaaataaatcatatcccgtaattaaagtgttaatgactaaccattgccggtcaaggcatagccgcatagaagaag

SEQ ID NO: 24920 - DNA, 3046 bp, Zea Mays
gcagaaaatcgtgtcccgagtccgccgccctacgcctactgctcctcccaccaccaccaaacaaacaccacaccgcgcgccacgcctccgtctgccggcggtgaccgagccagctcatcagcggccaaggagcgggatgccggggccaggagcgcacctgctgtacgctctgtcgggcggtgcggcgctgtctcggctcgccggcccggaccgccgcttcgggccgcaccactgcgccgtctacgcagcgaacgcgttcctcggcccggacctcggctccttcgccgagtggctctgctccttcctcccctcggcctccgccgcgggggacctcgccatggccgccgtgcaccaccccttctactacccgctcctcctcggcctcccgctcgcctgggcctacgcctggctctcccgccgtctgcttcgcgccggcgtcctcgactctccctccggggtaccattaagaaagaggcagtgtttcttgctgatctctgccggctcgctctcccactttttcttggatcacttgtttgaggagaatgggcattctacaatgtacacttggatactgagcactggttggtggaaaggtcgtgctcctatcaatccagatgcagtgctcgtcgtaggacttctttgcacttgcctcatggggggatatgtgtacatcaacagagtgaatcatggaaggtctgcagcagaaaaatcaaaaccaatctttctttctcattctgatgatagccaccctgtactgtatgtggtgtgccagtcagatatacctgcggcaaccccctcaacctgccataggtgaagaagctgatctcggagtgataatatttcttgcgatttatctttttctcccacatggcctgtgcgccctttcgatgaatcaaaaggattatacagatgcactgaatgaattgccacttcaataatgcgtgtcgttattattcatttttcttccagtctgtgcagaatatcagtttggtaacagtctggtttctgcattatgttgtaattagatttagttactacctgaatgattactagtgcacttatgtatagccctgtaattctggaagcatatattattgtggaacaaagctgtatggatggtgctgacttctggtgaaaaagaatttcatctttttcattggtcgcagaggtggatcatatggatttgtattcaaggcacacatgactatatttttcatttggcactagttggtatatgctataaagtgatgatgtctgtcaagctagttatcgtgccttgtacacttaccagcgtttcctttttatagtaagttgaaagatagcatattcacttggaccatcacagtgaattcaagtgctgcattaaactcattatactaagaggtatcatgcttgacacctttagggctagtttggtgacaaagcaattgaggaggattgggcgggattgaggaggaaatggactaatttcctcctcaatcccccacaattcccttgtcaccaaactagcccttataggtttttctctactgtagctatacttctctgtatagtgtgacagaaaaggtgctgaaatattcaagcctgtgctctaatagaagtctagatcgtagtactgtccctagatttggtctttcagtatctctggttataggtgtgaactaattctattggtttgtcttaacttttctgatgtaaatttctcatcactcgaatggtttttcgttcacttagcgcacaaaaatgcttaagcatggtcatgtaaacatcaagggtcttaaggattacacataatagctatgcaagggattcgacaatgctaatgttgttgtgttttgcatcatctctcatggatatctcaagagccttctcaagtcttgacacaacttgctccatggatggccgttgcttcttgtggccagtgcataacagagcaagcttcaaactgaggtcaaatgcctccgttgaatactctccattcaacctaggatcagcaaactctgatacattgccatcttggataagtgtagaagcctgggaacaaaagtgacattggcatagcagtattcatgatgttgattgctcgtcttcctgagaggagttggaggagcaccatgccgaagctgtacacatcccctgcagcattcaccctgtggttgtggcggtattctggatcaacatagccaaatgttcctctgacttcagagcttacgtgcgacacacctaagtcgatgactctagagagtccaaaatctgacagcttgggttccatatcaaccccaagaagtatattggttggctgtcatagaaagtccttcagggtatatgtgcaggaaccaaaggccacaagcacttccaagtgctatctgaagcctctgaatccatggaaggttaccgttgatgcacagctcatacacaagaaaacactcctcctgcccgtcacagtaacctcttaatgacacaaggccagccatttgtcagcactcctctgtataccttgcctggaaccacaagatgaaccagttgcacaccataaaggacaacatatacttgaacagtagtctcctcatactcaagggatgccaacgcgacctctgcaagaaaaaaaaacatgtgcaacttcgtattgctattaaaaacagctatggccccaattatcaccccagcacagaggcatcctagcaacgcttcgtatcctgttgataaattttgaggagctcaaagcttgaaagatcaagtagaaaggtatgtgcaagagaagtaaaataaaccaacctctctgcatcccctttagcttatggcacttaccggaagaacacaagaatgcttctcgctcaccttgttgttgttctaataatgaagacaagtatgtctccatggacaatctataaccagtcgatgttaccaatgaagcgtgtagtgactgaccattgccgtccaatgcataggcatggaagaagccaaaaacacaaaaataaatcatatcccgtaattaaagtgttaatgactaaccattgccggtcaaggcatagccgcatagaagaag

SEQ ID NO: 24921 - DNA, 3154 bp, Zea Mays
gcagaaaatcgtgtcccgagtccgccgccctacgcctactgctcctcccaccaccaccaaacaaacaccacaccgcgcgccacgcctccgtctgccggcggtgaccgagccagctcatcagcggccaaggagcgggatgccggggccaggagcgcacctgctgtacgctctgtcgggcggtgcggcgctgtctcggctcgccggcccggaccgccgcttcgggccgcaccactgcgccgtctacgcagcgaacgcgttcctcggcccggacctcggctccttcgccgagtggctctgctccttcctcccctcggcctccgccgcgggggacctcgccatggccgccgtgcaccaccccttctactacccgctcctcctcggcctcccgctcgcctgggcctacgcctggctctcccgccgtctgcttcgcgccggcgtcctcgactctccctccggggtaccattaagaaagaggcagtgtttcttgctgatctctgccggctcgctctcccactttttcttggatcacttgtttgaggagaatgggcattctacaatgtacacttggatactgagcactggttggtggaaaggtcgtgctcctatcaatccagatgcagtgctcgtcgtaggacttctttgcacttgcctcatggggggatatgtgtacatcaacagagtgaatcatggaaggtctgcagcagaaaaatcaaaaccaatctttctttctcattctgatgatagccaccctgtactgtatgtggtgtgccagtcagatatacctgcggcaaccccctcaacctgccataggtgaagaagctgatctcggagtgataatatttcttgcgatttatctttttctcccacatggcctgtgcgccctttcgatgaatcaaaaggattatacagatgcactgaatgaattgccacttcaataatgcgtgtcgttattattcatttttcttccagtctgtgcagaatatcagtttggtaacagtctggtttctgcattatgttgtaattagatttagttactacctgaatgattactagtgcacttatgtatagccctgtaattctggaagcatatattattgtggaacaaagctgtatggatggtgctgacttctggtgaaaaagaatttcatctttttcattggtcgcagaggtggatcatatggatttgtattcaaggcacacatgactatatttttcatttggcactagttggtatatgctataaagtgatgatgtctgtcaagctagttatcgtgccttgtacacttaccagcgtttcctttttatagtaagttgaaagatagcatattcacttggaccatcacagtgaattcaagtgctgcattaaactcattatactaagaggtatcatgcttgacacctttagggctagtttggtgacaaagcaattgaggaggattgggcgggattgaggaggaaatggactaatttcctcctcaatcccccacaattcccttgtcaccaaactagcccttataggtttttctctactgtagctatacttctctgtatagtgtgacagaaaaggtgctgaaatattcaagcctgtgctctaatagaagtctagatcgtagtactgtccctagatttggtctttcagtatctctggttataggtgtgaactaattctattggtttgtcttaacttttctgatgtaaatttctcatcactcgaatggtttttcgttcacttagcgcacaaaaatgcttaagcatggtcatgtaaacatcaagggtcttaaggattacacataatagctatgcaagggattcgacaatgctaatgttgttgtgttttgcatcatctctcatggatatctcaagagccttctcaagtcttgacacaacttgctccatggatggccgttgcttcttgtggccagtgcataacagagcaagcttcaaactgaggtcaaatgcctccgttgaatactctccattcaacctaggatcagcaaactctgatacattgccatcttggataagtgtagaagcctgggaacaaaagtgacattggcatagcagtattcatgatgttgattgctcgtcttcctgagaggagttggaggagcaccatgccgaagctgtacacatcccctgcagcattcaccctgtggttgtggcggtattctggatcaacatagccaaatgttcctctgacttcagagcttacgtgcgacacacctaagtcgatgactctagagagtccaaaatctgacagcttgggttccatatcaaccccaagaagtatattggttggctgtcatagaaagtccttcagggtatatgtgcaggaaccaaaggccacaagcacttccaagtgctatctgaagcctctgaatccatggaagctcatacacaagaaaacactcctcctgcccgtcacagtaacctcttaatgacacaaggccagccatttgtcagcactcctctgtataccttgcctggaaccacaagatgaaccagttgcacaccataaaggacaacatatacttgaacagtagtctcctcatactcaagggatgccaacgcgacctctgcaagaaaaaaaaacatgtgcaacttcgtattgctattagtgggtaaaaaaacatctatctcagtaacttctatatgcatatggatgtgcaattaattagtgaaattaccaatatcgtttcttgatggttgggacttgctggctcttcttctcctaacactgcagaaaacagctatggccccaattatcaccccagcacagaggcatcctagcaacgcttcgtatcctgttgataaattttgaggagctcaaagcttgaaagatcaagtagaaaggtatgtgcaagagaagtaaaataaaccaacctctctgcatcccctttagcttatggcacttaccggaagaacacaagaatgcttctcgctcaccttgttgttgttctaataatgaagacaagtatgtctccatggacaatctataaccagtcgatgttaccaatgaagcgtgtagtgactgaccattgccgtccaatgcataggcatggaagaagccaaaaacacaaaaataaatcatatcccgtaattaaagtgttaatgactaaccattgccggtcaaggcatagccgcatagaagaag

SEQ ID NO: 24922 - DNA, 3174 bp, Zea Mays
gcagaaaatcgtgtcccgagtccgccgccctacgcctactgctcctcccaccaccaccaaacaaacaccacaccgcgcgccacgcctccgtctgccggcggtgaccgagccagctcatcagcggccaaggagcgggatgccggggccaggagcgcacctgctgtacgctctgtcgggcggtgcggcgctgtctcggctcgccggcccggaccgccgcttcgggccgcaccactgcgccgtctacgcagcgaacgcgttcctcggcccggacctcggctccttcgccgagtggctctgctccttcctcccctcggcctccgccgcgggggacctcgccatggccgccgtgcaccaccccttctactacccgctcctcctcggcctcccgctcgcctgggcctacgcctggctctcccgccgtctgcttcgcgccggcgtcctcgactctccctccggggtaccattaagaaagaggcagtgtttcttgctgatctctgccggctcgctctcccactttttcttggatcacttgtttgaggagaatgggcattctacaatgtacacttggatactgagcactggttggtggaaaggtcgtgctcctatcaatccagatgcagtgctcgtcgtaggacttctttgcacttgcctcatggggggatatgtgtacatcaacagagtgaatcatggaaggtctgcagcagaaaaatcaaaaccaatctttctttctcattctgatgatagccaccctgtactgtatgtggtgtgccagtcagatatacctgcggcaaccccctcaacctgccataggtgaagaagctgatctcggagtgataatatttcttgcgatttatctttttctcccacatggcctgtgcgccctttcgatgaatcaaaaggattatacagatgcactgaatgaattgccacttcaataatgcgtgtcgttattattcatttttcttccagtctgtgcagaatatcagtttggtaacagtctggtttctgcattatgttgtaattagatttagttactacctgaatgattactagtgcacttatgtatagccctgtaattctggaagcatatattattgtggaacaaagctgtatggatggtgctgacttctggtgaaaaagaatttcatctttttcattggtcgcagaggtggatcatatggatttgtattcaaggcacacatgactatatttttcatttggcactagttggtatatgctataaagtgatgatgtctgtcaagctagttatcgtgccttgtacacttaccagcgtttcctttttatagtaagttgaaagatagcatattcacttggaccatcacagtgaattcaagtgctgcattaaactcattatactaagaggtatcatgcttgacacctttagggctagtttggtgacaaagcaattgaggaggattgggcgggattgaggaggaaatggactaatttcctcctcaatcccccacaattcccttgtcaccaaactagcccttataggtttttctctactgtagctatacttctctgtatagtgtgacagaaaaggtgctgaaatattcaagcctgtgctctaatagaagtctagatcgtagtactgtccctagatttggtctttcagtatctctggttataggtgtgaactaattctattggtttgtcttaacttttctgatgtaaatttctcatcactcgaatggtttttcgttcacttagcgcacaaaaatgcttaagcatggtcatgtaaacatcaagggtcttaaggattacacataatagctatgcaagggattcgacaatgctaatgttgttgtgttttgcatcatctctcatggatatctcaagagccttctcaagtcttgacacaacttgctccatggatggccgttgcttcttgtggccagtgcataacagagcaagcttcaaactgaggtcaaatgcctccgttgaatactctccattcaacctaggatcagcaaactctgatacattgccatcttggataagtgtagaagcctgggaacaaaagtgacattggcatagcagtattcatgatgttgattgctcgtcttcctgagaggagttggaggagcaccatgccgaagctgtacacatcccctgcagcattcaccctgtggttgtggcggtattctggatcaacatagccaaatgttcctctgacttcagagcttacgtgcgacacacctaagtcgatgactctagagagtccaaaatctgacagcttgggttccatatcaaccccaagaagtatattggttggctgtcatagaaagtccttcagggtatatgtgcaggaaccaaaggccacaagcacttccaagtgctatctgaagcctctgaatccatggaaggttaccgttgatgcacagctcatacacaagaaaacactcctcctgcccgtcacagtaacctcttaatgacacaaggccagccatttgtcagcactcctctgtataccttgcctggaaccacaagatgaaccagttgcacaccataaaggacaacatatacttgaacagtgtagtctcctcatactcaagggatgccaacgcgacctctgcaagaaaaaaaaacatgtgcaacttcgtattgctattagtgggtaaaaaaacatctatctcagtaacttctatatgcatatggatgtgcaattaattagtgaaattaccaatatcgtttcttgatggttgggacttgctggctcttcttctcctaacactgcagaaaacagctatggccccaattatcaccccagcacagaggcatcctagcaacgcttcgtatcctgttgataaattttgaggagctcaaagcttgaaagatcaagtagaaaggtatgtgcaagagaagtaaaataaaccaacctctctgcatcccctttagcttatggcacttaccggaagaacacaagaatgcttctcgctcaccttgttgttgttctaataatgaagacaagtatgtctccatggacaatctataaccagtcgatgttaccaatgaagcgtgtagtgactgaccattgccgtccaatgcataggcatggaagaagccaaaaacacaaaaataaatcatatcccgtaattaaagtgttaatgactaaccattgccggtcaaggcatagccgcatagaagaag

SEQ ID NO: 24923 - DNA, 3919 bp, Zea Mays
ccgtgacatcgccgggatcccgcccggacctcacccggcgatatgtcgacggcggctcccgcgccgggctccacggccacggtgcgggtatccaacatcccggcctcggccatcgccgcagagctgctcgccttctttgactccgccgtcaccatcgctggcgcgaccttcgcctgcgagatagtcgccgctcaccgcggctggctcagccgcggccacggtttcgtccagtttgattcctccgccgccgccacccacgccatcgacctcgcctcctctggccgcctgccccccttcctcggctcctgcctatccgtctcccccgcccgcgctgacctcctgccccgcgcgcccgacctctccctccgcgctgccagcgcgagcctcattctaggcaaccgcgtcgccgagcgcgagctggaggtggcctactcctgcgacggcgtgcgggccgaggtcatcccgaggatgcggcgtgtggacctctacctgaagcacgattcccagagctacaagcttgaggttctctttgaggacatcaatgagtgctttgggtgccacctcgatgggacgggcgccatcttgctgcagttaaatcaaggtttacagatgatcgctttcatgcatgcaaggaggacgccaaatttgcatgggtcagagcactagatttcacacctaatagctcttttggcgagtgttccactcttgtcctgaaactgagcaaaggtgcatcagtatcatatattcttgaaagtttacccttctcaggagaattaggggaattggccattgcttcgatggatgtgtttggctcctcctccaatgtggttcctcttgttgactgcccaaatggcttttctgtgccttatgaagtactttttcgtctgaactctcttgttcacatggggaagctagttgccaggcatgttaatgctgatctgtttaaagtccttgaagatctgtcaatcgatactttaaggagaatatttgagaaaatgagcaaattaaaatctacctgctatgaacctttgcaattcatcagacatgaggctcatagcatgaatatgagaaagaaagccttgtccaacaagagggagagtggaaaattgatgaggtgttacagaattcacatcacaccatcaaaaatatactgcttggggcctgaggaagaagtttcaaattacgtggttaagtaccattctgagtatgcttctgactttgctcgagttacttttgttgatgaagattggagcaagctttctcccaatgcattgtcagctagaactgaacaaggtttcttttctaaacccttgaaaactggcctgtatcatcgtattctctccattctaaaagaaggattttgcattggccccaaaaaatatgaatttttggccttttcagcaagtcagcttcgtggtaattctgtttggatgtttgcttcaaatagttctctgactgctgagaatataaggaggtggatgggccactttgaagatatccgttcagtctccaagtgtgcagctagaatgggccaactgtttagctcatccaggcaaacatttgaagtctcatcatatgatgtagaagtaattccagatattgaagtcacaactgatggcactaaatacatattttcagatggtatcgggaagatttctactagatttgccagacaagtcgccaaattaattggcttagacccagctcatcctccttctgcttttcaaataaggtatgggggctataaaggagtcatcactattgaccctacatcctttttcaatctttctctgcgacctagtatgaagaagtttgaatcgaagagcactatgctgaacattacaaattggagtaagtctcagccatgttatgtgaaccgtgaaattatctctcttctttcaacattggggataaaggatgaagtatttgaatcgatgcaacaagatgacatgcacgaatcagatggaatgctaacaaataaagaagctgctttgtctgtcctagggaaaattggtggcggtgataccaagacggcagctgatatgcttctgcaaggctatgaaccaagttcagagccttacctattaatgattcttaaagcccatcgggctaataggctgaccgacataagaactcggtgtaagattcatgtccagaaaggccgtgttcttattggttgtttggatgaaacttgcaaattagagtatggccaagtttacatcagaattacaaagaatcacaaggagcagaagtacagtgaacagccgttcttttgcaacgatgatggcaaaacagctgtaattgtaggaaaagttgcaatcacaaaaaacccttgtctccatcctggtgatgtcagagtacttgaagctgtatatgaccctggattggatgctaggggtcttattgattgtgttgtatttcctcagagaggggaaaggcctcatccgaatgaatgctccgggggcgatttggatggcgacctcttctttattacttgggatgacaaactgattccggagaaggttgatgcacctatggactacactgcaacgaggccacgcataatggaccatgctgttacacttgagaagcacttcgtcagttacatgataaacgataccctcggtgccatctccaccgcccacttgatccacgcagaccgtgatccactgaaagctcgcagccccgagtgcgtccagctggccgctctgcactccatggcggtcgacttcgccaagacgggagctccagccgagatgcccctggcgctgaggccccgggagtttccggacttcatggaacggtgggagaggccaatgtacgtctccaacggcgtcctcggcaagctctaccgcgctgccctgcggcacgaggaggacgcagaagcgctcctgcctgcgggcccaccgagctgcgtgtacgacccggacctcgaggtcgccggtttcgacgagttcctggacgcagcggaggagcggtacgaggcgtacgccgagaggctgggcgccctgatgacctactactcggcggagcgcgaggacgagattctgacaggcaacatccggaacaagctggtgtacctgcggcgggacaacaagcgctacttcgagatgaaggaccgcatcatcgccgccgtcgacgcgctgcacgcggaggtgagggggtggctcagggcgtgcaaggaggacgacgcgtcgagggtggcgtcggcgtggtaccacgtgacctaccacccggaccgccgcggggagaagcggttctggagcttcccgtggatcatctgcgacaccctgctggccatcaaggcggcgcgcaggtgccggaagcgggtggaagacgccgccgtgcccatggactgcgacggttcctagacggaggtgccactgtggcagtgaagtgagcctgtgatgcgagtggaaactgtagtaataagatgcagtaccgctgagcgctgattgctgtaaaaagaagttagcgcgggttgtcttgagctcctcctaacaggcgtacgtatggtggaaccgtggaatcatgatttgccgcccttgctgatgactagaagcaggtacggttagctaagccgttacgtatgggtcaccgagttccccggccctaaagttgttgggggcttggggtggctgcttgaccaccctcgagtcgtgacatgttctgtcccccctgcgatcgtctaccaaacctccaacagtccaacgctactactactcatgtgagttttgactttccacaaatacttgacgttttggttaacaaagtcgtggagcttagcagctatcaagagttaaatccagaaacataaacgtcaaaatatgtacagctttgtgttgtaaagtagttgcataagctcttataagtcatcacattgttgagcaccaaaagggtgattattcttattttgtgc

SEQ ID NO: 24924 - DNA, 3695 bp, Zea Mays
ccgtgacatcgccgggatcccgcccggacctcacccggcgatatgtcgacggcggctcccgcgccgggctccacggccacggtgcgggtatccaacatcccggcctcggccatcgccgcagagctgctcgccttctttgactccgccgtcaccatcgctggcgcgaccttcgcctgcgagatagtcgccgctcaccgcggctggctcagccgcggccacggtttcgtccagtttgattcctccgccgccgccacccacgccatcgacctcgcctcctctggccgcctgccccccttcctcggctcctgcctatccgtctcccccgcccgcgctgacctcctgccccgcgcgcccgacctctccctccgcgctgccagcgcgagcctcattctaggcaaccgcgtcgccgagcgcgagctggaggtggcctactcctgcgacggcgtgcgggccgaggtcatcccgaggatgcggcgtgtggacctctacctgaagcacgattcccagagctacaagcttgaggttctctttgaggacatcaatgagtgctttgggtgccacctcgatgggacgggcgccatcttgctgcagttaaatcaaggtttacagatgatcgctttcatgcatgcaaggaggacgccaaatttgcatgggtcagagcactagatttcacacctaatagctcttttggcgagtgttccactcttgtcctgaaactgagcaaaggtgcatcagtatcatatattcttgaaagtttacccttctcaggagaattaggggaattggccattgcttcgatggatgtgtttggctcctcctccaatgtggttcctcttgttgactgcccaaatggcttttctgtgccttatgaagtactttttcgtctgaactctcttgttcacatggggaagctagttgccaggcatgttaatgctgatctgtttaaagtccttgaagatctgtcaatcgatactttaaggagaatatttgagaaaatgagcaaattaaaatctacctgctatgaacctttgcaattcatcagacatgaggctcatagcatgaatatgagaaagaaagccttgtccaacaagagggagagtggaaaattgatgaggtgttacagaattcacatcacaccatcaaaaatatactgcttggggcctgaggaagaagtttcaaattacgtggttaagtaccattctgagtatgcttctgactttgctcgagttacttttgttgatgaagattggagcaagctttctcccaatgcattgtcagctagaactgaacaagcaagtcagcttcgtggtaattctgtttggatgtttgcttcaaatagttctctgactgctgagaatataaggaggtggatgggccactttgaagatatccgttcagtctccaagtgtgcagctagaatgggccaactgtttagctcatccaggcaaacatttgaagtctcatcatatgatgtagaagtaattccagatattgaagtcacaactgatggcactaaatacatattttcagatggtatcgggaagatttctactagatttgccagacaatatgaagaagtttgaatcgaagagcactatgctgaacattacaaattggagtaagtctcagccatgttatgtgaaccgtgaaattatctctcttctttcaacattggggataaaggatgaagtatttgaatcgatgcaacaagatgacatgcacgaatcagatggaatgctaacaaataaagaagctgctttgtctgtcctagggaaaattggtggcggtgataccaagacggcagctgatatgcttctgcaaggctatgaaccaagttcagagccttacctattaatgattcttaaagcccatcgggctaataggctgaccgacataagaactcggtgtaagattcatgtccagaaaggccgtgttcttattggttgtttggatgaaacttgcaaattagagtatggccaagtttacatcagaattacaaagaatcacaaggagcagaagtacagtgaacagccgttcttttgcaacgatgatggcaaaacagctgtaattgtaggaaaagttgcaatcacaaaaaacccttgtctccatcctggtgatgtcagagtacttgaagctgtatatgaccctggattggatgctaggggtcttattgattgtgttgtatttcctcagagaggggaaaggcctcatccgaatgaatgctccgggggcgatttggatggcgacctcttctttattacttgggatgacaaactgattccggagaaggttgatgcacctatggactacactgcaacgaggccacgcataatggaccatgctgttacacttgaggaaattcagaagcacttcgtcagttacatgataaacgataccctcggtgccatctccaccgcccacttgatccacgcagaccgtgatccactgaaagctcgcagccccgagtgcgtccagctggccgctctgcactccatggcggtcgacttcgccaagacgggagctccagccgagatgcccctggcgctgaggccccgggagtttccggacttcatggaacggtgggagaggccaatgtacgtctccaacggcgtcctcggcaagctctaccgcgctgccctgcggcacgaggaggacgcagaagcgctcctgcctgcgggcccaccgagctgcgtgtacgacccggacctcgaggtcgccggtttcgacgagttcctggacgcagcggaggagcggtacgaggcgtacgccgagaggctgggcgccctgatgacctactactcggcggagcgcgaggacgagattctgacaggcaacatccggaacaagctggtgtacctgcggcgggacaacaagcgctacttcgagatgaaggaccgcatcatcgccgccgtcgacgcgctgcacgcggaggtgagggggtggctcagggcgtgcaaggaggacgacgcgtcgagggtggcgtcggcgtggtaccacgtgacctaccacccggaccgccgcggggagaagcggttctggagcttcccgtggatcatctgcgacaccctgctggccatcaaggcggcgcgcaggtgccggaagcgggtggaagacgccgccgtgcccatggactgcgacggttcctagacggaggtgccactgtggcagtgaagtgagcctgtgatgcgagtggaaactgtagtaataagatgcagtaccgctgagcgctgattgctgtaaaaagaagttagcgcgggttgtcttgagctcctcctaacaggcgtacgtatggtggaaccgtggaatcatgatttgccgcccttgctgatgactagaagcaggtacggttagctaagccgttacgtatgggtcaccgagttccccggccctaaagttgttgggggcttggggtggctgcttgaccaccctcgagtcgtgacatgttctgtcccccctgcgatcgtctaccaaacctccaacagtccaacgctactactactcatgtgagttttgactttccacaaatacttgacgttttggttaacaaagtcgtggagcttagcagctatcaagagttaaatccagaaacataaacgtcaaaatatgtacagctttgtgttgtaaagtagttgcataagctcttataagtcatcacattgttgagcaccaaaagggtgattattcttattttgtgc

SEQ ID NO: 24925 - DNA, 2679 bp, Zea Mays
ccgtgacatcgccgggatcccgcccggacctcacccggcgatatgtcgacggcggctcccgcgccgggctccacggccacggtgcgggtatccaacatcccggcctcggccatcgccgcagagctgctcgccttctttgactccgccgtcaccatcgctggcgcgaccttcgcctgcgagatagtcgccgctcaccgcggctggctcagccgcggccacggtttcgtccagtttgattcctccgccgccgccacccacgccatcgacctcgcctcctctggccgcctgccccccttcctcggctcctgcctatccgtctcccccgcccgcgctgacctcctgccccgcgcgcccgacctctccctccgcgctgccagcgcgagcctcattctaggcaaccgcgtcgccgagcgcgagctggaggtggcctactcctgcgacggcgtgcgggccgaggtcatcccgaggatgcggcgtgtggacctctacctgaagcacgattcccagagctacaagcttgaggttctctttgaggacatcaatgagtgctttgggtgccacctcgatgggacgggcgccatcttgctgcagctgacttatgcaccaagaatacacattgcaatttctgggtctacagttaaatcaaggtttacagatgatcgctttcatgcatgcaaggaggacgccaaatttgcatgggtcagagcactagatttcacacctaatagctcttttggcgagtgttccactcttgtcctgaaactgagcaaaggtgcatcagtatcatatattcttgaaagtttacccttctcaggagaattaggggaattggccattgcttcgatggatgtgtttggctcctcctccaatgtggttcctcttgttgactgcccaaatggcttttctgtgccttatgaagtactttttcgtctgaactctcttgttcacatggggaagctagttgccaggcatgttaatgctgatctgtttaaagtccttgaagatctgtcaatcgatactttaaggagaatatttgagaaaatgagcaaattaaaatctacctgctatgaacctttgcaattcatcagacatgaggctcatagcatgaatatgagaaagaaagccttgtccaacaagagggagagtggaaaattgatgaggtgttacagaattcacatcacaccatcaaaaatatactgcttggggcctgaggaagaagtttcaaattacgtggttaagtaccattctgagtatgcttctgactttgctcgagttacttttgttgatgaagattggagcaagctttctcccaatgcattgtcagctagaactgaacaaggtttcttttctaaacccttgaaaactggcctgtatcatcgtattctctccattctaaaagaaggattttgcattggccccaaaaaatatgaatttttggccttttcagcaagtcagcttcgtggtaattctgtttggatgtttgcttcaaatagttctctgactgctgagaatataaggaggtggatgggccactttgaagatatccgttcagtctccaagtgtgcagctagaatgggccaactgtttagctcatccaggcaaacatttgaagtctcatcatatgatgtagaagtaattccagatattgaagtcacaactgatggcactaaatacatattttcagatggtatcgggaagatttctactagatttgccagacaagtcgccaaattaattggcttagacccagctcatcctccttctgcttttcaaataaggtatgggggctataaaggagtcatcactattgaccctacatcctttttcaatctttctctgcgacctagtatgaagaagtttgaatcgaagagcactatgctgaacattacaaattggagtaagtctcagccatgttatgtgaaccgtgaaattatctctcttctttcaacattggggataaaggatgaagtatttgaatcgatgcaacaagatgacatgcacgaatcagatggaatgctaacaaataaagaagctgctttgtctgtcctagggaaaattggtggcggtgataccaagacggcagctgatatgcttctgcaaggctatgaaccaagttcagagccttacctattaatgattcttaaagcccatcgggctaataggctgaccgacataagaactcggtgtaagattcatgtccagaaaggccgtgttcttattggttgtttggatgaaacttgcaaattagagtatggccaagtttacatcagaattacaaagaatcacaaggagcagaagtacagtgaacagccgttcttttgcaacgatgatggcaaaacagctgtaattgtaggaaaagttgcaatcacaaaaaacccttgtctccatcctggtgatgtcagagtacttgaagctgtatatgaccctggattggatgctaggggtcttattgattgtgttgtatttcctcagagaggggaaaggcctcatccgaatgaatgctccgggggcgatttggatggcgacctcttctttattacttgggatgacaaactgattccggagaaggttgatgcacctatggactacactgcaacgaggccacgcataatggaccatgctgttacacttgaggattaaatccatgaaacaggccctgatagggcaataacgagcaca

SEQ ID NO: 24926 - DNA, 2633 bp, Zea Mays
ccgtgacatcgccgggatcccgcccggacctcacccggcgatatgtcgacggcggctcccgcgccgggctccacggccacggtgcgggtatccaacatcccggcctcggccatcgccgcagagctgctcgccttctttgactccgccgtcaccatcgctggcgcgaccttcgcctgcgagatagtcgccgctcaccgcggctggctcagccgcggccacggtttcgtccagtttgattcctccgccgccgccacccacgccatcgacctcgcctcctctggccgcctgccccccttcctcggctcctgcctatccgtctcccccgcccgcgctgacctcctgccccgcgcgcccgacctctccctccgcgctgccagcgcgagcctcattctaggcaaccgcgtcgccgagcgcgagctggaggtggcctactcctgcgacggcgtgcgggccgaggtcatcccgaggatgcggcgtgtggacctctacctgaagcacgattcccagagctacaagcttgaggttctctttgaggacatcaatgagtgctttgggtgccacctcgatgggacgggcgccatcttgctgcagttaaatcaaggtttacagatgatcgctttcatgcatgcaaggaggacgccaaatttgcatgggtcagagcactagatttcacacctaatagctcttttggcgagtgttccactcttgtcctgaaactgagcaaaggtgcatcagtatcatatattcttgaaagtttacccttctcaggagaattaggggaattggccattgcttcgatggatgtgtttggctcctcctccaatgtggttcctcttgttgactgcccaaatggcttttctgtgccttatgaagtactttttcgtctgaactctcttgttcacatggggaagctagttgccaggcatgttaatgctgatctgtttaaagtccttgaagatctgtcaatcgatactttaaggagaatatttgagaaaatgagcaaattaaaatctacctgctatgaacctttgcaattcatcagacatgaggctcatagcatgaatatgagaaagaaagccttgtccaacaagagggagagtggaaaattgatgaggtgttacagaattcacatcacaccatcaaaaatatactgcttggggcctgaggaagaagtttcaaattacgtggttaagtaccattctgagtatgcttctgactttgctcgagttacttttgttgatgaagattggagcaagctttctcccaatgcattgtcagctagaactgaacaaggtttcttttctaaacccttgaaaactggcctgtatcatcgtattctctccattctaaaagaaggattttgcattggccccaaaaaatatgaatttttggccttttcagcaagtcagcttcgtggtaattctgtttggatgtttgcttcaaatagttctctgactgctgagaatataaggaggtggatgggccactttgaagatatccgttcagtctccaagtgtgcagctagaatgggccaactgtttagctcatccaggcaaacatttgaagtctcatcatatgatgtagaagtaattccagatattgaagtcacaactgatggcactaaatacatattttcagatggtatcgggaagatttctactagatttgccagacaagtcgccaaattaattggcttagacccagctcatcctccttctgcttttcaaataaggtatgggggctataaaggagtcatcactattgaccctacatcctttttcaatctttctctgcgacctagtatgaagaagtttgaatcgaagagcactatgctgaacattacaaattggagtaagtctcagccatgttatgtgaaccgtgaaattatctctcttctttcaacattggggataaaggatgaagtatttgaatcgatgcaacaagatgacatgcacgaatcagatggaatgctaacaaataaagaagctgctttgtctgtcctagggaaaattggtggcggtgataccaagacggcagctgatatgcttctgcaaggctatgaaccaagttcagagccttacctattaatgattcttaaagcccatcgggctaataggctgaccgacataagaactcggtgtaagattcatgtccagaaaggccgtgttcttattggttgtttggatgaaacttgcaaattagagtatggccaagtttacatcagaattacaaagaatcacaaggagcagaagtacagtgaacagccgttcttttgcaacgatgatggcaaaacagctgtaattgtaggaaaagttgcaatcacaaaaaacccttgtctccatcctggtgatgtcagagtacttgaagctgtatatgaccctggattggatgctaggggtcttattgattgtgttgtatttcctcagagaggggaaaggcctcatccgaatgaatgctccgggggcgatttggatggcgacctcttctttattacttgggatgacaaactgattccggagaaggttgatgcacctatggactacactgcaacgaggccacgcataatggaccatgctgttacacttgaggattaaatccatgaaacaggccctgatagggcaataacgagcaca

SEQ ID NO: 24927 - DNA, 2711 bp, Zea Mays
actgacagcgtcagccctaggaaaatttctgccccagagtccctgacttgcacctaatgcaccatccacagcaccccataggctgttatcaccatcagcttcatcagtctattgtacccattcatagtgccaccaaacctaccggcaaggtgctgtttaaatcttttaattccagaaggaagaatcttcaaacagaaaatacactgaacaaagtcctttgcagtgtgacagtgtctggccacctcccaaacttccatccagggtcctgtgaccttgcctgctcttcggatcagttgcttgtgcacgaagctcaggagacagcgctgcaatggccttctcagcaagtgccgaagaatctgcagcggccaacgatgtcgacgcaggctcggtgctgtcagcaacagaggatgcaggggctccaccaaccacatgagactcaggaaagatcacctcaacgttatcagcaccacggcggctaccatggatctctgtacagatcaaaggaagggcaaaacaaccactttttggcaccacttaactcatacagagttacagaccatcggcagtcggcactcagcaccacttaactcattcagatgaagagcagaccagaaaacaggagagaaaagagggaaacttggggcgggggaccttcacttgaggagctcatgttgtggttgccttgccggagaacaggagccatcatcggtcaactggaataggatcagctgtcgactctggagcaggagaggagaggagaggtggagaggagatcaagagccgcagccaccggtcttggaacaggggcatcggtttgtatccagtgtaacaggggcgtcggcatagtgtgccttttcggctactgtagctgggccaaaaatagaggcccataaaaaaatctggctggtcgaattgctccttaattggacgatttaattgatcaagtcaacgactagtcggacgaccaaaggatctgatcaaggcgtcctcctagtcgaggacttgctggcgaccaggctgactaatcgcgattaaccagacgatttcaaaacaatgaccactctgccatgcagccaatgtatttgggttactgctatgacgttgttactaacaataacaattttgcaattaatttcggatacacatatttgtgataatcataagcagatgtgtattaatttatggtctcatctttacttctcttgttcataatttagcaaattagcttatctatatatatggacttgcacaccaatgttgttcttctattcaattgtgcactgcactgcatgctcctcctttgcatattacattcttttgttcattgtttttagtttatcttatatatttgtgaagcactaatagcatgtgtgtttccatttattgtgttcattttgttacattctgtcactgcaaacaggtcactacttttcctttttcttctgtaaaatgtaactggttgcttatccctgtggttccactctcactttgcaggcgacaattagaaagtaatagctcacatggagatgatggttcagaccgcctggttgggaagggtgatctgagactgaaactcatgaggaaaggcttgttgccgaggagcaatggtagtgcagaacagaatgacatagatctccgtgaaaagctttctcgaaaccataagttaccaaattatgattctagaggtcatgctgcagaatcaagggctagttatgatatgagagatgagcctccagagttaagttccagatattcttcgagggaggatgtcctagggtcgaggcactcttctgttgtaagtcgagttccttatgcaagaagtgtggatgatttgttaaagttggattattcaagaaaatcctacccgtcatggacagatgatggtttgaggcacagatcacctgaaaggatgttaaaagttcggagcgatatgtatccacggatagcttatgatcagattaggcccatgccaccccttaggtctgctggttcctcgagacctcaaagttttattacaagagatgctcctgacacgtcaaggagccaaccatatgctggcaaatccaccatttctattgatacagtacagaggactaatggaatcactccatctactgcagctctgcctaaggcccctgttatggatgaagccccgcttacagttactggattgctgaactcgttgggtcttgagaagtggatttgtctgcattgaggcaaatgggagagagcgacctcaaagacatgggggtaccaatgggcccgaggaagaagattctccttgcagttggccctcagtccaaataacgccaaagatgagcaaacagggtgtgggtctaagaacatttgttggcaaccgaaaatattggtgtaagaactccagatataagatattgtatacccaattatccatagtggcggtcttaatccacccttttgttgccgatgacgtttcgtgccgtagttgacatgtaagtctgttcggtcagctgttaatccaggttctatcgttctcggtctgtccggtgcctgccttactgtttttttctttttctttttttaaacagcctgccttactgttattattgcttcgaaatgggacgatacgccatatgcttggtgtacccattgatagttggcttgggaattgatgatccattcagttcttgtgtcagaaatcacaaggcgacgatactttacataagatctta

SEQ ID NO: 24928 - DNA, 2515 bp, Zea Mays
cttgtcctaacttatgttctttgaggttgaaaagatgaaccagcactgacagcgtcagccctaggaaaatttctgccccagagtccctgacttgcacctaatgcaccatccacagcaccccataggctgttatcaccatcagcttcatcagtctattgtacccattcatagtgccaccaaacctaccggcaaggtgctgtttaaatcttttaattccagaaggaagaatcttcaaacagaaaatacactgaacaaagtcctttgcagtgtgacagtgtctggccacctcccaaacttccatccagggtcctgtgaccttgcctgctcttcggatcagttgcttgtgcacgaagctcaggagacagcgctgcaatggccttctcagcaagtgccgaagaatctgcagcggccaacgatgtcgacgcaggctcggtgctgtcagcaacagaggatgcaggggctccaccaaccacatgagactcaggaaagatcacctcaacgttatcagcaccacggcggctaccatggatctctgtacagatcaaaggaagggcaaaacaaccactttttggcaccacttaactcatacagagttacagaccatcggcagtcggcactcagcaccacttaactcattcagatgaagagcagaccagaaaacaggagagaaaagagggaaacttggggcgggggaccttcacttgaggagctcatgttgtggttgccttgccggagaacaggagccatcatcggtcaactggaataggatcagctgtcgactctggagcaggagaggagaggagaggtggagaggagatcaagagccgcagccaccggtcttggaacaggggcatcggtttgtatccagtgtaacaggggcgtcggcatagtgtgccttttcggctactgtagctgggccaaaaatagaggcccataaaaaaatctggctggtcgaattgctccttaattggacgatttaattgatcaagtcaacgactagtcggacgaccaaaggatctgatcaaggcgtcctcctagtcgaggacttgctggcgaccaggctgactaatcgcgattaaccagacgatttcaaaacaatgaccactctgccatgcagccaatgtatttgggttactgctatgacgttgttactaacaataacaattttgcaattaatttcggatacacatatttgtgataatcataagcagatgtgtattaatttatggtctcatctttacttctcttgttcataatttagcaaattagcttatctatatatatggacttgcacaccaatgttgttcttctattcaattgtgcactgcactgcatgctcctcctttgcatattacattcttttgttcattgtttttagtttatcttatatatttgtgaagcactaatagcatgtgtgtttccatttattgtgttcattttgttacattctgtcactgcaaacaggtcactacttttcctttttcttctgtaaaatgtaactggttgcttatccctgtggttccactctcactttgcaggcgacaattagaaagtaatagctcacatggagatgatggttcagaccgcctggttgggaagggtgatctgagactgaaactcatgaggaaaggcttgttgccgaggagcaatgaatcaagggctagttatgatatgagagatgagcctccagagttaagttccagatattcttcgagggaggatgtcctagggtcgaggcactcttctgttatgatggtttgaggcacagatcacctgaaaggatgttaaaagttcggagcgatatgtatccacggatagcttatgatcagattaggcccatgccaccccttaggtctgctggttcctcgagacctcaaagttttattacaagagatgctcctgacacgtcaaggagccaaccatatgctggcaaatccaccatttctattgatacagtacagaggactaatggaatcactccatctactgcagctctgcctaaggcccctgttatggatgaagccccgcttacagttactggattgctgaactcgttgggtcttgagaagtatgttgttctctttcaggctgaggaggtggatttgtctgcattgaggcaaatgggagagagcgacctcaaagacatgggggtaccaatgggcccgaggaagaagattctccttgcagttggccctcagtccaaataacgccaaagatgagcaaacagggtgtgggtctaagaacatttgttggcaaccgaaaatattggtgtaagaactccagatataagatattgtatacccaattatccatagtggcggtcttaatccacccttttgttgccgatgacgtttcgtgccgtagttgacatcctgccttactgttattattgcttcgaaatgggacgatacgccatatgcttggtgtacccattgatagttggcttgggaattgatgatccattcagttcttgtgtcagaaatcacaaggcgacgatactttacataagatctta

SEQ ID NO: 24929 - DNA, 1376 bp, Zea Mays
ggacgatcagctggtcggtccagggaaccgaccaggcgacaattagaaagtaatagctcacatggagatgatggttcaggtgatgataaaccttaacttgtcaattctctagggcttgaactgaagatatctggcactacttactctgttgaattggcgtgcaaaatatttgaagaccgcctggttgggaagggtgatctgagactgaaactcatgaggaaaggcttgttgccgaggagcaatggtagtgcagaacagaatgacatagatctccgtgaaaagctttctcgaaaccataagttaccaaattatgattctagaggtcatgctgcagaatcaagggctagttatgatatgagagatgagcctccagagttaagttccagatattcttcgagggaggatgtcctagggtcgaggcactcttctgttgtaagtcgagttccttatgcaagaagtgtggatgatttgttaaagttggattattcaagaaaatcctacccgtcatggacagatgatggtttgaggcacagatcacctgaaaggatgttaaaagttcggagcgatatgtatccacggatagcttatgatcagattaggcccatgccaccccttaggtctgctggttcctcgagacctcaaagttttattacaagagatgctcctgacacgtcaaggagccaaccatatgctggcaaatccaccatttctattgatacagtacagaggactaatggaatcactccatctactgcagctctgcctaaggcccctgttatggatgaagccccgcttacagttactggattgctgaactcgttgggtcttgagaagtatgttgttctctttcaggctgaggaggtggatttgtctgcattgaggcaaatgggagagagcgacctcaaagacatgggggtaccaatgggcccgaggaagaagattctccttgcagttggccctcagtccaaataacgccaaagatgagcaaacagggtgtgggtctaagaacatttgttggcaaccgaaaatattggtgtaagaactccagatataagatattgtatacccaattatccatagtggcggtcttaatccacccttttgttgccgatgacgtttcgtgccgtagttgacatgtaagtctgttcggtcagctgttaatccaggttctatcgttctcggtctgtccggtgcctgccttactgtttttttctttttctttttttaaacagcctgccttactgttattattgcttcgaaatgggacgatacgccatatgcttggtgtacccattgatagttggcttgggaattgatgatccattcagttcttgtgtcagaaatcacaaggcgacgatactttacataagatctta

SEQ ID NO: 24930 - DNA, 1340 bp, Zea Mays
atcagagcagattctcccgcaagagagaacagggccgatgatctggtagaggttgtcaaaaggagggctatgtctgatgatattaatgacggtgaattgcctttgttggggaaaaagcgatctgtgagggataggttaggaagtaatgtgtctgattctgatttttatgaaagccagcagagaaacaaacggcgacaattagaaagtaatagctcacatggagatgatggttcagaccgcctggttgggaagggtgatctgagactgaaactcatgaggaaaggcttgttgccgaggagcaatggtagtgcagaacagaatgacatagatctccgtgaaaagctttctcgaaaccataagttaccaaattatgattctagaggtcatgctgcagaatcaagggctagttatgatatgagagatgagcctccagagttaagttccagatattcttcgagggaggatgtcctagggtcgaggcactcttctgttgtaagtcgagttccttatgcaagaagtgtggatgatttgttaaagttggattattcaagaaaatcctacccgtcatggacagatgatggtttgaggcacagatcacctgaaaggatgttaaaagttcggagcgatatgtatccacggatagcttatgatcagattaggcccatgccaccccttaggtctgctggttcctcgagacctcaaagttttattacaagagatgctcctgacacgtcaaggagccaaccatatgctggcaaatccaccatttctattgatacagtacagaggactaatggaatcactccatctactgcagctctgcctaaggcccctgttatggatgaagccccgcttacagttactggattgctgaactcgttgggtcttgagaagtatgttgttctctttcaggctgaggaggtggatttgtctgcattgaggcaaatgggagagagcgacctcaaagacatgggggtaccaatgggcccgaggaagaagattctccttgcagttggccctcagtccaaataacgccaaagatgagcaaacagggtgtgggtctaagaacatttgttggcaaccgaaaatattggtgtaagaactccagatataagatattgtatacccaattatccatagtggcggtcttaatccacccttttgttgccgatgacgtttcgtgccgtagttgacatcctgccttactgttattattgcttcgaaatgggacgatacgccatatgcttggtgtacccattgatagttggcttgggaattgatgatccattcagttcttgtgtcagaaatcacaaggcgacgatactttacataagatctta

SEQ ID NO: 24931 - DNA, 1934 bp, Zea Mays
cagcgaccagcgacgcaacaacttccgttccgtccccggcgccggtaaacgacgtctcactttcaacgcacatccccaatcttcattcccctgaaaccctagccgctccgtccggtcgcgccactcccttcgcctctctaaggttccggcggaagccgtcctctgcgtgactgcgtcggctgcggtggagatggcttcctcgtcggcgtcttcgaggcaccaggtcaccatcaccctcggccgcagcggtcaggttgtcaaaaggagggctatgtctgatgatattaatgacggtgaattgcctttgttggggaaaaagcgatctgtgagggataggttaggaagtaatgtgtctgattctgatttttatgaaagccagcagagaaacaaacggtatatttcttggatctgctatttccattgtttgtataggcttcaaagttttgaactacatttgtaatatacaaaggattctttccacatcattaggcacagggtttgttcctctatggtaattcacccccaattatgaaccgtggcttcagcttcatcacaatgttttaatgacacaaaactaaatgctttttatagtttatacactaatgtcaactctttcactctcaatgtttacaggtcggacgatcagctggtcggtccagggaaccgaccaggtgactaatcgtgattaggcgacaattagaaagtaatagctcacatggagatgatggttcagaccgcctggttgggaagggtgatctgagactgaaactcatgaggaaaggcttgttgccgaggagcaatggtagtgcagaacagaatgacatagatctccgtgaaaagctttctcgaaaccataagttaccaaattatgattctagaggtcatgctgcagaatcaagggctagttatgatatgagagatgagcctccagagttaagttccagatattcttcgagggaggatgtcctagggtcgaggcactcttctgttgtaagtcgagttccttatgcaagaagtgtggatgatttgttaaagttggattattcaagaaaatcctacccgtcatggacagatgatggtttgaggcacagatcacctgaaaggatgttaaaagttcggagcgatatgtatccacggatagcttatgatcagattaggcccatgccaccccttaggtctgctggttcctcgagacctcaaagttttattacaagagatgctcctgacacgtcaaggagccaaccatatgctggcaaatccaccatttctattgatacagtacagaggactaatggaatcactccatctactgcagctctgcctaaggcccctgttatggatgaagccccgcttacagttactggattgctgaactcgttgggtcttgagaagtatgttgttctctttcaggctgaggaggtggatttgtctgcattgaggcaaatgggagagagcgacctcaaagacatgggggtaccaatgggcccgaggaagaagattctccttgcagttggccctcagtccaaataacgccaaagatgagcaaacagggtgtgggtctaagaacatttgttggcaaccgaaaatattggtgtaagaactccagatataagatattgtatacccaattatccatagtggcggtcttaatccacccttttgttgccgatgacgtttcgtgccgtagttgacatgtaagtctgttcggtcagctgttaatccaggttctatcgttctcggtctgtccggtgcctgccttactgtttttttctttttctttttttaaacagcctgccttactgttattattgcttcgaaatgggacgatacgccatatgcttggtgtacccattgatagttggcttgggaattgatgatccattcagttcttgtgtcagaaatcacaaggcgacgatactttacataagatctta

SEQ ID NO: 24932 - DNA, 1915 bp, Zea Mays
cagcgaccagcgacgcaacaacttccgttccgtccccggcgccggtaaacgacgtctcactttcaacgcacatccccaatcttcattcccctgaaaccctagccgctccgtccggtcgcgccactcccttcgcctctctaaggttccggcggaagccgtcctctgcgtgactgcgtcggctgcggtggagatggcttcctcgtcggcgtcttcgaggcaccaggtcaccatcaccctcggccgcagcggtcaggttgtcaaaaggagggctatgtctgatgatattaatgacggtgaattgcctttgttggggaaaaagcgatctgtgagggataggttaggaagtaatgtgtctgattctgatttttatgaaagccagcagagaaacaaacggtatatttcttggatctgctatttccattgtttgtataggcttcaaagttttgaactacatttgtaatatacaaaggattctttccacatcattaggcacagggtttgttcctctatggtaattcacccccaattatgaaccgtggcttcagcttcatcacaatgttttaatgacacaaaactaaatgctttttatagtttatacactaatgtcaactctttcactctcaatgtttacaggtcggacgatcagctggtcggtccagggaaccgaccaggtgactaatcgtgattaggttggcccgggtcgccctgtatatttcaggagctatatataacaacaacaacaacctaataatatataattatataggcgacaattagaaagtaatagctcacatggagatgatggttcagaccgcctggttgggaagggtgatctgagactgaaactcatgaggaaaggcttgttgccgaggagcaatggtagtgcagaacagaatgacatagatctccgtgaaaagctttctcgaaaccataagttaccaaattatgattctagaggtcatgctgcagaatcaagggctagttatgatatgagagatgagcctccagagttaagttccagatattcttcgagggaggatgtcctagggtcgaggcactcttctgttgtaagtcgagttccttatgcaagaagtgtggatgatttgttaaagttggattattcaagaaaatcctacccgtcatggacagatgatggtttgaggcacagatcacctgaaaggatgttaaaagttcggagcgatatgtatccacggatagcttatgatcagattaggcccatgccaccccttaggtctgctggttcctcgagacctcaaagttttattacaagagatgctcctgacacgtcaaggagccaaccatatgctggcaaatccaccatttctattgatacagtacagaggactaatggaatcactccatctactgcagctctgcctaaggcccctgttatggatgaagccccgcttacagttactggattgctgaactcgttgggtcttgagaagtatgttgttctctttcaggctgaggaggtggatttgtctgcattgaggcaaatgggagagagcgacctcaaagacatgggggtaccaatgggcccgaggaagaagattctccttgcagttggccctcagtccaaataacgccaaagatgagcaaacagggtgtgggtctaagaacatttgttggcaaccgaaaatattggtgtaagaactccagatataagatattgtatacccaattatccatagtggcggtcttaatccacccttttgttgccgatgacgtttcgtgccgtagttgacatcctgccttactgttattattgcttcgaaatgggacgatacgccatatgcttggtgtacccattgatagttggcttgggaattgatgatccattcagttcttgtgtcagaaatcacaaggcgacgatactttacataagatctta

SEQ ID NO: 24933 - DNA, 1290 bp, Zea Mays
cgcacctgcgtctgtgtgcagcgaccagcgacgcaacaacttccgttccgtccccggcgccggttccggcggaagccgtcctctgcgtgactgcgtcggctgcggtggagatggcttcctcgtcggcgtcttcgaggcaccaggtcaccatcaccctcggccgcagcggtcaggttgtcaaaaggagggctatgtctgatgatattaatgacggtgaattgcctttgttggggaaaaagcgatctgtgagggataggttaggaagtaatgtgtctgattctgatttttatgaaagccagcagagaaacaaacggcgacaattagaaagtaatagctcacatggagatgatggttcagaccgcctggttgggaagggtgatctgagactgaaactcatgaggaaaggcttgttgccgaggagcaatgaatcaagggctagttatgatatgagagatgagcctccagagttaagttccagatattcttcgagggaggatgtcctagggtcgaggcactcttctgttatgatggtttgaggcacagatcacctgaaaggatgttaaaagttcggagcgatatgtatccacggatagcttatgatcagattaggcccatgccaccccttaggtctgctggttcctcgagacctcaaagttttattacaagagatgctcctgacacgtcaaggagccaaccatatgctggcaaatccaccatttctattgatacagtacagaggactaatggaatcactccatctactgcagctctgcctaaggcccctgttatggatgaagccccgcttacagttactggattgctgaactcgttgggtcttgagaagtatgttgttctctttcaggctgaggaggtggatttgtctgcattgaggcaaatgggagagagcgacctcaaagacatgggggtaccaatgggcccgaggaagaagattctccttgcagttggccctcagtccaaataacgccaaagatgagcaaacagggtgtgggtctaagaacatttgttggcaaccgaaaatattggtgtaagaactccagatataagatattgtatacccaattatccatagtggcggtcttaatccacccttttgttgccgatgacgtttcgtgccgtagttgacatcctgccttactgttattattgcttcgaaatgggacgatacgccatatgcttggtgtacccattgatagttggcttgggaattgatgatccattcagttcttgtgtcagaaatcacaaggcgacgatactttacataagatctta

SEQ ID NO: 24934 - DNA, 1692 bp, Zea Mays
cacgcacctgcgtctgtgtgcagcgaccagcgacgcaacaacttccgttccgtccccggcgccggtaaacgacgtctcactttcaacgcacatccccaatcttcattcccctgaaaccctagccgctccgtccggtcgcgccactcccttcgcctctctaaggttccggcggaagccgtcctctgcgtgactgcgtcggctgcggtggagatggcttcctcgtcggcgtcttcgaggcaccaggtcaccatcaccctcggccgcagcggtcaggttgtcaaaaggagggctatgtctgatgatattaatgacggtgaattgcctttgttggggaaaaagcgatctgtgagggataggttaggaagtaatgtgtctgattctgatttttatgaaagccagcagagaaacaaacggcgacaattagaaagtaatagctcacatggagatgatggttcagaccgcctggttgggaagggtgatctgagactgaaactcatgaggaaaggcttgttgccgaggagcaatggtagtgcagaacagaatgacatagatctccgtgaaaagctttctcgaaaccataagttaccaaattatgattctagaggtcatgctgcagaatcaagggctagttatgatatgagagatgagcctccagagttaagttccagatattcttcgagggaggatgtcctagggtcgaggcactcttctgttgtaagtcgagttccttatgcaagaagtgtggatgatttgttaaagttggattattcaagaaaatcctacccgtcatggacagatgatggtttgaggcacagatcacctgaaaggatgttaaaagttcggagcgatatgtatccacggatagcttatgatcagattaggcccatgccaccccttaggtctgctggttcctcgagacctcaaagttttattacaagagatgctcctgacacgtcaaggagccaaccatatgctggcaaatccaccatttctattgatacagtacagaggactaatggaatcactccatctactgcagctctgcctaaggcccctgttatggatgaagccccgcttacagttactggattgctgaactcgttgggtcttgagaagtatgttgttctctttcaggctgaggaggtggatttgtctgcattgaggcaaatgggagagagcgacctcaaagacatgggggtaccaatgggaacatgattcagcaagcaccaacattcttcagggcccgaggaagaagattctccttgcagttggccctcagtccaaataacgccaaagatgagcaaacagggtgtgggtctaagaacatttgttggcaaccgaaaatattggtgtaagaactccagatataagatattgtatacccaattatccatagtggcggtcttaatccacccttttgttgccgatgacgtttcgtgccgtagttgacatgtaagtctgttcggtcagctgttaatccaggttctatcgttctcggtctgtccggtgcctgccttactgtttttttctttttctttttttaaacagcctgccttactgttattattgcttcgaaatgggacgatacgccatatgcttggtgtacccattgatagttggcttgggaattgatgatccattcagttcttgtgtcagaaatcacaaggcgacgatactttacataagatctta

SEQ ID NO: 24935 - DNA, 1422 bp, Zea Mays
cacgcacctgcgtctgtgtgcagcgaccagcgacgcaacaacttccgttccgtccccggcgccggtaaacgacgtctcactttcaacgcacatccccaatcttcattcccctgaaaccctagccgctccgtccggtcgcgccactcccttcgcctctctaaggttccggcggaagccgtcctctgcgtgactgcgtcggctgcggtggagatggcttcctcgtcggcgtcttcgaggcaccaggtcaccatcaccctcggccgcagcggtcaggcgacaattagaaagtaatagctcacatggagatgatggttcagaccgcctggttgggaagggtgatctgagactgaaactcatgaggaaaggcttgttgccgaggagcaatggtagtgcagaacagaatgacatagatctccgtgaaaagctttctcgaaaccataagttaccaaattatgattctagaggtcatgctgcagaatcaagggctagttatgatatgagagatgagcctccagagttaagttccagatattcttcgagggaggatgtcctagggtcgaggcactcttctgttgtaagtcgagttccttatgcaagaagtgtggatgatttgttaaagttggattattcaagaaaatcctacccgtcatggacagatgatggtttgaggcacagatcacctgaaaggatgttaaaagttcggagcgatatgtatccacggatagcttatgatcagattaggcccatgccaccccttaggtctgctggttcctcgagacctcaaagttttattacaagagatgctcctgacacgtcaaggagccaaccatatgctggcaaatccaccatttctattgatacagtacagaggactaatggaatcactccatctactgcagctctgcctaaggcccctgttatggatgaagccccgcttacagttactggattgctgaactcgttgggtcttgagaagtatgttgttctctttcaggctgaggaggtggatttgtctgcattgaggcaaatgggagagagcgacctcaaagacatgggggtaccaatgggcccgaggaagaagattctccttgcagttggccctcagtccaaataacgccaaagatgagcaaacagggtgtgggtctaagaacatttgttggcaaccgaaaatattggtgtaagaactccagatataagatattgtatacccaattatccatagtggcggtcttaatccacccttttgttgccgatgacgtttcgtgccgtagttgacatcctgccttactgttattattgcttcgaaatgggacgatacgccatatgcttggtgtacccattgatagttggcttgggaattgatgatccattcagttcttgtgtcagaaatcacaaggcgacgatactttacataagatctta

SEQ ID NO: 24936 - DNA, 1353 bp, Zea Mays
cacgcacctgcgtctgtgtgcagcgaccagcgacgcaacaacttccgttccgtccccggcgccggttgtcaaaaggagggctatgtctgatgatattaatgacggtgaattgcctttgttggggaaaaagcgatctgtgagggataggttaggaagtaatgtgtctgattctgatttttatgaaagccagcagagaaacaaacggcgacaattagaaagtaatagctcacatggagatgatggttcagaccgcctggttgggaagggtgatctgagactgaaactcatgaggaaaggcttgttgccgaggagcaatggtagtgcagaacagaatgacatagatctccgtgaaaagctttctcgaaaccataagttaccaaattatgattctagaggtcatgctgcagaatcaagggctagttatgatatgagagatgagcctccagagttaagttccagatattcttcgagggaggatgtcctagggtcgaggcactcttctgttgtaagtcgagttccttatgcaagaagtgtggatgatttgttaaagttggattattcaagaaaatcctacccgtcatggacagatgatggtttgaggcacagatcacctgaaaggatgttaaaagttcggagcgatatgtatccacggatagcttatgatcagattaggcccatgccaccccttaggtctgctggttcctcgagacctcaaagttttattacaagagatgctcctgacacgtcaaggagccaaccatatgctggcaaatccaccatttctattgatacagtacagaggactaatggaatcactccatctactgcagctctgcctaaggcccctgttatggatgaagccccgcttacagttactggattgctgaactcgttgggtcttgagaagtatgttgttctctttcaggctgaggaggtggatttgtctgcattgaggcaaatgggagagagcgacctcaaagacatgggggtaccaatgggcccgaggaagaagattctccttgcagttggccctcagtccaaataacgccaaagatgagcaaacagggtgtgggtctaagaacatttgttggcaaccgaaaatattggtgtaagaactccagatataagatattgtatacccaattatccatagtggcggtcttaatccacccttttgttgccgatgacgtttcgtgccgtagttgacatcctgccttactgttattattgcttcgaaatgggacgatacgccatatgcttggtgtacccattgatagttggcttgggaattgatgatccattcagttcttgtgtcagaaatcacaaggcgacgatactttacataagatctta

SEQ ID NO: 24937 - DNA, 1014 bp, Zea Mays
cagcgaccagcgacgcaacaacttccgttccgtccccggcgccggtaaacgacgtctcactttcaacgcacatccccaatcttcattcccctgaaaccctagccgctccgtccggtcgcgccactcccttcgcctctctaaggttccggcggaagccgtcctctgcgtgactgcgtcggctgcggtggagatggcttcctcgtcggcgtcttcgaggcaccaggtcaccatcaccctcggccgcagcggtcaggttgtcaaaaggagggctatgtctgatgatattaatgacggtgaattgcctttgttggggaaaaagcgatctgtgagggataggttaggaagtaatgtgtctgattctgatttttatgaaagccagcagagaaacaaacggtatatttcttggatctgctatttccattgtttgtataggcttcaaagttttgaactacatttgtaatatacaaaggattctttccacatcattaggcacagggtttgttcctctatggtaattcacccccaattatgaaccgtggcttcagcttcatcacaatgttttaatgacacaaaactaaatgctttttatagtttatacactaatgtcaactctttcactctcaatgtttacaggtcggacgatcagctggtcggtccagggaaccgaccaggtgactaatcgtgattaggttggcccgggtcgccctgtatatttcaggagctatatataacaacaacaacaacctaataatatataattatataggtactacactgctatgaaggcaaatgggtagtaatactgtaataggcaaatctgaaacttaatattgatgcaaagttcatactaaaactgaaagtagataaatttcttatgacctattgacctcatctaaagttctaaacattcaaacaagcaaactcacagttattagagtgtagagacctagagcagaagatcattgtccaactgaaaggcatcagcagcagctccccctccaactgattcagatt

SEQ ID NO: 24938 - DNA, 523 bp, Zea Mays
ctcgcgatgacgtagttgccatgtcgcctcctcgcctagctgcattcgtccctcacccagccacttcccctctcttgtcttgctcgtcacgaatgtcatcctcgccgtggcgcacacaattgttgtagcagctgtcgaacagtctcggttcctcatccctggctgggttttgtttggatcgcgcagcagcaacatggcaactacgtcatcgcgaggcgaagcatccagttcatctccaccgcgaaaaacactgatgaggtcacacctaggtctcgaaggggatgcgaaaccagaaacagtgccagaggagaccgtacttgtagttgtcgacatcttgcgccgttccacagcgctccgcgtattagaggatggtaagctcgttatctctaccttttcgtccatacgtgttatgcagaaatcgtgtagtagtatttagttaaaattgattttgaattaagatggtgtagaagcttaatttcattcagcagaatatggcaatgttccatttccattttcagcaatg

SEQ ID NO: 24939 - DNA, 1347 bp, Zea Mays
agatcacgggtataccgaacagccgggttccgccaccaacccaaccgtgggggtgccttacggcctacgggccggagcagcgctcgggagccgcggcacggaggcatcgacgccgttgagctcgaggcgaccggcggctcgcggccccgccacagcggtgctgtggcagtgtggcttcttctggtttctgcgggctcagcgcggaggcctattgcaggattaaatggcaaataggccaagatggatgatgaagtacgaaaagggtcttgttgatatacttcatgagaacaacacttcacattatcgtacccaaaacggttggagaacagaggggtggaggaaaattgttagggatttcaatgtcctattcctgaaggggcacaaaaatcaccttccagcatacctcagaatgttggtggaaacgttggtgatggaggcaacaatatcagcacagccccagacttgtctgaaagacctagtggaacaattaacacaagcgttaatgaggcatggaataatatcagcctacttaagcaaacagcattgggaccccaaggtatagacaatctcgacacgctgcaaaatcgtgatgaagaggtgctggaacggctacagcatggctcggaccggaggccgcagagagctgatgaacaggcacagtcaagttcttgcgtagaactgcagagagacaggcgcaagaagcggaaggccccagacatccagcagatcatggagacctatatgaatttcagaatgaagcaacctcgcgtcaaacaacgaagagcaaaggacgctgaccagttcacgatttcaaggtattagcctctgatgttttcaaggaccctgagaacagggagacctttctttcgtatgaacccaggctgcgcaccttgtggctgaagagggaagttggcaagctactctccttatagaagtggcagcccttgcttgttttgtttgctacccgtgcctaggcttcatttaacaaactctactagtgacttaacttgttccatgcacagtacgtcactacgctgcttagtcattcatgatcaatgatgtgcttgctgcgtgtagtgcttccaaaattttgcatctgtgtcaatacactgttaaaaatgcgacagaatgcttgtttcttgacagcagatatttaggatcgttctgcatgactgagcgtcaacagcagaggttgtagagccactcaagcgcagtatatactttcggcctaaactttctgcaacaatatcgttcttagcaaactgtctattcattctcaacaatcagctcaaacaaagcgtctagacttggcaccgcaaaaaaaaacatttcaagaaactgaaaata

SEQ ID NO: 24940 - DNA, 1192 bp, Zea Mays
agatcacgggtataccgaacagccgggttccgccaccaacccaaccgtgggggtgccttacggcctacgggccggagcagcgctcgggagccgcggcacggaggcatcgacgccgttgagctcgaggcgaccggcggctcgcggccccgccacagcggtgctgtggcagtgtggcttcttctggtttctgcgggctcagcgcggaggtcctattcctgaaggggcacaaaaatcaccttccagcatacctcagaatgttggtggaaacgttggtgatggaggcaacaatatcagcacagccccagacttgtctgaaagacctagtggaacaattaacacaagcgttaatgaggcatggaataatatcagcctacttaagcaaacagcattgggaccccaaggtatagacaatctcgacacgctgcaaaatcgtgatgaagaggtgctggaacggctacagcatggctcggaccggaggccgcagagagctgatgaacaggcacagtcaagttcttgcgtagaactgcagagagacaggcgcaagaagcggaaggccccagacatccagcagatcatggagacctatatgaatttcagaatgaagcaacctcgcgtcaaacaacgaagagcaaaggacgctgaccagttcacgatttcaaggtattagcctctgatgttttcaaggaccctgagaacagggagacctttctttcgtatgaacccaggctgcgcaccttgtggctgaagagggaagttggcaagctactctccttatagaagtggcagcccttgcttgttttgtttgctacccgtgcctaggcttcatttaacaaactctactagtgacttaacttgttccatgcacagtacgtcactacgctgcttagtcattcatgatcaatgatgtgcttgctgcgtgtagtgcttccaaaattttgcatctgtgtcaatacactgttaaaaatgcgacagaatgcttgtttcttgacagcagatatttaggatcgttctgcatgactgagcgtcaacagcagaggttgtagagccactcaagcgcagtatatactttcggcctaaactttctgcaacaatatcgttcttagcaaactgtctattcattctcaacaatcagctcaaacaaagcgtctagacttggcaccgcaaaaaaaaacatttcaagaaactgaaaata

SEQ ID NO: 24941 - DNA, 1420 bp, Zea Mays
agatcacgggtataccgaacagccgggttccgccaccaacccaaccgtgggggtgccttacggcctacgggccggagcagcgctcgggagccgcggcacggaggcatcgacgccgttgagctcgaggcgaccggcggctcgcggccccgccacagcggtgctgtggcagtgtggcttcttctggtttctgcgggctcagcgcggaggcctattgcaggattaaatggcaaataggccaagatggatgatgaagtacgaaaagggtcttgttgatatacttcatgagaacaacacttcacattatcgtacccaaaacggttggagaacagaggggtggaggaaaattgttagggatttcaatgatatgcccaatgcacggaagtaccaaagcaagagctttccattgcttgactcactagaactgttatttgatggtcctattcctgaaggggcacaaaaatcaccttccagcatacctcagaatgttggtggaaacgttggtgatggaggcaacaatatcagcacagccccagacttgtctgaaagacctagtggaacaattaacacaagcgttaatgaggcatggaataatatcagcctacttaagcaaacagcattgggaccccaaggtatagacaatctcgacacgctgcaaaatcgtgatgaagaggtgctggaacggctacagcatggctcggaccggaggccgcagagagctgatgaacaggcacagtcaagttcttgcgtagaactgcagagagacaggcgcaagaagcggaaggccccagacatccagcagatcatggagacctatatgaatttcagaatgaagcaacctcgcgtcaaacaacgaagagcaaaggacgctgaccagttcacgatttcaaggtattagcctctgatgttttcaaggaccctgagaacagggagacctttctttcgtatgaacccaggctgcgcaccttgtggctgaagagggaagttggcaagctactctccttatagaagtggcagcccttgcttgttttgtttgctacccgtgcctaggcttcatttaacaaactctactagtgacttaacttgttccatgcacagtacgtcactacgctgcttagtcattcatgatcaatgatgtgcttgctgcgtgtagtgcttccaaaattttgcatctgtgtcaatacactgttaaaaatgcgacagaatgcttgtttcttgacagcagatatttaggatcgttctgcatgactgagcgtcaacagcagaggttgtagagccactcaagcgcagtatatactttcggcctaaactttctgcaacaatatcgttcttagcaaactgtctattcattctcaacaatcagctcaaacaaagcgtctagacttggcaccgcaaaaaaaaacatttcaagaaactgaaaata

SEQ ID NO: 24942 - DNA, 3831 bp, Zea Mays
ggaagcaaagggtgccaaggcggcgtcaactcggaaggttttacttgagagtaccataaactgaattatgtaactggcattaaattctgacagaggtcttataagtgaaatggtatatgttaccatctccttcaataactcatgtaaggaaacatttgcttaaagaaatactaagaggttaggaacttctcatactaaaaaaagaagaaataagaggttaccaaaccaaataacattcagatgattcaacggttgagaaattaaaccatactgaatatttgctttcttgaaagcagagcaaaaggaattaaaccatactttggcaagccattgaacaatgcctttcctaattcctcatcgtaataaactggagagcttttcccatgcatcactccagaaggagcacggataatctttcctgcatattcatgtcataaatgtttgagggacaaaagcagaggccattaaaaaactagcgacctggtatgaatataaatgttacctccaaatgcctctccaatgcattgcagacccatgcaaactccaaaaattgggatggttgggcctaattcaagaacagtctgcaatgatattcccgaatcttgtggttcacctacagaacacatatgaaagtattttattacacccaaagaagcttaaacactcgcgatattcaataagattaaacttaccaggtcctggagaaataagtattccccttgggttcttcctataataaatgaaaagggagcatgttcaacaaactgagattagttgaaacaaagtataacggtatttttttctatttggtattgggaaaaatacaaagcagctatatcaaaatcgaaaatgttctcagagaactaattataccttctcacatcttctatggtcagttcatcattgcggtatacttcgaagttcaatccaagctcccccatatacttcatcattaaacacaaaatgtcagctaagacacgttttgctcatagcatatgtttcttttcagctaagacacgttttgctcatagcatatgtttcttttctttctcctctatattatgttatgtttcaataaagtgtaatatgaaattgagtttcaaaaaaaaggataaatagatgccacctttgaggtacaatagaaattgcattagttggcataatcgtcattattagaaagatctactctcacaaagcaacatgtcatcctacatcgcacttgtcaaaatagaaattgcagcattgcaaaaccaaattagctatgccaagtgaacttgtcagtattaacaaagtcaacattccaaaccaaaccatgtcatgtaccctggtaactggtaagttacttgacaaaatagtaaggaaaatttacagaggattcaatggtactgatatgtctcacaaaacacgcttctgaacaaacaaaccaattgcctagaaatatgtcactgacgtctgcatacatatttcttaaccatgttgtccttctacttattatatagtattcttcaattaatgggcactgctgctgaagagccaagagacgccggagcgccatttccaaagtttttacttccacacaaaatgtcactgtaacattcaaatgcatatttgcccaccaaaaataaaaaaacatttttcaaacagcatagattttatagctttattgcaaagaagtatgccaatatcaatgttaacgactgttttaaaaaggccatctaaacctgactaaccgctggctgacagcttcccacctagtgcttaattgccacctatgcatatgcctaaccctgatcaggaactaggagacactccattggcaacctgatcttaaccattttgatatctaaccccatgaaaaaaaatgtacactaaggtgctgtttggttggattattttgtagtgtgatccgatcacatcgctactcgattgcaataattattgtttgtttcacgtatgttgtaatcggattgcatgggaatagatacaggcgtccagcacgttgattatgcctgatcctgggcggtaaccgcttacgctgtcgtcagcgtcaaaacaaacttgctttccgattgccgcaacgggaccaaacaaaataagtaaattgttgactcacttcccgttccattacctatgttgcctttgtagaaacaaacagtacctaagttccagtgcaaagctattctcggcagaaaaaagaaaggtagcaaagacttgaagatactcaacggaaatgggcacagaatctgttaagtcggtagctaccaaacaaacatagtgttcgtgttttaagtccgaattttgcaataaaggaacgttataagcatactgtggaaaagggaacacgataacacatgatccacacaacaccaagaataaagaatgctgttatgattctggttttaccgttatattatcgacctaaaagtgcaattttcaagcaagtgtgcctactgcctacaaaaggtttcttatgtaactttgtttacactttacagagagtgacaacatagtcgtttaggacgtgaatgtgacagatgggtatttccccccaagtatggatgcctactaatagcagatacaaattccatcaaaaggttcataatgtataacagcatcatggaatacattcctagcatccttgtgatcattatatcctatcagttgatctcattacatgcacacttgaaaaaagcacgatgcaattgcaaagcgacaataaaaatcataacattgtcacaaacaaacaaatttactaaaaacacagacaaaaaattgcatgtatatgcatataatgcatcttactttggaactaagacggttcgctggggttgcacctagagctctaggggcaccctaagccgcaatggttgcctctaaagaataccccaaatttatgcgtaggtcctcctacccctaaatctagggtgttctttctctttcccctaattttttatactctaaactaagaattaaacatagaattaatatgtacgtgtcgttttagactatgacaaatacatatgtaaaaaactaattaaaaatatattaggaatatggtgtattatgcatagggagatgaatttagagggaatcactacgggtgttcgtatttagagggatggaatcttttaaagggtgtgaagaaatgggctttagggggatgatatggagggaaccgctgcggatagtctaacatcacgagtgaaacgtgaaaggaactattccagttctgcacagccaggggcagatctaaaccccgggccacccggtccgtggcccggggcatgatccatacaagtccatataaatttatttgatccagtctaaaaaatagttaatataaaaaggaagggaaggaaatttaatggacttgacttggccctcggcataagaaaattctagattcaccctgcacacagcaattcatcttgcaaatattcttgaactaacatcgtgagcaacacatgaaagaaactatcccacctgggcatagcaattcatcttgcaacaaccaaacactacacaactcaacgagggaagatgtccaaacaaatgtccagaaatgcttgctgcagctgcaaccagatgtgtaaccgcaaacaggaactatggtacgtgcaaagtatgaacccaccccacctgtgtggccacagcccgcaggcagaggcagccgccactcatctccagtcgcaaggataccgcacgcacagatcacatataacccacaccatatttcggaagggaacaggccccccacaacaggaaacatagaacgacaaattacctggcagaggttgtatgtgaagctgtcgtagttgtcgatgacgatga

SEQ ID NO: 24943 - DNA, 966 bp, Zea Mays
cagcactttcttgagcaccaactaaataaagaatttgcaacgaaggggagcccagcttttctagattttcttccaaggtgaaaaacggatggttcccaagaagaaggctgcataggcagaccgactggtgtattctcctgaatctgtcaacttccatctaaaagtatctggaacatcttgttgaagaactaccccttgcacttggtcccaaacctggacatattccacaagtaatgttttatgaattactgcaaagccattcagaagtgtagccaagcttgagggtttcccctaccgtcgatgacagggccatactcctgaggttcaagcccatactgcaacatggtctctccaatctcagtagcctctataacggatgaccaaatcaaggattcagaacaccaacgggtcagaatggcagtcatatgcacacacaccaactgtcatgagaaacgctacataatgaactgacctccatgtaccagtgtctgggacggtgatggtctcctcctgctcccttttcatctccacatggcgcgggcgcagatcagaaattcagaatcatgcattaatgcacacctttttttaattgaaaaaaatgtggtgtttgtcatgttctcagatttgcaagtagagctcgtgcacatgtccatatcggctgcacagtgcaacatacaggctcatggctttccagtttagcgatcgctatgctatgagtactgttgctatactcagattctcattttctgcaaaagacgcccgcggatgctatggtgagaagtcgtgaaagactgaagaacgatctcaaactaagtttacaaaagagctgatatgtcatccaactatgaactaccgaatatactcgtgcatgaattgaatttatttttctcacatgtaactcaatatttagaacataaaatctcgtggccactggccagtcgagtaaaaggactggcaacttgtgct

SEQ ID NO: 24944 - DNA, 1242 bp, Zea Mays
ctagatctagatctgagatgtcttagcaattggtctatctggtgcatggctgtggttagtttccgtatttggcaatttagagactaaaacggaataaaatgaatggactaaaaattagtccctagaaaccaaacgcccccttaatttgcttgtcatcatggttgaatatgtagtgtagtatcaagttcaatctttacttaaccaaagtgaggcacatggatattttatttattattagcttcccctatattttttttctcgaacaacgcaagagatctgcgtatcatttcatttaagaagagaaaaacaaaagtccgacaaagccagaccggatacaacaacacactcacccacccacctaaggacgtgccaagcggtccaaaaaaacacgaccagaaaagatctaacaaggatcaaccattgttggaaagcgacccagccaagagctcctgcagcttagaagctccagtcatgcaccataaattgcattcttgtgcaattctcctaagaagttttatgaattactgcaaagccattcagaagtgtagccaagcttgagggtttcccctaccgtcgatgacagggccatactcctgaggttcaagcccatactgcaacatggtctctccaatctcagtagcctctataacggatgaccaaatcaaggattcagaacaccaacgggtcagaatggcagtcatatgcacacacaccaactgtcatgagaaacgctacataatgaactgacctccatgtaccagtgtctgggacggtgatggtctcctcctgctcccttttcatctccacatggcgcgggcgcagatcagaaattcagaatcatgcattaatgcacacctttttttaattgaaaaaaatgtggtgtttgtcatgttctcagatttgcaagtagagctcgtgcacatgtccatatcggctgcacagtgcaacatacaggctcatggctttccagtttagcgatcgctatgctatgagtactgttgctatactcagattctcattttctgcaaaagacgcccgcggatgctatggtgagaagtcgtgaaagactgaagaacgatctcaaactaagtttacaaaagagctgatatgtcatccaactatgaactaccgaatatactcgtgcatgaattgaatttatttttctcacatgtaactcaatatttagaacataaaatctcgtggccactggccagtcgagtaaaaggactggcaacttgtgct

SEQ ID NO: 24945 - DNA, 765 bp, Zea Mays
gccgctgaccctccgccgcccgtttctccaccatgttttatgaattactgcaaagccattcagaagtgtagccaagcttgagggtttcccctaccgtcgatgacagggccatactcctgaggttcaagcccatactgcaacatggtctctccaatctcagtagcctctataacggatgaccaaatcaaggattcagaacaccaacgggtcagaatggcagtcatatgcacacacaccaactgtcatgagaaacgctacataatgaactgacctccatgtaccagtgtctgggacggtgatggtctcctcctgctcccttttcatctccacatggcgcgggcgcagatcagaaattcagaatcatgcattaatgcacacctttttttaattgaaaaaaatgtggtgtttgtcatgttctcagatttgcaagtagagctcgtgcacatgtccatatcggctgcacagtgcaacatacaggctcatggctttccagtttagcgatcgctatgctatgagtactgttgctatactcagattctcattttctgcaaaagacgcccgcggatgctatggtgagaagtcgtgaaagactgaagaacgatctcaaactaagtttacaaaagagctgatatgtcatccaactatgaactaccgaatatactcgtgcatgaattgaatttatttttctcacatgtaactcaatatttagaacataaaatctcgtggccactggccagtcgagtaaaaggactggcaacttgtgct

SEQ ID NO: 24946 - DNA, 1633 bp, Zea Mays
accatatcattgggccgcgggactcggcgacaggccttttgtagaccgcagccggcaccatctcttgccgcaccccccattcgaacgccggagctcgacaaggacgaccgacgacgcacgcggaggttacctctcgccccccctctcctccgtccctcggagtctcctcctgtcttgatttcggatccggcgtactgcaaattttgaaaactgaactgtaagatggcatcagcagagctttcccgtgaggaaaatgtgtacatggcgaagctcgctgagcaggcggagaggtacgaggagatggttgagttcatggagaaggtagccaagactgttgactcggaggagctcactgtggaggagcgaaacctcttgtctgttgcatacaagaacgtcattggagcccgccgcgcctcatggcgcatcatctcctccatcgagcagaaggaggagggccgaggcaatgaggaccgagtaacactcatcaaggattatcgtggcaagattgagactgagctgaccaagatctgtgatggcatcctcaagctgcttgagacccatcttgtgccgtcttccactgcccccgagtccaaggtcttctatctcaagatgaagggtgattactacagataccttgctgagttcaagactggagctgagagaaaggacgccgctgagaacacgatggtggcatacaaggctgcccaggacattgctctggctgagcttgctccaactcaccctattaggcttggactggcacttaacttctcagtgttctactatgagattctgaactcacctgatcgcgcctgcagtcttgcaaagcaggcttttgacgaggccatctcggaactggacaccctgagcgaggagtcctacaaggacagcactttgatcatgcagctccttcgtgataacttgaccctatggacctctgacatctcggaggaccctgctgaagagattagggaggcgcccaagcgggactcgagtgaggggcagtaaagccggctttatgtgcctagaaactagtagctagtgtttgctgctgtcgaatgacactatgcaatgtgatctggaacctggtttcttgggtgcgacgcttgtagccgtgttatgactgtcgtccgtaaaatttgggggctccccgtaagggatgctgcctggcaaggcctcggtgtcccacctcgtctgtggcgtggggcgctggagcccggtctggttgggttgggaagccctttaaactgttgtcacttgcattttaccttttccatcgctgtttattgtgagtggtcctatatcaatggctggtctcagtggtctatacgtatgctttttggttctcttgattcctcacagggtgagtgggggcatgagcatttctctgtctcatctcaatgatgtaagttttctgtttggtgtctcgttccaagatgacttcagaatccgtaaatctctgaagtctaaacgctctatctaaacctttggattcgattacaattgtagatatagaaatctgtagaagggtgcaattcagaatactttgccatgaaatgaatatccttcttgtgagactctgtattaagactaaaacagctcaaattgatagagattctgtgattccttccct

SEQ ID NO: 24947 - DNA, 2413 bp, Zea Mays
gtttttcgggtcatgttgcagcatcccatgtctcaccatgagaagaaacggcaaattgcccgtcggatgaacaatgggcaatttttggtggttgccatcgttctacgtagttggacttttggtggttgccatcgttctacaaaggctcagacagatttaaccaaattaggccaaggtttacagcttagaaccaagatagggtaggaatgccatttttttcctgcctacatcgtaccatctcttgtaggacttaaactgaagccctttcatccaaggtctggtgactctggtccgatagaatatgccatcttttctaggatcagagtatacccttctgtactctggaattgcttagacagctctgaagattatcggaaaacaaaggttagtgctgcccgcaggacgcagacaactggtctacatcgaagtcatcctgacataagttatttatagagaagataaaataccaaacaaatatgcaggactaaattagtttgtgtgggttatttcctctttaaagatccaaatggtcaagtttttatataaactatcccattagcaaagtcagcatacaccttaatacagtcaaatttcatttgcaaaatagaaaacaatgtatggtaggatttacggtttcaaaaaaagtggctgcaaatgtgcaattaatacaaactagtactctgaacattaagcacaaaacacagatggttcatatgccaaaagtggccctccaagcaattttttttttactggaggaagccaaaacctcaggctaatttcaaccctgaaatacaaacatcctgagacaaaagtgataggagatacgaaaagacacagtggtcagcaggaaacacagtacctggtctaagctcccataatcccatcctctgaactggagagatcttggaagatcagcagccatacttcagtctatagtccaagaatttatattgaacctttgaagattattatagcctttagctaaatcctaaaaaggttaaaaccatcagcagtttcatgcataagcttgttccagcaagttcatcaccaatctctgacttgtcctgtttcgtccctcaagacgcatgcgtcattaggatttcacatgctctgggattatttagctccattgagatgtcagcacttgtatgtgagaagtgtagataacagcaataaattacataatcaaagcatgccaatacacgtccagcttcatatcattagataaaattgtttcttaatttaagtatgtgtctgaaataaaatatcaacacaagatgaagaggttttgtatttgccttaattgagttcatacagtcatttctcgtcttgttattttgtactccctccgtcccaaaatattagtcgttttagcattttactagattcatacaatacttaatgtatgtgttttatattatatatagattcattgtcattcatttaaatatagacataatttcaagggctaaaacgactaatattttgggacggagggagtatataatatcatttcttgattcaaacaatagcatgccaacatatctacttcagttatttcataaaggcatacaatttactccgctaaaagttccaccacttattagcaactttttatatcagcaaccttttggattctctgggcgtggcattacttaactgtgctttcacattcaatagttctggcaaagggaggcagcaagcttgagacaacaactgcacaacttgcaagaaaatcatcgttgatgggacaagatctttctggactaggtgtcaagggacttcaaaatctagaaaatcagctagagatgagcatttgttgcatccggacaaaaaaggaccaactcttggttgacgaaattcacgaactgaatcgaaagggaagtctcatccaacaagacaacatgggattacacagaaaggtcaacctaattcgtcaagaaaatgctgaattatataagaagctctatgagaaagaagcagaaggtgaagtcaaccgagattcaacaactccgtacaactttgtagttgcagagggtgccaacgttcctatccatcttgagcttaatattccactgcaagaaaatggtgttgagcaacctgtggctcctaaattagggttgcaattaaatcaatgaagacatgcaggacattgcctttgttctcattgtccttgtagtctgcaactcaaagcagcctaaaatgattggttgtaacaggcctaaaaacatagcaagacaaataaagtatgcatgccagagacagtggcaatggtagtgcaaatctatctcaaataacttgtgttatattgaataatccagcaaatggtttgttttttacacgttatgcaagtttgtttgaccaaaatggtatgtaacatgtacaaatttccaagtgaacttattgaaaaaat

SEQ ID NO: 24948 - DNA, 1173 bp, Zea Mays
aagagactcctctcttatcccgtcgtcctcttctctcgcctccaataattcgtaacccttctccttccaggccgggctcctgctggccggagttcccatctccctctttccttctcggttactatccgtgaagtctgcttgcgccgtgtgtgcgtgtgagaccggacgcagcttaacgatggggcgtggcaagatagtgatccgccggatcgacaactccacgagccggcaggtgacgttctccaagcggcggaacgggatcttcaagaaggcaagggagctcgccatcctctgcgacgcagaggtcgggttggtcatcttctccagcaccggtcgtctctatgaatacgccagcacaagcataaagtcagtgattgatcgatatggtcgagcaaaggaggaggagcatgtagcagaccccaacacagagcttaagttctggcaaagggaggcagcaagcttgagacaacaactgcacaacttgcaagaaaatcatcggcagttgatgggacaagatctttctggactaggtgtcaagggacttcaaaatctagaaaatcagctagagatgagcatttgttgcatccggacaaaaaaggaccaactcttggttgacgaaattcacgaactgaatcgaaagggaagtctcatccaacaagacaacatgggattacacagaaaggtcaacctaattcgtcaagaaaatgctgaattatataagaagctctatgagaaagaagcagaaggtgaagtcaaccgagattcaacaactccgtacaactttgtagttgcagagggtgccaacgttcctatccatcttgagcttaatattccactgcaagaaaatggtgttgagcaacctgtggctcctaaattagggttgcaattaaatcaatgaagacatgcaggacattgcctttgttctcattgtccttgtagtctgcaactcaaagcagcctaaaatgattggttgtaacaggcctaaaaacatagcaagacaaataaagtatgcatgccagagacagtggcaatggtagtgcaaatctatctcaaataacttgtgttatattgaataatccagcaaatggtttgttttttacacgttatgcaagtttgtttgaccaaaatggtatgtaacatgtacaaatttccaagtgaacttattgaaaaaat

SEQ ID NO: 24949 - DNA, 748 bp, Zea Mays
ggcacaagtttgttgttcctcttatccgcggaggaagaacgttggctcgacaccatgctcccaatggccgtccaccccacgagcacgccgtccctgtcgccgcgcgcccgcgtctccccgcccaggccttccacctctctggccgccacctcgtcctcgccctgctctcgcatcgtcagtttcaagagcaggaggctgccacttcgctctgtccgcagcgtcgtcgccgctgccgctgccgccgctgcagaggaagaagagaataaggtggtggtacctgagaggcaggacccgatgctggtgctcaagttcatctggatggagaagaacatcggcatagctctcgaccaattggttcctggctatggaagcatcccgttaagcccatactacttttggccgcgaaaagacgcgtgggaggagcttagagcgaagttggaagagaaagagtggatctcacagaagcagatgatcatccttctcaaccaggccaccgatatcatcaacctctggcagcagggtggcgggagcctctcgacatgacttgtgttttgttggttaattggtttccttacatgccctctctgttgttaattttgaagttatggtacataatgtagatcagtcgaatctgttctcacgtatggtttttttacatggaaatgatcttgtgatttatcttagttattacgtgtatcagtcggttttttgttgggaaaatcaagaaacacaaataaaatccatttcg

SEQ ID NO: 24950 - DNA, 1359 bp, Zea Mays
ctcagtgctggcaattgctgcctgcgctcgtagtcactctcacagtgcccccccgccctgctgccagagaaccagaaggaaaggaggatcccgagcagtcaattgccctgatcctcccccccaccctggggtagtaagagaaagagcgaggctgaattgctgtgaggcaggcgagggtggttgtgtgtgtgtgtgttgctgcgctgcgcaggctcagtgcgggcgatggggcgatcgccgtgctgcgacaaggaggggctcaagaagggcccgtggacgccggaggaggaccagaagctgctcgcctacattgagcagcacggccacggctgctggcgctcgctgcccgccaaagccgggctgcagcggtgcggcaagagctgccgcctccggtggacgaactacctccggccggacatcaagcggggcaagttcagcctgcaggaggagcagaccatcatccagctccacgctctgctcggcaacaggtggtcggcgatcgcgacgcacctcccgaaacgcaccgacaacgagatcaagaactactggaacacgcacctcaagaagcggctggccaagatgggcatcgacccggtcacgcacaagccgcgctccgacgcgctggggacgggcggcgggggaggcgccgcgggcgcgcagcacgccaaggccgcggcgcacctcagccacacggcgcagtgggagagcgccaggctcgaggccgaggcgcgcctggcgcgcgaggccaggctgcgcgcgctcgcggcctccgcctcggcgccgccgcagatgcccgccgccgccgcgcaccggctcgactcgcccacgtccacgttgagcttctccgagagcgccgcgctcgcctcggtcctgcaggaggcgcacggcgccgcggcggcggcggccgcggccgcgcgcgccgccatgcagcccatgcaggcgtacgaggaggcgtgcaaggagcacgagcagcagcagtggggcgatcacgtcgtcgatgtcgccgacgcaggcttcgccgcggcggggttcacgggcctgcttctcgacggctccttgagccagcatgatctgaggccggcgccggcgacgacgacgagggacgacgaggcggacgccggcctgcacgagacggaggaggagaagagctactgggacagcataatgaacctggtgaactcgtcgtcgttgccgacgactctccggcgatggagttctgctgactcgtgagccctggacacatgcatgtccgccggcatgtggccgttcaaatgacacagtaaatagctagctatttcggaacaataagatcgaactactaatgttgatggttaaatcgcgttctcgtgttaaatctga

SEQ ID NO: 24951 - DNA, 981 bp, Zea Mays
aaccagagccaacagagcaacgcccaggccccaggcacacactacacgaaccaggcaaccagctgggaggaaccctagcggaacactgtgcaggtgacagcggcgcgctaccggtgacgggggatacggcggcatcgtccccctcggtccctcctccatcccccgcgcggcggcgccagcagccggcctgcagaaccatagcaacactttggtgcgcttaagatgtccatcctccgatcctttctcccaatagtagcaagatcaaatggttggagatgcttttctactgggattccttctgatatgatagcggaccttaataaggaaatggagtcaatatttggcgaacctccatcatccagtcctttgggctcaagtccgtccccccagcagccagtggaggattcaccactagtgcttacccatactgatagcagcggacaggccaatatggttgacgtctctcccaaagaagacagtaagagagtcgctatagctagctgcagggttttgctaggccaaaaggtgttcaatttggtggcatctaacgagatttcgaaaggtgatgtccttactgttgcaaagattgctggaataactggtgcaaagcaaaccagcaatcttatacccttgtgccacaacattaatctttcacatgttcgtgttgatctcactctaaatgaagaggactctagtgtcgtgatagaaggggaagccacaaccagcggaaagacgggggttgagatggaagcattgagtgctgtagccattgctggccttacagtttatgacatgtgcaaagctgcttcaaaggacatttgtataacagatgtctgtctccaacataagtctggagggaagagcggaagctgggccaggaattaaaaggttaaattgttgctctgaggatatgaactgcaagcatgattccggcatctataggaacagcacataggccgacagaagatagacggaacggag

SEQ ID NO: 24952 - DNA, 805 bp, Zea Mays
tgagtcgctgtgcattattcatcgaagagtgcttgtgatatgcttcgccgcatgcactctcaactacgcatccatggcgatcctcggctacctcatgtacggcgacgacgtcaagtcccaggtgacgctgaacctgcccgagggcaaggtcgtctcgaagctagcgatctacaccacgctgatcaaccccttctccaagtacgccctgatggtgacgccgctctcaacggcagtggaggagaagctgctcgccgccggccgcggcggcaagagtagtaggtccgtcagcgtgctggtcaggactctgctggtcgtcaccacggtcgtcgtcgcgctcgcggtgcccttcttcggccacctgatggcgctcgtcggctcgctgctcagcgtcatggcctcgatgctgctcccctgcatcttctacctcaagatctttggcgcggcgcgctgcggcagggcggaagtcgcgcttgtcgccaccattattgttctgggttccgtggttcttgcgactgggacgtacgcctctgtgaagaagattgttcaggattactgaagacgagatgtctggaaatgtcggtggcagtgtcacagtcattgttggcgttcttttgccgcgatcgacagtcccatatctcaacatcagcagattaggtgaaccaattagaaggtgttctttaaaaaatcagttagaagatgtttgtagacaaagtaaggagagacggaaggaacagtgatgtactgaaaacataatagggtgatacgcttctatattggcgtgagctactattttatcttttatctt

SEQ ID NO: 24953 - DNA, 1713 bp, Zea Mays
tgttctgttcgcttctgctcccaccgcgtgcttgcgtggcgctgccccagcctgctagctagcctgcaacggaaggggccggataagatggcagatggtggggcggcgtcgcgcggccctcccgacggctcgccgccggccgcgctgctgctgctgcagcagcccctcctccacgcctacgaggcccgcaaggacccggcggcgtgcggccgggaggcgcacgggcacggcttcggcccggaccccgacggcgccggcttcggcggaagtccgatcttcgtgcggacctgcttcaatggcctttacggcctctccggcgtcgggctgctgtccatcccgtacgcgctgtcggagggcgggtggctgagcctggcgctgctgctcctcgtcgcggccgtctgctgctacacgggcctgctcctgcagcggtgcatggacgcgtccccagccgtgcgcgggtacccggacatcggcgccctggcgttcgggcgcggcggccgcctcgccgcgtccgcgttcctctacgccgagctctacctcgtcgccatcggcttcctcatcctggagggggacaacctggacaagctgttcccgggcaccagcctcagcctcggcctccgcggcgccgccctcgtggtctccgggaagcagctcttcgtcgtcctcgtcgccctcgtcatcctgcccaccacgtggctccggagcctcggcgtgctcgcctacgtgtccgccagcggcgtgctcgcgtcggccgtcgtcgtcgtctgcgtgctgtggaccgcgctggccgacggcgtcggcttccgggccagggggaggatgctcaacgtcagcggcctccccactgctctcggcctctacaccttctgctactgcggccatgccatcttcccaacgctctgcatctccatgaaagaaaagaaaaggttctccagggtgcttgtgatatgcttcgccgcatgcactctcaactacgcatccatggcgatcctcggctacctcatgtacggcgacgacgtcaagtcccaggtgacgctgaacctgcccgagggcaaggtcgtctcgaagctagcgatctacaccacgctgatcaaccccttctccaagtacgccctgatggtgacgccgctctcaacggcagtggaggagaagctgctcgccgccggccgcggcggcaagagtagtaggtccgtcagcgtgctggtcaggactctgctggtcgtcaccacggtcgtcgtcgcgctcgcggtgcccttcttcggccacctgatggcgctcgtcggctcgctgctcagcgtcatggcctcgatgctgctcccctgcatcttctacctcaagatctttggcgcggcgcgctgcggcagggcggaagtcgcgcttgtcgccaccattattgttctgggttccgtggttcttgcgactgggacgtacgcctctgtgaagaagattgttcaggattactgaagacgagatgtctggaaatgtcggtggcagtgtcacagtcattgttggcgttcttttgccgcgatcgacagtcccatatctcaacatcagcagattaggtgaaccaattagaaggtgttctttaaaaaatcagttagaagatgtttgtagacaaagtaaggagagacggaaggaacagtgatgtactgaaaacataatagggtgatacgcttctatattggcgtgagctactattttatcttttatctt

SEQ ID NO: 24954 - DNA, 1921 bp, Zea Mays
gaccatgagtcataataaaaatgctttaaaatagaaacattgagacataaaagaatatattgtcaagaatgatatagaaacgcttcaaaatcaaatggaaaaatagaaaaaaaaaatcaaaaccatgaggtgataataaaaatgtttcgaaatggaaacttagaaattaaaaagaacattgtcaagaatgatatagaacattagaaatgcttccaaaacaaaatgaagaaaaaataaaactttaaaagttttattgtcaagaatgctatagaaatgattcaaaaatcaaaatcaataaataagggattcgaaatggaagggacttagaaattaaaaataattgtcaaaaatgggatttgaaccaatgccctttcagttcggtacctaaaactgatactttaaacactcgaccatcttaactagttgacttacatgcagattattaaaataatagtatattacatcattacgtttggcaaaacatctgttctcctacttaaacagaaaggacagaaccctgagccggaacaaaatggcggcgctcataaaccctatataccgccgactcgccgccttcgcctgccgccggatctctgcaccggcgaaagacacaattccagtttggtggatgcgagtggaggattcagcgagatgcttgcctctacacggaggtgctatgtatttggaggcaaaggtggtgtggggaaaacaagcatggcggcgtcgcttgctgtgaagtttgccaaccatggtgaaccaacagctattgtttcgacggaaccatctccgtcactcggtgatttatttgaacaagacatgggtgttggcggcaaaactgtacgcatcactggatttgactctctttttgcagttgaggctggtcagttcaagataaagggagaacctgaagatcttggatcttttatcaacaatttacttggaaagatggggcttggaacacattctgatattatgtctatgattagagagatgctggatggaatgccccctggacttgaagaagcgcttgtactatcaaaggtgataaaatctattgacgtgcaagaggccgatatacttcggcgtttagtgctggatgctccatccactggacatacacttaagcttctgtcagcttctgattggattgaaatgttccttactttgagcattaagggcataaaagtggcttcgtccatgccatcgtttaatatgtatcttgaggacgtgcaattcatctctgccaggctagaggaactaaggcagcaggttcgcagagtgcgtgagattttgtttgatccacaatcaacagaattcatcgttgtgacaattccaacgatgatggcagttactgagtcatcaaggtttcacgagtcattaaagaaggatggtgcacacacaagaaggctcgtcataaatcaggtgttgccaccgtctgcgtcggactgcagattctgtgctgcaaaacggagggaagaagcacgtgccttccgtgcgatactggaggaccgagaactcggcggcctgaagctgatccaggctccgctccttgatatggaggtgaaaggcgtccctgcactccgattcctcagcgattcagtgtggaagtagcgagaaacactaggtcaaataaaagattaatctctgtcggtctgttcggattctttcatttggttggagttagaatctagttcatgaatttggcctagaatctggcattcgaccacgttctatcactcttctcaagtatagacctgtgtcaaattcagagggcaagaaatggtagtagtttttttttttttggtcacagcttatactagttcacaacagcacaccaatggataaccctcgcttgacgcttgtgttagtatctgttttctgaaatgccgagggataagatggaatgaactcagcattcagt

SEQ ID NO: 24955 - DNA, 2471 bp, Zea Mays
gaccatgagtcataataaaaatgctttaaaatagaaacattgagacataaaagaatatattgtcaagaatgatatagaaacgcttcaaaatcaaatggaaaaatagaaaaaaaaaatcaaaaccatgaggtgataataaaaatgtttcgaaatggaaacttagaaattaaaaagaacattgtcaagaatgatatagaacattagaaatgcttccaaaacaaaatgaagaaaaaataaaactttaaaagttttattgtcaagaatgctatagaaatgattcaaaaatcaaaatcaataaataagggattcgaaatggaagggacttagaaattaaaaataattgtcaaaaatgggatttgaaccaatgccctttcagttcggtacctaaaactgatactttaaacactcgaccatcttaactagttgacttacatgcagattattaaaataatagtatattacatcattacgtttggcaaaacatctgttctcctacttaaacagaaaggacagaaccctgagccggaacaaaatggcggcgctcataaaccctatataccgccgactcgccgccttcgcctgccgccggatctctgcaccggcggtagagaagcccgtgctgcccctcgtgtatcaccggaacttgcagcaaagacacaattccagtttggtggatgcgagtggaggattcagcgagatgcttgcctctacacggaggtgctatgtatttggaggcaaaggtggtgtggggaaaacaagcatggcggcgtcgcttgctgtgaagtttgccaaccatggtgaaccaacagctattgtttcgacggaaccatctccgtcactcggacatgggtgttggcggcaaaactgtacgcatcactggatttgactctctttttgcagttgaggctggtcagttcaagataaagggagaacctgaagatcttggatcttttatcaacaatttacttggaaagatggggcttggaacacattctgatattatgctgaatgcagcaactataaagttcaagctatatgggcgtgtttggatggcagcctcccatgcaactgcctggcaggcaaacgatcctagccacaggcataggaaatcgaacgctcggcattgttgcctgggccagacaagaaagtgacgccaccatccaaacaaaccctttttctttgttggccaagtgtatattgattgttccactgatcttctctttattgatattgtgacctgagataaatggagatgcttgaactttcctcggggttattagtttcatatccttgtttttgttctttagcacgtatcaccttatatcagttccttagcattgttgcttagtggtcagttgatccagcataacacttacatttttcgtttgatgctgtctaatgccaaggatattgtcccaaataaagtatttattttctgttgctcgagaagagaagttttctttcttttaaattatttatagatcacattacctgtgcatgcatttgtcctttcatggttgcaaagtctatgattagagagatgctggatggaatgccccctggacttgaagaagcgcttgtactatcaaaggtgataaaatctattgacgtgcaagaggccgatatacttcggcgtttagtgctggatgctccatccactggacatacacttaagcttctgtcagcttctgattggattgaaatgttccttactttgagcattaagggcataaaagtggcttcgtccatgccatcgtttaatatgtatcttgaggacgtgcaattcatctctgccaggctagaggaactaaggcagcaggttcgcagagtgcgtgagattttgtttgatccacaatcaacagaattcatcgttgtgacaattccaacgatgatggcagttactgagtcatcaaggtttcacgagtcattaaagaaggatggtgcacacacaagaaggctcgtcataaatcaggtgttgccaccgtctgcgtcggactgcagattctgtgctgcaaaacggagggaagaagcacgtgccttccgtgcgatactggaggaccgagaactcggcggcctgaagctgatccaggctccgctccttgatatggaggtgaaaggcgtccctgcactccgattcctcagcgattcagtgtggaagtagcgagaaacactaggtcaaataaaagattaatctctgtcggtctgttcggattctttcatttggttggagttagaatctagttcatgaatttggcctagaatctggcattcgaccacgttctatcactcttctcaagtatagacctgtgtcaaattcagagggcaagaaatggtagtagtttttttttttttggtcacagcttatactagttcacaacagcacaccaatggataaccctcgcttgacgcttgtgttagtatctgttttctgaaatgccgagggataagatggaatgaactcagcattcagt

SEQ ID NO: 24956 - DNA, 1956 bp, Zea Mays
gaccatgagtcataataaaaatgctttaaaatagaaacattgagacataaaagaatatattgtcaagaatgatatagaaacgcttcaaaatcaaatggaaaaatagaaaaaaaaaatcaaaaccatgaggtgataataaaaatgtttcgaaatggaaacttagaaattaaaaagaacattgtcaagaatgatatagaacattagaaatgcttccaaaacaaaatgaagaaaaaataaaactttaaaagttttattgtcaagaatgctatagaaatgattcaaaaatcaaaatcaataaataagggattcgaaatggaagggacttagaaattaaaaataattgtcaaaaatgggatttgaaccaatgccctttcagttcggtacctaaaactgatactttaaacactcgaccatcttaactagttgacttacatgcagattattaaaataatagtatattacatcattacgtttggcaaaacatctgttctcctacttaaacagaaaggacagaaccctgagccggaacaaaatggcggcgctcataaaccctatataccgccgactcgccgccttcgcctgccgccggatctctgcaccggcggtagagaagcccgtgctgcccctcgtgtatcaccggaacttgcagcaaagacacaattccagtttggtggatgcgagtggaggattcagcgagatgcttgcctctacacggaggtgctatgtatttggaggcaaaggtggtgtggggaaaacaagcatggcggcgtcgcttgctgtgaagtttgccaaccatggtgaaccaacagctattgtttcgacggaaccatctccgtcactcggtgatttatttgaacaagacatgggtgttggcggcaaaactgtacgcatcactggatttgactctctttttgcagttgaggctggtcagttcaagataaagggagaacctgaagatcttggatcttttatcaacaatttacttggaaagatggggcttggaacacattctgatattatgagagatgctggatggaatgccccctggacttgaagaagcgcttgtactatcaaaggtgataaaatctattgacgtgcaagaggccgatatacttcggcgtttagtgctggatgctccatccactggacatacacttaagcttctgtcagcttctgattggattgaaatgttccttactttgagcattaagggcataaaagtggcttcgtccatgccatcgtttaatatgtatcttgaggacgtgcaattcatctctgccaggctagaggaactaaggcagcaggttcgcagagtgcgtgagattttgtttgatccacaatcaacagaattcatcgttgtgacaattccaacgatgatggcagttactgagtcatcaaggtttcacgagtcattaaagaaggatggtgcacacacaagaaggctcgtcataaatcaggtgttgccaccgtctgcgtcggactgcagattctgtgctgcaaaacggagggaagaagcacgtgccttccgtgcgatactggaggaccgagaactcggcggcctgaagctgatccaggctccgctccttgatatggaggtgaaaggcgtccctgcactccgattcctcagcgattcagtgtggaagtagcgagaaacactaggtcaaataaaagattaatctctgtcggtctgttcggattctttcatttggttggagttagaatctagttcatgaatttggcctagaatctggcattcgaccacgttctatcactcttctcaagtatagacctgtgtcaaattcagagggcaagaaatggtagtagtttttttttttttggtcacagcttatactagttcacaacagcacaccaatggataaccctcgcttgacgcttgtgttagtatctgttttctgaaatgccgagggataagatggaatgaactcagcattcagt

SEQ ID NO: 24957 - DNA, 1898 bp, Zea Mays
gaccatgagtcataataaaaatgctttaaaatagaaacattgagacataaaagaatatattgtcaagaatgatatagaaacgcttcaaaatcaaatggaaaaatagaaaaaaaaaatcaaaaccatgaggtgataataaaaatgtttcgaaatggaaacttagaaattaaaaagaacattgtcaagaatgatatagaacattagaaatgcttccaaaacaaaatgaagaaaaaataaaactttaaaagttttattgtcaagaatgctatagaaatgattcaaaaatcaaaatcaataaataagggattcgaaatggaagggacttagaaattaaaaataattgtcaaaaatgggatttgaaccaatgccctttcagttcggtacctaaaactgatactttaaacactcgaccatcttaactagttgacttacatgcagattattaaaataatagtatattacatcattacgtttggcaaaacatctgttctcctacttaaacagaaaggacagaaccctgagccggaacaaaatggcggcgctcataaaccctatataccgccgactcgccgccttcgcctgccgccggatctctgcaccggcggtagagaagcccgtgctgcccctcgtgtatcaccggaacttgcagcaaagacacaattccagtttggtggatgcgagtggaggattcagcgagatgcttgcctctacacggaggtgctatgtatttggaggcaaaggtggtgtggggaaaacaagcatggcggcgtcgcttgctgtgaagtttgccaaccatggtgaaccaacagctattgtttcgacggaaccatctccgtcactcggtgatttatttgaacaagacatgggtgttggcggcaaaactgtacgcatcactggatttgactctctttttgcagttgaggctggtcagttcaagataaagggagaacctgaagatcttggatcttttatcaacaatttacttggaaagatggggcttggaacacattctgatattatgtctatgattagagagatgctggatggaatgccccctggacttgaagaagcgcttgtactatcaaagggacatacacttaagcttctgtcagcttctgattggattgaaatgttccttactttgagcattaagggcataaaagtggcttcgtccatgccatcgtttaatatgtatcttgaggacgtgcaattcatctctgccaggctagaggaactaaggcagcaggttcgcagagtgcgtgagattttgtttgatccacaatcaacagaattcatcgttgtgacaattccaacgatgatggcagttactgagtcatcaaggtttcacgagtcattaaagaaggatggtgcacacacaagaaggctcgtcataaatcaggtgttgccaccgtctgcgtcggactgcagattctgtgctgcaaaacggagggaagaagcacgtgccttccgtgcgatactggaggaccgagaactcggcggcctgaagctgatccaggctccgctccttgatatggaggtgaaaggcgtccctgcactccgattcctcagcgattcagtgtggaagtagcgagaaacactaggtcaaataaaagattaatctctgtcggtctgttcggattctttcatttggttggagttagaatctagttcatgaatttggcctagaatctggcattcgaccacgttctatcactcttctcaagtatagacctgtgtcaaattcagagggcaagaaatggtagtagtttttttttttttggtcacagcttatactagttcacaacagcacaccaatggataaccctcgcttgacgcttgtgttagtatctgttttctgaaatgccgagggataagatggaatgaactcagcattcagt

SEQ ID NO: 24958 - DNA, 1950 bp, Zea Mays
gaccatgagtcataataaaaatgctttaaaatagaaacattgagacataaaagaatatattgtcaagaatgatatagaaacgcttcaaaatcaaatggaaaaatagaaaaaaaaaatcaaaaccatgaggtgataataaaaatgtttcgaaatggaaacttagaaattaaaaagaacattgtcaagaatgatatagaacattagaaatgcttccaaaacaaaatgaagaaaaaataaaactttaaaagttttattgtcaagaatgctatagaaatgattcaaaaatcaaaatcaataaataagggattcgaaatggaagggacttagaaattaaaaataattgtcaaaaatgggatttgaaccaatgccctttcagttcggtacctaaaactgatactttaaacactcgaccatcttaactagttgacttacatgcagattattaaaataatagtatattacatcattacgtttggcaaaacatctgttctcctacttaaacagaaaggacagaaccctgagccggaacaaaatggcggcgctcataaaccctatataccgccgactcgccgccttcgcctgccgccggatctctgcaccggcggtagagaagcccgtgctgcccctcgtgtatcaccggaacttgcagcaaagacacaattccagtttggtggatgcgagtggaggattcagcgagatgcttgcctctacacggaggtgctatgtatttggaggcaaaggtggtgtggggaaaacaagcatggcggcgtcgcttgctgtgaagtttgccaaccatggtgaaccaacagctattgtttcgacggaaccatctccgtcactcggacatgggtgttggcggcaaaactgtacgcatcactggatttgactctctttttgcagttgaggctggtcagttcaagataaagggagaacctgaagatcttggatcttttatcaacaatttacttggaaagatggggcttggaacacattctgatattatgtctatgattagagagatgctggatggaatgccccctggacttgaagaagcgcttgtactatcaaaggtgataaaatctattgacgtgcaagaggccgatatacttcggcgtttagtgctggatgctccatccactggacatacacttaagcttctgtcagcttctgattggattgaaatgttccttactttgagcattaagggcataaaagtggcttcgtccatgccatcgtttaatatgtatcttgaggacgtgcaattcatctctgccaggctagaggaactaaggcagcaggttcgcagagtgcgtgagattttgtttgatccacaatcaacagaattcatcgttgtgacaattccaacgatgatggcagttactgagtcatcaaggtttcacgagtcattaaagaaggatggtgcacacacaagaaggctcgtcataaatcaggtgttgccaccgtctgcgtcggactgcagattctgtgctgcaaaacggagggaagaagcacgtgccttccgtgcgatactggaggaccgagaactcggcggcctgaagctgatccaggctccgctccttgatatggaggtgaaaggcgtccctgcactccgattcctcagcgattcagtgtggaagtagcgagaaacactaggtcaaataaaagattaatctctgtcggtctgttcggattctttcatttggttggagttagaatctagttcatgaatttggcctagaatctggcattcgaccacgttctatcactcttctcaagtatagacctgtgtcaaattcagagggcaagaaatggtagtagtttttttttttttggtcacagcttatactagttcacaacagcacaccaatggataaccctcgcttgacgcttgtgttagtatctgttttctgaaatgccgagggataagatggaatgaactcagcattcagt

SEQ ID NO: 24959 - DNA, 790 bp, Zea Mays
cttccttttttttgtcttatgcaaggttcgccgtgctggcttgaacgtggacttcgctccagatccaattgcgtatcagcttaacgttcgcaacggagctcttatactcaaggtaaactgcatgtatcagatgttcgcttgcactagcatctccctttcctaccggacgttggctcctccgtaggtacctgggggcagcgccgcagccaaagcagggcttgctccgaccagcaggggttttgccggtaacatcgttctcggtgacatcgttgtcgctgtggatggcaagcctgttaaaggcaaatctgacctgctgagggttctagatgactacggtgtcggagaccaggtgagcttgacgatccggcgaggctccgagaccctggaggcgacgctgcctttagaagaggcagacatgtgagcagtttgtggaaaatagaacccacgtataccgagctgtccacgactgtcgtcccattggaaacaattccatttcactaggaaatattgaagtgtccttttcgctctggacattcccttccatgcacgtgtatgagcatgatcatgagcttcacttctcgtgcttgtagttgccttaagatcagacagcctgatgttggagaacaagctgacctgttagttggattctgttgtcatctcattcccgtcagttcatctgcggtgttggctcaagttctatttttctcggctgacaaagatcgtgcgattgctgtgcacgcggtaaaagccaattaggtagtgtttggttgaggagccaagtagaatggag

SEQ ID NO: 24960 - DNA, 1739 bp, Zea Mays
ccctccagctcctatccccaaactcgattgcagctcgtgcaccacacacggacacgaatcctcctccgggtcctccctctggaaaaccaggactacctcggatcagatgcagtgcctaccctgcggaccgtccaccaacgcgcccgctgcgcatgccgcggccaggagcgtcagccgtcggagggttgtcgtcgaagggcgtcacctcggcaacccacgacagcgaggaagcgcctccaaggtcaatgagggcaacaggtgaccgtggtgcaatgtcaagcaaaaccttatggctcgtgtcaaagaggaagcttattgctttgtcagccttttgtcttagcttacattcttcaagcatttgctttgggtgatacgtctgtcaaaatcgaggatgtgactcctaagatttttccatctgggccattatttccaactgagaaacggattgcagagctatttgaaataaatacttactcagttgtgaacatttttgatgcaacactacggccgcagcttaatgttactggtgttgtggagttgttggcagtgctctttcaaaaaatccgaagcctggtgatgttgttgcacgcgtcaacattcttgctgctgaagggatacagaaaaattttgaaggcaaattggttggtgcagatcgtgctaaagatcttgctgttcttaaggttgatgctcctactgatcttttgaagccaattaatgtgggacaatcctcggccctaagagttggtcagcaatgcttagcaattggaaatccttttggttttgaccatactctaacagttggtgttatcagtggtttaaatcgagatattttaagtcaggctggggtgacaattggaggcggaattcaaacagatgcagctattaaccctggtaacagtggtggtcctttgcttgactcaaaggggcatatgattggtattaatgcagcaattttcacacagacagggacatccgctggtgttggcttcgctatcccatcatcaaccgtacttaaaatcgctcctcagttaatccagtttggaaaagttcgccgtgctggcttgaacgtggacttcgctccagatccaattgcgtatcagcttaacgttcgcaacggagctcttatactcaaggtacctgggggcagcgccgcagccaaagcagggcttgctccgaccagcaggggttttgccggtaacatcgttctcggtgacatcgttgtcgctgtggatggcaagcctgttaaaggcaaatctgacctgctgagggttctagatgactacggtgtcggagaccaggtgagcttgacgatccggcgaggctccgagaccctggaggcgacgctgcctttagaagaggcagacatgtgagcagtttgtggaaaatagaacccacgtataccgagctgtccacgactgtcgtcccattggaaacaattccatttcactaggaaatattgaagtgtccttttcgctctggacattcccttccatgcacgtgtatgagcatgatcatgagcttcacttctcgtgcttgtagttgccttaagatcagacagcctgatgttggagaacaagctgacctgttagttggattctgttgtcatctcattcccgtcagttcatctgcggtgttggctcaagttctatttttctcggctgacaaagatcgtgcgattgctgtgcacgcggtaaaagccaattaggtagtgtttggttgaggagccaagtagaatggag

SEQ ID NO: 24961 - DNA, 1799 bp, Zea Mays
ccctccagctcctatccccaaactcgattgcagctcgtgcaccacacacggacacgaatcctcctccgggtcctccctctggaaaaccaggactacctcggatcagatgcagtgcctaccctgcggaccgtccaccaacgcgcccgctgcgcatgccgcggccaggagcgtcagccgtcggagggttgtcgtcgaagggcgtcacctcggcaacccacgacagcgaggaagcgcctccaaggtcaatgagggcaacaggtgaccgtggtgcaatgtcaagcaaaaccttatggctcgtgtcaaagaggaagcttattgctttgtcagccttttgtcttagcttacattcttcaagcatttgctttgggtgatacgtctgtcaaaatcgaggatgtgactcctaagatttttccatctgggccattatttccaactgagaaacggattgcagagctatttgaaataaatacttactcagttgtgaacatttttgatgcaacactacggccgcagcttaatgttactggtgttgtggagatccctgaaggaaatggttctggtgtagtgtgggacgattttggacatattattacaaattatcatgttgttggcagtgctctttcaaaaaatccgaagcctggtgatgttgttgcacgcgtcaacattcttgctgctgaaggaaaaattttgaaggcaaattggttggtgcagatcgtgctaaagatcttgctgttcttaaggttgatgctcctactgatcttttgaagccaattaatgtgggacaatcctcggccctaagagttggtcagcaatgcttagcaattggaaatccttttggttttgaccatactctaacagttggtgttatcagtggtttaaatcgagatattttaagtcaggctggggtgacaattggaggcggaattcaaacagatgcagctattaaccctggtaacagtggtggtcctttgcttgactcaaaggggcatatgattggtattaatgcagcaattttcacacagacagggacatccgctggtgttggcttcgctatcccatcatcaaccgtacttaaaatcgctcctcagttaatccagtttggaaaagttcgccgtgctggcttgaacgtggacttcgctccagatccaattgcgtatcagcttaacgttcgcaacggagctcttatactcaaggtacctgggggcagcgccgcagccaaagcagggcttgctccgaccagcaggggttttgccggtaacatcgttctcggtgacatcgttgtcgctgtggatggcaagcctgttaaaggcaaatctgacctgctgagggttctagatgactacggtgtcggagaccaggtgagcttgacgatccggcgaggctccgagaccctggaggcgacgctgcctttagaagaggcagacatgtgagcagtttgtggaaaatagaacccacgtataccgagctgtccacgactgtcgtcccattggaaacaattccatttcactaggaaatattgaagtgtccttttcgctctggacattcccttccatgcacgtgtatgagcatgatcatgagcttcacttctcgtgcttgtagttgccttaagatcagacagcctgatgttggagaacaagctgacctgttagttggattctgttgtcatctcattcccgtcagttcatctgcggtgttggctcaagttctatttttctcggctgacaaagatcgtgcgattgctgtgcacgcggtaaaagccaattaggtagtgtttggttgaggagccaagtagaatggag

SEQ ID NO: 24962 - DNA, 1793 bp, Zea Mays
ccctccagctcctatccccaaactcgattgcagctcgtgcaccacacacggacacgaatcctcctccgggtcctccctctggaaaaccaggactacctcggatcagatgcagtgcctaccctgcggaccgtccaccaacgcgcccgctgcgcatgccgcggccaggagcgtcagccgtcggagggttgtcgtcgaagggcgtcacctcggcaacccacgacagcgaggaagcgcctccaaggtcaatgagggcaacaggtgaccgtggtgcaatgtcaagcaaaaccttatggctcgtgtcaaagaggaagcttattgctttgtcagccttttgtcttagcttacattcttcaagcatttgctttgggtgatacgtctgtcaaaatcgaggatgtgactcctaagatttttccatctgggccattatttccaactgagagctatttgaaataaatacttactcagttgtgaacatttttgatgcaacactacggccgcagcttaatgttactggtgttgtggagatccctgaaggaaatggttctggtgtagtgtgggacgattttggacatattattacaaattatcatgttgttggcagtgctctttcaaaaaatccgaagcctggtgatgttgttgcacgcgtcaacattcttgctgctgaagggatacagaaaaattttgaaggcaaattggttggtgcagatcgtgctaaagatcttgctgttcttaaggttgatgctcctactgatcttttgaagccaattaatgtgggacaatcctcggccctaagagttggtcagcaatgcttagcaattggaaatccttttggttttgaccatactctaacagttggtgttatcagtggtttaaatcgagatattttaagtcaggctggggtgacaattggaggcggaattcaaacagatgcagctattaaccctggtaacagtggtggtcctttgcttgactcaaaggggcatatgattggtattaatgcagcaattttcacacagacagggacatccgctggtgttggcttcgctatcccatcatcaaccgtacttaaaatcgctcctcagttaatccagtttggaaaagttcgccgtgctggcttgaacgtggacttcgctccagatccaattgcgtatcagcttaacgttcgcaacggagctcttatactcaaggtacctgggggcagcgccgcagccaaagcagggcttgctccgaccagcaggggttttgccggtaacatcgttctcggtgacatcgttgtcgctgtggatggcaagcctgttaaaggcaaatctgacctgctgagggttctagatgactacggtgtcggagaccaggtgagcttgacgatccggcgaggctccgagaccctggaggcgacgctgcctttagaagaggcagacatgtgagcagtttgtggaaaatagaacccacgtataccgagctgtccacgactgtcgtcccattggaaacaattccatttcactaggaaatattgaagtgtccttttcgctctggacattcccttccatgcacgtgtatgagcatgatcatgagcttcacttctcgtgcttgtagttgccttaagatcagacagcctgatgttggagaacaagctgacctgttagttggattctgttgtcatctcattcccgtcagttcatctgcggtgttggctcaagttctatttttctcggctgacaaagatcgtgcgattgctgtgcacgcggtaaaagccaattaggtagtgtttggttgaggagccaagtagaatggag

SEQ ID NO: 24963 - DNA, 1798 bp, Zea Mays
ccctccagctcctatccccaaactcgattgcagctcgtgcaccacacacggacacgaatcctcctccgggtcctccctctggaaaaccaggactacctcggatcagatgcagtgcctaccctgcggaccgtccaccaacgcgcccgctgcgcatgccgcggccaggagcgtcagccgtcggagggttgtcgtcgaagggcgtcacctcggcaacccacgacagcgaggaagcgcctccaaggtcaatgagggcaacaggtgaccgtggtgcaatgtcaagcaaaaccttatggctcgtgtcaaagaggaagcttattgctttgtcagccttttgtcttagcttacattcttcaagcatttgctttgggtgatacgtctgtcaaaatcgaggatgtgactcctaagatttttccatctgggccattatttccaactgagaaacggattgcagagctatttgaaataaatacttactcagttgtgaacatttttgatgcaacactacggccgcagcttaatgttactggtgttgtggagatccctgaaggaaatggttctggtgtagtgtgggacgattttggacatattattacaaattatcatgttgttggcagtgctctttcaaaaaatccgaagcctggtgatgttgttgcacgcgtcaacattcttgctgctgaagggatacagaaaaattttgaaggcaaattggttggtgcagatcgtgctaaagatcttgctgttcttaaggttgatgctcctactgatcttttgaagccaattaatgtgggacaatcctcggccctaagagttggtcagcaatgcttagcaattggaaatccttttggttttgaccatactctaacagttggtgttatcagtggtttaaatcgagatattttaagtcaggctggggtgacaattggaggcggaattcaaacagatgcagctattaaccctggtaacagtggtggtcctttgcttgactcaaaggggcatatgattggtattaatgcagcaattttcacacagacaggttcgccgtgctggcttgaacgtggacttcgctccagatccaattgcgtatcagcttaacgttcgcaacggagctcttatactcaaggtaaactgcatgtatcagatgttcgcttgcactagcatctccctttcctaccggacgttggctcctccgtaggtacctgggggcagcgccgcagccaaagcagggcttgctccgaccagcaggggttttgccggtaacatcgttctcggtgacatcgttgtcgctgtggatggcaagcctgttaaaggcaaatctgacctgctgagggttctagatgactacggtgtcggagaccaggtgagcttgacgatccggcgaggctccgagaccctggaggcgacgctgcctttagaagaggcagacatgtgagcagtttgtggaaaatagaacccacgtataccgagctgtccacgactgtcgtcccattggaaacaattccatttcactaggaaatattgaagtgtccttttcgctctggacattcccttccatgcacgtgtatgagcatgatcatgagcttcacttctcgtgcttgtagttgccttaagatcagacagcctgatgttggagaacaagctgacctgttagttggattctgttgtcatctcattcccgtcagttcatctgcggtgttggctcaagttctatttttctcggctgacaaagatcgtgcgattgctgtgcacgcggtaaaagccaattaggtagtgtttggttgaggagccaagtagaatggag

SEQ ID NO: 24964 - DNA, 1750 bp, Zea Mays
ccctccagctcctatccccaaactcgattgcagctcgtgcaccacacacggacacgaatcctcctccgggtcctccctctggaaaaccaggactacctcggatcagatgcagtgcctaccctgcggaccgtccaccaacgcgcccgctgcgcatgccgcggccaggagcgtcagccgtcggagggttgtcgtcgaagggcgtcacctcggcaacccacgacagcgaggaagcgcctccaaggtcaatgagggcaacaggtgaccgtggtgcaatgtcaagcaaaaccttatggctcgtgtcaaagaggaagcttattgctttgtcagccttttgtcttagcttacattcttcaaggtactttccagcatttgctttgggtgatacgtctgtcaaaatcgaggatgtgactcctaagatttttccatctgggccattatttccaactgagaaacggattgcagagctatttgaaataaatacttactcagttgtgaacatttttgatgcaacactacggccgcagcttaatgttactggtgttgtggagttgttggcagtgctctttcaaaaaatccgaagcctggtgatgttgttgcacgcgtcaacattcttgctgctgaagggatacagaaaaattttgaaggcaaattggttggtgcagatcgtgctaaagatcttgctgttcttaaggttgatgctcctactgatcttttgaagccaattaatgtgggacaatcctcggccctaagagttggtcagcaatgcttagcaattggaaatccttttggttttgaccatactctaacagttggtgttatcagtggtttaaatcgagatattttaagtcaggctggggtgacaattggaggcggaattcaaacagatgcagctattaaccctggtaacagtggtggtcctttgcttgactcaaaggggcatatgattggtattaatgcagcaattttcacacagacagggacatccgctggtgttggcttcgctatcccatcatcaaccgtacttaaaatcgctcctcagttaatccagtttggaaaagttcgccgtgctggcttgaacgtggacttcgctccagatccaattgcgtatcagcttaacgttcgcaacggagctcttatactcaaggtacctgggggcagcgccgcagccaaagcagggcttgctccgaccagcaggggttttgccggtaacatcgttctcggtgacatcgttgtcgctgtggatggcaagcctgttaaaggcaaatctgacctgctgagggttctagatgactacggtgtcggagaccaggtgagcttgacgatccggcgaggctccgagaccctggaggcgacgctgcctttagaagaggcagacatgtgagcagtttgtggaaaatagaacccacgtataccgagctgtccacgactgtcgtcccattggaaacaattccatttcactaggaaatattgaagtgtccttttcgctctggacattcccttccatgcacgtgtatgagcatgatcatgagcttcacttctcgtgcttgtagttgccttaagatcagacagcctgatgttggagaacaagctgacctgttagttggattctgttgtcatctcattcccgtcagttcatctgcggtgttggctcaagttctatttttctcggctgacaaagatcgtgcgattgctgtgcacgcggtaaaagccaattaggtagtgtttggttgaggagccaagtagaatggag

SEQ ID NO: 24965 - DNA, 1817 bp, Zea Mays
cggcaacccctccagctcctatccccaaactcgattgcagctcgtgcaccacacacggacacgaatcctcctccgggtcctccctctggaaaaccaggactacctcggatcagatgcagtgcctaccctgcggaccgtccaccaacgcgcccgctgcgcatgccgcggccaggagcgtcagccgtcggagggttgtcgtcgaagggcgtcacctcggcaacccacgacagcgaggaagcgcctccaaggtcaatgagggcaacaggtgaccgtggtgcaatgtcaagcaaaaccttatggctcgtgtcaaagaggaagcttattgctttgtcagccttttgtcttagcttacattcttcaaggtactttccagcatttgctttgggtgatacgtctgtcaaaatcgaggatgtgactcctaagatttttccatctgggccattatttccaactgagaaacggattgcagagctatttgaaataaatacttactcagttgtgaacatttttgatgcaacactacggccgcagcttaatgttactggtgttgtggagatccctgaaggaaatggttctggtgtagtgtgggacgattttggacatattattacaaattatcatgttgttggcagtgctctttcaaaaaatccgaagcctggtgatgttgttgcacgcgtcaacattcttgctgctgaaggaaaaattttgaaggcaaattggttggtgcagatcgtgctaaagatcttgctgttcttaaggttgatgctcctactgatcttttgaagccaattaatgtgggacaatcctcggccctaagagttggtcagcaatgcttagcaattggaaatccttttggttttgaccatactctaacagttggtgttatcagtggtttaaatcgagatattttaagtcaggctggggtgacaattggaggcggaattcaaacagatgcagctattaaccctggtaacagtggtggtcctttgcttgactcaaaggggcatatgattggtattaatgcagcaattttcacacagacagggacatccgctggtgttggcttcgctatcccatcatcaaccgtacttaaaatcgctcctcagttaatccagtttggaaaagttcgccgtgctggcttgaacgtggacttcgctccagatccaattgcgtatcagcttaacgttcgcaacggagctcttatactcaaggtacctgggggcagcgccgcagccaaagcagggcttgctccgaccagcaggggttttgccggtaacatcgttctcggtgacatcgttgtcgctgtggatggcaagcctgttaaaggcaaatctgacctgctgagggttctagatgactacggtgtcggagaccaggtgagcttgacgatccggcgaggctccgagaccctggaggcgacgctgcctttagaagaggcagacatgtgagcagtttgtggaaaatagaacccacgtataccgagctgtccacgactgtcgtcccattggaaacaattccatttcactaggaaatattgaagtgtccttttcgctctggacattcccttccatgcacgtgtatgagcatgatcatgagcttcacttctcgtgcttgtagttgccttaagatcagacagcctgatgttggagaacaagctgacctgttagttggattctgttgtcatctcattcccgtcagttcatctgcggtgttggctcaagttctatttttctcggctgacaaagatcgtgcgattgctgtgcacgcggtaaaagccaattaggtagtgtttggttgaggagccaagtagaatggag

SEQ ID NO: 24966 - DNA, 1729 bp, Zea Mays
cggcaacccctccagctcctatccccaaactcgattgcagctcgtgcaccacacacggacacgaatcctcctccgggtcctccctctggaaaaccaggactacctcggatcagatgcagtgcctaccctgcggaccgtccaccaacgcgcccgctgcgcatgccgcggccaggagcgtcagccgtcggagggttgtcgtcgaagggcgtcacctcggcaacccacgacagcgaggaagcgcctccaaggtcaatgagggcaacaggtgaccgtggtgcaatgtcaagcaaaaccttatggctcgtgtcaaagaggaagcttattgctttgtcagccttttgtcttagcttacattcttcaaggtactttccagcatttgctttgggtgatacgtctgtcaaaatcgaggatgtgactcctaagatttttccatctgggccattatttccaactgagaaacggattgcagagctatttgaaataaatacttactcagttgtgaacatttttgatgcaacactacggccgcagcttaatgttactggtgttgtggagatccctgaaggaaatggttctggtgtagtgtgggacgattttggacatattattacaaattatcatgttgttggcagtgctctttcaaaaaatccgaagcctggtgatgttgttgcacgcgtcaacattcttgctgctgaagggatacagaaaaattttgaaggcaaattggttggtgcagatcgtgctaaagatcttgctgttcttaaggttgatgctcctactgatcttttgaagccaattaattggtttaaatcgagatattttaagtcaggctggggtgacaattggaggcggaattcaaacagatgcagctattaaccctggtaacagtggtggtcctttgcttgactcaaaggggcatatgattggtattaatgcagcaattttcacacagacagggacatccgctggtgttggcttcgctatcccatcatcaaccgtacttaaaatcgctcctcagttaatccagtttggaaaagttcgccgtgctggcttgaacgtggacttcgctccagatccaattgcgtatcagcttaacgttcgcaacggagctcttatactcaaggtacctgggggcagcgccgcagccaaagcagggcttgctccgaccagcaggggttttgccggtaacatcgttctcggtgacatcgttgtcgctgtggatggcaagcctgttaaaggcaaatctgacctgctgagggttctagatgactacggtgtcggagaccaggtgagcttgacgatccggcgaggctccgagaccctggaggcgacgctgcctttagaagaggcagacatgtgagcagtttgtggaaaatagaacccacgtataccgagctgtccacgactgtcgtcccattggaaacaattccatttcactaggaaatattgaagtgtccttttcgctctggacattcccttccatgcacgtgtatgagcatgatcatgagcttcacttctcgtgcttgtagttgccttaagatcagacagcctgatgttggagaacaagctgacctgttagttggattctgttgtcatctcattcccgtcagttcatctgcggtgttggctcaagttctatttttctcggctgacaaagatcgtgcgattgctgtgcacgcggtaaaagccaattaggtagtgtttggttgaggagccaagtagaatggag

SEQ ID NO: 24967 - DNA, 1724 bp, Zea Mays
gtcaaacggcaacccctccagctcctatccccaaactcgattgcagctcgtgcaccacacacggacacgaatcctcctccgggtcctccctctggaaaaccaggactacctcggatcagatgcagtgcctaccctgcggaccgtccaccaacgcgcccgctgcgcatgccgcggccaggagcgtcagccgtcggagggttgtcgtcgaagggcgtcacctcggcaacccacgacagcgaggaagcgcctccaaggtcaatgagggcaacaggtgaccgtggtgcaatgtcaagcaaaaccttatggctcgtgtcaaagaggaagcttattgctttgtcagccttttgtcttagcttacattcttcaagcatttgctttgggtgatacgtctgtcaaaatcgaggatgtgactcctaagatttttccatctgggccattatttccaactgagaaacggattgcagagctatttgaaataaatacttactcagttgtgaacatttttgatgcaacactacggccgcagcttaatgttactggtgttgtggagatccctgaaggaaatggttctggtgtagtgtgggacgattttggacatattattacaaattatcatgttgttggcagtgctctttcaaaaaatccgaagcctggtgatgttgttgcacgcgtcaacattcttgctgctgaagggatacagaaaaattttgaaggcaaattggttggtgcagatcgtgctaaagatcttgctgttcttaaggttgatgctcctactgatcttttgaagccaattaatgtgggacaatcctcggccctaagagttggctggggtgacaattggaggcggaattcaaacagatgcagctattaaccctggtaacagtggtggtcctttgcttgactcaaaggggcatatgattggtattaatgcagcaattttcacacagacagggacatccgctggtgttggcttcgctatcccatcatcaaccgtacttaaaatcgctcctcagttaatccagtttggaaaagttcgccgtgctggcttgaacgtggacttcgctccagatccaattgcgtatcagcttaacgttcgcaacggagctcttatactcaaggtacctgggggcagcgccgcagccaaagcagggcttgctccgaccagcaggggttttgccggtaacatcgttctcggtgacatcgttgtcgctgtggatggcaagcctgttaaaggcaaatctgacctgctgagggttctagatgactacggtgtcggagaccaggtgagcttgacgatccggcgaggctccgagaccctggaggcgacgctgcctttagaagaggcagacatgtgagcagtttgtggaaaatagaacccacgtataccgagctgtccacgactgtcgtcccattggaaacaattccatttcactaggaaatattgaagtgtccttttcgctctggacattcccttccatgcacgtgtatgagcatgatcatgagcttcacttctcgtgcttgtagttgccttaagatcagacagcctgatgttggagaacaagctgacctgttagttggattctgttgtcatctcattcccgtcagttcatctgcggtgttggctcaagttctatttttctcggctgacaaagatcgtgcgattgctgtgcacgcggtaaaagccaattaggtagtgtttggttgaggagccaagtagaatggag

SEQ ID NO: 24968 - DNA, 1856 bp, Zea Mays
gtgccatggagtggaggcaagagaacagagatgtcagatgtcaaacggcaacccctccagctcctatccccaaactcgattgcagctcgtgcaccacacacggacacgaatcctcctccgggtcctccctctggaaaaccaggactacctcggatcagatgcagtgcctaccctgcggaccgtccaccaacgcgcccgctgcgcatgccgcggccaggagcgtcagccgtcggagggttgtcgtcgaagggcgtcacctcggcaacccacgacagcgaggaagcgcctccaaggtcaatgagggcaacaggtgaccgtggtgcaatgtcaagcaaaaccttatggctcgtgtcaaagaggaagcttattgctttgtcagccttttgtcttagcttacattcttcaagcatttgctttgggtgatacgtctgtcaaaatcgaggatgtgactcctaagatttttccatctgggccattatttccaactgagaaacggattgcagagctatttgaaataaatacttactcagttgtgaacatttttgatgcaacactacggccgcagcttaatgttactggtgttgtggagttgttggcagtgctctttcaaaaaatccgaagcctggtgatgttgttgcacgcgtcaacattcttgctgctgaaggaaaaattttgaaggcaaattggttggtgcagatcgtgctaaagatcttgctgttcttaaggttgatgctcctactgatcttttgaagccaattaatgtgggacaatcctcggccctaagagttggtcagcaatgcttagcaattggaaatccttttggttttgaccatactctaacagttggtgttatcagtggtttaaatcgagatattttaagtcaggctggggtgacaattggaggcggaattcaaacagatgcagctattaaccctggtaacagtggtggtcctttgcttgactcaaaggggcatatgattggtattaatgcagcaattttcacacagacagggacatccgctggtgttggcttcgctatcccatcatcaaccgtacttaaaatcgctcctcagttaatccagtttggaaaagttcgccgtgctggcttgaacgtggacttcgctccagatccaattgcgtatcagcttaacgttcgcaacggagctcttatactcaaggtaaactgcatgtatcagatgttcgcttgcactagcatctccctttcctaccggacgttggctcctccgtaggtacctgggggcagcgccgcagccaaagcagggcttgctccgaccagcaggggttttgccggtaacatcgttctcggtgacatcgttgtcgctgtggatggcaagcctgttaaaggcaaatctgacctgctgagggttctagatgactacggtgtcggagaccaggtgagcttgacgatccggcgaggctccgagaccctggaggcgacgctgcctttagaagaggcagacatgtgagcagtttgtggaaaatagaacccacgtataccgagctgtccacgactgtcgtcccattggaaacaattccatttcactaggaaatattgaagtgtccttttcgctctggacattcccttccatgcacgtgtatgagcatgatcatgagcttcacttctcgtgcttgtagttgccttaagatcagacagcctgatgttggagaacaagctgacctgttagttggattctgttgtcatctcattcccgtcagttcatctgcggtgttggctcaagttctatttttctcggctgacaaagatcgtgcgattgctgtgcacgcggtaaaagccaattaggtagtgtttggttgaggagccaagtagaatggag

SEQ ID NO: 24969 - DNA, 1819 bp, Zea Mays
ccgggagcggcccacatgttcaagcgaggtgccatggagtggaggcaagagaacagagatgtcagatgtcaaacggcaacccctccagctcctatccccaaactcgattgcagctcgtgcaccacacacggacacgaatcctcctccgggtcctccctctggaaaaccaggactacctcggatcagatgcagtgcctaccctgcggaccgtccaccaacgcgcccgctgcgcatgccgcggccaggagcgtcagccgtcggagggttgtcgtcgaagggcgtcacctcggcaacccacgacagcgaggaagcgcctccaaggtcaatgagggcaacaggtgaccgtggtgcaatgtcaagcaaaaccttatggctcgtgtcaaagaggaagcttattgctttgtcagccttttgtcttagcttacattcttcaagcatttgctttgggtgatacgtctgtcaaaatcgaggatgtgactcctaagatttttccatctgggccattatttccaactgagaaacggattgcagagctatttgaaataaatacttactcagttgtgaacatttttgatgcaacactacggccgcagcttaatgttactggtgttgtggagatccctgaaggaaatggttctggtgtagtgtgggacgattttggacatattattacaaattatcatgttgttggcagtgctctttcaaaaaatccgaagcctggtgatgttgttgcacgcgtcaacattcttgctgctgaagggatacagaaaaattttgaaggcaaattggttggtgcagatcgtgctaaagatcttgctgttcttaaggttgatgctcctactgatcttttgaagccaattaatgtgggacaatcctcggccctaagagttgtggtttaaatcgagatattttaagtcaggctggggtgacaattggaggcggaattcaaacagatgcagctattaaccctggtaacagtggtggtcctttgcttgactcaaaggggcatatgattggtattaatgcagcaattttcacacagacagggacatccgctggtgttggcttcgctatcccatcatcaaccgtacttaaaatcgctcctcagttaatccagtttggaaaagttcgccgtgctggcttgaacgtggacttcgctccagatccaattgcgtatcagcttaacgttcgcaacggagctcttatactcaaggtacctgggggcagcgccgcagccaaagcagggcttgctccgaccagcaggggttttgccggtaacatcgttctcggtgacatcgttgtcgctgtggatggcaagcctgttaaaggcaaatctgacctgctgagggttctagatgactacggtgtcggagaccaggtgagcttgacgatccggcgaggctccgagaccctggaggcgacgctgcctttagaagaggcagacatgtgagcagtttgtggaaaatagaacccacgtataccgagctgtccacgactgtcgtcccattggaaacaattccatttcactaggaaatattgaagtgtccttttcgctctggacattcccttccatgcacgtgtatgagcatgatcatgagcttcacttctcgtgcttgtagttgccttaagatcagacagcctgatgttggagaacaagctgacctgttagttggattctgttgtcatctcattcccgtcagttcatctgcggtgttggctcaagttctatttttctcggctgacaaagatcgtgcgattgctgtgcacgcggtaaaagccaattaggtagtgtttggttgaggagccaagtagaatggag

SEQ ID NO: 24970 - DNA, 572 bp, Zea Mays
gcgtgaatcattatcattgtcattaacgttatatttcgtgaatcaagcaacaccattgttttcattgcggaaaacatctccatttctccatttccagagttgccagcagcacaaggcaatgaacatactactcttcccataatattcagacgctttgcctgccaagttgagagggatgtctcagttatctcgatgtaggtattgaatgcagaggctgccagtctattttgctgatagacggaggcctagatagtgttgtggaagaacaccattacctctgatttgacagtctctcaggccgctccgtagaaggatgttccaaagtcatcaggtccggagcactatggcgttccatggacaacatttgatgtgtcttgtcttgcactgagaaatgatgtgcaagcgcagccaacggttcaagtttgtctagaaagagcgctgaaatatcacccgacgatggaactgacgaagctgtcaatttgcattattgcactccctgccatgttggcatctcctaagatttttcattgtcgagggacggattataatcgacttccagcaaaggaaatcgc

SEQ ID NO: 24971 - DNA, 1436 bp, Zea Mays
ctctcgtgccgcgtctctctctccacccgtgctgctacgggggcggcctgtccgagttctccgggctcaggagctccgcgtcgctgcccatgcgccggaatgccacctccgacgacttcatgtccgccgtctccttcaggacccacgcggtcggcacgagcggcgggtcgcggcgggcgccgacggaggcgaagctgaaggtggccatcaacgggttcggccgcatcgggcgcaacttcctgcggtgctggcacgggcgcggcgacgcctcgcccctcgacgtcatcgccatcaacgacaccggcggtgtcaagcaggcgtcccacctgctcaagtacgactccacgctcggcatcttcgacgccgacgtcaagcccgtcggcgacaacgccatctccgtcgacggcaaggtcatcaaggtcgtgtccgaccgcaaccccagcaacctgccgtggggcgagctcggcatcgacctcgtcatcgagggcaccggcgtcttcgtcgaccgcgagggcgcggggaagcacatccaggcgggggccaagaaggtgctcatcacggcgcccggcaagggcgacatccccacctacgtcgtcggcgtcaatgccgaccagtacaaccccgacgagcccatcatcagcaacgcctcctgcaccaccaactgcctcgcgccattcgtcaaggtgctcgaccaaaagttcggcatcatcaagggcaccatgaccaccacccactcctacaccggcgaccagaggctgctggacgcgagccaccgcgacctgcgccgcgcccgcgccgccgcgctcaacatcgtgcccacgtccaccggcgccgccaaggccgtctcgctggtgctccccaacctcaagggcaagctcaacgggatcgcgctccgggtgcccaccccgaacgtctccgtcgtcgacctcgtcgtgcaggtctccaagaagaccctcgccgaggaggtgaaccaggcgttccgcgacgccgcggccaacgagctcacgggcatcctcgaggtctgcgacgtgccgctcgtgtccgtcgacttcaggtgctccgacgtctcctccaccatcgacgcctccctcaccatggtcatgggcgacgacatggtcaaggtcatctcctggtacgacaacgagtggggctactcgcagagggtcgtcgacctcgctgacatctgcgccaaccagtggaagtgaagcgttgcattgtaatagcactttgtaactcctcaccctccacagggctttgggattcaccccgaaatgactcactttcggtgaaattcacccgtttcggcgaggtcgtccgaatataccggccaaatgtttccattggatttcaattattagtcaactctagagttgaaacaaacatacaagttcttcattcaataatcaatatagaagtgcatatctgtttcctcttca

SEQ ID NO: 24972 - DNA, 997 bp, Zea Mays
ggtaggccttagttaaatgggtcgtgccaggccggcccgtgggcttgaattgaggccccggcacggcccacaatatgggccgtgccggcccaggcccacaattaggttgggccgtgccagatatgggccgtgccagaaattgtgtgctttgggccggcctattaggcacagcacaaatgtacacctataggcccatccttgttccgtatttggttcaggtacatcaaaaggtgggacaatgcatctagcatgtgaggtccacatgtcagcctcctcttttcttcttccttgcaccaagagcttgttgaagccacacaccgcttcttctcactcaccggagctcgccctatgacccttgctgacgcccaccctcctcttcctttgcactcacaggcacacaccctcctcttcgttcctcctcaccgtcgcccctcactagcgccgctccccaccgacacagcagctcagccagagctcaccaacccactcacagttcaagcagatggagctcgcccgcctgcgtctcaacttgcaccttgttcccttgacactgggccactcattgtaaccggaggtcatctcacgcttgtgcgtgccagtgccaaagctggagctcacattgcctatgcgtgtctatgctgaacccaaagctcgtttgaacatctgtgcttggagcatgcactcttgctcatcctccacacctgcatgcacgcacgagaagaaggcgaatgagtcagtccgctcgaatcaaagggataggctcactccatatcttagggatattccactatggggggatgagaggatgaccccgttccctctgactcccaaccaaacagcacctgatatgatattgatggcggtaaaagatcctctaagggctagtttcgaaacccaaatccctttgggacccccctcttttcccagggtgagaaatccctgtagataatatttgaataagggctagtttgggaaccccatttttccaagggatttc

SEQ ID NO: 24973 - DNA, 2750 bp, Zea Mays
caaatatgaagttgcttattattgttggtactcgtcactatttgttcgcatgttaccatagccattggcttagatggtaataatgaattgctacctcattcgagtggtaagtcagattaagggtgtgtttggttgaatggaagagaatgtaactatttcattcttattttttggatgtttggcttcaaacaaaagaggaacggaacggctcttggagtctccatattgaaatattaaaatttaccatagttgaaatactcccgctctaccaaaacgaccgtatgcgagcactcctctagacatgagcactcggacacccatcggtctacctctggctatgcagtgtttcttgtggccaacctcatctcttagtcctccaagtgagtgtcagcatgtggtctcacgctccagtgtgctgagggtgagtacctagttgtcgacaatggggtggctaaggcaagctggatgcaccaactcagctcctccaggagcttcacagtcccctcaccagtagcacacttgtctaccacgacaacgtcagcgtcatctaactctctgtcaaccccgcccagcactgctgatcaatagaagacaattgatcatgaaaatcaatagaaattgcaacttagcatggaattgatcatggaatttaatctataacccagcaattgatcatgaaaatcaatagaagaaaatacaatggttcttaaacaagcacatgtttatctttaccagtaggttcacaggttaccgaactgtaactaagattatgttgaagaggctaggtagtcgtacatgtctttcagccacgaatttcctaccagttctcagatacttttaattgaaattttcctactcaagttgacatacttgcaacttagcaaatctcacctaaatgcacagacacacagtaccaccctgacaaaaggccaagagcacaccaaaactcaccagaatgatcaatttaaattattgttgcaatacatagccaccaagaatacttgacaacctgcaaaagagacacaacatccttgaatgagcagaaattgcaaaagaaatgtcaaagtaaaaataaaaatcagcaaagcaaggttacaaggcaaccgcagcaggttagctagattcagggaaaggtttagcccatctcatccagtttctgcacctgtactcaagcacagacaaagggtgactaccattcaccgatacatacacatgttatatatgcaatggaatgataagagggggttcactgtactaaactactaatttgtggttcatgtacacatcgaacccagcatataaaaagattattatgtcaaataacctggcagaaaaaaagatgccactaaaccaaatgcaaacatggaactatatgtacatttagtaatactccctctgtctcaaaataaaattcgttttagcaaattagtgggttcatgcaacacttaatgtatatgtttggtatatgtctagattccatttgaatatagacataaaaattaagagctaaaacaactactatttggaaagtttccctatgtaccattgaattttatactcattccttgtgtgctattgagtgacatatatggaattttttgtgtgtgtatgatatatggggccagtggcacacaaggaacgagtataatttcctatggcacacaaggaattgccccctactattttgggacggagggagtactaaaaaaactcaacatcattgtggttcaaaaactgaacataatctgatcaatcatttatataatttattgataacataaggaaagagaataaagtgacaactttatatggtcaaacactgatgatcagtgaagttctgaaatgtgatactggcatgcaactttccactgagttatgagatcaaaaaagaaatgccacctgaactccttatatatgaacattagcaatttagcatgtcaacagtacatgtatggtttacccgatttgaaattaaaaaattgaacaacgccactatagtatactaacacgagataagtttcaccacactttgacatgaaccagtattaaatcaaaacctaagcaaaatgttttgcatttattcatgatcaatgttttgacgatatgcatactttgtacttgcaataggaaattagtgtcatgacatgtcaaagcacttaacaatcacctgtataaataaattataaattatgtcaatcagcaagcaccgaagcagtaagcaatcttctgtgcaccaataacaaaccaaccattagcctcttcccaaaactgattaaccatatgtttgatctgggacatagtgggatgggatagttttgaccctgatttttaagatgggatgatccagtttcatgtctgcgttagggagatgggcccatctatacatgtacatgtgggccggcctggcccggcacggcacaggcccacaaaagcacggcccacaaaggcacggcccacaaaagcacatatctaattatgggccgtgccgtgccagcacgtgtgcccagtcatcggcccacggcacggcccacaattagttatgtgtgccaggccggcccaaatagcccaaaataccttaatgtgccagaccggctcatatacatacaacagtaatatatcaacaaaaagtataaaatatatatgaccaaaataaaactaagatgttttgtggatgcacattataaacctttggtcagaaagaaaaaaaatagtacaactagctcacaaataatattcagttctctgtttag

SEQ ID NO: 24974 - DNA, 1108 bp, Zea Mays
gtccgtgatggatcagtcctcgagtggtggcacagcgttcagcaaaagcgtctggacggtgaaggagtatgtcggcggcggcgactccccatacgtcaccctgtactaccacagcttcgacggagagcaaggtttccccgggaacctcgacgcgtacgtgacgtaccgggtgtcgggcccgtacacgctgggcgtgcacatgagcgcgacggcgctggacagggcgacgccggtgaacctgctgctgcacgcgtactggaacctgggcgggcagggcagcggggacgtcctgggccacgagctccggctgcacgcgtcgcggtacgccgtgctggacgaggagctcctgccttcgtcggggcgcgtcgcgcccgtcgccggcacgccgctggacttccggacgcccacgcccatcggcgcgcgcatccgccaggtcacgggcgggaaggtcgtcgggtacgacgccaactacgtcgtcgacggggaagggatgcggcccgtggcgcaggtccgggacggcgcgtccggcagggcggtggagctgtgggcgaaccaggccaccgtgcagctctacaccgggaactggctcaaccacacccaggggaagggcggcggggtgtacgaccagtacgccgggttcacgctggagaccatggggtacgtggacgcagtgaaccaccccgagttcccgtctcagaccctgttgcccggacaggagtacaagcacgacatggtcttcaagttctcgttctagcaggtgcatggtttggtttgatgtacaacgttcgttattggtgtttgagacgtacctaggcgaatactgagggtttgatcagctgccctgcaacaacagagtcagtggatttttttaaaacacacaaactatgcattaatcaatgacgcaacagatcactgtccaaaatatttttcgtttcctgaaaattttcaccaagagaaacaaccaaaggaatcaaaaagaaaagaaaaaaagggtaaaggtacaaacgttagccctcctgtcctgcgacacctcaggtacaaacatgtatgtaccacctccctagcgtgtgctgtatataccatgccatgcatgcggtctttagaactt

SEQ ID NO: 24975 - DNA, 2607 bp, Zea Mays
ccccaccccaccccacccgcgccgagacggattggaggaggaaccctaccatatcaatctcgcttctcgcctcgtttcgtctcagctgcattccaattccacctgtaagcggagagccttcgtggtccctgctcggttcatcagaatacaggaggctccggaggtagtccaccaaaacaaaacaccactccatctctcctcttcccagcgatttcctcttcccctcctcgcccgccgaggccgcccgtcctccgtccgccgtcccagcgagagggtgttgcgggtacgagagctttcgggattaaggtgccatgtccctcttcggggaacctcatgtggttggggaattccctcccgcgttccatctgatgctttaagattgtgcagacacataatttggatgctcctgcctatgcaagatgtcaaccaccagagatattgtttagtgctgggaaagttatgcagttttggatcataaattctaaatagacaagataattatggaccgtgcagacacatcagggtttgtcagtggtggttgctttgtgggatgctcagcgccaagctctacggtggagaacatgggccaaagcacactctgtatggatggcctgaacccagcaattgttagttgcagccatgttaatggaaatacacagataatgaatgacataacagcgagagatgatggcagcaggttagtccttggtttgggtccaacaccgaatttttattctgcagtgtccactggctcaaaacaagctcagagattgtcaggccagagttcaactttcactgattcagggatgctgaggcttggccttcacaccgatggtgggggagcaattcaatgtctgcaaggaccgaatggagcactccattctttaggtattgtcgacgaggcttcgacatctactactgtaaggagcatgggtggttacatgccatccctactctttgctccccgctccaatcctactgtcaacgagacacaagtagaaatcccagattctctaaacctcacgcacagcaccagcaacagtcagcatattcaacgtcacctccagtttagccctgaaccctctgcaatgaccgagtcttcatttggtgtgagttctgatgttgtcaccgcaacaactacatcagaacgtagccattctcgacatcctaagaaatgcaggttcaagggatgttccaaaggtgcaagaggcgcatcaggattgtgtattgctcatggaggtgggcagagatgtcataaacctggatgccataaaggagccgagagcagctctgcatactgcaaagcccacggtggcggtcgtcggtgtgaggaacttggttgtaccaaaagcgcagaaggaaaaacagattattgcattgctcatggtggaggccgccgctgcgaacatcctggctgtcctaaagctgcccggggtaagtctgggcggtgcatcaagcatggtggtgggaagaggtgtttggttaaaggttgcattcggagtgcggaggggaaggctggattgtgcatttctcatggcggtggtcgacggtgccagtatccagattgtggcaagggggcacagggcagcacattgtactgcaagggacatggtggtggcaagaggtgcgtcttcgatggttgcagcaaaggcgcagagggtagcacacctctgtgcaaagcacatggtggcgggaagcggtgcatgtttgaaggaggtggtgtctgtgcaaaaagtgtgcacggggctactgaatattgcgtggcgcatggaggaggaaagcgctgttccgtgcccggctgcaccaagagtgctcgtggccgcactgactgctgtgtgaagcacggtggcggcaagcggtgcaaggttgagaactgtggcaagagcgcccaggggagcacggacttctgcaaagcccatggcggaggaaagcggtgcacatggggcacaggctgtgaaaaattctcccgtggcaagagtggcttctgtgcggcacatggtaccttgatggccaggcagcgagaacaagaggcggcgaagaatgtaggaagcatgattggaccaggtctcttcagcggcattgttgtgtcatctgccaccgcagcaagcagcatgacgaacgagcactcgtcctctggtgtcagcaccgcttccgactgcgacggcactgtgaggagccaatcaatgattcctccacaggtgctggttcctcgctctatgatgccttcttggtcgactgagcctgtagatggaggcagagagggaggtcatgttgttcccgaggggagggtccatggtggtggcctcctgtcactcatcggtggcagcttcaggaacgccgatttggagaagcttcaaagctagtgcttttccatcagcagattcggtcagtttgtttgtacataaacaggccgcgtttcggcctattgtattcttattgtaccttttcttgtctagataaacatttcaaccttcatgtactggtttaagtccattgtaaatggtgactgccaattgttgtgaacgcttttggcttgttggttcagctgtagtcagtactgcaataatttcgtgtgttgtttaagctgctcttatttgtttgtgcata

SEQ ID NO: 24976 - DNA, 3613 bp, Zea Mays
cggttctgccatcgtctcctctccgcgacgcacgcctccctctcctccgccccaccctcctccccacgccatcggcaccgccatcatcagatccggcccaagacgcctctgccccacgcgcccgagtcgtcgaggcacactcctgcccgcctccggcgtccacgcacatctccgcctcacctcggcgcccgagtcgtcgcacgcgttcgaggtggcgtccatcccggcaccggcctcacgcaccatctacagctcccaactctgctcctctcagttctccctctgcattccaccttctctcccttcctctccaagcaccgtcctcctcgcctagatccgtacaagctgcaaataacctctccggtggcaagacagatggagtcgatctccggcgaggatgctccgaagcacaacctgatcctgtccgcgctcgtctccaacctacagtgcatgctcgccgcccgccgcccgttcacggcagaggtcagcaccgccgccacagctagcgaggctgaggccttggctcaggaagcagaggcgtccgatgcccccacgggagatgggacgctggcgaggcccatcgtgctgctgacctgtgccggaggggaaccggtcggcgggtctcgcggcgctcgtcgacgccctcgttgccgccggccgctgcgatgtccacgtgtgtgcccccgaatcgtacatgctgtgacttagaaaaccaaaccacagcgggaccggtgctcggatagggtccaacggcgatgcaagcaaggagtggcatgcggccggaggggcgcagatcggctcctgcacgtgcagcgcagccgcgtgacagtgaagcagggaggccgcgataggcggcacagggagggtgcgacggaggcaaagtgcaagcacctggggacttcaggtaagtagaaaaccaacactgaatttgtcggttctctgttttgtgattgaccgattggtttgttgatctcagaaacaaaaaattgtttcaccgtcaagcaccaatttttaggtaggtcagtgttttgggatgattctccgatgcatcaatagcaaccttgtgcttggcaaagttatttgccctgataatgttgtaggtttagtgaaaagaaatatactgacatatccatcgatccatcgatgcccaatggagattgacctctatcaagatttagttacgtgtctcaatagggcaatatttctgtgagttgtatactgtggattcctcatctgcatcatgaattgatcgcactatttatgccctatttttcaaaccatggtttctgtaattctttgcaccatggtatttttctcaaatgattttatctttcacaacccggactgaagtcactgaagcagaaagaaagagtacaagtctactactgcagaaagcaaggaggatgccaacagaagcagatttcatgtttggatcgggtattgacctttttgtgttctcctcaactcattatttagctacatatcttattaaatcttaatatttggtcattagctaccaacttgcactattattgtgaaaatccattaactttagccaatgaaatggttagactatcaccacgtaggtgatattagtggcattaagttattaatctgtggcaaattctattatcaactattttcttggctaatcattacaatatataatgaagaatactatggcttgaagggatatttatacagttggctatgtatacggtctgcccaagcgcccaacaatgaatgatgtggtgaaggaacttgagatcatcagatagaatgaaggggcacaattgctaaactcaacgtctttatcagttgaacaatttggaaaaaaagagaagagatccttatgcatttgcctatggatgatggaagcaacaacaacacttttgactacaacagtgggagttcaattaagttgttcacccaagtagatagttgtctccactctttcaacaagttattggagtgattatatatgtctgctccatatgaatgccttttcgttttagtatcacatctgaaattaccaaccttttagatcggataaaatcttaagcaaaatgggagaaggtttgggttttctgcaatctgtcgtctcctcttctgctgggtatctccgttattattctaatgaagagggctatgagttggattttcgtaggtacatttgagcgtgttttggaatgctgggaccgtgaaacacatgaatatgttgccataaaagttgttcgcagtatccacaagtactctgatgctacaatgattgagatagatgtgctcaatcgccttgtagaaaatgaaaaatatagatctctgtgagtatctcagagacctaattgcttaaagtataaccctattctatttttgacttgacagttcctcttcaatttgtcagctgtgctcaaatttagagatggcttgactatcgtaatcatatatgcatggatgcgttactttatgtttgcttgtatttaatatagaaggctcccttgccttcgttcgatcatgtggtatttgaaagtgatgtctctataaatgaagtaagatcattcgtattgtatccttcctcggattgcttcttttgttctactacaaatatgcccaacatggcagggagaggtatgctcctaaatttcttattttgtgcattgtgaaatgattgttctaacaacatcaagtttgtgttcttcatataatctatctcagattgctctgtgttttgcaggtctcgaggtcaagcctggacccactgtcaagtgtgtgcttggacatgactttatcctgcactttccactgctgcacttggggaatcaaagaaaagtgaaagtaccatgtcaaagttgatgaccagaagcttgctattggaaccctctctattgaaaaatacccctagatagaaattgatttggttttcaataaagagtgtgagttgtcacacacatagaaaactacctgtgtatttttctttggttacaaggttgagcaaccaatcgaggaagatgaatatcctttttaacattgatttttttagttttatttcatgtaagactgatctaaacaatttctttgtggagtattttgtttccttgatctcatttttgcttcttgcctcttacataatggatcttgattctgaagatgaagagaaggagctaaacattccagtaatcaaggaaaatggcaaaggtgatgggaaggcagttgctgcagcttcaaaatcaagtcttgggcttgaaaaaaagcaaggatgagtatgagtctgatgattctgatgagggagaaggtgaaaccggagaatgaggagatgtggttgttcatggacgacagcatcaagaaacctgcaacatgcaacctgattttaagaaatctgccacctgcaacatgactgggcagtggtatctctgagatataatgtggacaacggcaaagaatactatgcatacacaacaaaagagtcctacaacctgattttaagtccatttgtagcaaaccatcttggaagccattaactcgttgaatttgaagctgatgtgcagttttatttttatgtcagttttactgatgcagttagttcctaagaagatccatggcaacttgtttcacgctg

SEQ ID NO: 24977 - DNA, 4379 bp, Zea Mays
cggttctgccatcgtctcctctccgcgacgcacgcctccctctcctccgccccaccctcctccccacgccatcggcaccgccatcatcagatccggcccaagacgcctctgccccacgcgcccgagtcgtcgaggcacactcctgcccgcctccggcgtccacgcacatctccgcctcacctcggcgcccgagtcgtcgcacgcgttcgaggtggcgtccatcccggcaccggcctcacgcaccatctacagctcccaactctgctcctctcagttctccctctgcattccaccttctctcccttcctctccaagcaccgtcctcctcgcctagatccgtacaagctgcaaataacctctccggtggcaagacagatggagtcgatctccggcgaggatgctccgaagcacaacctgatcctgtccgcgctcgtctccaacctacagtgcatgctcgccgcccgccgcccgttcacggcagaggtcagcaccgccgccacagctagcgaggctgaggccttggctcaggaagcagaggcgtccgatgcccccacgggagatgggacgctggcgaggcccatcgtgctgctgacctgtgccggaggggaaccggtcggcgggtctcgcggcgctcgtcgacgccctcgttgccgccggccgctgcgatgtccacgtgtgtgcccccgaatcgtacatgctgtgacttagaaaaccaaaccacagcgggaccggtgctcggatagggtccaacggcgatgcaagcaaggagtggcatgcggccggaggggcgcagatcggctcctgcacgtgcagcgcagccgcgtgacagtgaagcagggaggccgcgataggcggcacagggagggtgcgacggaggcaaagtgcaagcacctggggacttcaggtaagtagaaaaccaacactgaatttgtcggttctctgttttgtgattgaccgattggtttgttgatctcagaaacaaaaaattgtttcaccgtcaagcaccaatttttaggtaggtcagtgttttgggatgattctccgatgcatcaatagcaaccttgtgcttggcaaagttatttgccctgataatgttgtaggtttagtgaaaagaaatatactgacatatccatcgatccatcgatgcccaatggagattgacctctatcaagatttagttacgtgtctcaatagggcaatatttctgtgagttgtatactgtggattcctcatctgcatcatgaattgatcgcactatttatgccctatttttcaaaccatggtttctgtaattctttgcaccatggtatttttctcaaatgattttatctttcacaacccggactgaagtcactgaagcagaaagaaagagtacaagtctactactgcagaaagcaaggaggatgccaacagaagcagatttcatgtttggatcgggtattgacctttttgtgttctcctcaactcattatttagctacatatcttattaaatcttaatatttggtcattagctaccaacttgcactattattgtgaaaatccattaactttagccaatgaaatggttagactatcaccacgtaggtgatattagtggcattaagttattaatctgtggcaaattctattatcaactattttcttggctaatcattacaatatataatgaagaatactatggcttgaagggatatttatacagttggctatgtatacggtctgcccaagcgcccaacaatgaatgatgtggtgaaggaacttgagatcatcagatagaatgaaggggcacaattgctaaactcaacgtctttatcagttgaacaatttggaaaaaaagagaagagatccttatgcatttgcctatggatgatggaagcaacaacaacacttttgactacaacagtgggagttcaattaagttgttcacccaagtagatagttgtctccactctttcaacaagttattggagtgattatatatgtctgctccatatgaatgccttttcgttttagtatcacatctgaaattaccaaccttttagatcgggtattgacatctttgtgttctcctcaactcattatttagctacatatcttattaaatcttaatctttggtcattagctaccagcttgcactattattgtgaaaatccattaactttagtaagtgaaatggttagactatcaccacgtaggtgatattagtggcgttaagtgattaatcagtggcaaatcctattatcaactattttcttggctaatcattacaatatataatgaagaataccatggcttgcagtgatatttatacagttggctatgtatacagtctgcctaggcgcccaacaatgaatgaagtggtgaaggaacttgagatcatcagatagaatgaaggggcacaattgttaaactcagcgtctttattagttgaacaatttggaaacaaaaagagaagagatccttatgcatttgcctatggatgatggaagcaacaacaacacttttgactacaacagtgggagttcaattaagttgttcacccaagtagataattgtctccactctttcaacaagttattggagtgattatatatgtctgctccatatgaatgccttttcattttagtatcacatctgaaattaccaaccttttagatcggataaaatcttaagcaaaatgggagaaggtttgggttttctgcaatctgtcgtctcctcttctgctgggtatctccgttattattctaatgaagagggctatgagttggattttcgtaggtacatttgagcgtgttttggaatgctgggaccgtgaaacacatgaatatgttgccataaaagttgttcgcagtatccacaagtactctgatgctacaatgattgagatagatgtgctcaatcgccttgtagaaaatgaaaaatatagatctctgtgagtatctcagagacctaattgcttaaagtataaccctattctatttttgacttgacagttcctcttcaatttgtcagctgtgctcaaatttagagatggcttgactatcgtaatcatatatgcatggatgcgttactttatgtttgcttgtatttaatatagaaggctcccttgccttcgttcgatcatgtggtatttgaaagtgatgtctctataaatgaagtaaggtagggcaatgcttatgttactgttgtcagttattagctttttaaaccatgcatctgtcaatgtgtcctgtttcaatagggtcttattataggacgtgatggcactgaattaggatgtttgttcttttgctacctttgttaaacaacatcagatcattcgtattgtatccttcctcggattgcttcttttgttctactacaaatatgcccaacatggcagggagaggtatgctcctaaatttcttattttgtgcattgtgaaatgattgttctaacaacatcaagtttgtgttcttcatataatctatctcagattgctctgtgttttgcaggtctcgaggtcaagcctggacccactgtcaagtgtgtgcttggacatgactttatcctgcactttccactgctgcacttggggaatcaaagaaaagtgaaagtaccatgtcaaagttgatgaccagaagcttgctattggaaccctctctattgaaaaatacccctagatagaaattgatttggttttcaataaagagtgtgagttgtcacacacatagaaaactacctgtgtatttttctttggttacaaggttgagcaaccaatcgaggaagatgaatatcctttttaacattgatttttttagttttatttcatgtaagactgatctaaacaatttctttgtggagtattttgtttccttgatctcatttttgcttcttgcctcttacataatggatcttgattctgaagatgaagagaaggagctaaacattccagtaatcaaggaaaatggcaaaggtgatgggaaggcagttgctgcagcttcaaaatcaagtcttgggcttgaaaaaaagcaaggatgagtatgagtctgatgattctgatgagggagaaggtgaaaccggagaatgaggagatgtggttgttcatggacgacagcatcaagaaacctgcaacatgcaacctgattttaagaaatctgccacctgcaacatgactgggcagtggtatctctgagatataatgtggacaacggcaaagaatactatgcatacacaacaaaagagtcctacaacctgattttaagtccatttgtagcaaaccatcttggaagccattaactcgttgaatttgaagctgatgtgcagttttatttttatgtcagttttactgatgcagttagttcctaagaagatccatggcaacttgtttcacgctg

SEQ ID NO: 24978 - DNA, 2707 bp, Zea Mays
cggttctgccatcgtctcctctccgcgacgcacgcctccctctcctccgccccaccctcctccccacgccatcggcaccgccatcatcagatccggcccaagacgcctctgccccacgcgcccgagtcgtcgaggcacactcctgcccgcctccggcgtccacgcacatctccgcctcacctcggcgcccgagtcgtcgcacgcgttcgaggtggcgtccatcccggcaccggcctcacgcaccatctacagctcccaactctgctcctctcagttctccctctgcattccaccttctctcccttcctctccaagcaccgtcctcctcgcctagatccgtacaagctgcaaataacctctccggtggcaagacagatggagtcgatctccggcgaggatgctccgaagcacaacctgatcctgtccgcgctcgtctccaacctacagtgcatgctcgccgcccgccgcccgttcacggcagaggtcagcaccgccgccacagctagcgaggctgaggccttggctcaggaagcagaggcgtccgatgcccccacgggagatgggacgctggcgaggcccatcgtgctgctgacctgtgccggaggggaaccggtcggcgggtctcgcggcgctcgtcgacgccctcgttgccgccggccgctgcgatgtccacgtgtgtgcccccgaatcgtacatgctgtgacttagaaaaccaaaccacagcgggaccggtgctcggatagggtccaacggcgatgcaagcaaggagtggcatgcggccggaggggcgcagatcggctcctgcacgtgcagcgcagccgcgtgacagtgaagcagggaggccgcgataggcggcacagggagggtgcgacggaggcaaagtgcaagcacctggggacttcagtcactgaagcagaaagaaagagtacaagtctactactgcagaaagcaaggaggatgccaacagaagcagatttcatgtttggatcggataaaatcttaagcaaaatgggagaaggtttgggttttctgcaatctgtcgtctcctcttctgctgggtatctccgttattattctaatgaagagggctatgagttggattttcgtaggtacatttgagcgtgttttggaatgctgggaccgtgaaacacatgaatatgttgccataaaagttgttcgcagtatccacaagtactctgatgctacaatgattgagatagatgtgctcaatcgccttgtagaaaatgaaaaatatagatctctgtgagtatctcagagacctaattgcttaaagtataaccctattctatttttgacttgacagttcctcttcaatttgtcagctgtgctcaaatttagagatggcttgactatcgtaatcatatatgcatggatgcgttactttatgtttgcttgtatttaatatagaaggctcccttgccttcgttcgatcatgtggtatttgaaagtgatgtctctataaatgaagtaaggtagggcaatgcttatgttactgttgtcagttattagctttttaaaccatgcatctgtcaatgtgtcctgtttcaatagggtcttattataggacgtgatggcactgaattaggatgtttgttcttttgctacctttgttaaacaacatcagatcattcgtattgtatccttcctcggattgcttcttttgttctactacaaatatgcccaacatggcagggagaggtatgctcctaaatttcttattttgtgcattgtgaaatgattgttctaacaacatcaagtttgtgttcttcatataatctatctcagattgctctgtgttttgcaggtctcgaggtcaagcctggacccactgtcaagtgtgtgcttggacatgactttatcctgcactttccactgctgcacttggggaatcaaagaaaagtgaaagtaccatgtcaaagttgatgaccagaagcttgctattggaaccctctctattgaaaaatacccctagatagaaattgatttggttttcaataaagagtgtgagttgtcacacacatagaaaactacctgtgtatttttctttggttacaaggttgagcaaccaatcgaggaagatgaatatcctttttaacattgatttttttagttttatttcatgtaagactgatctaaacaatttctttgtggagtattttgtttccttgatctcatttttgcttcttgcctcttacataatggatcttgattctgaagatgaagagaaggagctaaacattccagtaatcaaggaaaatggcaaaggtgatgggaaggcagttgctgcagcttcaaaatcaagtcttgggcttgaaaaaaagcaaggatgagtatgagtctgatgattctgatgagggagaaggtgaaaccggagaatgaggagatgtggttgttcatggacgacagcatcaagaaacctgcaacatgcaacctgattttaagaaatctgccacctgcaacatgactgggcagtggtatctctgagatataatgtggacaacggcaaagaatactatgcatacacaacaaaagagtcctacaacctgattttaagtccatttgtagcaaaccatcttggaagccattaactcgttgaatttgaagctgatgtgcagttttatttttatgtcagttttactgatgcagttagttcctaagaagatccatggcaacttgtttcacgctg

SEQ ID NO: 24979 - DNA, 3153 bp, Zea Mays
cggttctgccatcgtctcctctccgcgacgcacgcctccctctcctccgccccaccctcctccccacgccatcggcaccgccatcatcagatccggcccaagacgcctctgccccacgcgcccgagtcgtcgaggcacactcctgcccgcctccggcgtccacgcacatctccgcctcacctcggcgcccgagtcgtcgcacgcgttcgaggtggcgtccatcccggcaccggcctcacgcaccatctacagctcccaactctgctcctctcagttctccctctgcattccaccttctctcccttcctctccaagcaccgtcctcctcgcctagatccgtacaagctgcaaataacctctccggtggcaagacagatggagtcgatctccggcgaggatgctccgaagcacaacctgatcctgtccgcgctcgtctccaacctacagtgcatgctcgccgcccgccgcccgttcacggcagaggtcagcaccgccgccacagctagcgaggctgaggccttggctcaggaagcagaggcgtccgatgcccccacgggagatgggacgctggcgaggcccatcgtgctgctgacctgtgccggaggggaaccggtcggcgggtctcgcggcgctcgtcgacgccctcgttgccgccggccgctgcgatgtccacgtgtgtgcccccgaatcgtacatgctgtgacttagaaaaccaaaccacagcgggaccggtgctcggatagggtccaacggcgatgcaagcaaggagtggcatgcggccggaggggcgcagatcggctcctgcacgtgcagcgcagccgcgtgacagtgaagcagggaggccgcgataggcggcacagggagggtgcgacggaggcaaagtgcaagcacctggggacttcaggtaagtagaaaaccaacactgaatttgtcggttctctgttttgtgattgaccgattggtttgttgatctcagaaacaaaaaattgtttcaccgtcaagcaccaatttttaggtaggtcagtgttttgggatgattctccgatgcatcaatagcaaccttgtgcttggcaaagttatttgccctgataatgttgtaggtttagtgaaaagaaatatactgacatatccatcgatccatcgatgcccaatggagattgacctctatcaagatttagttacgtgtctcaatagggcaatatttctgtgagttgtatactgtggattcctcatctgcatcatgaattgatcgcactatttatgccctatttttcaaaccatggtttctgtaattctttgcaccatggtatttttctcaaatgattttatctttcacaacccggactgaagtcactgaagcagaaagaaagagtacaagtctactactgcagaaagcaaggaggatgccaacagaagcagatttcatgtttggatcggataaaatcttaagcaaaatgggagaaggtttgggttttctgcaatctgtcgtctcctcttctgctgggtatctccgttattattctaatgaagagggctatgagttggattttcgtaggtacatttgagcgtgttttggaatgctgggaccgtgaaacacatgaatatgttgccataaaagttgttcgcagtatccacaagtactctgatgctacaatgattgagatagatgtgctcaatcgccttgtagaaaatgaaaaatatagatctctgtgagtatctcagagacctaattgcttaaagtataaccctattctatttttgacttgacagttcctcttcaatttgtcagctgtgctcaaatttagagatggcttgactatcgtaatcatatatgcatggatgcgttactttatgtttgcttgtatttaatatagaaggctcccttgccttcgttcgatcatgtggtatttgaaagtgatgtctctataaatgaagtaaggtagggcaatgcttatgttactgttgtcagttattagctttttaaaccatgcatctgtcaatgtgtcctgtttcaatagggtcttattataggacgtgatggcactgaattaggatgtttgttcttttgctacctttgttaaacaacatcagatcattcgtattgtatccttcctcggattgcttcttttgttctactacaaatatgcccaacatggcagggagaggtatgctcctaaatttcttattttgtgcattgtgaaatgattgttctaacaacatcaagtttgtgttcttcatataatctatctcagattgctctgtgttttgcaggtctcgaggtcaagcctggacccactgtcaagtgtgtgcttggacatgactttatcctgcactttccactgctgcacttggggaatcaaagaaaagtgaaagtaccatgtcaaagttgatgaccagaagcttgctattggaaccctctctattgaaaaatacccctagatagaaattgatttggttttcaataaagagtgtgagttgtcacacacatagaaaactacctgtgtatttttctttggttacaaggttgagcaaccaatcgaggaagatgaatatcctttttaacattgatttttttagttttatttcatgtaagactgatctaaacaatttctttgtggagtattttgtttccttgatctcatttttgcttcttgcctcttacataatggatcttgattctgaagatgaagagaaggagctaaacattccagtaatcaaggaaaatggcaaaggtgatgggaaggcagttgctgcagcttcaaaatcaagtcttgggcttgaaaaaaagcaaggatgagtatgagtctgatgattctgatgagggagaaggtgaaaccggagaatgaggagatgtggttgttcatggacgacagcatcaagaaacctgcaacatgcaacctgattttaagaaatctgccacctgcaacatgactgggcagtggtatctctgagatataatgtggacaacggcaaagaatactatgcatacacaacaaaagagtcctacaacctgattttaagtccatttgtagcaaaccatcttggaagccattaactcgttgaatttgaagctgatgtgcagttttatttttatgtcagttttactgatgcagttagttcctaagaagatccatggcaacttgtttcacgctg

SEQ ID NO: 24980 - DNA, 3823 bp, Zea Mays
cacggttctgccatcgtctcctctccgcgacgcacgcctccctctcctccgccccaccctcctccccacgccatcggcaccgccatcatcagatccggcccaagacgcctctgccccacgcgcccgagtcgtcgaggcacactcctgcccgcctccggcgtccacgcacatctccgcctcacctcggcgcccgagtcgtcgcacgcgttcgaggtggcgtccatcccggcaccggcctcacgcaccatctacagctcccaactctgctcctctcagttctccctctgcattccaccttctctcccttcctctccaagcaccgtcctcctcgcctagatccgtacaagctgcaaataacctctccggtggcaagacagatggagtcgatctccggcgaggatgctccgaagcacaacctgatcctgtccgcgctcgtctccaacctacagtgcatgctcgccgcccgccgcccgttcacggcagaggtcagcaccgccgccacagctagcgaggctgaggccttggctcaggaagcagaggcgtccgatgcccccacgggagatgggacgctggcgaggcccatcgtgctgctgacctgtgccggaggggaaccggtcggcgggtctcgcggcgctcgtcgacgccctcgttgccgccggccgctgcgatgtccacgtgtgtgcccccgaatcgtacatgctgtgacttagaaaaccaaaccacagcgggaccggtgctcggatagggtccaacggcgatgcaagcaaggagtggcatgcggccggaggggcgcagatcggctcctgcacgtgcagcgcagccgcgtgacagtgaagcagggaggccgcgataggcggcacagggagggtgcgacggaggcaaagtgcaagcacctggggacttcagaaagaaagagtacaagtctactactgcagaaagcaaggaggatgccaacagaagcagatttcatgtttggatcggtgatatttatacagttggctatgtatacagtctgcctaggcgcccaacaatgaatgaagtggtgaaggaacttgagatcatcagatagaatgaaggggcacaattgttaaactcagcgtctttattagttgaacaatttggaaacaaaaagagaagagatccttatgcatttgcctatggatgatggaagcaacaacaacacttttgactacaacagtgggagttcaattaagttgttcacccaagtagataattgtctccactctttcaacaagttattggagtgattatatatgtctgctccatatgaatgccttttcattttagtatcacatctgaaattaccaaccttttagatcgggtattgacattttttgtgttctcctcaactcactatttagctacatatcttattaaatcttaatcttttgtcattagctaccatattgcactattattgtgaaaatccattaactttagtcagtgaaatggttagactatcaccacgtaggtgatattagtggaattaagtgattaatcagtggcaaatcctattatcaactattttcttggctaatcattacaatatataatgaagaatactatggcttgaagggatatttatacagttggctatgctgcttacatgatccatttagctgtctttggatttttggggtaactctccaatatctcacatgaggttctttgtgatagctgttacttaatctgtggtgatctatgtaaatgtggcaacacttgcagttcctcgagcccttgtgcatggatatatcgtttagttgtgtctaataatttgtaattagtggcaacatctttttgttattttggttttatctgctttttattgttataagatctcgattgcaaactggcagttagtacaccattaggttttcctttgtcgtatcaagctaataatgtgtgaagcagggttcccattctgatctttagttttttgtgattttaatagcaataaccttttttcgcaaaaaagtaacaaactttatgcagaatgcggtccgtatagttcccagtatccttttgtacttagatttagtttgatatatggttatgtttattgacagaatgctttttagctttgcagataaaatcttaagcaaaatgggagaaggtttgggttttctgcaatctgtcgtctcctcttctgctgggtatctccgttattattctaatgaagagggctatgagttggattttcgtaggtacatttgagcgtgttttggaatgctgggaccgtgaaacacatgaatatgttgccataaaagttgttcgcagtatccacaagtactctgatgctacaatgattgagatagatgtgctcaatcgccttgtagaaaatgaaaaatatagatctctgtgagtatctcagagacctaattgcttaaagtataaccctattctatttttgacttgacagttcctcttcaatttgtcagctgtgctcaaatttagagatggcttgactatcgtaatcatatatgcatggatgcgttactttatgtttgcttgtatttaatatagaaggctcccttgccttcgttcgatcatgtggtatttgaaagtgatgtctctataaatgaagtaaggtagggcaatgcttatgttactgttgtcagttattagctttttaaaccatgcatctgtcaatgtgtcctgtttcaatagggtcttattataggacgtgatggcactgaattaggatgtttgttcttttgctacctttgttaaacaacatcagatcattcgtattgtatccttcctcggattgcttcttttgttctactacaaatatgcccaacatggcagggagaggtatgctcctaaatttcttattttgtgcattgtgaaatgattgttctaacaacatcaagtttgtgttcttcatataatctatctcagattgctctgtgttttgcaggtctcgaggtcaagcctggacccactgtcaagtgtgtgcttggacatgactttatcctgcactttccactgctgcacttggggaatcaaagaaaagtgaaagtaccatgtcaaagttgatgaccagaagcttgctattggaaccctctctattgaaaaatacccctagatagaaattgatttggttttcaataaagagtgtgagttgtcacacacatagaaaactacctgtgtatttttctttggttacaaggttgagcaaccaatcgaggaagatgaatatcctttttaacattgatttttttagttttatttcatgtaagactgatctaaacaatttctttgtggagtattttgtttccttgatctcatttttgcttcttgcctcttacataatggatcttgattctgaagatgaagagaaggagctaaacattccagtaatcaaggaaaatggcaaaggtgatgggaaggcagttgctgcagcttcaaaatcaagtcttgggcttgaaaaaaagcaaggatgagtatgagtctgatgattctgatgagggagaaggtgaaaccggagaatgaggagatgtggttgttcatggacgacagcatcaagaaacctgcaacatgcaacctgattttaagaaatctgccacctgcaacatgactgggcagtggtatctctgagatataatgtggacaacggcaaagaatactatgcatacacaacaaaagagtcctacaacctgattttaagtccatttgtagcaaaccatcttggaagccattaactcgttgaatttgaagctgatgtgcagttttatttttatgtcagttttactgatgcagttagttcctaagaagatccatggcaacttgtttcacgctg

SEQ ID NO: 24981 - DNA, 3134 bp, Zea Mays
cacggttctgccatcgtctcctctccgcgacgcacgcctccctctcctccgccccaccctcctccccacgccatcggcaccgccatcatcagatccggcccaagacgcctctgccccacgcgcccgagtcgtcgaggcacactcctgcccgcctccggcgtccacgcacatctccgcctcacctcggcgcccgagtcgtcgcacgcgttcgaggtggcgtccatcccggcaccggcctcacgcaccatctacagctcccaactctgctcctctcagttctccctctgcattccaccttctctcccttcctctccaagcaccgtcctcctcgcctagatccgtacaagctgcaaataacctctccggtggcaagacagatggagtcgatctccggcgaggatgctccgaagcacaacctgatcctgtccgcgctcgtctccaacctacagtgcatgctcgccgcccgccgcccgttcacggcagaggtcagcaccgccgccacagctagcgaggctgaggccttggctcaggaagcagaggcgtccgatgcccccacgggagatgggacgctggcgaggcccatcgtgctgctgacctgtgccggaggggaaccggtcggcgggtctcgcggcgctcgtcgacgccctcgttgccgccggccgctgcgatgtccacgtgtgtgcccccgaatcgtacatgctgtgacttagaaaaccaaaccacagcgggaccggtgctcggatagggtccaacggcgatgcaagcaaggagtggcatgcggccggaggggcgcagatcggctcctgcacgtgcagcgcagccgcgtgacagtgaagcagggaggccgcgataggcggcacagggagggtgcgacggaggcaaagtgcaagcacctggggacttcagtcactgaagcagaaagaaagagtacaagtctactactgcagaaagcaaggaggatgccaacagaagcagatttcatgtttggatcggtctgcctaggcgcccaacaatgaatgaagtggtgaaggaacttgagatcatcagatagaatgaaggggcacaattgttaaactcagcgtctttattagttgaacaatttggaaacaaaaagagaagagatccttatgcatttgcctatggatgatggaagcaacaacaacacttttgactacaacagtgggagttcaattaagttgttcacccaagtagataattgtctccactctttcaacaagttattggagtgattatatatgtctgctccatatgaatgccttttcattttagtatcacatctgaaattaccaaccttttagatcggataaaatcttaagcaaaatgggagaaggtttgggttttctgcaatctgtcgtctcctcttctgctgggtatctccgttattattctaatgaagagggctatgagttggattttcgtaggtacatttgagcgtgttttggaatgctgggaccgtgaaacacatgaatatgttgccataaaagttgttcgcagtatccacaagtactctgatgctacaatgattgagatagatgtgctcaatcgccttgtagaaaatgaaaaatatagatctctgtgagtatctcagagacctaattgcttaaagtataaccctattctatttttgacttgacagttcctcttcaatttgtcagctgtgctcaaatttagagatggcttgactatcgtaatcatatatgcatggatgcgttactttatgtttgcttgtatttaatatagaaggctcccttgccttcgttcgatcatgtggtatttgaaagtgatgtctctataaatgaagtaaggtagggcaatgcttatgttactgttgtcagttattagctttttaaaccatgcatctgtcaatgtgtcctgtttcaatagggtcttattataggacgtgatggcactgaattaggatgtttgttcttttgctacctttgttaaacaacatcagatcattcgtattgtatccttcctcggattgcttcttttgttctactacaaatatgcccaacatggcagggagaggtatgctcctaaatttcttattttgtgcattgtgaaatgattgttctaacaacatcaagtttgtgttcttcatataatctatctcagattgctctgtgttttgcaggtctcgaggtcaagcctggacccactgtcaagtgtgtgcttggacatgactttatcctgcactttccactgctgcacttggggaatcaaagaaaagtgaaagtaccatgtcaaagttgatgaccagaagcttgctattggaaccctctctattgaaaaatacccctagatagaaattgatttggttttcaataaagagtgtgagttgtcacacacatagaaaactacctgtgtatttttctttggttacaaggttgagcaaccaatcgaggaagatgaatatcctttttaacattgatttttttagttttatttcatgtaagactgatctaaacaatttctttgtggagtattttgtttccttgatctcatttttgcttcttgcctcttacataatggatcttgattctgaagatgaagagaaggagctaaacattccagtaatcaaggaaaatggtatatatatcttctcttttgttctttgtgggttttttctagcattgttggggttgaattatggattgtttggatcatgaacatatctaattaggcaaaggtgatgggaaggcagttgctgcagcttcaaaatcaagtcttgggcttgaaaaaaagcaaggatgagtatgagtctgatgattctgatgagggagaaggtgaaaccggagaatgaggagatgtggttgttcatggacgacagcatcaagaaacctgcaacatgcaacctgattttaagaaatctgccacctgcaacatgactgggcagtggtatctctgagatataatgtggacaacggcaaagaatactatgcatacacaacaaaagagtcctacaacctgattttaagtccatttgtagcaaaccatcttggaagccattaactcgttgaatttgaagctgatgtgcagttttatttttatgtcagttttactgatgcagttagttcctaagaagatccatggcaacttgtttcacgctg

SEQ ID NO: 24982 - DNA, 4688 bp, Zea Mays
cacggttctgccatcgtctcctctccgcgacgcacgcctccctctcctccgccccaccctcctccccacgccatcggcaccgccatcatcagatccggcccaagacgcctctgccccacgcgcccgagtcgtcgaggcacactcctgcccgcctccggcgtccacgcacatctccgcctcacctcggcgcccgagtcgtcgcacgcgttcgaggtggcgtccatcccggcaccggcctcacgcaccatctacagctcccaactctgctcctctcagttctccctctgcattccaccttctctcccttcctctccaagcaccgtcctcctcgcctagatccgtacaagctgcaaataacctctccggtggcaagacagatggagtcgatctccggcgaggatgctccgaagcacaacctgatcctgtccgcgctcgtctccaacctacagtgcatgctcgccgcccgccgcccgttcacggcagaggtcagcaccgccgccacagctagcgaggctgaggccttggctcaggaagcagaggcgtccgatgcccccacgggagatgggacgctggcgaggcccatcgtgctgctgacctgtgccggaggggaaccggtcggcgggtctcgcggcgctcgtcgacgccctcgttgccgccggccgctgcgatgtccacgtgtgtgcccccgaatcgtacatgctgtgacttagaaaaccaaaccacagcgggaccggtgctcggatagggtccaacggcgatgcaagcaaggagtggcatgcggccggaggggcgcagatcggctcctgcacgtgcagcgcagccgcgtgacagtgaagcagggaggccgcgataggcggcacagggagggtgcgacggaggcaaagtgcaagcacctggggacttcagaaagaaagagtacaagtctactactgcagaaagcaaggaggatgccaacagaagcagatttcatgtttggatcgggtattgacctttttgtgttctcctcaactcattatttagctacatatcttattaaatcttaatatttggtcattagctaccaacttgcactattattgtgaaaatccattaactttagccaatgaaatggttagactatcaccacgtaggtgatattagtggcattaagttattaatctgtggcaaattctattatcaactattttcttggctaatcattacaatatataatgaagaatactatggcttgaagggatatttatacagttggctatgtatacggtctgcccaagcgcccaacaatgaatgatgtggtgaaggaacttgagatcatcagatagaatgaaggggcacaattgctaaactcaacgtctttatcagttgaacaatttggaaaaaaagagaagagatccttatgcatttgcctatggatgatggaagcaacaacaacacttttgactacaacagtgggagttcaattaagttgttcacccaagtagatagttgtctccactctttcaacaagttattggagtgattatatatgtctgctccatatgaatgccttttcgttttagtatcacatctgaaattaccaaccttttagatcgggtattgacatctttgtgttctcctcaactcattatttagctacatatcttattaaatcttaatctttggtcattagctaccagcttgcactattattgtgaaaatccattaactttagtaagtgaaatggttagactatcaccacgtaggtgatattagtggcgttaagtgattaatcagtggcaaatcctattatcaactattttcttggctaatcattacaatatataatgaagaataccatggcttgcagtgatatttatacagttggctatgtatacagtctgcctaggcgcccaacaatgaatgaagtggtgaaggaacttgagatcatcagatagaatgaaggggcacaattgttaaactcagcgtctttattagttgaacaatttggaaacaaaaagagaagagatccttatgcatttgcctatggatgatggaagcaacaacaacacttttgactacaacagtgggagttcaattaagttgttcacccaagtagataattgtctccactctttcaacaagttattggagtgattatatatgtctgctccatatgaatgccttttcattttagtatcacatctgaaattaccaaccttttagatcgggtattgacattttttgtgttctcctcaactcactatttagctacatatcttattaaatcttaatcttttgtcattagctaccatattgcactattattgtgaaaatccattaactttagtcagtgaaatggttagactatcaccacgtaggtgatattagtggaattaagtgattaatcagtggcaaatcctattatcaactattttcttggctaatcattacaatatataatgaagaatactatggcttgaagggatatttatacagttggctatgctgcttacatgatccatttagctgtctttggatttttggggtaactctccaatatctcacatgaggttctttgtgatagctgttacttaatctgtggtgatctatgtaaatgtggcaacacttgcagttcctcgagcccttgtgcatggatatatcgtttagttgtgtctaataatttgtaattagtggcaacatctttttgttattttggttttatctgctttttattgttataagatctcgattgcaaactggcagttagtacaccattaggttttcctttgtcgtatcaagctaataatgtgtgaagcagggttcccattctgatctttagttttttgtgattttaatagcaataaccttttttcgcaaaaaagtaacaaactttatgcagaatgcggtccgtatagttcccagtatccttttgtacttagatttagtttgatatatggttatgtttattgacagaatgctttttagctttgcagataaaatcttaagcaaaatgggagaaggtttgggttttctgcaatctgtcgtctcctcttctgctgggtatctccgttattattctaatgaagagggctatgagttggattttcgtaggtacatttgagcgtgttttggaatgctgggaccgtgaaacacatgaatatgttgccataaaagttgttcgcagtatccacaagtactctgatgctacaatgattgagatagatgtgctcaatcgccttgtagaaaatgaaaaatatagatctctgtgagtatctcagagacctaattgcttaaagtataaccctattctatttttgacttgacagttcctcttcaatttgtcagctgtgctcaaatttagagatggcttgactatcgtaatcatatatgcatggatgcgttactttatgtttgcttgtatttaatatagaaggctcccttgccttcgttcgatcatgtggtatttgaaagtgatgtctctataaatgaagtaaggtagggcaatgcttatgttactgttgtcagttattagctttttaaaccatgcatctgtcaatgtgtcctgtttcaatagggtcttattataggacgtgatggcactgaattaggatgtttgttcttttgctacctttgttaaacaacatcagatcattcgtattgtatccttcctcggattgcttcttttgttctactacaaatatgcccaacatggcagggagaggtatgctcctaaatttcttattttgtgcattgtgaaatgattgttctaacaacatcaagtttgtgttcttcatataatctatctcagattgctctgtgttttgcaggtctcgaggtcaagcctggacccactgtcaagtgtgtgcttggacatgactttatcctgcactttccactgctgcacttggggaatcaaagaaaagtgaaagtaccatgtcaaagttgatgaccagaagcttgctattggaaccctctctattgaaaaatacccctagatagaaattgatttggttttcaataaagagtgtgagttgtcacacacatagaaaactacctgtgtatttttctttggttacaaggttgagcaaccaatcgaggaagatgaatatcctttttaacattgatttttttagttttatttcatgtaagactgatctaaacaatttctttgtggagtattttgtttccttgatctcatttttgcttcttgcctcttacataatggatcttgattctgaagatgaagagaaggagctaaacattccagtaatcaaggaaaatggcaaaggtgatgggaaggcagttgctgcagcttcaaaatcaagtcttgggcttgaaaaaaagcaaggatgagtatgagtctgatgattctgatgagggagaaggtgaaaccggagaatgaggagatgtggttgttcatggacgacagcatcaagaaacctgcaacatgcaacctgattttaagaaatctgccacctgcaacatgactgggcagtggtatctctgagatataatgtggacaacggcaaagaatactatgcatacacaacaaaagagtcctacaacctgattttaagtccatttgtagcaaaccatcttggaagccattaactcgttgaatttgaagctgatgtgcagttttatttttatgtcagttttactgatgcagttagttcctaagaagatccatggcaacttgtttcacgctg

SEQ ID NO: 24983 - DNA, 2699 bp, Zea Mays
tgcacggttctgccatcgtctcctctccgcgacgcacgcctccctctcctccgccccaccctcctccccacgccatcggcaccgccatcatcagatccggcccaagacgcctctgccccacgcgcccgagtcgtcgaggcacactcctgcccgcctccggcgtccacgcacatctccgcctcacctcggcgcccgagtcgtcgcacgcgttcgaggtggcgtccatcccggcaccggcctcacgcaccatctacagctcccaactctgctcctctcagttctccctctgcattccaccttctctcccttcctctccaagcaccgtcctcctcgcctagatccgtacaagctgcaaataacctctccggtggcaagacagatggagtcgatctccggcgaggatgctccgaagcacaacctgatcctgtccgcgctcgtctccaacctacagtgcatgctcgccgcccgccgcccgttcacggcagaggtcagcaccgccgccacagctagcgaggctgaggccttggctcaggaagcagaggcgtccgatgcccccacgggagatgggacgctggcgaggcccatcgtgctgctgacctgtgccggaggggaaccggtcggcgggtctcgcggcgctcgtcgacgccctcgttgccgccggccgctgcgatgtccacgtgtgtgcccccgaatcgtacatgctgtgacttagaaaaccaaaccacagcgggaccggtgctcggatagggtccaacggcgatgcaagcaaggagtggcatgcggccggaggggcgcagatcggctcctgcacgtgcagcgcagccgcgtgacagtgaagcagggaggccgcgataggcggcacagggagggtgcgacggaggcaaagtgcaagcacctggggacttcagaaagaaagagtacaagtctactactgcagaaagcaaggaggatgccaacagaagcagatttcatgtttggatcggataaaatcttaagcaaaatgggagaaggtttgggttttctgcaatctgtcgtctcctcttctgctgggtatctccgttattattctaatgaagagggctatgagttggattttcgtaggtacatttgagcgtgttttggaatgctgggaccgtgaaacacatgaatatgttgccataaaagttgttcgcagtatccacaagtactctgatgctacaatgattgagatagatgtgctcaatcgccttgtagaaaatgaaaaatatagatctctgtgagtatctcagagacctaattgcttaaagtataaccctattctatttttgacttgacagttcctcttcaatttgtcagctgtgctcaaatttagagatggcttgactatcgtaatcatatatgcatggatgcgttactttatgtttgcttgtatttaatatagaaggctcccttgccttcgttcgatcatgtggtatttgaaagtgatgtctctataaatgaagtaaggtagggcaatgcttatgttactgttgtcagttattagctttttaaaccatgcatctgtcaatgtgtcctgtttcaatagggtcttattataggacgtgatggcactgaattaggatgtttgttcttttgctacctttgttaaacaacatcagatcattcgtattgtatccttcctcggattgcttcttttgttctactacaaatatgcccaacatggcagggagaggtatgctcctaaatttcttattttgtgcattgtgaaatgattgttctaacaacatcaagtttgtgttcttcatataatctatctcagattgctctgtgttttgcaggtctcgaggtcaagcctggacccactgtcaagtgtgtgcttggacatgactttatcctgcactttccactgctgcacttggggaatcaaagaaaagtgaaagtaccatgtcaaagttgatgaccagaagcttgctattggaaccctctctattgaaaaatacccctagatagaaattgatttggttttcaataaagagtgtgagttgtcacacacatagaaaactacctgtgtatttttctttggttacaaggttgagcaaccaatcgaggaagatgaatatcctttttaacattgatttttttagttttatttcatgtaagactgatctaaacaatttctttgtggagtattttgtttccttgatctcatttttgcttcttgcctcttacataatggatcttgattctgaagatgaagagaaggagctaaacattccagtaatcaaggaaaatggcaaaggtgatgggaaggcagttgctgcagcttcaaaatcaagtcttgggcttgaaaaaaagcaaggatgagtatgagtctgatgattctgatgagggagaaggtgaaaccggagaatgaggagatgtggttgttcatggacgacagcatcaagaaacctgcaacatgcaacctgattttaagaaatctgccacctgcaacatgactgggcagtggtatctctgagatataatgtggacaacggcaaagaatactatgcatacacaacaaaagagtcctacaacctgattttaagtccatttgtagcaaaccatcttggaagccattaactcgttgaatttgaagctgatgtgcagttttatttttatgtcagttttactgatgcagttagttcctaagaagatccatggcaacttgtttcacgctg

SEQ ID NO: 24984 - DNA, 3160 bp, Zea Mays
gtgcacggttctgccatcgtctcctctccgcgacgcacgcctccctctcctccgccccaccctcctccccacgccatcggcaccgccatcatcagatccggcccaagacgcctctgccccacgcgcccgagtcgtcgaggcacactcctgcccgcctccggcgtccacgcacatctccgcctcacctcggcgcccgagtcgtcgcacgcgttcgaggtggcgtccatcccggcaccggcctcacgcaccatctacagctcccaactctgctcctctcagttctccctctgcattccaccttctctcccttcctctccaagcaccgtcctcctcgcctagatccgtacaagctgcaaataacctctccggtggcaagacagatggagtcgatctccggcgaggatgctccgaagcacaacctgatcctgtccgcgctcgtctccaacctacagtgcatgctcgccgcccgccgcccgttcacggcagaggtcagcaccgccgccacagctagcgaggctgaggccttggctcaggaagcagaggcgtccgatgcccccacgggagatgggacgctggcgaggcccatcgtgctgctgacctgtgccggaggggaaccggtcggcgggtctcgcggcgctcgtcgacgccctcgttgccgccggccgctgcgatgtccacgtgtgtgcccccgaatcgtacatgctgtgacttagaaaaccaaaccacagcgggaccggtgctcggatagggtccaacggcgatgcaagcaaggagtggcatgcggccggaggggcgcagatcggctcctgcacgtgcagcgcagccgcgtgacagtgaagcagggaggccgcgataggcggcacagggagggtgcgacggaggcaaagtgcaagcacctggggacttcagaaagaaagagtacaagtctactactgcagaaagcaaggaggatgccaacagaagcagatttcatgtttggatcgggtattgacctttttgtgttctcctcaactcattatttagctacatatcttattaaatcttaatatttggtcattagctaccaacttgcactattattgtgaaaatccattaactttagccaatgaaatggttagactatcaccacgtaggtgatattagtggcattaagttattaatctgtggcaaattctattatcaactattttcttggctaatcattacaatatataatgaagaatactatggcttgaagggatatttatacagttggctatgtatacggtctgcccaagcgcccaacaatgaatgatgtggtgaaggaacttgagatcatcagatagaatgaaggggcacaattgctaaactcaacgtctttatcagttgaacaatttggaaaaaaagagaagagatccttatgcatttgcctatggatgatggaagcaacaacaacacttttgactacaacagtgggagttcaattaagttgttcacccaagtagatagttgtctccactctttcaacaagttattggagtgattatatatgtctgctccatatgaatgccttttcgttttagtatcacatctgaaattaccaaccttttagatcggataaaatcttaagcaaaatgggagaaggtttgggttttctgcaatctgtcgtctcctcttctgctgggtatctccgttattattctaatgaagagggctatgagttggattttcgtaggtacatttgagcgtgttttggaatgctgggaccgtgaaacacatgaatatgttgccataaaagttgttcgcagtatccacaagtactctgatgctacaatgattgagatagatgtgctcaatcgccttgtagaaaatgaaaaatatagatctctgtgagtatctcagagacctaattgcttaaagtataaccctattctatttttgacttgacagttcctcttcaatttgtcagctgtgctcaaatttagagatggcttgactatcgtaatcatatatgcatggatgcgttactttatgtttgcttgtatttaatatagaaggctcccttgccttcgttcgatcatgtggtatttgaaagtgatgtctctataaatgaagtaagatcattcgtattgtatccttcctcggattgcttcttttgttctactacaaatatgcccaacatggcagggagaggtatgctcctaaatttcttattttgtgcattgtgaaatgattgttctaacaacatcaagtttgtgttcttcatataatctatctcagattgctctgtgttttgcaggtctcgaggtcaagcctggacccactgtcaagtgtgtgcttggacatgactttatcctgcactttccactgctgcacttggggaatcaaagaaaagtgaaagtaccatgtcaaagttgatgaccagaagcttgctattggaaccctctctattgaaaaatacccctagatagaaattgatttggttttcaataaagagtgtgagttgtcacacacatagaaaactacctgtgtatttttctttggttacaaggttgagcaaccaatcgaggaagatgaatatcctttttaacattgatttttttagttttatttcatgtaagactgatctaaacaatttctttgtggagtattttgtttccttgatctcatttttgcttcttgcctcttacataatggatcttgattctgaagatgaagagaaggagctaaacattccagtaatcaaggaaaatggcaaaggtgatgggaaggcagttgctgcagcttcaaaatcaagtcttgggcttgaaaaaaagcaaggatgagtatgagtctgatgattctgatgagggagaaggtgaaaccggagaatgaggagatgtggttgttcatggacgacagcatcaagaaacctgcaacatgcaacctgattttaagaaatctgccacctgcaacatgactgggcagtggtatctctgagatataatgtggacaacggcaaagaatactatgcatacacaacaaaagagtcctacaacctgattttaagtccatttgtagcaaaccatcttggaagccattaactcgttgaatttgaagctgatgtgcagttttatttttatgtcagttttactgatgcagttagttcctaagaagatccatggcaacttgtttcacgctg

SEQ ID NO: 24985 - DNA, 3815 bp, Zea Mays
gtatggtgcacggttctgccatcgtctcctctccgcgacgcacgcctccctctcctccgccccaccctcctccccacgccatcggcaccgccatcatcagatccggcccaagacgcctctgccccacgcgcccgagtcgtcgaggcacactcctgcccgcctccggcgtccacgcacatctccgcctcacctcggcgcccgagtcgtcgcacgcgttcgaggtggcgtccatcccggcaccggcctcacgcaccatctacagctcccaactctgctcctctcagttctccctctgcattccaccttctctcccttcctctccaagcaccgtcctcctcgcctagatccgtacaagctgcaaataacctctccggtggcaagacagatggagtcgatctccggcgaggatgctccgaagcacaacctgatcctgtccgcgctcgtctccaacctacagtgcatgctcgccgcccgccgcccgttcacggcagaggtcagcaccgccgccacagctagcgaggctgaggccttggctcaggaagcagaggcgtccgatgcccccacgggagatgggacgctggcgaggcccatcgtgctgctgacctgtgccggaggggaaccggtcggcgggtctcgcggcgctcgtcgacgccctcgttgccgccggccgctgcgatgtccacgtgtgtgcccccgaatcgtacatgctgtgacttagaaaaccaaaccacagcgggaccggtgctcggatagggtccaacggcgatgcaagcaaggagtggcatgcggccggaggggcgcagatcggctcctgcacgtgcagcgcagccgcgtgacagtgaagcagggaggccgcgataggcggcacagggagggtgcgacggaggcaaagtgcaagcacctggggacttcagaaagaaagagtacaagtctactactgcagaaagcaaggaggatgccaacagaagcagatttcatgtttggatcgggtattgacctttttgtgttctcctcaactcattatttagctacatatcttattaaatcttaatatttggtcattagctaccaacttgcactattattgtgaaaatccattaactttagccaatgaaatggttagactatcaccacgtaggtgatattagtggcattaagttattaatctgtggcaaattctattatcaactattttcttggctaatcattacaatatataatgaagaatactatggcttgaagggatatttatacagttggctatgtatacggtctgcccaagcgcccaacaatgaatgatgtggtgaaggaacttgagatcatcagatagaatgaaggggcacaattgctaaactcaacgtctttatcagttgaacaatttggaaaaaaagagaagagatccttatgcatttgcctatggatgatggaagcaacaacaacacttttgactacaacagtgggagttcaattaagttgttcacccaagtagatagttgtctccactctttcaacaagttattggagtgattatatatgtctgctccatatgaatgccttttcgttttagtatcacatctgaaattaccaaccttttagatcgggtattgacatctttgtgttctcctcaactcattatttagctacatatcttattaaatcttaatctttggtcattagctaccagcttgcactattattgtgaaaatccattaactttagtaagtgaaatggttagactatcaccacgtaggtgatattagtggcgttaagtgattaatcagtggcaaatcctattatcaactattttcttggctaatcattacaatatataatgaagaataccatggcttgcagtgatatttatacagttggctatgtatacagtctgcctaggcgcccaacaatgaatgaagtggtgaaggaacttgagatcatcagatagaatgaaggggcacaattgttaaactcagcgtctttattagttgaacaatttggaaacaaaaagagaagagatccttatgcatttgcctatggatgatggaagcaacaacaacacttttgactacaacagtgggagttcaattaagttgttcacccaaataaaatcttaagcaaaatgggagaaggtttgggttttctgcaatctgtcgtctcctcttctgctgggtatctccgttattattctaatgaagagggctatgagttggattttcgtaggtacatttgagcgtgttttggaatgctgggaccgtgaaacacatgaatatgttgccataaaagttgttcgcagtatccacaagtactctgatgctacaatgattgagatagatgtgctcaatcgccttgtagaaaatgaaaaatatagatctctgtgagtatctcagagacctaattgcttaaagtataaccctattctatttttgacttgacagttcctcttcaatttgtcagctgtgctcaaatttagagatggcttgactatcgtaatcatatatgcatggatgcgttactttatgtttgcttgtatttaatatagaaggctcccttgccttcgttcgatcatgtggtatttgaaagtgatgtctctataaatgaagtaaggtagggcaatgcttatgttactgttgtcagttattagctttttaaaccatgcatctgtcaatgtgtcctgtttcaatagggtcttattataggacgtgatggcactgaattaggatgtttgttcttttgctacctttgttaaacaacatcagatcattcgtattgtatccttcctcggattgcttcttttgttctactacaaatatgcccaacatggcagggagaggtatgctcctaaatttcttattttgtgcattgtgaaatgattgttctaacaacatcaagtttgtgttcttcatataatctatctcagattgctctgtgttttgcaggtctcgaggtcaagcctggacccactgtcaagtgtgtgcttggacatgactttatcctgcactttccactgctgcacttggggaatcaaagaaaagtgaaagtaccatgtcaaagttgatgaccagaagcttgctattggaaccctctctattgaaaaatacccctagatagaaattgatttggttttcaataaagagtgtgagttgtcacacacatagaaaactacctgtgtatttttctttggttacaaggttgagcaaccaatcgaggaagatgaatatcctttttaacattgatttttttagttttatttcatgtaagactgatctaaacaatttctttgtggagtattttgtttccttgatctcatttttgcttcttgcctcttacataatggatcttgattctgaagatgaagagaaggagctaaacattccagtaatcaaggaaaatggcaaaggtgatgggaaggcagttgctgcagcttcaaaatcaagtcttgggcttgaaaaaaagcaaggatgagtatgagtctgatgattctgatgagggagaaggtgaaaccggagaatgaggagatgtggttgttcatggacgacagcatcaagaaacctgcaacatgcaacctgattttaagaaatctgccacctgcaacatgactgggcagtggtatctctgagatataatgtggacaacggcaaagaatactatgcatacacaacaaaagagtcctacaacctgattttaagtccatttgtagcaaaccatcttggaagccattaactcgttgaatttgaagctgatgtgcagttttatttttatgtcagttttactgatgcagttagttcctaagaagatccatggcaacttgtttcacgctg

SEQ ID NO: 24986 - DNA, 3408 bp, Zea Mays
gtatggtgcacggttctgccatcgtctcctctccgcgacgcacgcctccctctcctccgccccaccctcctccccacgccatcggcaccgccatcatcagatccggcccaagacgcctctgccccacgcgcccgagtcgtcgaggcacactcctgcccgcctccggcgtccacgcacatctccgcctcacctcggcgcccgagtcgtcgcacgcgttcgaggtggcgtccatcccggcaccggcctcacgcaccatctacagctcccaactctgctcctctcagttctccctctgcattccaccttctctcccttcctctccaagcaccgtcctcctcgcctagatccgtacaagctgcaaataacctctccggtggcaagacagatggagtcgatctccggcgaggatgctccgaagcacaacctgatcctgtccgcgctcgtctccaacctacagtgcatgctcgccgcccgccgcccgttcacggcagaggtcagcaccgccgccacagctagcgaggctgaggccttggctcaggaagcagaggcgtccgatgcccccacgggagatgggacgctggcgaggcccatcgtgctgctgacctgtgccggaggggaaccggtcggcgggtctcgcggcgctcgtcgacgccctcgttgccgccggccgctgcgatgtccacgtgtgtgcccccgaatcgtacatgctgtgacttagaaaaccaaaccacagcgggaccggtgctcggatagggtccaacggcgatgcaagcaaggagtggcatgcggccggaggggcgcagatcggctcctgcacgtgcagcgcagccgcgtgacagtgaagcagggaggccgcgataggcggcacagggagggtgcgacggaggcaaagtgcaagcacctggggacttcaggtaagtagaaaaccaacactgaatttgtcggttctctgttttgtgattgaccgattggtttgttgatctcagaaacaaaaaattgtttcaccgtcaagcaccaatttttaggtaggtcagtgttttgggatgattctccgatgcatcaatagcaaccttgtgcttggcaaagttatttgccctgataatgttgtaggtttagtgaaaagaaatatactgacatatccatcgatccatcgatgcccaatggagattgacctctatcaagatttagttacgtgtctcaatagggcaatatttctgtgagttgtatactgtggattcctcatctgcatcatgaattgatcgcactatttatgccctatttttcaaaccatggtttctgtaattctttgcaccatggtatttttctcaaatgattttatctttcacaacccggactgaagtcactgaagcagaaagaaagagtacaagtctactactgcagaaagcaaggaggatgccaacagaagcagatttcatgtttggatcggtgatatttatacagttggctatgtatacagtctgcctaggcgcccaacaatgaatgaagtggtgaaggaacttgagatcatcagatagaatgaaggggcacaattgttaaactcagcgtctttattagttgaacaatttggaaacaaaaagagaagagatccttatgcatttgcctatggatgatggaagcaacaacaacacttttgactacaacagtgggagttcaattaagttgttcacccaaataaaatcttaagcaaaatgggagaaggtttgggttttctgcaatctgtcgtctcctcttctgctgggtatctccgttattattctaatgaagagggctatgagttggattttcgtaggtacatttgagcgtgttttggaatgctgggaccgtgaaacacatgaatatgttgccataaaagttgttcgcagtatccacaagtactctgatgctacaatgattgagatagatgtgctcaatcgccttgtagaaaatgaaaaatatagatctctgtgagtatctcagagacctaattgcttaaagtataaccctattctatttttgacttgacagttcctcttcaatttgtcagctgtgctcaaatttagagatggcttgactatcgtaatcatatatgcatggatgcgttactttatgtttgcttgtatttaatatagaaggctcccttgccttcgttcgatcatgtggtatttgaaagtgatgtctctataaatgaagtaaggtagggcaatgcttatgttactgttgtcagttattagctttttaaaccatgcatctgtcaatgtgtcctgtttcaatagggtcttattataggacgtgatggcactgaattaggatgtttgttcttttgctacctttgttaaacaacatcagatcattcgtattgtatccttcctcggattgcttcttttgttctactacaaatatgcccaacatggcagggagaggtatgctcctaaatttcttattttgtgcattgtgaaatgattgttctaacaacatcaagtttgtgttcttcatataatctatctcagattgctctgtgttttgcaggtctcgaggtcaagcctggacccactgtcaagtgtgtgcttggacatgactttatcctgcactttccactgctgcacttggggaatcaaagaaaagtgaaagtaccatgtcaaagttgatgaccagaagcttgctattggaaccctctctattgaaaaatacccctagatagaaattgatttggttttcaataaagagtgtgagttgtcacacacatagaaaactacctgtgtatttttctttggttacaaggttgagcaaccaatcgaggaagatgaatatcctttttaacattgatttttttagttttatttcatgtaagactgatctaaacaatttctttgtggagtattttgtttccttgatctcatttttgcttcttgcctcttacataatggatcttgattctgaagatgaagagaaggagctaaacattccagtaatcaaggaaaatggcaaaggtgatgggaaggcagttgctgcagcttcaaaatcaagtcttgggcttgaaaaaaagcaaggatgagtatgagtctgatgattctgatgagggagaaggtgaaaccggagaatgaggagatgtggttgttcatggacgacagcatcaagaaacctgcaacatgcaacctgattttaagaaatctgccacctgcaacatgactgggcagtggtatctctgagatataatgtggacaacggcaaagaatactatgcatacacaacaaaagagtcctacaacctgattttaagtccatttgtagcaaaccatcttggaagccattaactcgttgaatttgaagctgatgtgcagttttatttttatgtcagttttactgatgcagttagttcctaagaagatccatggcaacttgtttcacgctg

SEQ ID NO: 24987 - DNA, 4868 bp, Zea Mays
cggttctgccatcgtctcctctccgcgacgcacgcctccctctcctccgccccaccctcctccccacgccatcggcaccgccatcatcagatccggcccaagacgcctctgccccacgcgcccgagtcgtcgaggcacactcctgcccgcctccggcgtccacgcacatctccgcctcacctcggcgcccgagtcgtcgcacgcgttcgaggtggcgtccatcccggcaccggcctcacgcaccatctacagctcccaactctgctcctctcagttctccctctgcattccaccttctctcccttcctctccaagcaccgtcctcctcgcctagatccgtacaagctgcaaataacctctccggtggcaagacagatggagtcgatctccggcgaggatgctccgaagcacaacctgatcctgtccgcgctcgtctccaacctacagtgcatgctcgccgcccgccgcccgttcacggcagaggtcagcaccgccgccacagctagcgaggctgaggccttggctcaggaagcagaggcgtccgatgcccccacgggagatgggacgctggcgaggcccatcgtgctgctgacctgtgccggaggggaaccggtcggcgggtctcgcggcgctcgtcgacgccctcgttgccgccggccgctgcgatgtccacgtgtgtgcccccgaatcgtacatgctgtgacttagaaaaccaaaccacagcgggaccggtgctcggatagggtccaacggcgatgcaagcaaggagtggcatgcggccggaggggcgcagatcggctcctgcacgtgcagcgcagccgcgtgacagtgaagcagggaggccgcgataggcggcacagggagggtgcgacggaggcaaagtgcaagcacctggggacttcaggtaagtagaaaaccaacactgaatttgtcggttctctgttttgtgattgaccgattggtttgttgatctcagaaacaaaaaattgtttcaccgtcaagcaccaatttttaggtaggtcagtgttttgggatgattctccgatgcatcaatagcaaccttgtgcttggcaaagttatttgccctgataatgttgtaggtttagtgaaaagaaatatactgacatatccatcgatccatcgatgcccaatggagattgacctctatcaagatttagttacgtgtctcaatagggcaatatttctgtgagttgtatactgtggattcctcatctgcatcatgaattgatcgcactatttatgccctatttttcaaaccatggtttctgtaattctttgcaccatggtatttttctcaaatgattttatctttcacaacccggactgaagtcactgaagcagaaagaaagagtacaagtctactactgcagaaagcaaggaggatgccaacagaagcagatttcatgtttggatcggggatatttatacagttggctatgtatacggtctgcccaagcgcccaacaatgaatgatgtggtgaaggaacttgagatcatcagatagaatgaaggggcacaattgctaaactcaacgtctttatcagttgaacaatttggaaaaaaagagaagagatccttatgcatttgcctatggatgatggaagcaacaacaacacttttgactacaacagtgggagttcaattaagttgttcacccaagtagatagttgtctccactctttcaacaagttattggagtgattatatatgtctgctccatatgaatgccttttcgttttagtatcacatctgaaattaccaaccttttagatcgggtattgacatctttgtgttctcctcaactcattatttagctacatatcttattaaatcttaatctttggtcattagctaccagcttgcactattattgtgaaaatccattaactttagtaagtgaaatggttagactatcaccacgtaggtgatattagtggcgttaagtgattaatcagtggcaaatcctattatcaactattttcttggctaatcattacaatatataatgaagaataccatggcttgcagtgatatttatacagttggctatgtatacagtctgcctaggcgcccaacaatgaatgaagtggtgaaggaacttgagatcatcagatagaatgaaggggcacaattgttaaactcagcgtctttattagttgaacaatttggaaacaaaaagagaagagatccttatgcatttgcctatggatgatggaagcaacaacaacacttttgactacaacagtgggagttcaattaagttgttcacccaagtagataattgtctccactctttcaacaagttattggagtgattatatatgtctgctccatatgaatgccttttcattttagtatcacatctgaaattaccaaccttttagatcgggtattgacattttttgtgttctcctcaactcactatttagctacatatcttattaaatcttaatcttttgtcattagctaccatattgcactattattgtgaaaatccattaactttagtcagtgaaatggttagactatcaccacgtaggtgatattagtggaattaagtgattaatcagtggcaaatcctattatcaactattttcttggctaatcattacaatatataatgaagaatactatggcttgaagggatatttatacagttggctatgctgcttacatgatccatttagctgtctttggatttttgggataaaatcttaagcaaaatgggagaaggtttgggttttctgcaatctgtcgtctcctcttctgctgggtatctccgttattattctaatgaagagggctatgagttggattttcgtaggtacatttgagcgtgttttggaatgctgggaccgtgaaacacatgaatatgttgccataaaagttgttcgcagtatccacaagtactctgatgctacaatgattgagatagatgtgctcaatcgccttgtagaaaatgaaaaatatagatctctgtgagtatctcagagacctaattgcttaaagtataaccctattctatttttgacttgacagttcctcttcaatttgtcagctgtgctcaaatttagagatggcttgactatcgtaatcatatatgcatggatgcgttactttatgtttgcttgtatttaatatagaaggctcccttgccttcgttcgatcatgtggtatttgaaagtgatgtctctataaatgaagtaaggtagggcaatgcttatgttactgttgtcagttattagctttttaaaccatgcatctgtcaatgtgtcctgtttcaatagggtcttattataggacgtgatggcactgaattaggatgtttgttcttttgctacctttgttaaacaacatcagatcattcgtattgtatccttcctcggattgcttcttttgttctactacaaatatgcccaacatggcagggagaggtctcgaggtcaagcctggacccactgtcaagtgtgtgcttggacatgactttatcctgcactttccactgctgcacttggggaatcaaagaaaagtgaaagtaccatgtcaaagttgatgaccagaagcttgctattggaaccctctctattgaaaaatacccctagatagaaattgatttggttttcaataaagagtgtgagttgtcacacacatagaaaactacctgtgtatttttctttggttacaaggttgagcaaccaatcgaggaagatgaatatcctttttaacattgatttttttagttttatttcatgtaagactgatctaaacaatttctttgtggagtattttgtttccttgatctcatttttgcttcttgcctcttacataatggatcttgattctgaagatgaagagaaggagctaaacattccagtaatcaaggaaaatggcaaaggtgatgggaaggcagttgctgcagcttcaaaatcaagtcttgggcttgaaaaaaagcaaggatgagtatgagtctgatgattctgatgagggtgagtgattatctcctgaagaaggaaatgttgtgatttgaagggtatggtgcagaaaagttttgtctgcatgtcatgacagtttcatacaacgcacgggcgaacgcactgggagcctaccacctcccgtgctcaccattgccgtgtttgatacctgactgctactgatgttacttcgaatctctggggtgctcatggagtcatggtgcatatgctcatgtttgcagggtgtcagtttttttcatcgtctacttctagagataacaactttagcatgttggttaaagattcttggtgtgctaagcttttcttttttgcttcatttgaaactcaactatatagatggtgccctactttacattttgcaaacacaaactgctccaaaataaatggaagcttatgtcttcatctctcgtgtgcttcatccgtgtgcttggaattttagccccttcttttgcttctaacatagatgcttttgtgttacatgtatttggttaccgaattaggaccatgttttctctttggatatttcagaactaatatccccaaaagattcccttatctaaacacttgagtaggggaagcaaccatgttgtgctgcgataagagcgtagctgatatgtgatttgtaatttgcatctttttaatgtcatgtaacagtaagaccccatatgtatgactcatagttttttgctttccctaagctaggttccaagtgaagacataccccacagacttatcaatatcgataaaaaggattagattagtataaatatatttacctatcactaaaaattgtatattgactttttagaaataatttgtgcgtattgataatgtttgctcggcatcagttcaaac

SEQ ID NO: 24988 - DNA, 3148 bp, Zea Mays
cacggttctgccatcgtctcctctccgcgacgcacgcctccctctcctccgccccaccctcctccccacgccatcggcaccgccatcatcagatccggcccaagacgcctctgccccacgcgcccgagtcgtcgaggcacactcctgcccgcctccggcgtccacgcacatctccgcctcacctcggcgcccgagtcgtcgcacgcgttcgaggtggcgtccatcccggcaccggcctcacgcaccatctacagctcccaactctgctcctctcagttctccctctgcattccaccttctctcccttcctctccaagcaccgtcctcctcgcctagatccgtacaagctgcaaataacctctccggtggcaagacagatggagtcgatctccggcgaggatgctccgaagcacaacctgatcctgtccgcgctcgtctccaacctacagtgcatgctcgccgcccgccgcccgttcacggcagaggtcagcaccgccgccacagctagcgaggctgaggccttggctcaggaagcagaggcgtccgatgcccccacgggagatgggacgctggcgaggcccatcgtgctgctgacctgtgccggaggggaaccggtcggcgggtctcgcggcgctcgtcgacgccctcgttgccgccggccgctgcgatgtccacgtgtgtgcccccgaatcgtacatgctgtgacttagaaaaccaaaccacagcgggaccggtgctcggatagggtccaacggcgatgcaagcaaggagtggcatgcggccggaggggcgcagatcggctcctgcacgtgcagcgcagccgcgtgacagtgaagcagggaggccgcgataggcggcacagggagggtgcgacggaggcaaagtgcaagcacctggggacttcagaaagaaagagtacaagtctactactgcagaaagcaaggaggatgccaacagaagcagatttcatgtttggatcggataaaatcttaagcaaaatgggagaaggtttgggttttctgcaatctgtcgtctcctcttctgctgggtatctccgttattattctaatgaagagggctatgagttggattttcgtaggtacatttgagcgtgttttggaatgctgggaccgtgaaacacatgaatatgttgccataaaagttgttcgcagtatccacaagtactctgatgctacaatgattgagatagatgtgctcaatcgccttgtagaaaatgaaaaatatagatctctctgtgctcaaatttagagatggcttgactatcgtaatcatatatgcatggatgcgttactttatgtttgcttgtatttaatatagaaggctcccttgccttcgttcgatcatgtggtatttgaaagtgatgtctctataaatgaagtaaggtagggcaatgcttatgttactgttgtcagttattagctttttaaaccatgcatctgtcaatgtgtcctgtttcaatagggtcttattataggacgtgatggcactgaattaggatgtttgttcttttgctacctttgttaaacaacatcagatcattcgtattgtatccttcctcggattgcttcttttgttctactacaaatatgcccaacatggcagggagaggtatgctcctaaatttcttattttgtgcattgtgaaatgattgttctaacaacatcaagtttgtgttcttcatataatctatctcagattgctctgtgttttgcaggtctcgaggtcaagcctggacccactgtcaagtgtgtgcttggacatgactttatcctgcactttccactgctgcacttggggaatcaaagaaaagtgaaagtaccatgtcaaagttgatgaccagaagcttgctattggaaccctctctattgaaaaatacccctagatagaaattgatttggttttcaataaagagtgtgagttgtcacacacatagaaaactacctgtgtatttttctttggttacaaggttgagcaaccaatcgaggaagatgaatatcctttttaacattgatttttttagttttatttcatgtaagactgatctaaacaatttctttgtggagtattttgtttccttgatctcatttttgcttcttgcctcttacataatggatcttgattctgaagatgaagagaaggagctaaacattccagtaatcaaggaaaatggcaaaggtgatgggaaggcagttgctgcagcttcaaaatcaagtcttgggcttgaaaaaaagcaaggatgagtatgagtctgatgattctgatgagggtgagtgattatctcctgaagaaggaaatgttgtgatttgaagggtatggtgcagaaaagttttgtctgcatgtcatgacagtttcatacaacgcacgggcgaacgcactgggagcctaccacctcccgtgctcaccattgccgtgtttgatacctgactgctactgatgttacttcgaatctctggggtgctcatggagtcatggtgcatatgctcatgtttgcagggtgtcagtttttttcatcgtctacttctagagataacaactttagcatgttggttaaagattcttggtgtgctaagcttttcttttttgcttcatttgaaactcaactatatagatggtgccctactttacattttgcaaacacaaactgctccaaaataaatggaagcttatgtcttcatctctcgtgtgcttcatccgtgtgcttggaattttagccccttcttttgcttctaacatagatgcttttgtgttacatgtatttggttaccgaattaggaccatgttttctctttggatatttcagaactaatatccccaaaagattcccttatctaaacacttgagtaggggaagcaaccatgttgtgctgcgataagagcgtagctgatatgtgatttgtaatttgcatctttttaatgtcatgtaacagtaagaccccatatgtatgactcatagttttttgctttccctaagctaggttccaagtgaagacataccccacagacttatcaatatcgataaaaaggattagattagtataaatatatttacctatcactaaaaattgtatattgactttttagaaataatttgtgcgtattgataatgtttgctcggcatcagttcaaac

SEQ ID NO: 24989 - DNA, 4634 bp, Zea Mays
cacggttctgccatcgtctcctctccgcgacgcacgcctccctctcctccgccccaccctcctccccacgccatcggcaccgccatcatcagatccggcccaagacgcctctgccccacgcgcccgagtcgtcgaggcacactcctgcccgcctccggcgtccacgcacatctccgcctcacctcggcgcccgagtcgtcgcacgcgttcgaggtggcgtccatcccggcaccggcctcacgcaccatctacagctcccaactctgctcctctcagttctccctctgcattccaccttctctcccttcctctccaagcaccgtcctcctcgcctagatccgtacaagctgcaaataacctctccggtggcaagacagatggagtcgatctccggcgaggatgctccgaagcacaacctgatcctgtccgcgctcgtctccaacctacagtgcatgctcgccgcccgccgcccgttcacggcagaggtcagcaccgccgccacagctagcgaggctgaggccttggctcaggaagcagaggcgtccgatgcccccacgggagatgggacgctggcgaggcccatcgtgctgctgacctgtgccggaggggaaccggtcggcgggtctcgcggcgctcgtcgacgccctcgttgccgccggccgctgcgatgtccacgtgtgtgcccccgaatcgtacatgctgtgacttagaaaaccaaaccacagcgggaccggtgctcggatagggtccaacggcgatgcaagcaaggagtggcatgcggccggaggggcgcagatcggctcctgcacgtgcagcgcagccgcgtgacagtgaagcagggaggccgcgataggcggcacagggagggtgcgacggaggcaaagtgcaagcacctggggacttcagaaacaaaaaattgtttcaccgtcaagcaccaatttttaggtaggtcagtgttttgggatgattctccgatgcatcaatagcaaccttgtgcttggcaaagttatttgccctgataatgttgtaggtttagtgaaaagaaatatactgacatatccatcgatccatcgatgcccaatggagattgacctctatcaagatttagttacgtgtctcaatagggcaatatttctgtgagttgtatactgtggattcctcatctgcatcatgaattgatcgcactatttatgccctatttttcaaaccatggtttctgtaattctttgcaccatggtatttttctcaaatgattttatctttcacaacccggactgaagtcactgaagcagaaagaaagagtacaagtctactactgcagaaagcaaggaggatgccaacagaagcagatttcatgtttggatcggtgatatttatacagttggctatgtatacagtctgcctaggcgcccaacaatgaatgaagtggtgaaggaacttgagatcatcagatagaatgaaggggcacaattgttaaactcagcgtctttattagttgaacaatttggaaacaaaaagagaagagatccttatgcatttgcctatggatgatggaagcaacaacaacacttttgactacaacagtgggagttcaattaagttgttcacccaagtagataattgtctccactctttcaacaagttattggagtgattatatatgtctgctccatatgaatgccttttcattttagtatcacatctgaaattaccaaccttttagatcgggtattgacattttttgtgttctcctcaactcactatttagctacatatcttattaaatcttaatcttttgtcattagctaccatattgcactattattgtgaaaatccattaactttagtcagtgaaatggttagactatcaccacgtaggtgatattagtggaattaagtgattaatcagtggcaaatcctattatcaactattttcttggctaatcattacaatatataatgaagaatactatggcttgaagggatatttatacagttggctatgctgcttacatgatccatttagctgtctttggatttttggggtaactctccaatatctcacatgaggttctttgtgatagctgttacttaatctgtggtgatctatgtaaatgtggcaacacttgcagttcctcgagcccttgtgcatggatatatcgtttagttgtgtctaataatttgtaattagtggcaacatctttttgttattttggttttatctgctttttattgttataagatctcgattgcaaactggcagttagtacaccattaggttttcctttgtcgtatcaagctaataatgtgtgaagcagggttcccattctgatctttagttttttgtgattttaatagcaataaccttttttcgcaaaaaagtaacaaactttatgcagaatgcggtccgtatagttcccagtatccttttgtacttagatttagtttgatatatggttatgtttattgacagaatgctttttagctttgcagataaaatcttaagcaaaatgggagaaggtttgggttttctgcaatctgtcgtctcctcttctgctgggtatctccgttattattctaatgaagagggctatgagttggattttcgtaggtacatttgagcgtgttttggaatgctgggaccgtgaaacacatgaatatgttgccataaaagttgttcgcagtatccacaagtactctgatgctacaatgattgagatagatgtgctcaatcgccttgtagaaaatgaaaaatatagatctctgtgagtatctcagagacctaattgcttaaagtataaccctattctatttttgacttgacagttcctcttcaatttgtcagctgtgctcaaatttagagatggcttgactatcgtaatcatatatgcatggatgcgttactttatgtttgcttgtatttaatatagaaggctcccttgccttcgttcgatcatgtggtatttgaaagtgatgtctctataaatgaagtaaggtagggcaatgcttatgttactgttgtcagttattagctttttaaaccatgcatctgtcaatgtgtcctgtttcaatagggtcttattataggacgtgatggcactgaattaggatgtttgttcttttgctacctttgttaaacaacatcagatcattcgtattgtatccttcctcggattgcttcttttgttctactacaaatatgcccaacatggcagggagaggtctcgaggtcaagcctggacccactgtcaagtgtgtgcttggacatgactttatcctgcactttccactgctgcacttggggaatcaaagaaaagtgaaagtaccatgtcaaagttgatgaccagaagcttgctattggaaccctctctattgaaaaatacccctagatagaaattgatttggttttcaataaagagtgtgagttgtcacacacatagaaaactacctgtgtatttttctttggttacaaggttgagcaaccaatcgaggaagatgaatatcctttttaacattgatttttttagttttatttcatgtaagactgatctaaacaatttctttgtggagtattttgtttccttgatctcatttttgcttcttgcctcttacataatggatcttgattctgaagatgaagagaaggagctaaacattccagtaatcaaggaaaatggcaaaggtgatgggaaggcagttgctgcagcttcaaaatcaagtcttgggcttgaaaaaaagcaaggatgagtatgagtctgatgattctgatgagggtgagtgattatctcctgaagaaggaaatgttgtgatttgaagggtatggtgcagaaaagttttgtctgcatgtcatgacagtttcatacaacgcacgggcgaacgcactgggagcctaccacctcccgtgctcaccattgccgtgtttgatacctgactgctactgatgttacttcgaatctctggggtgctcatggagtcatggtgcatatgctcatgtttgcagggtgtcagtttttttcatcgtctacttctagagataacaactttagcatgttggttaaagattcttggtgtgctaagcttttcttttttgcttcatttgaaactcaactatatagatggtgccctactttacattttgcaaacacaaactgctccaaaataaatggaagcttatgtcttcatctctcgtgtgcttcatccgtgtgcttggaattttagccccttcttttgcttctaacatagatgcttttgtgttacatgtatttggttaccgaattaggaccatgttttctctttggatatttcagaactaatatccccaaaagattcccttatctaaacacttgagtaggggaagcaaccatgttgtgctgcgataagagcgtagctgatatgtgatttgtaatttgcatctttttaatgtcatgtaacagtaagaccccatatgtatgactcatagttttttgctttccctaagctaggttccaagtgaagacataccccacagacttatcaatatcgataaaaaggattagattagtataaatatatttacctatcactaaaaattgtatattgactttttagaaataatttgtgcgtattgataatgtttgctcggcatcagttcaaac

SEQ ID NO: 24990 - DNA, 1901 bp, Zea Mays
cggttctgccatcgtctcctctccgcgacgcacgcctccctctcctccgccccaccctcctccccacgccatcggcaccgccatcatcagatccggcccaagacgcctctgccccacgcgcccgagtcgtcgaggcacactcctgcccgcctccggcgtccacgcacatctccgcctcacctcggcgcccgagtcgtcgcacgcgttcgaggtggcgtccatcccggcaccggcctcacgcaccatctacagctcccaactctgctcctctcagttctccctctgcattccaccttctctcccttcctctccaagcaccgtcctcctcgcctagatccgtacaagctgcaaataacctctccggtggcaagacagatggagtcgatctccggcgaggatgctccgaagcacaacctgatcctgtccgcgctcgtctccaacctacagtgcatgctcgccgcccgccgcccgttcacggcagaggtcagcaccgccgccacagctagcgaggctgaggccttggctcaggaagcagaggcgtccgatgcccccacgggagatgggacgctggcgaggcccatcgtgctgctgacctgtgccggaggggaaccggtcggcgggtctcgcggcgctcgtcgacgccctcgttgccgccggccgctgcgatgtccacgtgtgtgcccccgaatcgtacatgctgtgacttagaaaaccaaaccacagcgggaccggtgctcggatagggtccaacggcgatgcaagcaaggagtggcatgcggccggaggggcgcagatcggctcctgcacgtgcagcgcagccgcgtgacagtgaagcagggaggccgcgataggcggcacagggagggtgcgacggaggcaaagtgcaagcacctggggacttcagaaagaaagagtacaagtctactactgcagaaagcaaggaggatgccaacagaagcagatttcatgtttggatcggtctgcctaggcgcccaacaatgaatgaagtggtgaaggaacttgagatcatcagatagaatgaaggggcacaattgttaaactcagcgtctttattagttgaacaatttggaaacaaaaagagaagagatccttatgcatttgcctatggatgatggaagcaacaacaacacttttgactacaacagtgggagttcaattaagttgttcacccaagtagataattgtctccactctttcaacaagttattggagtgattatatatgtctgctccatatgaatgccttttcattttagtatcacatctgaaattaccaaccttttagatcgggtattgacattttttgtgttctcctcaactcactatttagctacatatcttattaaatcttaatcttttgtcattagctaccatattgcactattattgtgaaaatccattaactttagtcagtgaaatggttagactatcaccacgtaggtgatattagtggaattaagtgattaatcagtggcaaatcctattatcaactattttcttggctaatcattacaatatataatgaagaatactatggcttgaagggatatttatacagttggctatgctgcttacatgatccatttagctgtctttggatttttggggtaactctccaatatctcacatgaggttctttgtgatagctgttacttaatctgtggtgatctatgtaaatgtggcaacacttgcagttcctcgagcccttgtgcatggatatatcgtttagttgtgtctaataatttgtaattagtggcaacatctttttgttattttggttttatctgctttttattgttataagatctcgattgcaaactggcagttagtacaccattaggttttcctttgtcgtatcaagctaataatgtgtgaagcagg

SEQ ID NO: 24991 - DNA, 2513 bp, Zea Mays
cggttctgccatcgtctcctctccgcgacgcacgcctccctctcctccgccccaccctcctccccacgccatcggcaccgccatcatcagatccggcccaagacgcctctgccccacgcgcccgagtcgtcgaggcacactcctgcccgcctccggcgtccacgcacatctccgcctcacctcggcgcccgagtcgtcgcacgcgttcgaggtggcgtccatcccggcaccggcctcacgcaccatctacagctcccaactctgctcctctcagttctccctctgcattccaccttctctcccttcctctccaagcaccgtcctcctcgcctagatccgtacaagctgcaaataacctctccggtggcaagacagatggagtcgatctccggcgaggatgctccgaagcacaacctgatcctgtccgcgctcgtctccaacctacagtgcatgctcgccgcccgccgcccgttcacggcagaggtcagcaccgccgccacagctagcgaggctgaggccttggctcaggaagcagaggcgtccgatgcccccacgggagatgggacgctggcgaggcccatcgtgctgctgacctgtgccggaggggaaccggtcggcgggtctcgcggcgctcgtcgacgccctcgttgccgccggccgctgcgatgtccacgtgtgtgcccccgaatcgtacatgctgtgacttagaaaaccaaaccacagcgggaccggtgctcggatagggtccaacggcgatgcaagcaaggagtggcatgcggccggaggggcgcagatcggctcctgcacgtgcagcgcagccgcgtgacagtgaagcagggaggccgcgataggcggcacagggagggtgcgacggaggcaaagtgcaagcacctggggacttcagaaagaaagagtacaagtctactactgcagaaagcaaggaggatgccaacagaagcagatttcatgtttggatcgggtattgacctttttgtgttctcctcaactcattatttagctacatatcttattaaatcttaatatttggtcattagctaccaacttgcactattattgtgaaaatccattaactttagccaatgaaatggttagactatcaccacgtaggtgatattagtggcattaagttattaatctgtggcaaattctattatcaactattttcttggctaatcattacaatatataatgaagaatactatggcttgaagggatatttatacagttggctatgtatacggtctgcccaagcgcccaacaatgaatgatgtggtgaaggaacttgagatcatcagatagaatgaaggggcacaattgctaaactcaacgtctttatcagttgaacaatttggaaaaaaagagaagagatccttatgcatttgcctatggatgatggaagcaacaacaacacttttgactacaacagtgggagttcaattaagttgttcacccaagtagatagttgtctccactctttcaacaagttattggagtgattatatatgtctgctccatatgaatgccttttcgttttagtatcacatctgaaattaccaaccttttagatcggtctgcctaggcgcccaacaatgaatgaagtggtgaaggaacttgagatcatcagatagaatgaaggggcacaattgttaaactcagcgtctttattagttgaacaatttggaaacaaaaagagaagagatccttatgcatttgcctatggatgatggaagcaacaacaacacttttgactacaacagtgggagttcaattaagttgttcacccaagtagataattgtctccactctttcaacaagttattggagtgattatatatgtctgctccatatgaatgccttttcattttagtatcacatctgaaattaccaaccttttagatcgggtattgacattttttgtgttctcctcaactcactatttagctacatatcttattaaatcttaatcttttgtcattagctaccatattgcactattattgtgaaaatccattaactttagtcagtgaaatggttagactatcaccacgtaggtgatattagtggaattaagtgattaatcagtggcaaatcctattatcaactattttcttggctaatcattacaatatataatgaagaatactatggcttgaagggatatttatacagttggctatgctgcttacatgatccatttagctgtctttggatttttggggtaactctccaatatctcacatgaggttctttgtgatagctgttacttaatctgtggtgatctatgtaaatgtggcaacacttgcagttcctcgagcccttgtgcatggatatatcgtttagttgtgtctaataatttgtaattagtggcaacatctttttgttattttggttttatctgctttttattgttataagatctcgattgcaaactggcagttagtacaccattaggttttcctttgtcgtatcaagctaataatgtgtgaagcagg

SEQ ID NO: 24992 - DNA, 1877 bp, Zea Mays
cgcacggtggcccttccgcctccgaggcgttgccacggcgagttctacaaccttctccgcgccacggagaggttccgcggcacctttttaggcgagctcgagcgtggccagtggccagtgcccccaccatcttttctcagtcatatcagtcactacacgcacgagtgagtacacgatcgtagccaaaccacattatcatggagaactactgcgaaagcatcgactactatcagaagccttcccatcctcccaacaagccaacgaccatggacgaagacaaggacgacaacaatgacacgggcaagggcaaggccgtcctgggcgccggtccttaccaccaccaccaccatgctaccgccgctgaccagcaggaacccgaaagccaggaggagttcttcagcgactccgagtcgggctccgagtccatcgagatcgctgacctcaagaagcgcatgtggaaggaccagctgctgctcatgaagctcgagggccgctcgggccgcgaccgcgaggcccagctcccgctccatctccatccctttgctgacgaccacccggcgacggcgtctgccctgctccagcaggccaaggaccaccaggagtcgcccgagagccggtaccggcgcaaggcgatgctccgggcgcaggacggcgtcatccggcacatgctgaagatgatggaggcgtgcaacgcgcgcgggttcgtgtatggcgtggtgaacgagtccggcgtgcccgtgtccggctcctccgacagcctccgcggctggtggaaggacgaggtggggttcgagcgggcgggcccgctggcgctgtccgtggccgccgccgccggcctggacgaccccgggagcccgatggcggcgtccttcctgcacggcctccacgacatccaggacagcacgctggggtccctgctgtcggcgctcatccagcactgcgagcccccgcagcggagcttcccgctggaccgcggcctggcgccgccgtggtggcccacggggcgggaggcctggtggggcacgcagggcgaggcgcaggcgcaccagggcccgccgccgtaccgcaagccccacgacctcaagaaggcctggaagatctcgctgctcagcgccgtgatcaagcacctcagcccgcgcttcgaccagatgcgcaagctcgtctggcagtccaagcggctgcagcacaagatgagcgccagggacgccgacacctggtccaaggtcatcacccaggaggaggcgctggaccgccacgcgcagcgcgcgctgcagatcacaccgctcgaggaggaagaggacgacgacggtggccccgacaccgacgccggtggcgattctccgatggcggcagcgcacgtcgagaagcgcaagcgcaaggggaccgatgatggcgagcacgaggcgaaagacgcggtggcagtccgagacggagggcagcataatagcagtatcgccgtcgctgagaccacacagcctccgccggtggcgcacgatagcatgctccaaggtttacagcgcggcgggaccacgctgcccgacgggtcggcggtgcacgacgatgacatgctcagcagtcttctgggaatcgctgatgtcgtggacatgactgacttcccaaacagtccgatttggcagtggggggtttacgactgatgattatagagcggtgactggtgagtcggttagcaactactccaggtattagattcgtacaagtctagctacagcaagtgttgtgctatgttgattattttatgcctgttttaattattacctccaacaaataagtcggatctgtatattaccgtgctctctgtaagaatcgactaaaatcactccaccagaaactttaaaacattggaactgaagaaccag

SEQ ID NO: 24993 - DNA, 1389 bp, Zea Mays
ggaagaactgcgcctgcaagaagttgagccccaggttgagcgccacggccgcgccctgccccgccgaccgcacctccacggggtatatctcgccggggatggtccagtacagcgcgccccacgaccagctgaagctcgccgagaagatcagcgccaccaccagcaccgtcaccgcgtaccccttgggcatcttgctcccgttgccgagaatgtgacatgtgcgatgcctggcacgtgaacatgagcgcgccaccgatcatgaagagcagcttccggccgtagcggtccatggcgaagcccgacgcgaggatgccgccgatgttcatgaggcccaggatgacggcgcccatgagcgcggcgtcgctctcgaagccgacggtccggaacagtatcggcgagaagaaggcggtgacggccacccctgtgaggttgaggaacaccgggaacgccacggccatcaccaggtagggccggtactcccggcgcaggatccggcggaacgcgccctcctcgttccggcggtcgttctccgccgcggcgaggatgtccgcgaactcggggccgatgtccacgcccttgccgcgcacccgctggagcgcggcgcgggcgtcgtcgtgcttcccgcgcaggacgaggctgctgggggtgtccgggatgaacgcggcgccgaccaccatgacggcggccgggacggaggcgaggccgagcgagaggcgccagccccagcccgggatccgcgaggtgccgtagttgatgaggttggccaccaggtacccgacgctgatgaagagggggaaggccgagatgaagccgccgcgccagcgcgggggcgacacctcggcgaggtacaccggcgtggcctggccggagaagccgagccccaggccgagcagcatcctcccgacgatgagcatggcgatgttggccgcggcggcgttgacgagggcgccggccaagaacaggccgccgccgatcagcatgacggcctgccgccccagccgccgggtcacgcggctcgccagcagcgtccccaccatgccgaacgcgtacagcgacgacgtgaaggccgtcagcgcctggttgttgtaaatgcagtacacgtccttgttggcgcgcgccgtcctcttgagcaacccggggaagaacttgttcaggaaatcctccatctccgacacacctcccggacagaatacagcagaagtggcgcttgcacgctttaccactttcagttccatttcaaattacggtcaaacataaacatataataaaaatataaatggcgggtgacactgcttttgcaagcatcggggggctatagggaagcaaagaagtgaggaggaggaactaaagtaaaaaacaaaaaaaaaacagcggtagaatagaacggag

SEQ ID NO: 24994 - DNA, 2233 bp, Zea Mays
tcacaaaagttctttgcttccctagtccatcccattgagacccgatctcactggtcagggaccgccggttgaaggagatgctggcggctgagggcatcgttgtgcaatctttcaattcggatctgctgtacgagccatgggaagttgtcgatgatgaagggcagccattcaccatgttcgacccgttctggaacaggtgcctcagcatgccgtatgacccccctgcaccgcttctgcccccgaagaggatcaattcaggtgacttatcgatgtgcccatcggaggatctgatctttgaggacgagtcagagaggggaagcaacgctcttctggcccgagcgtggacgccagggtggcagaacgcagacaaggcgctgacggccttcctcaacggcccactggccgactactcagtgaaccgcaagaaggccgatagcgcgagcacgtccctgctgtcgcctcacctgcacttcggcgagcttagcgtgcgcaaggtcttccacctagttcgcatgaagcagctcgtgtggagcaacgagggcaaccacgctgccgaggagagctgcaccctgttcctccgttccatcggcctgcgggagtactcccggtacctgagcttcaatcacccgagcagccatgagaggcccctcctggcgcacctcaggttcttcccctgggtggtggacgagagctacttcaagatttggaggcagggaaggaccgggtacccgctcgtcgacgctggcatgagggagctgtgggcgacggggtggctgcatgaccggatacgtgtggtggtggcaagcttcttcgtcaaggtcctccagcttccatggcgatggggcatgaagtacttttgggacacgttactggatgctgatcttgagagcgatgcgctgggctggcagtacatcactggctctcttcctgatggccgggagcttgaccgcatcgacaacccccagtttgaaggctacaagttcgacccgcatggggagtacgtccggcgatggattcctgagctcgcaaggctgccgacggagtggatacaccatccatgggacgcgcctgtctccgtgctgcaagctgcaggaatcgagctgggctctaactaccctctccccatagtggagctggacgcggccaagggcaggctgcaagcggccctgtcagagatgtggcagctggaggcggcgtcgagggccaccatgaacaacgggacggaggaaggcctcggcgactcctcggaggtcctgttccctcaagagctgcagatggaggtcgaccggcagccagccccagccgaggcagcagccaacgtgcacgtgcacgtgccgatgcctgcccggaggcgcggggaccagatggtgcccaccatgacgacctcttcgctgaacagagctggaacagaggtctccgccgatctagtagtagcgaacagcgaggaggaggacaccagggcgcaggttccgttccacgcgcatctccatctccacccccgagccgaagccccgccagctgcgcgtagaaccaacaacggcgctcgccagcacgacgtcttccagcagcgtcggaaccacaggcgagatgctctgcttgctccgtcggcgtcggaggcttcgagcagctggaccggcagagagggcgccgtggtcccggtctggtcgcctcctgcggcgtcgggccattcggacgccttcgccgccgacgaagctgacgtctctagtaggagctatctgggtaggcatccgcagtcgcaccgcctgatgaactggagccaactatcgcagtcatcgtgagctcggatgcacggacagcagcagaagattctgtgcggccaaacttaatcgagctgaagattctcgtatgtagattgtccactgaactactcatccatagtctgatgggatggaaaccaggcggcttttcctggttgtggtggctatagctgtgtaaatctcgtcttctagaacgtgtgtggtcgatatagtgcggttggctttacaaccaaaaaaaaaggtcgctattattgatcagacgacaaaggttttccgtatttttttagccttttttgggggaggtatgtgatgtatgtaaccgtaactgtacattcccttgtgctgaccatattgttagttgtagtttccatgcgtcttgtattgctgttttgggctgaggagtgatgaaccatggaccatggtcacgtttgccggtccatatggattggagggct

SEQ ID NO: 24995 - DNA, 1910 bp, Zea Mays
cttttatttccgctctcctccattctctgtttgctactttgcaagtctcgaacaaaacctgaagcaactcgaagcgaagccgcgatactgcgagaagcggaagcggggagggcgaggaggagcagcaatggaggcgctgctggagctcgagaagatgcagagggtgctgtccctcatgagttcacgcggcctctcccacaccgactccagctgcggcggcgctgccgctgaccgcttcctcgcccaattcctcctcttcatgtgtaggtcgtactttatgtttcatggtttggatgttaacaagccacaagccattttcaagtatctacctgttctttctttcacagagagttacatatatcagttagatgcttcaaatgaagactgtttacatgtagtcccagatgacaacacttcaaaagtgttgggaaagaaagaagaatctctcaatgagacatccttgtctcaaatgattgaaccccttgaagggcttcttcagtgccaaggattaatgacagaccgattgcgaactgaactcaaatcaggcattcagtattggtctctagagaggaagctctgccaagcattactaagaaatgagaagatctcgattgaagatgttatgatggcaatccatctgaaatcatttgactatcgagttcttaacctgttgatgtttcaacttactggtcaatgaattgcatatggacttcttgtcagtttcagaatttttggttgagatatctgatgacctgtatgattatgaggatgacgttatgaacaatacgttcaatatccttcgcatgtttgctgcaatatatggaccattagaggcaccgaatatgctggccaagtgcataggcgaggctgaagagaaatacgagagcttctccaagaaactggatcctagtctctcaggtagttactggagaagatgtgaggaagcgacgaaggaaggcggaaaaacatcaggccatgcatatggaacatggaatatccctcgtgtgataagcaacgaagatgctttccgacgtgaaagacggagcaaacacgatgcttgtgctgtgatcacttgataggtgaaatgcagaaatgacctgcaaccgttgatgtaaggtgctaggggtctgctcagtgggaactccttgaggatatagtggtccttggcctaccttgggcccctttgatgctcacaaatgtacccattttcaagtcaaattttcacaaatgcagaaatgacatgctgaatttagtttctgtaaggctgtctccatcggataccccatctcatctcttttcaaacttatctgtaaataatgtcaaacagtatagttttttactgagtccaagaagggaacaagtcggtctggactctggagtgcgccttgtggccacgtgagagcatctgattcacgacgggctacagtgacagatggatatgtatcggtgtatcctgctactcctacccctatactcgtggctgcgcctgctacagtgacagacgggctacagtgattcacattccatgtgattggttgttaggatcagcagatcctggtcgaagccgagatgcaggttgggcttaacctgtatgcattgatgcaaaccaaaataagttctcttgtttggttgtttgtcctcaattagttaggatcaacactgttttaggtaagttgtatggatttagctttaagttgcacgactcaactatatttctaaaattacaatgccataaattataacgccataaattacacaaaatccaaatttatacaattataaattacaataacttatcctttacatatcttttacaaaattataaattacaattatagtattgatactgaggcacaagaacactttataaaattatagtttaaagtatgcattaccagtttaccagcgtc

SEQ ID NO: 24996 - DNA, 2704 bp, Zea Mays
cttttatttccgctctcctccattctctgtttgctactttgcaagtctcgaacaaaacctgaagcaactcgaagcgaagccgcgatactgcgagaagcggaagcggggagggcgaggaggagcagcaatggaggcgctgctggagctcgagaagatgcagagggtgctgtccctcatgagttcacgcggcctctcccacaccgactccagctgcggcggcgctgccgctgaccgcttcctcgcccaattcctcctcttcatggtgcaaccgtttgattctcttaccctggagaataagttccttttgatctctgagctattaagaaaggctactcctaatactttggaagaagtgcagcatctcacccatctggaagtgtaggtcgtactttatgtttcatggtttggatgttaacaagccacaagccattttcaagtatctacctgttctttctttcacagagagttacatatatcagttagatgcttcaaatgaagactgtttacatgtagtcccagatgacaacacttcaaaagtgttgggaaagaaagaagaatctctcaatgagacatccttgtctcaaatgattgaaccccttgaagggcttcttcagtgccaaggattaatgacagaccgattgcgaactgaactcaaatcaggcattcagtattggtctctagagaggaagctctgccaagcattactaagaaatgagaagatctcgattgaagatgttatgatggcaatccatctgaaatcatttgactatcgagttcttaacctgttgatgtttcaacttactggtcagcatgtcaatgaattgcatatggacttcttgtcagtttcagaatttttggttgagatatctgatgacctgtgagtttgctctgaatcttattcccatgcatcacagcataacaaaatggtaggaactgcctacttcttaaaaatctgtcattaatgttttggtaaatttgtaaaatctgaggcaaggtagtgcatgggttaagatggaactagtgcttctattgagatgtcggtgttgtatgtaaatggaaaacaataattttaatttaaatgaaattgtgttttagttatcatgtaatctaactattaaaggatctgcggatatagaaacccaaaaacttatgcacttttgtagtgtaccttagtgtgatttatgggaaaatcatcagattagtagcgttgttatatacaatcctgtacctttttccttcttaatcaaatgacatgcagctctcctgcattgtttgagaaaaaagtgtatataagtcctcgggggtcaatataagcctagatgcaccatgtgctggacagacactatgaataactttcagtcttttttttatttgtttcacaaaccatgtcatcaattgaaatagctgtttcacccgtgacttgtttttgaatatcttgcaggtatgattatgaggatgacgttatgaacaatacgttcaatatccttcgcatgtttgctgcaatatatggaccattagaggcaccgaatatgctggccaagtgcataggcgaggctgaagagaaatacgagagcttctccaagaaactggatcctagtctctcaggtagttactggagaagatgtgaggaagcgacgaaggaaggcggaaaaacatcaggccatgcatatggaacatggaatatccctcgtgtgataagcaacgaagatgctttccgacgtgaaagacggagcaaacacgatgcttgtgctgtgatcacttgataggcaaatttcatgttccagacttccaggcatcttcaaaattgaatgaagctaggtacactgctagacagtgtcttacttacctgtatgcacgtttccattcttgccaggtgaaatgcagaaatgacctgcaaccgttgatgtaaggtgctaggggtctgctcagtgggaactccttgaggatatagtggtccttggcctaccttgggcccctttgatgctcacaaatgtacccattttcaagtcaaattttcacaaatgcagaaatgacatgctgaatttagtttctgtaaggctgtctccatcggataccccatctcatctcttttcaaacttatctgtaaataatgtcaaacagtatagttttttactgagtccaagaagggaacaagtcggtctggactctggagtgcgccttgtggccacgtgagagcatctgattcacgacgggctacagtgacagatggatatgtatcggtgtatcctgctactcctacccctatactcgtggctgcgcctgctacagtgacagacgggctacagtgattcacattccatgtgattggttgttaggatcagcagatcctggtcgaagccgagatgcaggttgggcttaacctgtatgcattgatgcaaaccaaaataagttctcttgtttggttgtttgtcctcaattagttaggatcaacactgttttaggtaagttgtatggatttagctttaagttgcacgactcaactatatttctaaaattacaatgccataaattataacgccataaattacacaaaatccaaatttatacaattataaattacaataacttatcctttacatatcttttacaaaattataaattacaattatagtattgatactgaggcacaagaacactttataaaattatagtttaaagtatgcattaccagtttaccagcgtc

SEQ ID NO: 24997 - DNA, 2222 bp, Zea Mays
cttttatttccgctctcctccattctctgtttgctactttgcaagtctcgaacaaaacctgaagcaactcgaagcgaagccgcgatactgcgagaagcggaagcggggagggcgaggaggagcagcaatggaggcgctgctggagctcgagaagatgcagagggtgctgtccctcatgagttcacgcggcctctcccacaccgactccagctgcggcggcgctgccgctgaccgcttcctcgcccaattcctcctcttcatggtgcaaccgtttgattctcttaccctggagaataagttccttttgatctctgagctattaagaaaggctactcctaatactttggaagaagtgcagcatctcacccatctggaagctaataaagatatatgttctggaggttcactccagccaattaagaagtttaagatgcatgccgagaaatcaaccgttcaagctatgccgatggttggttttgatgcgatggcaagagctaagtctacgcttgaagatttttgtaggtcgtactttatgtttcatggtttggatgttaacaagccacaagccattttcaagtatctacctgttctttctttcacagagagttacatatatcagttagatgcttcaaatgaagactgtttacatgtagtcccagatgacaacacttcaaaagtgttgggaaagaaagaagaatctctcaatgagacatccttgtctcaaatgattgaaccccttgaagggcttcttcagtgccaaggattaatgacagaccgattgcgaactgaactcaaatcaggcattcagtattggtctctagagaggaagctctgccaagcattactaagaaatgagaagatctcgattgaagatgttatgatggcaatccatctgaaatcatttgactatcgagttcttaacctgttgatgtttcaacttactggtcagcatgtcaatgaattgcatatggacttcttgtcagtttcagaatttttggttgagatatctgatgacctgtgagtttgctctgaatcttattcccatgcatcacagcataacaaaatggtatgattatgaggatgacgttatgaacaatacgttcaatatccttcgcatgtttgctgcaatatatggaccattagaggcaccgaatatgctggccaagtgcataggcgaggctgaagagaaatacgagagcttctccaagaaactggatcctagtctctcaggtagttactggagaagatgtgaggaagcgacgaaggaaggcggaaaaacatcaggccatgcatatggaacatggaatatccctcgtgtgataagcaacgaagatgctttccgacgtgaaagacggagcaaacacgatgcttgtgctgtgatcacttgataggtgaaatgcagaaatgacctgcaaccgttgatgtaaggtgctaggggtctgctcagtgggaactccttgaggatatagtggtccttggcctaccttgggcccctttgatgctcacaaatgtacccattttcaagtcaaattttcacaaatgcagaaatgacatgctgaatttagtttctgtaaggctgtctccatcggataccccatctcatctcttttcaaacttatctgtaaataatgtcaaacagtatagttttttactgagtccaagaagggaacaagtcggtctggactctggagtgcgccttgtggccacgtgagagcatctgattcacgacgggctacagtgacagatggatatgtatcggtgtatcctgctactcctacccctatactcgtggctgcgcctgctacagtgacagacgggctacagtgattcacattccatgtgattggttgttaggatcagcagatcctggtcgaagccgagatgcaggttgggcttaacctgtatgcattgatgcaaaccaaaataagttctcttgtttggttgtttgtcctcaattagttaggatcaacactgttttaggtaagttgtatggatttagctttaagttgcacgactcaactatatttctaaaattacaatgccataaattataacgccataaattacacaaaatccaaatttatacaattataaattacaataacttatcctttacatatcttttacaaaattataaattacaattatagtattgatactgaggcacaagaacactttataaaattatagtttaaagtatgcattaccagtttaccagcgtc

SEQ ID NO: 24998 - DNA, 3453 bp, Zea Mays
cttttatttccgctctcctccattctctgtttgctactttgcaagtctcgaacaaaacctgaagcaactcgaagcgaagccgcgatactgcgagaagcggaagcggggagggcgaggaggagcagcaatggaggcgctgctggagctcgagaagatgcagagggtgctgtccctcatgagttcacgcggcctctcccacaccgactccagctgcggcggcgctgccgctgaccgcttcctcgcccaattcctcctcttcatggtgcaaccgtttgattctcttaccctggagaataagttccttttgatctctgagctattaagaaaggctactcctaatactttggaagaagtgcagcatctcacccatctggaaggtagtggtaatagttgtgaagtaatgatgatcttacattaaccttatgagtttatccggaaattttcttgttgattgggtctggaactctgataagacataggaccctttcaaacgcagctaataaagatatatgttctggaggttcactccagccaattaagaagtttaagatgcatgccgagaaatcaaccgttcaagctatgccgatggttggttttgatgcgatggcaagagctaagtctacgcttgaagattttgtatgtattctttgtagttggtactcgtaaaaatccttaatggaaacactgccatgaattaatcctggagtgacccaggtcttctgggctgccttttagtttttcttcttttatttttctcaagagaaacctgtttaccttttcttttctcacatcaataaaatcttagcacattaggggattcctttactgtttttgctaaaaaaacactgtcatactgccttttgttgagattttgcaatgcaagtgctacaaaacaattgaaccgcttatagaggcattaagcccgtataaaaaatagcaaggtatctttgaatgtattttgttgttccattattagtcttatagagaaactgggtcacatgctgttctaaattttgatttttcctgttcaaacatgtcttttttggggggttatgagtctatcttgagcacttcctgataattatgtttccctaaagtcccttttttccttcttgagaaaacagtgtaggtcgtactttatgtttcatggtttggatgttaacaagccacaagccattttcaagtatctacctgttctttctttcacagagagttacatatatcagttagatgcttcaaatgaagactgtttacatgtagtcccagatgacaacacttcaaaagtgttgggaaagaaagaagaatctctcaatgagacatccttgtctcaaatgattgaaccccttgaagggcttcttcagtgccaaggattaatgacagaccgattgcgaactgaactcaaatcaggcattcagtattggtctctagagaggaagctctgccaagcattactaagaaatgagaaggtcaatgaattgcatatggacttcttgtcagtttcagaatttttggttgagatatctgatgacctgtgagtttgctctgaatcttattcccatgcatcacagcataacaaaatggtaggaactgcctacttcttaaaaatctgtcattaatgttttggtaaatttgtaaaatctgaggcaaggtagtgcatgggttaagatggaactagtgcttctattgagatgtcggtgttgtatgtaaatggaaaacaataattttaatttaaatgaaattgtgttttagttatcatgtaatctaactattaaaggatctgcggatatagaaacccaaaaacttatgcacttttgtagtgtaccttagtgtgatttatgggaaaatcatcagattagtagcgttgttatatacaatcctgtacctttttccttcttaatcaaatgacatgcagctctcctgcattgtttgagaaaaaagtgtatataagtcctcgggggtcaatataagcctagatgcaccatgtgctggacagacactatgaataactttcagtcttttttttatttgtttcacaaaccatgtcatcaattgaaatagctgtttcacccgtgacttgtttttgaatatcttgcaggtatgattatgaggtaagttgggctaccgaaactgatggtatcgtataatcttagctgtactagtgagtgtaggcctaactgttgaagaagttcaatttgttttgtaggatgacgttatgaacaatacgttcaatatccttcgcatgtttgctgcaatatatggaccattagaggcaccgaatatgctggccaagtgcataggcgaggctgaagagaaatacgagagcttctccaagaaactggatcctagtctctcaggtagttactggagaagatgtgaggaagcgacgaaggaaggcggaaaaacatcaggccatgcatatggaacatggaatatccctcgtgtgataagcaacgaagatgctttccgacgtgaaagacggagcaaacacgatgcttgtgctgtgatcacttgataggcaaatttcatgttccagacttccaggcatcttcaaaattgaatgaagctaggtacactgctagacagtgtcttacttacctgtatgcacgtttccattcttgccaggtgaaatgcagaaatgacctgcaaccgttgatgtaaggtgctaggggtctgctcagtgggaactccttgaggatatagtggtccttggcctaccttgggcccctttgatgctcacaaatgtacccattttcaagtcaaattttcacaaatgcagaaatgacatgctgaatttagtttctgtaaggctgtctccatcggataccccatctcatctcttttcaaacttatctgtaaataatgtcaaacagtatagttttttactgagtccaagaagggaacaagtcggtctggactctggagtgcgccttgtggccacgtgagagcatctgattcacgacgggctacagtgacagatggatatgtatcggtgtatcctgctactcctacccctatactcgtggctgcgcctgctacagtgacagacgggctacagtgattcacattccatgtgattggttgttaggatcagcagatcctggtcgaagccgagatgcaggttgggcttaacctgtatgcattgatgcaaaccaaaataagttctcttgtttggttgtttgtcctcaattagttaggatcaacactgttttaggtaagttgtatggatttagctttaagttgcacgactcaactatatttctaaaattacaatgccataaattataacgccataaattacacaaaatccaaatttatacaattataaattacaataacttatcctttacatatcttttacaaaattataaattacaattatagtattgatactgaggcacaagaacactttataaaattatagtttaaagtatgcattaccagtttaccagcgtc

SEQ ID NO: 24999 - DNA, 3031 bp, Zea Mays
cttttatttccgctctcctccattctctgtttgctactttgcaagtctcgaacaaaacctgaagcaactcgaagcgaagccgcgatactgcgagaagcggaagcggggagggcgaggaggagcagcaatggaggcgctgctggagctcgagaagatgcagagggtgctgtccctcatgagttcacgcggcctctcccacaccgactccagctgcggcggcgctgccgctgaccgcttcctcgcccaattcctcctcttcatggtgcaaccgtttgattctcttaccctggagaataagttccttttgatctctgagctattaagaaaggctactcctaatactttggaagaagtgcagcatctcacccatctggaaggtagtggtaatagttgtgaagtaatgatgatcttacattaaccttatgagtttatccggaaattttcttgttgattgggtctggaactctgataagacataggaccctttcaaacgcagctaataaagatatatgttctggaggttcactccagccaattaagaagtttaagatgcatgccgagaaatcaaccgttcaagctatgccgatggttggttttgatgcgatggcaagagctaagtctacgcttgaagattttgtatgtattctttgtagttggtactcgtaaaaatccttaatggaaacactgccatgaattaatcctggagtgacccaggtcttctgggctgccttttagtttttcttcttttatttttctcaagagaaacctgtttaccttttcttttctcacatcaataaaatcttagcacattaggggattcctttactgtttttgctaaaaaaacactgtcatactgccttttgttgagattttgcaatgcaagtgctacaaaacaattgaaccgcttatagaggcattaagcccgtataaaaaatagcaaggtatctttgaatgtattttgttgttccattattagtcttatagagaaactgggtcacatgctgttctaaattttgatttttcctgttcaaacatgtcttttttggggggttatgagtctatcttgagcacttcctgataattatgtttccctaaagtcccttttttccttcttgagaaaacagtgtaggtcgtactttatgtttcatggtttggatgttaacaagccacaagccattttcaagtatctacctgttctttctttcacagagagttacatatatcagttagatgcttcaaatgaagactgtttacatgtagtcccagatgacaacacttcaaaagtgttgggaaagaaagaagaatctctcaatgagacatccttgtctcaaatgattgaaccccttgaagggcttcttcagtgccaaggattaatgacagaccgattgcgaactgaactcaaatcaggcattcagtattggtctctagagaggaagctctgccaagcattactaagaaatgagaagatctcgattgaagatgttatgatggcaatccatctgaaatcatttgactatcgagttcttaacctgttgatgtttcaacttactggtcagcatgtcaatgaattgcatatggacttcttgtcagtttcagaatttttggttgagatatctgatgacctgtgagtttgctctgaatcttattcccatgcatcacagcataacaaaatggtatgattatgaggtaagttgggctaccgaaactgatggtatcgtataatcttagctgtactagtgagtgtaggcctaactgttgaagaagttcaatttgttttgtaggatgacgttatgaacaatacgttcaatatccttcgcatgtttgctgcaatatatggaccattagaggcaccgaatatgctggccaagtgcataggcgaggctgaagagaaatacgagagcttctccaagaaactggatcctagtctctcaggtagttactggagaagatgtgaggaagcgacgaaggaaggcggaaaaacatcaggccatgcatatggaacatggaatatccctcgtgtgataagcaacgaagatgctttccgacgtgaaagacggagcaaacacgatgcttgtgctgtgatcacttgataggcaaatttcatgttccagacttccaggcatcttcaaaattgaatgaagctaggtacactgctagacagtgtcttacttacctgtatgcacgtttccattcttgccaggtgaaatgcagaaatgacctgcaaccgttgatgtaaggtgctaggggtctgctcagtgggaactccttgaggatatagtggtccttggcctaccttgggcccctttgatgctcacaaatgtacccattttcaagtcaaattttcacaaatgcagaaatgacatgctgaatttagtttctgtaaggctgtctccatcggataccccatctcatctcttttcaaacttatctgtaaataatgtcaaacagtatagttttttactgagtccaagaagggaacaagtcggtctggactctggagtgcgccttgtggccacgtgagagcatctgattcacgacgggctacagtgacagatggatatgtatcggtgtatcctgctactcctacccctatactcgtggctgcgcctgctacagtgacagacgggctacagtgattcacattccatgtgattggttgttaggatcagcagatcctggtcgaagccgagatgcaggttgggcttaacctgtatgcattgatgcaaaccaaaataagttctcttgtttggttgtttgtcctcaattagttaggatcaacactgttttaggtaagttgtatggatttagctttaagttgcacgactcaactatatttctaaaattacaatgccataaattataacgccataaattacacaaaatccaaatttatacaattataaattacaataacttatcctttacatatcttttacaaaattataaattacaattatagtattgatactgaggcacaagaacactttataaaattatagtttaaagtatgcattaccagtttaccagcgtc

SEQ ID NO: 25000 - DNA, 2668 bp, Zea Mays
ctcagcctcatttctcttttatttccgctctcctccattctctgtttgctactttgcaagtctcgaacaaaacctgaagcaactcgaagcgaagccgcgatactgcgagaagcggaagcggggagggcgaggaggagcagcaatggaggcgctgctggagctcgagaagatgcagagggtgctgtccctcatgagttcacgcggcctctcccacaccgactccagctgcggcggcgctgccgctgaccgcttcctcgcccaattcctcctcttcatggtgcaaccgtttgattctcttaccctggagaataagttccttttgatctctgagctattaagaaaggctactcctaatactttggaagaagtgcagcatctcacccatctggaagctaataaagatatatgttctggaggttcactccagccaattaagaagtttaagatgcatgccgagaaatcaaccgttcaagctatgccgatggttggttttgatgcgatggcaagagctaagtctacgcttgaagattttgtatgtattctttgtagttggtactcgtaaaaatccttaatggaaacactgccatgaattaatcctggagtgacccaggtcttctgggctgccttttagtttttcttcttttatttttctcaagagaaacctgtttaccttttcttttctcacatcaataaaatcttagcacattaggggattcctttactgtttttgctaaaaaaacactgtcatactgccttttgttgagattttgcaatgcaagtgctacaaaacaattgaaccgcttatagaggcattaagcccgtataaaaaatagcaaggtatctttgaatgtattttgttgttccattattagtcttatagagaaactgggtcacatgctgttctaaattttgatttttcctgttcaaacatgtcttttttggggggttatgagtctatcttgagcacttcctgataattatgtttccctaaagtcccttttttccttcttgagaaaacagtgtaggtcgtactttatgtttcatggtttggatgttaacaagccacaagccattttcaagtatctacctgttctttctttcacagagagttacatatatcagttagatgcttcaaatgaagactgtttacatgtagtcccagatgacaacacttcaaaagtgttgggaaagaaagaagaatctctcaatgagacatccttgtctcaaatgattgaaccccttgaagggcttcttcagtgccaaggattaatgacagaccgattgcgaactgaactcaaatcaggcattcagtattggtctctagagaggaagctctgccaagcattactaagaaatgagaagatctcgattgaagatgttatgatggcaatccatctgaaatcatttgactatcgagttcttaacctgttgatgtttcaacttactggtcaatgaattgcatatggacttcttgtcagtttcagaatttttggttgagatatctgatgacctgtatgattatgaggatgacgttatgaacaatacgttcaatatccttcgcatgtttgctgcaatatatggaccattagaggcaccgaatatgctggccaagtgcataggcgaggctgaagagaaatacgagagcttctccaagaaactggatcctagtctctcaggtagttactggagaagatgtgaggaagcgacgaaggaaggcggaaaaacatcaggccatgcatatggaacatggaatatccctcgtgtgataagcaacgaagatgctttccgacgtgaaagacggagcaaacacgatgcttgtgctgtgatcacttgataggtgaaatgcagaaatgacctgcaaccgttgatgtaaggtgctaggggtctgctcagtgggaactccttgaggatatagtggtccttggcctaccttgggcccctttgatgctcacaaatgtacccattttcaagtcaaattttcacaaatgcagaaatgacatgctgaatttagtttctgtaaggctgtctccatcggataccccatctcatctcttttcaaacttatctgtaaataatgtcaaacagtatagttttttactgagtccaagaagggaacaagtcggtctggactctggagtgcgccttgtggccacgtgagagcatctgattcacgacgggctacagtgacagatggatatgtatcggtgtatcctgctactcctacccctatactcgtggctgcgcctgctacagtgacagacgggctacagtgattcacattccatgtgattggttgttaggatcagcagatcctggtcgaagccgagatgcaggttgggcttaacctgtatgcattgatgcaaaccaaaataagttctcttgtttggttgtttgtcctcaattagttaggatcaacactgttttaggtaagttgtatggatttagctttaagttgcacgactcaactatatttctaaaattacaatgccataaattataacgccataaattacacaaaatccaaatttatacaattataaattacaataacttatcctttacatatcttttacaaaattataaattacaattatagtattgatactgaggcacaagaacactttataaaattatagtttaaagtatgcattaccagtttaccagcgtc

SEQ ID NO: 25001 - DNA, 2957 bp, Zea Mays
cacacattaacctcagcctcatttctcttttatttccgctctcctccattctctgtttgctactttgcaagtctcgaacaaaacctgaagcaactcgaagcgaagccgcgatactgcgagaagcggaagcggggagggcgaggaggagcagcaatggaggcgctgctggagctcgagaagatgcagagggtgctgtccctcatgagttcacgcggcctctcccacaccgactccagctgcggcggcgctgccgctgaccgcttcctcgcccaattcctcctcttcatggtgcaaccgtttgattctcttaccctggagaataagttccttttgatctctgagctattaagaaaggctactcctaatactttggaagaagtgcagcatctcacccatctggaagctaataaagatatatgttctggaggttcactccagccaattaagaagtttaagatgcatgccgagaaatcaaccgttcaagctatgccgatggttggttttgatgcgatggcaagagctaagtctacgcttgaagatttttgtaggtcgtactttatgtttcatggtttggatgttaacaagccacaagccattttcaagtatctacctgttctttctttcacagagagttacatatatcagttagatgcttcaaatgaagactgtttacatgtagtcccagatgacaacacttcaaaagtgttgggaaagaaagaagaatctctcaatgagacatccttgtctcaaatgattgaaccccttgaagggcttcttcagtgccaaggattaatgacagaccgattgcgaactgaactcaaatcaggcattcagtattggtctctagagaggaagctctgccaagcattactaagaaatgagaagatctcgattgaagatgttatgatggcaatccatctgaaatcatttgactatcgagttcttaacctgttgatgtttcaacttactggtcaatgaattgcatatggacttcttgtcagtttcagaatttttggttgagatatctgatgacctgtgagtttgctctgaatcttattcccatgcatcacagcataacaaaatggtaggaactgcctacttcttaaaaatctgtcattaatgttttggtaaatttgtaaaatctgaggcaaggtagtgcatgggttaagatggaactagtgcttctattgagatgtcggtgttgtatgtaaatggaaaacaataattttaatttaaatgaaattgtgttttagttatcatgtaatctaactattaaaggatctgcggatatagaaacccaaaaacttatgcacttttgtagtgtaccttagtgtgatttatgggaaaatcatcagattagtagcgttgttatatacaatcctgtacctttttccttcttaatcaaatgacatgcagctctcctgcattgtttgagaaaaaagtgtatataagtcctcgggggtcaatataagcctagatgcaccatgtgctggacagacactatgaataactttcagtcttttttttatttgtttcacaaaccatgtcatcaattgaaatagctgtttcacccgtgacttgtttttgaatatcttgcaggtatgattatgaggtaagttgggctaccgaaactgatggtatcgtataatcttagctgtactagtgagtgtaggcctaactgttgaagaagttcaatttgttttgtaggatgacgttatgaacaatacgttcaatatccttcgcatgtttgctgcaatatatggaccattagaggcaccgaatatgctggccaagtgcataggcgaggctgaagagaaatacgagagcttctccaagaaactggatcctagtctctcaggtagttactggagaagatgtgaggaagcgacgaaggaaggcggaaaaacatcaggccatgcatatggaacatggaatatccctcgtgtgataagcaacgaagatgctttccgacgtgaaagacggagcaaacacgatgcttgtgctgtgatcacttgataggcaaatttcatgttccagacttccaggcatcttcaaaattgaatgaagctaggtacactgctagacagtgtcttacttacctgtatgcacgtttccattcttgccaggtgaaatgcagaaatgacctgcaaccgttgatgtaaggtgctaggggtctgctcagtgggaactccttgaggatatagtggtccttggcctaccttgggcccctttgatgctcacaaatgtacccattttcaagtcaaattttcacaaatgcagaaatgacatgctgaatttagtttctgtaaggctgtctccatcggataccccatctcatctcttttcaaacttatctgtaaataatgtcaaacagtatagttttttactgagtccaagaagggaacaagtcggtctggactctggagtgcgccttgtggccacgtgagagcatctgattcacgacgggctacagtgacagatggatatgtatcggtgtatcctgctactcctacccctatactcgtggctgcgcctgctacagtgacagacgggctacagtgattcacattccatgtgattggttgttaggatcagcagatcctggtcgaagccgagatgcaggttgggcttaacctgtatgcattgatgcaaaccaaaataagttctcttgtttggttgtttgtcctcaattagttaggatcaacactgttttaggtaagttgtatggatttagctttaagttgcacgactcaactatatttctaaaattacaatgccataaattataacgccataaattacacaaaatccaaatttatacaattataaattacaataacttatcctttacatatcttttacaaaattataaattacaattatagtattgatactgaggcacaagaacactttataaaattatagtttaaagtatgcattaccagtttaccagcgtc

SEQ ID NO: 25002 - DNA, 3465 bp, Zea Mays
cccaactgggggcacacattaacctcagcctcatttctcttttatttccgctctcctccattctctgtttgctactttgcaagtctcgaacaaaacctgaagcaactcgaagcgaagccgcgatactgcgagaagcggaagcggggagggcgaggaggagcagcaatggaggcgctgctggagctcgagaagatgcagagggtgctgtccctcatgagttcacgcggcctctcccacaccgactccagctgcggcggcgctgccgctgaccgcttcctcgcccaattcctcctcttcatggtgcaaccgtttgattctcttaccctggagaataagttccttttgatctctgagctattaagaaaggctactcctaatactttggaagaagtgcagcatctcacccatctggaaggtagtggtaatagttgtgaagtaatgatgatcttacattaaccttatgagtttatccggaaattttcttgttgattgggtctggaactctgataagacataggaccctttcaaacgcagctaataaagatatatgttctggaggttcactccagccaattaagaagtttaagatgcatgccgagaaatcaaccgttcaagctatgccgatggttggttttgatgcgatggcaagagctaagtctacgcttgaagattttgtatgtattctttgtagttggtactcgtaaaaatccttaatggaaacactgccatgaattaatcctggagtgacccaggtcttctgggctgccttttagtttttcttcttttatttttctcaagagaaacctgtttaccttttcttttctcacatcaataaaatcttagcacattaggggattcctttactgtttttgctaaaaaaacactgtcatactgccttttgttgagattttgcaatgcaagtgctacaaaacaattgaaccgcttatagaggcattaagcccgtataaaaaatagcaaggtatctttgaatgtattttgttgttccattattagtcttatagagaaactgggtcacatgctgttctaaattttgatttttcctgttcaaacatgtcttttttggggggttatgagtctatcttgagcacttcctgataattatgtttccctaaagtcccttttttccttcttgagaaaacagtgtaggtcgtactttatgtttcatggtttggatgttaacaagccacaagccattttcaagtatctacctgttctttctttcacagagagttacatatatcagatgcttcaaatgaagactgtttacatgtagtcccagatgacaacacttcaaaagtgttgggaaagaaagaagaatctctcaatgagacatccttgtctcaaatgattgaaccccttgaagggcttcttcagtgccaaggattaatgacagaccgattgcgaactgaactcaaatcaggcattcagtattggtctctagagaggaagctctgccaagcattactaagaaatgagaagatctcgattgaagatgttatgatggcaatccatctgaaatcatttgactatcgagttcttaacctgttgatgtttcaacttactggtcaatgaattgcatatggacttcttgtcagtttcagaatttttggttgagatatctgatgacctgtgagtttgctctgaatcttattcccatgcatcacagcataacaaaatggtaggaactgcctacttcttaaaaatctgtcattaatgttttggtaaatttgtaaaatctgaggcaaggtagtgcatgggttaagatggaactagtgcttctattgagatgtcggtgttgtatgtaaatggaaaacaataattttaatttaaatgaaattgtgttttagttatcatgtaatctaactattaaaggatctgcggatatagaaacccaaaaacttatgcacttttgtagtgtaccttagtgtgatttatgggaaaatcatcagattagtagcgttgttatatacaatcctgtacctttttccttcttaatcaaatgacatgcagctctcctgcattgtttgagaaaaaagtgtatataagtcctcgggggtcaatataagcctagatgcaccatgtgctggacagacactatgaataactttcagtcttttttttatttgtttcacaaaccatgtcatcaattgaaatagctgtttcacccgtgacttgtttttgaatatcttgcaggtatgattatgaggtaagttgggctaccgaaactgatggtatcgtataatcttagctgtactagtgagtgtaggcctaactgttgaagaagttcaatttgttttgtaggatgacgttatgaacaatacgttcaatatccttcgcatgtttgctgcaatatatggaccattagaggcaccgaatatgctggccaagtgcataggcgaggctgaagagaaatacgagagcttctccaagaaactggatcctagtctctcaggtagttactggagaagatgtgaggaagcgacgaaggaaggcggaaaaacatcaggccatgcatatggaacatggaatatccctcgtgtgataagcaacgaagatgctttccgacgtgaaagacggagcaaacacgatgcttgtgctgtgatcacttgataggtgaaatgcagaaatgacctgcaaccgttgatgtaaggtgctaggggtctgctcagtgggaactccttgaggatatagtggtccttggcctaccttgggcccctttgatgctcacaaatgtacccattttcaagtcaaattttcacaaatgcagaaatgacatgctgaatttagtttctgtaaggctgtctccatcggataccccatctcatctcttttcaaacttatctgtaaataatgtcaaacagtatagttttttactgagtccaagaagggaacaagtcggtctggactctggagtgcgccttgtggccacgtgagagcatctgattcacgacgggctacagtgacagatggatatgtatcggtgtatcctgctactcctacccctatactcgtggctgcgcctgctacagtgacagacgggctacagtgattcacattccatgtgattggttgttaggatcagcagatcctggtcgaagccgagatgcaggttgggcttaacctgtatgcattgatgcaaaccaaaataagttctcttgtttggttgtttgtcctcaattagttaggatcaacactgttttaggtaagttgtatggatttagctttaagttgcacgactcaactatatttctaaaattacaatgccataaattataacgccataaattacacaaaatccaaatttatacaattataaattacaataacttatcctttacatatcttttacaaaattataaattacaattatagtattgatactgaggcacaagaacactttataaaattatagtttaaagtatgcattaccagtttaccagcgtc

SEQ ID NO: 25003 - DNA, 2866 bp, Zea Mays
ggaacccaacgctgcatttcccaactgggggcacacattaacctcagcctcatttctcttttatttccgctctcctccattctctgtttgctactttgcaagtctcgaacaaaacctgaagcaactcgaagcgaagccgcgatactgcgagaagcggaagcggggagggcgaggaggagcagcaatggaggcgctgctggagctcgagaagatgcagagggtgctgtccctcatgagttcacgcggcctctcccacaccgactccagctgcggcggcgctgccgctgaccgcttcctcgcccaattcctcctcttcatggtgcaaccgtttgattctcttaccctggagaataagttccttttgatctctgagctattaagaaaggctactcctaatactttggaagaagtgcagcatctcacccatctggaagctaataaagatatatgttctggaggttcactccagccaattaagaagtttaagatgcatgccgagaaatcaaccgttcaagctatgccgatggttggttttgatgcgatggcaagagctaagtctacgcttgaagattttgtatgtattctttgtagttggtactcgtaaaaatccttaatggaaacactgccatgaattaatcctggagtgacccaggtcttctgggctgccttttagtttttcttcttttatttttctcaagagaaacctgtttaccttttcttttctcacatcaataaaatcttagcacattaggggattcctttactgtttttgctaaaaaaacactgtcatactgccttttgttgagattttgcaatgcaagtgctacaaaacaattgaaccgcttatagaggcattaagcccgtataaaaaatagcaaggtatctttgaatgtattttgttgttccattattagtcttatagagaaactgggtcacatgctgttctaaattttgatttttcctgttcaaacatgtcttttttggggggttatgagtctatcttgagcacttcctgataattatgtttccctaaagtcccttttttccttcttgagaaaacagtgtaggtcgtactttatgtttcatggtttggatgttaacaagccacaagccattttcaagtatctacctgttctttctttcacagagagttacatatatcagttagatgcttcaaatgaagactgtttacatgtagtcccagatgacaacacttcaaaagtgttgggaaagaaagaagaatctctcaatgagacatccttgtctcaaatgattgaaccccttgaagggcttcttcagtgccaaggattaatgacagaccgattgcgaactgaactcaaatcaggcattcagtattggtctctagagaggaagctctgccaagcattactaagaaatgagaagatctcgattgaagatgttatgatggcaatccatctgaaatcatttgactatcgagttcttaacctgttgatgtttcaacttactggtcaatgaattgcatatggacttcttgtcagtttcagaatttttggttgagatatctgatgacctgtgagtttgctctgaatcttattcccatgcatcacagcataacaaaatggtatgattatgaggatgacgttatgaacaatacgttcaatatccttcgcatgtttgctgcaatatatggaccattagaggcaccgaatatgctggccaagtgcataggcgaggctgaagagaaatacgagagcttctccaagaaactggatcctagtctctcaggtagttactggagaagatgtgaggaagcgacgaaggaaggcggaaaaacatcaggccatgcatatggaacatggaatatccctcgtgtgataagcaacgaagatgctttccgacgtgaaagacggagcaaacacgatgcttgtgctgtgatcacttgataggcaaatttcatgttccagacttccaggcatcttcaaaattgaatgaagctaggtacactgctagacagtgtcttacttacctgtatgcacgtttccattcttgccaggtgaaatgcagaaatgacctgcaaccgttgatgtaaggtgctaggggtctgctcagtgggaactccttgaggatatagtggtccttggcctaccttgggcccctttgatgctcacaaatgtacccattttcaagtcaaattttcacaaatgcagaaatgacatgctgaatttagtttctgtaaggctgtctccatcggataccccatctcatctcttttcaaacttatctgtaaataatgtcaaacagtatagttttttactgagtccaagaagggaacaagtcggtctggactctggagtgcgccttgtggccacgtgagagcatctgattcacgacgggctacagtgacagatggatatgtatcggtgtatcctgctactcctacccctatactcgtggctgcgcctgctacagtgacagacgggctacagtgattcacattccatgtgattggttgttaggatcagcagatcctggtcgaagccgagatgcaggttgggcttaacctgtatgcattgatgcaaaccaaaataagttctcttgtttggttgtttgtcctcaattagttaggatcaacactgttttaggtaagttgtatggatttagctttaagttgcacgactcaactatatttctaaaattacaatgccataaattataacgccataaattacacaaaatccaaatttatacaattataaattacaataacttatcctttacatatcttttacaaaattataaattacaattatagtattgatactgaggcacaagaacactttataaaattatagtttaaagtatgcattaccagtttaccagcgtc

SEQ ID NO: 25004 - DNA, 3282 bp, Zea Mays
ggaacccaacgctgcatttcccaactgggggcacacattaacctcagcctcatttctcttttatttccgctctcctccattctctgtttgctactttgcaagtctcgaacaaaacctgaagcaactcgaagcgaagccgcgatactgcgagaagcggaagcggggagggcgaggaggagcagcaatggaggcgctgctggagctcgagaagatgcagagggtgctgtccctcatgagttcacgcggcctctcccacaccgactccagctgcggcggcgctgccgctgaccgcttcctcgcccaattcctcctcttcatggtgcaaccgtttgattctcttaccctggagaataagttccttttgatctctgagctattaagaaaggctactcctaatactttggaagaagtgcagcatctcacccatctggaagctaataaagatatatgttctggaggttcactccagccaattaagaagtttaagatgcatgccgagaaatcaaccgttcaagctatgccgatggttggttttgatgcgatggcaagagctaagtctacgcttgaagattttgtatgtattctttgtagttggtactcgtaaaaatccttaatggaaacactgccatgaattaatcctggagtgacccaggtcttctgggctgccttttagtttttcttcttttatttttctcaagagaaacctgtttaccttttcttttctcacatcaataaaatcttagcacattaggggattcctttactgtttttgctaaaaaaacactgtcatactgccttttgttgagattttgcaatgcaagtgctacaaaacaattgaaccgcttatagaggcattaagcccgtataaaaaatagcaaggtatctttgaatgtattttgttgttccattattagtcttatagagaaactgggtcacatgctgttctaaattttgatttttcctgttcaaacatgtcttttttggggggttatgagtctatcttgagcacttcctgataattatgtttccctaaagtcccttttttccttcttgagaaaacagtgtaggtcgtactttatgtttcatggtttggatgttaacaagccacaagccattttcaagtatctacctgttctttctttcacagagagttacatatatcagttagatgcttcaaatgaagactgtttacatgtagtcccagatgacaacacttcaaaagtgttgggaaagaaagaagaatctctcaatgagacatccttgtctcaaatgattgaaccccttgaagggcttcttcagtgccaaggattaatgacagaccgattgcgaactgaactcaaatcaggcattcagtattggtctctagagaggaagctctgccaagcattactaagaaatgagaagatctcgattgaagatgttatgatggcaatccatctgaaatcatttgactatcgagttcttaacctgttgatgtttcaacttactggtcagcatgtcaatgaattgcatatggacttcttgtcagtttcagaatttttggttgagatatctgatgacctgtgagtttgctctgaatcttattcccatgcatcacagcataacaaaatggtaggaactgcctacttcttaaaaatctgtcattaatgttttggtaaatttgtaaaatctgaggcaaggtagtgcatgggttaagatggaactagtgcttctattgagatgtcggtgttgtatgtaaatggaaaacaataattttaatttaaatgaaattgtgttttagttatcatgtaatctaactattaaaggatctgcggatatagaaacccaaaaacttatgcacttttgtagtgtaccttagtgtgatttatgggaaaatcatcagattagtagcgttgttatatacaatcctgtacctttttccttcttaatcaaatgacatgcagctctcctgcattgtttgagaaaaaagtgtatataagtcctcgggggtcaatataagcctagatgcaccatgtgctggacagacactatgaataactttcagtcttttttttatttgtttcacaaaccatgtcatcaattgaaatagctgtttcacccgtgacttgtttttgaatatcttgcaggtatgattatgaggatgacgttatgaacaatacgttcaatatccttcgcatgtttgctgcaatatatggaccattagaggcaccgaatatgctggccaagtgcataggcgaggctgaagagaaatacgagagcttctccaagaaactggatcctagtctctcaggtagttactggagaagatgtgaggaagcgacgaaggaaggcggaaaaacatcaggccatgcatatggaacatggaatatccctcgtgtgataagcaacgaagatgctttccgacgtgaaagacggagcaaacacgatgcttgtgctgtgatcacttgataggtgaaatgcagaaatgacctgcaaccgttgatgtaaggtgctaggggtctgctcagtgggaactccttgaggatatagtggtccttggcctaccttgggcccctttgatgctcacaaatgtacccattttcaagtcaaattttcacaaatgcagaaatgacatgctgaatttagtttctgtaaggctgtctccatcggataccccatctcatctcttttcaaacttatctgtaaataatgtcaaacagtatagttttttactgagtccaagaagggaacaagtcggtctggactctggagtgcgccttgtggccacgtgagagcatctgattcacgacgggctacagtgacagatggatatgtatcggtgtatcctgctactcctacccctatactcgtggctgcgcctgctacagtgacagacgggctacagtgattcacattccatgtgattggttgttaggatcagcagatcctggtcgaagccgagatgcaggttgggcttaacctgtatgcattgatgcaaaccaaaataagttctcttgtttggttgtttgtcctcaattagttaggatcaacactgttttaggtaagttgtatggatttagctttaagttgcacgactcaactatatttctaaaattacaatgccataaattataacgccataaattacacaaaatccaaatttatacaattataaattacaataacttatcctttacatatcttttacaaaattataaattacaattatagtattgatactgaggcacaagaacactttataaaattatagtttaaagtatgcattaccagtttaccagcgtc

SEQ ID NO: 25005 - DNA, 2084 bp, Zea Mays
ggaacccaacgctgcatttcccaactgggggcacacattaacctcagcctcatttctcttttatttccgctctcctccattctctgtttgctactttgcaagtctcgaacaaaacctgaagcaactcgaagcgaagccgcgatactgcgagaagcggaagcggggagggcgaggaggagcagcaatggaggcgctgctggagctcgagaagatgcagagggtgctgtccctcatgagttcacgcggcctctcccacaccgactccagctgcggcggcgctgccgctgaccgcttcctcgcccaattcctcctcttcatgtgtaggtcgtactttatgtttcatggtttggatgttaacaagccacaagccattttcaagtatctacctgttctttctttcacagagagttacatatatcagttagatgcttcaaatgaagactgtttacatgtagtcccagatgacaacacttcaaaagtgttgggaaagaaagaagaatctctcaatgagacatccttgtctcaaatgattgaaccccttgaagggcttcttcagtgccaaggattaatgacagaccgattgcgaactgaactcaaatcaggcattcagtattggtctctagagaggaagctctgccaagcattactaagaaatgagaaggtcaatgaattgcatatggacttcttgtcagtttcagaatttttggttgagatatctgatgacctgtatgattatgaggtaagttgggctaccgaaactgatggtatcgtataatcttagctgtactagtgagtgtaggcctaactgttgaagaagttcaatttgttttgtaggatgacgttatgaacaatacgttcaatatccttcgcatgtttgctgcaatatatggaccattagaggcaccgaatatgctggccaagtgcataggcgaggctgaagagaaatacgagagcttctccaagaaactggatcctagtctctcaggtagttactggagaagatgtgaggaagcgacgaaggaaggcggaaaaacatcaggccatgcatatggaacatggaatatccctcgtgtgataagcaacgaagatgctttccgacgtgaaagacggagcaaacacgatgcttgtgctgtgatcacttgataggcaaatttcatgttccagacttccaggcatcttcaaaattgaatgaagctaggtacactgctagacagtgtcttacttacctgtatgcacgtttccattcttgccaggtgaaatgcagaaatgacctgcaaccgttgatgtaaggtgctaggggtctgctcagtgggaactccttgaggatatagtggtccttggcctaccttgggcccctttgatgctcacaaatgtacccattttcaagtcaaattttcacaaatgcagaaatgacatgctgaatttagtttctgtaaggctgtctccatcggataccccatctcatctcttttcaaacttatctgtaaataatgtcaaacagtatagttttttactgagtccaagaagggaacaagtcggtctggactctggagtgcgccttgtggccacgtgagagcatctgattcacgacgggctacagtgacagatggatatgtatcggtgtatcctgctactcctacccctatactcgtggctgcgcctgctacagtgacagacgggctacagtgattcacattccatgtgattggttgttaggatcagcagatcctggtcgaagccgagatgcaggttgggcttaacctgtatgcattgatgcaaaccaaaataagttctcttgtttggttgtttgtcctcaattagttaggatcaacactgttttaggtaagttgtatggatttagctttaagttgcacgactcaactatatttctaaaattacaatgccataaattataacgccataaattacacaaaatccaaatttatacaattataaattacaataacttatcctttacatatcttttacaaaattataaattacaattatagtattgatactgaggcacaagaacactttataaaattatagtttaaagtatgcattaccagtttaccagcgtc

SEQ ID NO: 25006 - DNA, 3275 bp, Zea Mays
tggaacccaacgctgcatttcccaactgggggcacacattaacctcagcctcatttctcttttatttccgctctcctccattctctgtttgctactttgcaagtctcgaacaaaacctgaagcaactcgaagcgaagccgcgatactgcgagaagcggaagcggggagggcgaggaggagcagcaatggaggcgctgctggagctcgagaagatgcagagggtgctgtccctcatgagttcacgcggcctctcccacaccgactccagctgcggcggcgctgccgctgaccgcttcctcgcccaattcctcctcttcatggtgcaaccgtttgattctcttaccctggagaataagttccttttgatctctgagctattaagaaaggctactcctaatactttggaagaagtgcagcatctcacccatctggaagctaataaagatatatgttctggaggttcactccagccaattaagaagtttaagatgcatgccgagaaatcaaccgttcaagctatgccgatggttggttttgatgcgatggcaagagctaagtctacgcttgaagattttgtatgtattctttgtagttggtactcgtaaaaatccttaatggaaacactgccatgaattaatcctggagtgacccaggtcttctgggctgccttttagtttttcttcttttatttttctcaagagaaacctgtttaccttttcttttctcacatcaataaaatcttagcacattaggggattcctttactgtttttgctaaaaaaacactgtcatactgccttttgttgagattttgcaatgcaagtgctacaaaacaattgaaccgcttatagaggcattaagcccgtataaaaaatagcaaggtatctttgaatgtattttgttgttccattattagtcttatagagaaactgggtcacatgctgttctaaattttgatttttcctgttcaaacatgtcttttttggggggttatgagtctatcttgagcacttcctgataattatgtttccctaaagtcccttttttccttcttgagaaaacagtgtaggtcgtactttatgtttcatggtttggatgttaacaagccacaagccattttcaagtatctacctgttctttctttcacagagagttacatatatcagttagatgcttcaaatgaagactgtttacatgtagtcccagatgacaacacttcaaaagtgttgggaaagaaagaagaatctctcaatgagacatccttgtctcaaatgattgaaccccttgaagggcttcttcagtgccaaggattaatgacagaccgattgcgaactgaactcaaatcaggcattcagtattggtctctagagaggaagctctgccaagcattactaagaaatgagaagatctcgattgaagatgttatgatggcaatccatctgaaatcatttgactatcgagttcttaacctgttgatgtttcaacttactggtcaatgaattgcatatggacttcttgtcagtttcagaatttttggttgagatatctgatgacctgtgagtttgctctgaatcttattcccatgcatcacagcataacaaaatggtaggaactgcctacttcttaaaaatctgtcattaatgttttggtaaatttgtaaaatctgaggcaaggtagtgcatgggttaagatggaactagtgcttctattgagatgtcggtgttgtatgtaaatggaaaacaataattttaatttaaatgaaattgtgttttagttatcatgtaatctaactattaaaggatctgcggatatagaaacccaaaaacttatgcacttttgtagtgtaccttagtgtgatttatgggaaaatcatcagattagtagcgttgttatatacaatcctgtacctttttccttcttaatcaaatgacatgcagctctcctgcattgtttgagaaaaaagtgtatataagtcctcgggggtcaatataagcctagatgcaccatgtgctggacagacactatgaataactttcagtcttttttttatttgtttcacaaaccatgtcatcaattgaaatagctgtttcacccgtgacttgtttttgaatatcttgcaggtatgattatgaggatgacgttatgaacaatacgttcaatatccttcgcatgtttgctgcaatatatggaccattagaggcaccgaatatgctggccaagtgcataggcgaggctgaagagaaatacgagagcttctccaagaaactggatcctagtctctcaggtagttactggagaagatgtgaggaagcgacgaaggaaggcggaaaaacatcaggccatgcatatggaacatggaatatccctcgtgtgataagcaacgaagatgctttccgacgtgaaagacggagcaaacacgatgcttgtgctgtgatcacttgataggtgaaatgcagaaatgacctgcaaccgttgatgtaaggtgctaggggtctgctcagtgggaactccttgaggatatagtggtccttggcctaccttgggcccctttgatgctcacaaatgtacccattttcaagtcaaattttcacaaatgcagaaatgacatgctgaatttagtttctgtaaggctgtctccatcggataccccatctcatctcttttcaaacttatctgtaaataatgtcaaacagtatagttttttactgagtccaagaagggaacaagtcggtctggactctggagtgcgccttgtggccacgtgagagcatctgattcacgacgggctacagtgacagatggatatgtatcggtgtatcctgctactcctacccctatactcgtggctgcgcctgctacagtgacagacgggctacagtgattcacattccatgtgattggttgttaggatcagcagatcctggtcgaagccgagatgcaggttgggcttaacctgtatgcattgatgcaaaccaaaataagttctcttgtttggttgtttgtcctcaattagttaggatcaacactgttttaggtaagttgtatggatttagctttaagttgcacgactcaactatatttctaaaattacaatgccataaattataacgccataaattacacaaaatccaaatttatacaattataaattacaataacttatcctttacatatcttttacaaaattataaattacaattatagtattgatactgaggcacaagaacactttataaaattatagtttaaagtatgcattaccagtttaccagcgtc

SEQ ID NO: 25007 - DNA, 2701 bp, Zea Mays
tggaacccaacgctgcatttcccaactgggggcacacattaacctcagcctcatttctcttttatttccgctctcctccattctctgtttgctactttgcaagtctcgaacaaaacctgaagcaactcgaagcgaagccgcgatactgcgagaagcggaagcggggagggcgaggaggagcagcaatggaggcgctgctggagctcgagaagatgcagagggtgctgtccctcatgagttcacgcggcctctcccacaccgactccagctgcggcggcgctgccgctgaccgcttcctcgcccaattcctcctcttcatggtgcaaccgtttgattctcttaccctggagaataagttccttttgatctctgagctattaagaaagtgtaggtcgtactttatgtttcatggtttggatgttaacaagccacaagccattttcaagtatctacctgttctttctttcacagagagttacatatatcagttagatgcttcaaatgaagactgtttacatgtagtcccagatgacaacacttcaaaagtgttgggaaagaaagaagaatctctcaatgagacatccttgtctcaaatgattgaaccccttgaagggcttcttcagtgccaaggattaatgacagaccgattgcgaactgaactcaaatcaggcattcagtattggtctctagagaggaagctctgccaagcattactaagaaatgagaagatctcgattgaagatgttatgatggcaatccatctgaaatcatttgactatcgagttcttaacctgttgatgtttcaacttactggtcagcatgtcaatgaattgcatatggacttcttgtcagtttcagaatttttggttgagatatctgatgacctgtgagtttgctctgaatcttattcccatgcatcacagcataacaaaatggtaggaactgcctacttcttaaaaatctgtcattaatgttttggtaaatttgtaaaatctgaggcaaggtagtgcatgggttaagatggaactagtgcttctattgagatgtcggtgttgtatgtaaatggaaaacaataattttaatttaaatgaaattgtgttttagttatcatgtaatctaactattaaaggatctgcggatatagaaacccaaaaacttatgcacttttgtagtgtaccttagtgtgatttatgggaaaatcatcagattagtagcgttgttatatacaatcctgtacctttttccttcttaatcaaatgacatgcagctctcctgcattgtttgagaaaaaagtgtatataagtcctcgggggtcaatataagcctagatgcaccatgtgctggacagacactatgaataactttcagtcttttttttatttgtttcacaaaccatgtcatcaattgaaatagctgtttcacccgtgacttgtttttgaatatcttgcaggtatgattatgaggtaagttgggctaccgaaactgatggtatcgtataatcttagctgtactagtgagtgtaggcctaactgttgaagaagttcaatttgttttgtaggatgacgttatgaacaatacgttcaatatccttcgcatgtttgctgcaatatatggaccattagaggcaccgaatatgctggccaagtgcataggcgaggctgaagagaaatacgagagcttctccaagaaactggatcctagtctctcaggtagttactggagaagatgtgaggaagcgacgaaggaaggcggaaaaacatcaggccatgcatatggaacatggaatatccctcgtgtgataagcaacgaagatgctttccgacgtgaaagacggagcaaacacgatgcttgtgctgtgatcacttgataggtgaaatgcagaaatgacctgcaaccgttgatgtaaggtgctaggggtctgctcagtgggaactccttgaggatatagtggtccttggcctaccttgggcccctttgatgctcacaaatgtacccattttcaagtcaaattttcacaaatgcagaaatgacatgctgaatttagtttctgtaaggctgtctccatcggataccccatctcatctcttttcaaacttatctgtaaataatgtcaaacagtatagttttttactgagtccaagaagggaacaagtcggtctggactctggagtgcgccttgtggccacgtgagagcatctgattcacgacgggctacagtgacagatggatatgtatcggtgtatcctgctactcctacccctatactcgtggctgcgcctgctacagtgacagacgggctacagtgattcacattccatgtgattggttgttaggatcagcagatcctggtcgaagccgagatgcaggttgggcttaacctgtatgcattgatgcaaaccaaaataagttctcttgtttggttgtttgtcctcaattagttaggatcaacactgttttaggtaagttgtatggatttagctttaagttgcacgactcaactatatttctaaaattacaatgccataaattataacgccataaattacacaaaatccaaatttatacaattataaattacaataacttatcctttacatatcttttacaaaattataaattacaattatagtattgatactgaggcacaagaacactttataaaattatagtttaaagtatgcattaccagtttaccagcgtc

SEQ ID NO: 25008 - DNA, 2760 bp, Zea Mays
tttagcccaagcccaacttgagaaaatgaggagaaaggcctcaggattttggaatttggaacccaacgctgcatttcccaactgggggcacacattaacctcagcctcatttctcttttatttccgctctcctccattctctgtttgctactttgcaagtctcgaacaaaacctgaagcaactcgaagcgaagccgcgatactgcgagaagcggaagcggggagggcgaggaggagcagcaatggaggcgctgctggagctcgagaagatgcagagggtgctgtccctcatgagttcacgcggcctctcccacaccgactccagctgcggcggcgctgccgctgaccgcttcctcgcccaattcctcctcttcatggtgcaaccgtttgattctcttaccctggagaataagttccttttgatctctgagctattaagaaaggctactcctaatactttggaagaagtgcagcatctcacccatctggaagctaataaagatatatgttctggaggttcactccagccaattaagaagtttaagatgcatgccgagaaatcaaccgttcaagctatgccgatggttggttttgatgcgatggcaagagctaagtctacgcttgaagattttgtatgtattctttgtagttggtactcgtaaaaatccttaatggaaacactgccatgaattaatcctggagtgacccaggtcttctgggctgccttttagtttttcttcttttatttttctcaagagaaacctgtttaccttttcttttctcacatcaataaaatcttagcacattaggggattcctttactgtttttgctaaaaaaacactgtcatactgccttttgttgagattttgcaatgcaagtgctacaaaacaattgaaccgcttatagaggcattaagcccgtataaaaaatagcaaggtatctttgaatgtattttgttgttccattattagtcttatagagaaactgggtcacatgctgttctaaattttgatttttcctgttcaaacatgtcttttttggggggttatgagtctatcttgagcacttcctgataattatgtttccctaaagtcccttttttccttcttgagaaaacagtgtaggtcgtactttatgtttcatggtttggatgttaacaagccacaagccattttcaagtatctacctgttctttctttcacagagagttacatatatcagttagatgcttcaaatgaagactgtttacatgtagtcccagatgacaacacttcaaaagtgttgggaaagaaagaagaatctctcaatgagacatccttgtctcaaatgattgaaccccttgaagggcttcttcagtgccaaggattaatgacagaccgattgcgaactgaactcaaatcaggcattcagtattggtctctagagaggaagctctgccaagcattactaagaaatgagaagatctcgattgaagatgttatgatggcaatccatctgaaatcatttgactatcgagttcttaacctgttgatgtttcaacttactggtcagcatgtcaatgaattgcatatggacttcttgtcagtttcagaatttttggttgagatatctgatgacctgtatgattatgaggatgacgttatgaacaatacgttcaatatccttcgcatgtttgctgcaatatatggaccattagaggcaccgaatatgctggccaagtgcataggcgaggctgaagagaaatacgagagcttctccaagaaactggatcctagtctctcaggtagttactggagaagatgtgaggaagcgacgaaggaaggcggaaaaacatcaggccatgcatatggaacatggaatatccctcgtgtgataagcaacgaagatgctttccgacgtgaaagacggagcaaacacgatgcttgtgctgtgaaatgcagaaatgacctgcaaccgttgatgtaaggtgctaggggtctgctcagtgggaactccttgaggatatagtggtccttggcctaccttgggcccctttgatgctcacaaatgtacccattttcaagtcaaattttcacaaatgcagaaatgacatgctgaatttagtttctgtaaggctgtctccatcggataccccatctcatctcttttcaaacttatctgtaaataatgtcaaacagtatagttttttactgagtccaagaagggaacaagtcggtctggactctggagtgcgccttgtggccacgtgagagcatctgattcacgacgggctacagtgacagatggatatgtatcggtgtatcctgctactcctacccctatactcgtggctgcgcctgctacagtgacagacgggctacagtgattcacattccatgtgattggttgttaggatcagcagatcctggtcgaagccgagatgcaggttgggcttaacctgtatgcattgatgcaaaccaaaataagttctcttgtttggttgtttgtcctcaattagttaggatcaacactgttttaggtaagttgtatggatttagctttaagttgcacgactcaactatatttctaaaattacaatgccataaattataacgccataaattacacaaaatccaaatttatacaattataaattacaataacttatcctttacatatcttttacaaaattataaattacaattatagtattgatactgaggcacaagaacactttataaaattatagtttaaagtatgcattaccagtttaccagcgtc

SEQ ID NO: 25009 - DNA, 2331 bp, Zea Mays
aaaaaaagaggattgctggctttttgctccttcctgatggccagtttagcccaagcccaacttgagaaaatgaggagaaaggcctcaggattttggaatttggaacccaacgctgcatttcccaactgggggcacacattaacctcagcctcatttctcttttatttccgctctcctccattctctgtttgctactttgcaagtctcgaacaaaacctgaagcaactcgaagcgaagccgcgatactgcgagaagcggaagcggggagggcgaggaggagcagcaatggaggcgctgctggagctcgagaagatgcagagggtgctgtccctcatgagttcacgcggcctctcccacaccgactccagctgcggcggcgctgccgctgaccgcttcctcgcccaattcctcctcttcatggtgcaaccgtttgattctcttaccctggagaataagttccttttgatctctgagctattaagaaaggctactcctaatactttggaagaagtgcagcatctcacccatctggaagctaataaagatatatgttctggaggttcactccagccaattaagaagtttaagatgcatgccgagaaatcaaccgttcaagctatgccgatggttggttttgatgcgatggcaagagctaagtctacgcttgaagatttttgtaggtcgtactttatgtttcatggtttggatgttaacaagccacaagccattttcaagtatctacctgttctttctttcacagagagttacatatatcagttagatgcttcaaatgaagactgtttacatgtagtcccagatgacaacacttcaaaagtgttgggaaagaaagaagaatctctcaatgagacatccttgtctcaaatgattgaaccccttgaagggcttcttcagtgccaaggattaatgacagaccgattgcgaactgaactcaaatcaggcattcagtattggtctctagagaggaagctctgccaagcattactaagaaatgagaagatctcgattgaagatgttatgatggcaatccatctgaaatcatttgactatcgagttcttaacctgttgatgtttcaacttactggtcagcatgtcaatgaattgcatatggacttcttgtcagtttcagaatttttggttgagatatctgatgacctgtatgattatgaggatgacgttatgaacaatacgttcaatatccttcgcatgtttgctgcaatatatggaccattagaggcaccgaatatgctggccaagtgcataggcgaggctgaagagaaatacgagagcttctccaagaaactggatcctagtctctcaggtagttactggagaagatgtgaggaagcgacgaaggaaggcggaaaaacatcaggccatgcatatggaacatggaatatccctcgtgtgataagcaacgaagatgctttccgacgtgaaagacggagcaaacacgatgcttgtgctgtgatcacttgataggtgaaatgcagaaatgacctgcaaccgttgatgtaaggtgctaggggtctgctcagtgggaactccttgaggatatagtggtccttggcctaccttgggcccctttgatgctcacaaatgtacccattttcaagtcaaattttcacaaatgcagaaatgacatgctgaatttagtttctgtaaggctgtctccatcggataccccatctcatctcttttcaaacttatctgtaaataatgtcaaacagtatagttttttactgagtccaagaagggaacaagtcggtctggactctggagtgcgccttgtggccacgtgagagcatctgattcacgacgggctacagtgacagatggatatgtatcggtgtatcctgctactcctacccctatactcgtggctgcgcctgctacagtgacagacgggctacagtgattcacattccatgtgattggttgttaggatcagcagatcctggtcgaagccgagatgcaggttgggcttaacctgtatgcattgatgcaaaccaaaataagttctcttgtttggttgtttgtcctcaattagttaggatcaacactgttttaggtaagttgtatggatttagctttaagttgcacgactcaactatatttctaaaattacaatgccataaattataacgccataaattacacaaaatccaaatttatacaattataaattacaataacttatcctttacatatcttttacaaaattataaattacaattatagtattgatactgaggcacaagaacactttataaaattatagtttaaagtatgcattaccagtttaccagcgtc

SEQ ID NO: 25010 - DNA, 1534 bp, Zea Mays
ctcatttctcttttatttccgctctcctccattctctgtttgctactttgcaagtctcgaacaaaacctgaagcaactcgaagcgaagccgcgatactgcgagaagcggaagcggggagggcgaggaggagcagcaatggaggcgctgctggagctcgagaagatgcagagggtgctgtccctcatgagttcacgcggcctctcccacaccgactccagctgcggcggcgctgccgctgaccgcttcctcgcccaattcctcctcttcatggtgcaaccgtttgattctcttaccctggagaataagttccttttgatctctgagctattaagaaaggctactcctaatactttggaagaagtgcagcatctcacccatctggaagctaataaagatatatgttctggaggttcactccagccaattaagaagtttaagatgcatgccgagaaatcaaccgttcaagctatgccgatggttggttttgatgcgatggcaagagctaagtctacgcttgaagattttgtatgtattctttgtagttggtactcgtaaaaatccttaatggaaacactgccatgaattaatcctggagtgacccaggtcttctgggctgccttttagtttttcttcttttatttttctcaagagaaacctgtttaccttttcttttctcacatcaataaaatcttagcacattaggggattcctttactgtttttgctaaaaaaacactgtcatactgccttttgttgagattttgcaatgcaagtgctacaaaacaattgaaccgcttatagaggcattaagcccgtataaaaaatagcaaggtatctttgaatgtattttgttgttccattattagtcttatagagaaactgggtcacatgctgttctaaattttgatttttcctgttcaaacatgtcttttttggggggttatgagtctatcttgagcacttcctgataattatgtttccctaaagtcccttttttccttcttgagaaaacagtgtaggtcgtactttatgtttcatggtttggatgttaacaagccacaagccattttcaagtatctacctgttctttctttcacagagagttacatatatcagttagatgcttcaaatgaagactgtttacatgtagtcccagatgacaacacttcaaaagtgttgggaaagaaagaagaatctctcaatgagacatccttgtctcaaatgattgaaccccttgaagggcttcttcagtgccaaggattaatgacagaccgattgcgaactgaactcaaatcaggcattcagtattggtctctagagaggaagctctgccaagcattactaagaaatgagaaggtgccccgtaatgcccaagttctctttgatgttgctctggagaccaaggttgggaatggggagaacaccaaattttggactgatcgttggctgcaaggcagcactgtagtacaggtgcttgtcgaatacctgaggctctgggagtcagttgatggtgttactttgcaaccttcagttt

SEQ ID NO: 25011 - DNA, 883 bp, Zea Mays
cttttatttccgctctcctccattctctgtttgctactttgcaagtctcgaacaaaacctgaagcaactcgaagcgaagccgcgatactgcgagaagcggaagcggggagggcgaggaggagcagcaatggaggcgctgctggagctcgagaagatgcagagggtgctgtccctcatgagttcacgcggcctctcccacaccgactccagctgcggcggcgctgccgctgaccgcttcctcgcccaattcctcctcttcatggtgcaaccgtttgattctcttaccctggagaataagttccttttgatctctgagctattaagaaaggctactcctaatactttggaagaagtgcagcatctcacccatctggaagctaataaagatatatgttctggaggttcactccagccaattaagaagtttaagatgcatgccgagaaatcaaccgttcaagctatgccgatggttggttttgatgcgatggcaagagctaagtctacgcttgaagatttttgtaggtcgtactttatgtttcatggtttggatgttaacaagccacaagccattttcaagtatctacctgttctttctttcacagagagttacatatatcagttagatgcttcaaatgaagactgtttacatgtagtcccagatgacaacacttcaaaagtgttgggaaagaaagaagaatctctcaatgagacatccttgtctcaaatgattgaaccccttgaagggcttcttcagtgccaaggattaatgacagaccgattgcgaactgaactcaaatcaggcattcagtattggtctctagagaggaagctctgccaagcattactaagaaatgagaaggtgccccgtaatgcccaagttctc

SEQ ID NO: 25012 - DNA, 216 bp, Zea Mays
caccttcttccaatctttactacatcgtcaccttcaggcttcagataatcagatttcaatacacgtcatgccctatgtcctggaaacgatcgaagtttcaacacgagaaaggagcagatctgattcaacaaccttttcatttctcgtgtattcagatgaacaagaacacaacggaactacaagcgtgtatccatggggcggagaaaaaaagaaaag

SEQ ID NO: 25013 - DNA, 3979 bp, Zea Mays
gccagctgccaacaacttactcaggtttcaggtagtccatggtctcactattaattacaactatagcacgtggttttgtgttaatctccgtttaatttctccgaaggagaacgagccagaatcaggctatcatcaaacgagcattcctggatccgatctgcagagaataacagggctgtacagtatacatttctcgagttgcaaacatccaattcctggatccgatcatcaacttctaacctcattttagagatcacaagcataagctaagggcgtactgatcgcggccgtcgatccaacgaccagcaggcagcagcaaacgttattagcagcagcgagcaaaattcggctcgagtaccaccagagaccgccatcactcacaatggcagcaccgagctccgagcgcgggaatggcgcgagaagaaggacctcgggacgccgctgggagccagcagccagtcggtgctgaggttgctgcggtgccccgaacccgatgccttcgggcgggacgggcacgggcccgtccagcgcttccgcctcccaccgatctgctcctcttcaggagctgctacttccggcagccggtctagctccgcgacactcgccgcagttgacaccgccacggcatccatggatgccgcgcgccgcacgttacgcggcagcgcacacaagagttctggcggcggcggcggctgtgcggagctgggtcgctcttgctggtcctctcgtgcgggcgaagcgtctaggccgtcgctctcctctccttcgtgatccggggctgcgtcgctcgccgcgccaacatgatctggtccgccgttgggactcgcgtccggatcagctggcggcgggctggagctggactcgccgcctcctccggagtcggccgtgacggcggggtcgagcacgtcggagcggcagacggggcagttgacgtgcgcgcggagccaggtgtcgatgcaggggacgtggaacgcgtgcgcgcacttgggcagcaggcgcacgagctcgccgtcctggaactcgccgaggcagacggagcagtcagccgcgcccaggagccccgccccggcgcggtaccgcgtggcggcgatggaactgatggacgcctcgtcgagccccacggtccggatgttccagacgtggtgcaccaccccgcctgcgccgtcccacccgtggtcgtgcccgccgccgccgccgacgttcgccgcgccctcggggaatgggataggcggtgcgaggagcgcctgccgcctccgccggacctgccggcgccgcacggccaccgagacgccgagcaggatcaggcatacgaaggcgaacaccccggcggcgatgagcgcgtatttgacgaggtgccgtcggtcgtggtcgcctgcaccgggtgggggcccgtatccctgcgtccctccctggttcctcctaccgttatgcgcgggagcaggcgacggagacggcgacggcgacaaaacgggagggcacggtagatcgccatagggaggcagcgatggggaagggccagggccggaatcaggagtgctgggaaccggcggtggtgtctggcagtcggcccacgggtcaccgcaggccccagcgcctgcgctgtgcaacgggaagagggcccggcggcgaggcctcatggccggcgaccgatggcgtcagatcggccgcgacggcggcatctgcatcgggcgcgcgcgggaggcggagaccaggcgctggagacggaggggaaagtgctgggaaggttgcggagaagcgtgcgccttaacgtgagtgcgtggacgtttagggcggtgcgtgcaggtgcagccgtggactggggaaggggatgcccgctggctcgccgcagcttggggcttttggttggtggccaagttggactgggcgcgtagaaaaacttgccccgcgaggccgccagccagtgaaataacctttcctttttcttttccctccccgttcgctttcgtcctccgtttacccggctggcttggtgaccgctgcttggggttggaggagggacacgataggcctgacggcacgatgaccggaagagtgacgttgctgaggatatggtgaccgtgatacctgttcagagcagcttgccctgaccaaacagcaagcaaacagccgccgacggctctcgttcgtgtacaggcagtcgctcgccctgtgtggctgcgctgttttcgaatttcgaccttcgcgagcaccggaagccaacgctccccccactaccactacacactacacagaagccgcactgcgcatcaactcaacgacgtccgtccgattgggtcaggtggtccacaggctttgagtagttcgcaacgagaaagcctcgtcagacggcctacttccagcccgctttcgctttcgcgtgttcgttgggccaagaaaatatgtttcttccggcccaaacgtctgcctcttctcgttcgttccttgtaacccatcctggcggggcggcggccgtgcggcacggcacgcaggcgcgtagcagccagtcaaccgaccgaagctcccgctcttccctgcgaccgccgccgttcgtggtggtaggctggtgggcggtggcccatctctcctaccgctgagtaccaagccatagtccaccgcccaacgccggtggcgacctcatggcggcggttgtgagctggtacgggccactgatcgacctctcggcggccgccagccatgtcggcggattcgtgcagcttctggcggtcgttcgccggctccttccccaccaggagcagaatgctgcgaccggaaggacgtatcagagaaccattgccgaagtcggcgacgatacacggtccagcttctctgtctccctgtggtcctccaagcataattcgaccataatcgctggtgatgtcttactgctgcaaaatattaagatagtgcaatttagaaatggcctggagggaagagcttctcagatgtcgtcagtccaagtattgttgaactctaaagacttgctggacactgagcctgaaggaatatgtgaactaataagcagttgcaaagtcgggaacgctacaaaatcaaagttaagaaaagtggcagaatggatcatacacactaaatgtgctcttggggaaagtcatcatcagatgcaggtggtgtctaagaactggaaactagcaaaagaaaatgaatcagcacattttttgtctatatcagagctaatctctcagagaaagttatgtaatataaacatttatgcatgcatcggcaagatggttctagtgagttctccgacctcccctttaaaggtaaacttgtcggtcatcgacagacgttctttcaaagagcacagtgatattgtcagagatttggttactgctggatgtaagctgtgtggttcgcctctctatcacaaaaaccttcatgaggaaaacacgtttgcacttgattgtcctaataacccaaaatatctccatgttcctggtcagatatacaggccatttctgatatatatctatgaccaatctggacaagttcctttgcttgtgaggaatagagctgcggagaccttgtttgccaatatcactgcagatgatgtatctgaatgccacaacagccacatgctgtcagaaacctatgaatcgtgtaacctgagcacccctggtacggtagatgattgcggcaacaaagagatagcgaaaaggagaaaaaccgaacagaagcctaatttctatcttatttggcttactctgatcaagtgtctgctgagccaaggcagcaacagtcccttctgcttccagatctcagtcaaccccgagaagaatgttgaggatggacgtttcgaattggaacttggtttggatggcagagctatcggatgttgactgggcatggatatgattcaacttgtacctaaccatttgaatactaaccttggagcccgctgaaagttagcattcgcatatatacaatctgaaacatgcagccaggacacatgagtagcatagaa

SEQ ID NO: 25014 - DNA, 4056 bp, Zea Mays
gccagctgccaacaacttactcaggtttcaggtagtccatggtctcactattaattacaactatagcacgtggttttgtgttaatctccgtttaatttctccgaaggagaacgagccagaatcaggctatcatcaaacgagcattcctggatccgatctgcagagaataacagggctgtacagtatacatttctcgagttgcaaacatccaattcctggatccgatcatcaacttctaacctcattttagagatcacaagcataagctaagggcgtactgatcgcggccgtcgatccaacgaccagcaggcagcagcaaacgttattagcagcagcgagcaaaattcggctcgagtaccaccagagaccgccatcactcacaatggcagcaccgagctccgagcgcgggaatggcgcgagaagaaggacctcgggacgccgctgggagccagcagccagtcggtgctgaggttgctgcggtgccccgaacccgatgccttcgggcgggacgggcacgggcccgtccagcgcttccgcctcccaccgatctgctcctcttcaggagctgctacttccggcagccggtctagctccgcgacactcgccgcagttgacaccgccacggcatccatggatgccgcgcgccgcacgttacgcggcagcgcacacaagagttctggcggcggcggcggctgtgcggagctgggtcgctcttgctggtcctctcgtgcgggcgaagcgtctaggccgtcgctctcctctccttcgtgatccggggctgcgtcgctcgccgcgccaacatgatctggtccgccgttgggactcgcgtccggatcagctggcggcgggctggagctggactcgccgcctcctccggagtcggccgtgacggcggggtcgagcacgtcggagcggcagacggggcagttgacgtgcgcgcggagccaggtgtcgatgcaggggacgtggaacgcgtgcgcgcacttgggcagcaggcgcacgagctcgccgtcctggaactcgccgaggcagacggagcagtcagccgcgcccaggagccccgccccggcgcggtaccgcgtggcggcgatggaactgatggacgcctcgtcgagccccacggtccggatgttccagacgtggtgcaccaccccgcctgcgccgtcccacccgtggtcgtgcccgccgccgccgccgacgttcgccgcgccctcggggaatgggataggcggtgcgaggagcgcctgccgcctccgccggacctgccggcgccgcacggccaccgagacgccgagcaggatcaggcatacgaaggcgaacaccccggcggcgatgagcgcgtatttgacgaggtgccgtcggtcgtggtcgcctgcaccgggtgggggcccgtatccctgcgtccctccctggttcctcctaccgttatgcgcgggagcaggcgacggagacggcgacggcgacaaaacgggagggcacggtagatcgccatagggaggcagcgatggggaagggccagggccggaatcaggagtgctgggaaccggcggtggtgtctggcagtcggcccacgggtcaccgcaggccccagcgcctgcgctgtgcaacgggaagagggcccggcggcgaggcctcatggccggcgaccgatggcgtcagatcggccgcgacggcggcatctgcatcgggcgcgcgcgggaggcggagaccaggcgctggagacggaggggaaagtgctgggaaggttgcggagaagcgtgcgccttaacgtgagtgcgtggacgtttagggcggtgcgtgcaggtgcagccgtggactggggaaggggatgcccgctggctcgccgcagcttggggcttttggttggtggccaagttggactgggcgcgtagaaaaacttgccccgcgaggccgccagccagtgaaataacctttcctttttcttttccctccccgttcgctttcgtcctccgtttacccggctggcttggtgaccgctgcttggggttggaggagggacacgataggcctgacggcacgatgaccggaagagtgacgttgctgaggatatggtgaccgtgatacctgttcagagcagcttgccctgaccaaacagcaagcaaacagccgccgacggctctcgttcgtgtacaggcagtcgctcgccctgtgtggctgcgctgttttcgaatttcgaccttcgcgagcaccggaagccaacgctccccccactaccactacacactacacagaagccgcactgcgcatcaactcaacgacgtccgtccgattgggtcaggtggtccacaggctttgagtagttcgcaacgagaaagcctcgtcagacggcctacttccagcccgctttcgctttcgcgtgttcgttgggccaagaaaatatgtttcttccggcccaaacgtctgcctcttctcgttcgttccttgtaacccatcctggcggggcggcggccgtgcggcacggcacgcaggcgcgtagcagccagtcaaccgaccgaagctcccgctcttccctgcgaccgccgccgttcgtggtggtaggctggtgggcggtggcccatctctcctaccgctgagtaccaagccatagtccaccgcccaacgccggtggcgacctcatggcggcggttgtgagctggtacgggccactgatcgacctctcggcggccgccagccatgtcggcggattcgtgcagcttctggcggtcgttcgccggctccttccccaccaggagcagaatgctgcgaccggaaggacgtatcagagaaccattgccgaagtcggcgacgatacacggtccagcttctctgtctccctgtggtcctccaagcataattcgaccataatcgctggtgatgtcttactgctgcaaaatattaagatagtgcaatttagaaatggcctggagggaagagcttctcagatgtcgtcagtccaagtattgttgaactctaaagacttgctggacactgagcctgaaggaatatgtgaactaataagcagttgcaaagtcgggaacgctacaaaatcaaagttaagaaaagtggcagaatggatcatacacactaaatgtgctcttggggaaagtcatcatcagatgcaggtggtgtctaagaactggaaactagcaaaagaaaatgaatcagcacattttttgtctatatcagagctaatctctcagagaaagttatgtaatataaacatttatgcatgcatcggcaagatggttctagtgagttctccgacctcccctttaaagaaaccttcatgaggaaaacacgtttgcacttgattgtcctaataacccaaaatatctccatgttcctggtcagatatacaggccatttctgatatatatctatgaccaatctggacaagttcctttgcttgtgaggaatagagctgcggagaccttgtttgccaatatcactgcagatgatgtatctgaatgccacaacagccacatgctgtcagaaacctatgaatcgtgtaacctgagcacccctggtacggtagatgattgcggcaacaaagagatagcgaaaaggagaaaaaccgaacagaagcctaatttctatcttatttggcttactctgatcaagtgtctgctgagccaaggcagcaacagtcccttctgcttccagatctcagtcaaccccgagaagaatgttgaggatggacgtttcgaattggtttgtttgacaatgccaataccatgagatagcattttttttcttatgcaacacatggtttaagctgaaccaactcggtttttttcctagaaaaatagcaaagtctctctttttttttctcccacaagaatgttccttggtcattccattagttgaaatcatgctgacatactgtcctgcataggaacttggtttggatggcagagctatcggatgttgactgggcatggatatgattcaacttgtacctaaccatttgaatactaaccttggagcccgctgaaagttagcattcgcatatatacaatctgaaacatgcagccaggacacatgagtagcatagaa

SEQ ID NO: 25015 - DNA, 3675 bp, Zea Mays
cgctgccggcacggttcgctcgctcgaacggggttacagccgcacagggtaacgagatggcggcggtgcttacccgagccggcggccgctccaagcgatccgtctccggcttccacctccgctctgttctcgcggggcacgggaccttctcatctgaagccgcgtcgaccgccgtgggcgatcgcgtggtcgcggctacgggcgagcacgatggggacgacctgcgcagccgcatcttccgactgggcctggcgaagcggagcgcgacggcggcactcgagaagtggtccagtgagggacgcgacgcacccacggcggagctccgccgcatcgcgcgcgacctcacccgcgtccgtcgctacaagcacgcccttgaggtagcagactggatgaagacacatcacgagtctgatctatcagagaacgactacggaatgcgcatcgacttgattaccaaggtcttcggtgccagtgccgcggaagatttctttgagaagctcccaccgggagccaaatcgctagaagcctacacagcacttctgcactcctatggccggtcgaagatgacggacagagccgaaaggctgttcgagaggatgaaagacgcgagcctgcctatggacgccctggtctacaacgagatgatgaccctgtacatctccgtgggggagctcggtaaagtggaggccgtcgcagaggagctgaaacggcagaacgtctctccggacctgttcacgtacaacctccgtgccagcgcggccgcggcgtccatggatctcgagggcttcagagcagtcctcgacgagatgtccagagacccgaagtcgtccacagaaggagggtgggcgctgtaccgggacctcgcgtccgtgtacgtcgacgcgggccagcttctgggctctgtgaattcgccgccggtggaggccggggaggcgaggatcagccagagggaatggatcacctacgacttcctcgtcatcttgcacgccggcctcggcaggccagagaggataagggacatctggaggtccatggtggcgacctcgcagtcgcagtcgcagcagcagcagcgcatgacgagccggaactacgtctgcgtggtctcgtcctacctggcgtgcgggcggctggaggatgccggggaggtcgtcgaccagtggcagcgctctaaggcccccgagttcgacgtctccgcctgcaaccggctgctggacgccctcctgcgcgccggtctcgccgacgccgcgggtaggtttcgggagctgatgctgcagaagcgttgtatactgactagcagcagcagcagcagggcggcagtggtcgagtgattacgggttggtttcgagtctgttctttttgttgttgttgtcttgtgtgaaggaataaacaatggacagcccaagcactctgcacgttacgttattctctgacatgattgatgtgatcatgtctggttagtgggttacgtacgtacatagtgccaggctcgtggcatgacgaagcacactgagaaactgtgtacggccatcggtgcgcgcgttcttgtgaccttcgtcttcttcctggccctaactaccctgcaggctgcagctattgtaaagacgacaggtacagcggctacgagctggcggaaacgatgctgttgcatactgtttgtcctatgctccacattctcgccacgaagatggtgacgttgcgagttgttgtttcatgattgtgcgtggaataaagataccggtcgcaagccacaggagttttttcaagtatttcgagtcctttcatgcgttgcctaccaccaccttccattccatccacggctgctttgatagcccccgaaacctcagaatactcccggtcccggcccggtgtcaaacactcggcacacgcctgcctgccatccgccgctccttcggcacagtcgcgctcgcgcagatgtaaaacgtgccaaccctgcgtcaaagatccacccagatgcaggaactgaactaggcgggtctgggatcggcaagaaagagagaggggcaagcaagtatttcgcccaactcacgagtcacgacgtgggatgtaggcatccgcagcaccaccagcgcgcgtctagctagcaacaccaatcggtttctcactttctcgtgccgtcaaagcaggattcgctccacagcagacagaccggcggcagaagtggtgccgtttccccaaatctgtgcctctgcgtgcgtgcttcgcgaggagcgatggagacgcggcagctgctcctcgtgttctgcctcctcggcgccggcatggccgtcgtcgtggacgcgcaggcgcagtcggcgccggcgccgccgcctcggcagacgccttctgcgccgccgcaacagacgcagttcggccgcaccatgtcgaccttcatcacggtggccatcagcgtcttcttcttcttgctcttcgtctgcgcgtacatcaaccagtgccgcctagcggaccccggggcggcggcggcggcagcggcagcggcagcggcagccggcggcgggggcgggggcccgtccaggagggggaagcgcgggctggaccccgcggtcgtcgccacgttcccgattgtgtcgtacagggaggtcgtggagcacaagatcggcaagggcgtgctggagtgcgcggtgtgcctgacggcgttcgaggacgacgacgacctccgcctgctgccgcactgctcccacgcgttccacccggagtgcatcgacccctggctgcagtcgcgggtcacgtgcccgctctgccgcgcgaacctcgagaagccggcgccggcgccggcggtggcgcccccgtcgccttcgccgcggctagcgccgcgccagccttcgccgccgccggaggccgtggcgataccggtgtcggacgacggatcggaggggggcagcagcagctgcgaggacgacaggaaggaggaggccgtcgagctggagacgctgcgcagcgcgcggcgcgccgccaggatgccgcggtcgcactcgacggggcactcgctgttcgcggcggcggcggccgccgccgccgcggaggaaggcgaccacgagaggttcacgctgcggctgccggagcacgtgcgggagcaggtgctccggtctcgccgcctgcgccacgccaccagcctgctcaacctctcggacatgagttccgaggggagctcccgaggcggaaggggcgtagcaggagcaggaagctttggcaacggcggggggagcagccacggcgggcgccggtggcaatcgttcctggccaggacggtctcctgggcgcgaggcggcggcgacggctcggtgcggagaggctgggacgggtccacgaggagggggagggacggcggtgagtcaagctggaagggcgtggcgtcgccgccgccgacgggccggccgtgatcgaggccgcggctggaactggcatgctgcggccccgtaaagtttgacgagctgtgccttttcttttcttttttcttttgctgtatttgtttattgttaggagcatttcgtgatatatagctgccagattttcgcgacactttatttatctatctagcttttattctagtacctttctgcaaagattgattcgtctggtccgtagattttgattttgtgggattgatgattactgacgataagagaagaactcactttggtctccctgccgttcttt

SEQ ID NO: 25016 - DNA, 986 bp, Zea Mays
tccctcttccaatggaagtagcagggagatgccagctgcggcagctcgtctcatccaaggctccatccgctctcggtccacggtcaacgctgcctcggcgcctagccaccttcgcagcggcgtcgtcctgctcctgctcctgtcccttgcgcgatggcaaccgccgcgcgcacggcgtcagggcctccgagtccaccgacaccgacgcgcctgcgttcgggccaccacgaccacgacggccgccgcggttcctgtgcctgcacgggttccgcaccagcggggagatcatgcggcgccaggtggtgggcaggtgggcgcccgaggtgaccgcgcgcctggacctcgtcttcgcggacgggccgttcccggccgagggcgcgtcccccgtggccggcgccttcgacccgccctactacgagtggtgccagttcgtcggcgagctgcaggaacttggataggtgcttctcctacctcgaggagctgatggctagagaagggccgttcgacgggctgctgggcttctcccagggcgccggcctgtctgccgtgcttgcagggctccaggagcaggggctggccctcactggggttgctcaggtgaagtgcgtgatagttatagcgggggccaagatcagggcgccggcggcggtcgcgagggcgtttgacaccaagattacctgcccatcgcttcatttcattggtgaagaggactttgtgaaggttcacagcgaagagcttgtccgagcatttgcggacccacttgtcatacgtcatccccgaggccacactgttcctaagcttgacgagaagggtctccaaactatgctcacttaccttgacaagattgagagggagatatgggagcattcgtcaactgatgctgagatcgtgggctcaaattaaacattctgcagttatgaaaaattcacgaatttacagtatatgctcaacaatataaaaggttaatgggagtttcagttctattt

SEQ ID NO: 25017 - DNA, 1670 bp, Zea Mays
atggcctattgtaagcctctcattttactctacagctattcatcgttggggcctttcaatttccagaaccgcaggcagcaggataccgtagctcctctgcatggcggctaccggatacccaaatgccgccgcatggacacggccagccggaacacccgacaacccggaccagaacagccgcgtcgaggcggccctcgagacccccggccccgacccatcccaccaccacccccacccccacctcgcctcccggatccgcacccgatgggcagcctcggcggcgacgcggagccgcagggcgcgaggcggcggccgcggttcctgtgcctgcacgggttccgcaccagcggcgagatcatgcgcaagcaggtgctcgggaagtggcccgccgacgtcacggcgcgcctcgacctcgtcttcgccgacgcgccgttccccgccgagggcaagtccgacgtcgagggcatcttcgaccctccctactacgagtggttccagttcgacaaggtccgccgccgcgtacgcgcacgcgcatccgcccgcccattacccgcccccctctcctccccgatctcgtcgtcctgctgatttcgtcaaactaattgtggtttccctagtttttttttgtggtgcgcgtgtcgctggctcgtgcgacgcacttaccaacttgacctttataagcacttattactaccaaattccttatgtactgtacaacgcaaaacagagttttatggagtacaggaatttcgacaagtgcctggcctacatcgaagagctgatgataaaagacggccccttcgacggactgatgggtttctcccagggttccattctgtcggcggcgcttccggggctccaagaacaagggctggccctgactagagtcccgaaggtcaagtacctcatcatcatcggtggcgctaagttccagtcacccacggtggccggcaaggcgtacgccaacaagatcgcatgcccctcgcttcacttcatcggtacgttacgtcaatggcaacgccgcgcatcattccattgtcatgccaagtttgtttgtccggttgcgttcaagcgttgcgttggtggaaacgttatggcgtactcacgtcgtctccgtattcgttgctcttgcctgccggcttctcttgttaattgaaagagacagggcttgctttcggcaatgtgctgcataatgctgtcaagaaaggttcaagaaacctgtgtccaccattaaaaaaaacccaattgaatatatgccaactttgatttccgcatggaaaataatgtgaaaacgacttcctgaaagtccatggtgaaaagctgatagaatcatgcgtggacccattcgtaatccgtcacccaaagggccacacagttccgaggctcgatgacgagagtttagtggtcatgcaccgtttccttgagaagattgagggggaggtacttgagtattcgtccaaagatgtcaacgaaaccgaagtgggcatgtgataaagactttagaccattagtacttgatgttggcgaaaaggctatacttgtactatttatttacagaatgaacatgtgatgtaacctcgattttcatgaggcatgattatgaaaaatacagaataattgttttatattctatattacttgaatcagaatatctatgtacctttggttca

SEQ ID NO: 25018 - DNA, 1450 bp, Zea Mays
atggcctattgtaagcctctcattttactctacagctattcatcgttggggcctttcaatttccagaaccgcaggcagcaggataccgtagctcctctgcatggcggctaccggatacccaaatgccgccgcatggacacggccagccggaacacccgacaacccggaccagaacagccgcgtcgaggcggccctcgagacccccggccccgacccatcccaccaccacccccacccccacctcgcctcccggatccgcacccgatgggcagcctcggcggcgacgcggagccgcagggcgcgaggcggcggccgcggttcctgtgcctgcacgggttccgcaccagcggcgagatcatgcgcaagcaggtgctcgggaagtggcccgccgacgtcacggcgcgcctcgacctcgtcttcgccgacgcgccgttccccgccgagggcaagtccgacgtcgagggcatcttcgaccctccctactacgagtggttccagttcgacaagagttttatggagtacaggaatttcgacaagtgcctggcctacatcgaagagctgatgataaaagacggccccttcgacggactgatgggtttctcccagggttccattctgtcggcggcgcttccggggctccaagaacaagggctggccctgactagagtcccgaaggtcaagtacctcatcatcatcggtggcgctaagttccagtcacccacggtggccggcaaggcgtacgccaacaagatcgcatgcccctcgcttcacttcatcggtacgttacgtcaatggcaacgccgcgcatcattccattgtcatgccaagtttgtttgtccggttgcgttcaagcgttgcgttggtggaaacgttatggcgtactcacgtcgtctccgtattcgttgctcttgcctgccggcttctcttgttaattgaaagagacagggcttgctttcggcaatgtgctgcataatgctgtcaagaaaggttcaagaaacctgtgtccaccattaaaaaaaacccaattgaatatatgccaactttgatttccgcatggaaaataatgtgaaaacgacttcctgaaagtccatggtgaaaagctgatagaatcatgcgtggacccattcgtaatccgtcacccaaagggccacacagttccgaggctcgatgacgagagtttagtggtcatgcaccgtttccttgagaagattgagggggaggtacttgagtattcgtccaaagatgtcaacgaaaccgaagtgggcatgtgataaagactttagaccattagtacttgatgttggcgaaaaggctatacttgtactatttatttacagaatgaacatgtgatgtaacctcgattttcatgaggcatgattatgaaaaatacagaataattgttttatattctatattacttgaatcagaatatctatgtacctttggttca

SEQ ID NO: 25019 - DNA, 1383 bp, Zea Mays
atggcctattgtaagcctctcattttactctacagctattcatcgttggggcctttcaatttccagaaccgcaggcagcaggataccgtagctcctctgcatggcggctaccggatacccaaatgccgccgcatggacacggccagccggaacacccgacaacccggaccagaacagccgcgtcgaggcggccctcgagacccccggccccgacccatcccaccaccacccccacccccacctcgcctcccggatccgcacccgatgggcagcctcggcggcgacgcggagccgcagggcgcgaggcggcggccgcggttcctgtgcctgcacgggttccgcaccagcggcgagatcatgcgcaagcaggtgctcgggaagtggcccgccgacgtcacggcgcgcctcgacctcgtcttcgccgacgcgccgttccccgccgagggcaagtccgacgtcgagggcatcttcgaccctccctactacgagtggttccagttcgacaaggtccgccgccgcgtacgcgcacgcgcatccgcccgcccattacccgcccccctctcctccccgatctcgtcgtcctgctgatttcgtcaaactaattgtggtttccctagtttttttttgtggtgcgcgtgtcgctggctcgtgcgacgcacttaccaacttgacctttataagcacttattactaccaaattccttatgtactgtacaacgcaaaacagagttttatggagtacaggaatttcgacaagtgcctggcctacatcgaagagctgatgataaaagacggccccttcgacggactgatgggtttctcccagggttccattctgtcggcggcgcttccggggctccaagaacaagggctggccctgactagagtcccgaaggtcaagtacctcatcatcatcggtggcgctaagttccagtcacccacggtggccggcaaggcgtacgccaacaagatcgcatgcccctcgcttcacttcatcggtgaaaacgacttcctgaaagtccatggtgaaaagctgatagaatcatgcgtggacccattcgtaatccgtcacccaaagggccacacagttccgaggctcgatgacgagagtttagtggtcatgcaccgtttccttgagaagattgagggggaggtacttgagtattcgtccaaagatgtcaacgaaaccgaagtgggcatgtgataaagactttagaccattagtacttgatgttggcgaaaaggctatacttgtactatttatttacagaatgaacatgtgatgtaacctcgattttcatgaggcatgattatgaaaaatacagaataattgttttatattctatattacttgaatcagaatatctatgtacctttggttca

SEQ ID NO: 25020 - DNA, 1184 bp, Zea Mays
gtcactattcacttgacccgctatttcttgacgaggagtctgcacatgtaagaatacaatgttgattgcccctaacgcactgtggatttcgtaagctgtatgaaaaagaactagggcagtttatagaaacagaaagtttatacctcgcgagtgacgcttcccctccatcgcctctttcttttcctggcaactgtgacaaaggaaagggccatcccagggacgcagcttccctgtctttgacgaaccctcgtgtatggatatgccttggccagactccaagtcaatttgacaaattgcacatgcaaaaagcttgaacatatctcggacaggatattcagaattaagcctgcattttgggggaaaaaacaagcttgttttcaacattttatgagtctatggctttctcacaatattgccatgatagctcttgatgagatactggttccttccaacaaacatctacttccatttccgagacatgcaatgaaaacactactggaagcagttacgttttggggttgtcctaagtcaaccatttcaaaatttggttgaatattactttctatgtgttgagtttggatatttgaaaaaaaaatgatgagtatcgtctcgaaatataaatagttttgtaagagaggacactagaaaaagtattgttttggagaccaggtcaatgttcaaaatgtcacttagagactcgagtaattgattactctgtgaggaactgcacggttaattaagtgttaatagaacagcatgcacttaattgaggacaagcatagcacacagtcacaaattgtaatactattgagtattgactaccctttaaaaattcagcccaaggatgcaataccctggtttttttcaatattttgtgaaggtgttatatactcctacttgacaacagcaatcattgatcattatgctctatcaggaatttaacttttgtagacaagatatggtatctggcactatcaaacaaactaatgtattttgtgtttcggcaccgcacatccaacttccgcatgaaggtaaaatacttctggcccaagtggcatcacgttagtagcaggaaacatcataattctttattgtagtagtaactacaaatatcttagccagtactgaaacagtgctacatacgaagcacaatttatagtacaattatttggcacctattatgc

SEQ ID NO: 25021 - DNA, 3002 bp, Zea Mays
ctcagctgcaaattccattcttctccggcaccggccatgccaccaacataaaattcgcgatcttggcaggcgcatccatcgaagcacctttctgctctagagcttcagagacaacagacaactaactagcttcctcttccagttcccgactctcccgtcagtctgcccgagaatcaatgactaaccgcaaatacactaaaggcagaaggcacgagctagcacacagtcctctgctgaggactgaggttgactccagctaccgcgctcagtgactgtgactgaccggcgataaagcagtagcagactagcagtagaccagctgctcaatcagaggaaagcttccacaccaccagcccaccaccatgctgagcacaacgtgggcatcgccgaaggcgacccccatcccctcgtctccggcctctcagacggcgacccggctccatcccgcctccagcagcaaccgaacgctccgccttgtcgcgcttccctccccgtccgcgccgcggcggaggcggaggcccggccttcctcctcctgcgcgcgcggggctcgtcgccaccgcggcaatgccggcgccggagcccaaggcgcgggtcctggtggccggcggcggcatcggcggcctggccttcgcgctcgccgccaagcgcaaggggttcgaggtgctggtgctggagcgggacatgagcgcggtccgcggggaagggaggtaccgcggcccgatccagctgcagagcaacgcgctcgccgcgctcgaggccgtcgacgccgccgcggccgacgagatcatggacagcggctgcgtcacgggggaccgcgtcaacggcatcgtcgacggcgtttctggctcctggtacatcaagtttgatacgtttactcctgcagctgagcgggggctcccagtcacaagggtcattagccgcatgacactgcaacaaatccttgctcgagcagtcggcgatgatgcaatattgaatggaagccatgtagtcgattttatagatgatggcagtaaggttactgccatattggaggatggtagaaaatttgaaggtgaccttttggttggcgccgatggaatatggtcaaaggtgaggaagacactattcgggcattcggatgccacctattcaggttacacttgctacactggaattgcagattttgtgccacctgatatcgatacagttgggtaccgagtatttcttggccacaaacagtacttcgtctcttcggatgtcggtgctggtaaaatgcaatggtacgcttttcacaatgaagaggctggtggcactgaccctgaaaatggcaaaaagaaaaaattgcttgagatattcgacggatggtgtgataatgttattgatttgataaatgcaactgatgaagaagcagttcttcgccgagatatatacgaccgcccacctactatgaattgggggaaaggtcgtgtcaccttgcttggtgattctgtccatgctatgcagccaaatctgggccaaggtggctgcatggctattgaggatggttaccagctggctgtagagctagagaatgcctggcaagagagtgtcaaaactgaaactcctatagacatagtttcctccttgaggcgctacgagaaagagagaaggctgcgtgttgctattatacatggactggcaagaatggcagcaatcatggctaccacctatagaccgtacttgggtgttggtctagggcctttatcgtttttgaccaagttgcggataccacaccctggaagagtcggtggcagattcttcatcaagtatggaatgcctacgatgttgagctgggtgcttggtggcaacagctcaaaactagaaggaagacttttaagctgccgactttctgacaaggcaaatgaccagctttatcaatggtttgaggatgatgacgcactggaagaagctatgggtggagaatggtacctcatcgcaacaagtgaaggaaactgcaatagcttgcagcccattcatttaattagggatgagcagaggtcactctttgttggaagccggtcagatcctaatgattcagcttcttccctatcattgtcctctccacagatatcagaaagacatgctactatcacatgcaagaataaagctttctatctgactgatctcggaagcgaacatggtacctggattaccgacaatgaaggtagacgttaccgcgtgccaccaaacttcccagttcgtttccatccctccgatgtcattgagtttggttccgataagaaggctatgttccgggtgaaggtgctgaacacgctcccgtatgaatctgcaagaagtgggaatcggcagcaacagcaagtccttcaggcagcatgaatggagacactggctaccaccactatcatcagccacactgtactgtacagcatccggtaaagacacaacactgcatcacggaaaggatacactcgttctcgaatatttgtcgtctgctagttcaattttaaactaaaacgtgacaaatgaaaaaacgaaggaagtagaagatatgtcaaaacacatgcaatttttgcatccatgaagatgccaaacaggatcttgaatactagcacctagcggattgaaataatgaagttgcagttctgcgtgaactggattgtacgatagggatagacaatttagctgttgtcggactgtgtacatcgttgtaccatcaccggaaatattgtacaccgagaagccatattgtaattacggcatgagaacagtaacactttgatcatgtaatacagtatatagttgtttagcaattagctgagtcagataagatatgatttgttcttccacaagtgccagctcctcgaactgttgaaatttccttaaaatttctgcaggaattgaaaaacttgttcctataaaattatttcatgatccaattaaaaattttactatattatgttggatttaattgggcctagcccattttgaattagtaattaaataaaaaaaataaaaccatag

SEQ ID NO: 25022 - DNA, 2716 bp, Zea Mays
cgcctcaagagtctcagaccaacggcaaagttctagaagcacggttgcacgggcagcacggcataacacctccctccactgatccagttccagtcgcccaacgccccaacgtcttctcttgcaaatcgcaagcaaacttcctgttcagctgagctcagccgaaggttgccgtgctcgcgcgccatggcgctgctctccgccacttcacccgccaaggcgcacctgccgacgctcctcgcctaccacgacgagccgcagcagcaccagcacgctctcccgcctgcacacccgcagtgcttcggcggcggcgggggcaaggccaggcaacgggcgcggggccggtgcgcggcggcaatgcggcctctggacgcggccgtcgctcccgctcccacgcccgcggccggtgaggcgccgcggaagaggccccgggtgctggtggccggcggtggtatcggcggactcgttctcgcgctggcggcgcgacgcaaggggtacgacgtgacggtgttcgagcgcgacctgagcgcggtgcgcggggagggccagtaccgcggacccatccagatccagagcaacgcgctggctgcgctggaggccatcgacatgtccgtcgccgaggaggtcatgcgcgtcggctgcgtcaccggcgaccgtatcaatggcctcgtcgatggcatgtccggctcctgctgagcgggggctcccagtcacaagggtcattagccgcatgacactgcaacaaatccttgctcgagcagtcggcgatgatgcaatattgaatggaagccatgtagtcgattttatagatgatggcagtaaggttactgccatattggaggatggtagaaaatttgaaggtgaccttttggttggcgccgatggaatatggtcaaaggtgaggaagacactattcgggcattcggatgccacctattcaggttacacttgctacactggaattgcagattttgtgccacctgatatcgatacagttgggtaccgagtatttcttggccacaaacagtacttcgtctcttcggatgtcggtgctggtaaaatgcaatggtacgcttttcacaatgaagaggctggtggcactgaccctgaaaatgaagcagttcttcgccgagatatatacgaccgcccacctactatgaattgggggaaaggtcgtgtcaccttgcttggtgattctgtccatgctatgcagccaaatctgggccaaggtggctgcatggctattgaggatggttaccagctggctgtagagctagagaatgcctggcaagagagtgtcaaaactgaaactcctatagacatagtttcctccttgaggcgctacgagaaagagagaaggctgcgtgttgctattatacatggactggcaagaatggcagcaatcatggctaccacctatagaccgtacttgggtgttggtctagggcctttatcgtttttgaccaagttgcggataccacaccctggaagagtcggtggcagattcttcatcaagtatggaatgcctacgatgttgagctgggtgcttggtggcaacagctcaaaactagaaggaagacttttaagctgccgactttctgacaagctttatcaatggtttgaggatgatgacgcactggaagaagctatgggtggagaatggtacctcatcgcaacaagtgaaggaaactgcaatagcttgcagcccattcatttaattagggatgagcagaggtcactctttgttggaagccggtcagatcctaatgattcagcttcttccctatcattgtcctctccacagatatcagaaagacatgctactatcacatgcaagaataaagctttctatctgactgatctcggaagcgaacatggtacctggattaccgacaatgaaggtagacgttaccgcgtgccaccaaacttcccagttcgtttccatccctccgatgtcattgagtttggttccgataagaaggctatgttccgggtgaaggtgctgaacacgctcccgtatgaatctgcaagaagtgggaatcggcagcaacagcaagtccttcaggcagcatgaatggagacactggctaccaccactatcatcagccacactgtactgtacagcatccggtaaagacacaacactgcatcacggaaaggatacactcgttctcgaatatttgtcgtctgctagttcaattttaaactaaaacgtgacaaatgaaaaaacgaaggaagtagaagatatgtcaaaacacatgcaatttttgcatccatgaagatgccaaacaggatcttgaatactagcacctagcggattgaaataatgaagttgcagttctgcgtgaactggattgtacgatagggatagacaatttagctgttgtcggactgtgtacatcgttgtaccatcaccggaaatattgtacaccgagaagccatattgtaattacggcatgagaacagtaacactttgatcatgtaatacagtatatagttgtttagcaattagctgagtcagataagatatgatttgttcttccacaagtgccagctcctcgaactgttgaaatttccttaaaatttctgcaggaattgaaaaacttgttcctataaaattatttcatgatccaattaaaaattttactatattatgttggatttaattgggcctagcccattttgaattagtaattaaataaaaaaaataaaaccatag

SEQ ID NO: 25023 - DNA, 2748 bp, Zea Mays
cgcctcaagagtctcagaccaacggcaaagttctagaagcacggttgcacgggcagcacggcataacacctccctccactgatccagttccagtcgcccaacgccccaacgtcttctcttgcaaatcgcaagcaaacttcctgttcagctgagctcagccgaaggttgccgtgctcgcgcgccatggcgctgctctccgccacttcacccgccaaggcgcacctgccgacgctcctcgcctaccacgacgagccgcagcagcaccagcacgctctcccgcctgcacacccgcagtgcttcggcggcggcgggggcaaggccaggcaacgggcgcggggccggtgcgcggcggcaatgcggcctctggacgcggccgtcgctcccgctcccacgcccgcggccggtgaggcgccgcggaagaggccccgggtgctggtggccggcggtggtatcggcggactcgttctcgcgctggcggcgcgacgcaaggggtacgacgtgacggtgttcgagcgcgacctgagcgcggtgcgcggggagggccagtaccgcggacccatccagatccagagcaacgcgctggctgcgctggaggccatcgacatgtccgtcgccgaggaggtcatgcgcgtcggctgcgtcaccggcgaccgtatcaatggcctcgtcgatggcatgtccggctcctggtacatcaagtttgatacgtttactcctgcagctgagcgggggctcccagtcacaagggtcattagccgcatgacactgcaacaaatccttgctcgagcagtcggcgatgatgcaatattgaatggaagccatgtagtcgattttatagatgatggcagtaaggttactgccatattggaggatggtagaaaatttgaaggtgaccttttggttggcgccgatggaatatggtcaaaggtgaggaagacactattcgggcattcggatgccacctattcaggttacacttgctacactggaattgcagattttgtgccacctgatatcgatacagttgggtaccgagtatttcttggccacaaacagtacttcgtctcttcggatgtcggtgctggtaaaatgcaatggtacgcttttcacaatgaagaggctggtggcactgaccctgaaaatgaagcagttcttcgccgagatatatacgaccgcccacctactatgaattgggggaaaggtcgtgtcaccttgcttggtgattctgtccatgctatgcagccaaatctgggccaaggtggctgcatggctattgaggatggttaccagctggctgtagagctagagaatgcctggcaagagagtgtcaaaactgaaactcctatagacatagtttcctccttgaggcgctacgagaaagagagaaggctgcgtgttgctattatacatggactggcaagaatggcagcaatcatggctaccacctatagaccgtacttgggtgttggtctagggcctttatcgtttttgaccaagttgcggataccacaccctggaagagtcggtggcagattcttcatcaagtatggaatgcctacgatgttgagctgggtgcttggtggcaacagctcaaaactagaaggaagacttttaagctgccgactttctgacaagctttatcaatggtttgaggatgatgacgcactggaagaagctatgggtggagaatggtacctcatcgcaacaagtgaaggaaactgcaatagcttgcagcccattcatttaattagggatgagcagaggtcactctttgttggaagccggtcagatcctaatgattcagcttcttccctatcattgtcctctccacagatatcagaaagacatgctactatcacatgcaagaataaagctttctatctgactgatctcggaagcgaacatggtacctggattaccgacaatgaaggtagacgttaccgcgtgccaccaaacttcccagttcgtttccatccctccgatgtcattgagtttggttccgataagaaggctatgttccgggtgaaggtgctgaacacgctcccgtatgaatctgcaagaagtgggaatcggcagcaacagcaagtccttcaggcagcatgaatggagacactggctaccaccactatcatcagccacactgtactgtacagcatccggtaaagacacaacactgcatcacggaaaggatacactcgttctcgaatatttgtcgtctgctagttcaattttaaactaaaacgtgacaaatgaaaaaacgaaggaagtagaagatatgtcaaaacacatgcaatttttgcatccatgaagatgccaaacaggatcttgaatactagcacctagcggattgaaataatgaagttgcagttctgcgtgaactggattgtacgatagggatagacaatttagctgttgtcggactgtgtacatcgttgtaccatcaccggaaatattgtacaccgagaagccatattgtaattacggcatgagaacagtaacactttgatcatgtaatacagtatatagttgtttagcaattagctgagtcagataagatatgatttgttcttccacaagtgccagctcctcgaactgttgaaatttccttaaaatttctgcaggaattgaaaaacttgttcctataaaattatttcatgatccaattaaaaattttactatattatgttggatttaattgggcctagcccattttgaattagtaattaaataaaaaaaataaaaccatag

SEQ ID NO: 25024 - DNA, 2826 bp, Zea Mays
cgcctcaagagtctcagaccaacggcaaagttctagaagcacggttgcacgggcagcacggcataacacctccctccactgatccagttccagtcgcccaacgccccaacgtcttctcttgcaaatcgcaagcaaacttcctgttcagctgagctcagccgaaggttgccgtgctcgcgcgccatggcgctgctctccgccacttcacccgccaaggcgcacctgccgacgctcctcgcctaccacgacgagccgcagcagcaccagcacgctctcccgcctgcacacccgcagtgcttcggcggcggcgggggcaaggccaggcaacgggcgcggggccggtgcgcggcggcaatgcggcctctggacgcggccgtcgctcccgctcccacgcccgcggccggtgaggcgccgcggaagaggccccgggtgctggtggccggcggtggtatcggcggactcgttctcgcgctggcggcgcgacgcaaggggtacgacgtgacggtgttcgagcgcgacctgagcgcggtgcgcggggagggccagtaccgcggacccatccagatccagagcaacgcgctggctgcgctggaggccatcgacatgtccgtcgccgaggaggtcatgcgcgtcggctgcgtcaccggcgaccgtatcaatggcctcgtcgatggcatgtccggctcctggtacatcaagtttgatacgtttactcctgcagctgagcgggggctcccagtcacaagggtcattagccgcatgacactgcaacaaatccttgctcgagcagtcggcgatgatgcaatattgaatggaagccatgtagtcgattttatagatgatggcagtaaggttactgccatattggaggatggtagaaaatttgaaggtgaccttttggttggcgccgatggaatatggtcaaaggtgaggaagacactattcgggcattcggatgccacctattcaggttacacttgctacactggaattgcagattttgtgccacctgatatcgatacagttgggtaccgagtatttcttggccacaaacagtacttcgtctcttcggatgtcggtgctggtaaaatgcaatggtacgcttttcacaatgaagaggctggtggcactgaccctgaaaatggcaaaaagaaaaaattgcttgagatattcgacggatggtgtgataatgttattgatttgataaatgcaactgatgaagaagcagttcttcgccgagatatatacgaccgcccacctactatgaattgggggaaaggtcgtgtcaccttgcttggtgattctgtccatgctatgcagccaaatctgggccaaggtggctgcatggctattgaggatggttaccagctggctgtagagctagagaatgcctggcaagagagtgtcaaaactgaaactcctatagacatagtttcctccttgaggcgctacgagaaagagagaaggctgcgtgttgctattatacatggactggcaagaatggcagcaatcatggctaccacctatagaccgtacttgggtgttggtctagggcctttatcgtttttgaccaagttgcggataccacaccctggaagagtcggtggcagattcttcatcaagtatggaatgcctacgatgttgagctgggtgcttggtggcaacagctcaaaactagaaggaagacttttaagctgccgactttctgacaagctttatcaatggtttgaggatgatgacgcactggaagaagctatgggtggagaatggtacctcatcgcaacaagtgaaggaaactgcaatagcttgcagcccattcatttaattagggatgagcagaggtcactctttgttggaagccggtcagatcctaatgattcagcttcttccctatcattgtcctctccacagatatcagaaagacatgctactatcacatgcaagaataaagctttctatctgactgatctcggaagcgaacatggtacctggattaccgacaatgaaggtagacgttaccgcgtgccaccaaacttcccagttcgtttccatccctccgatgtcattgagtttggttccgataagaaggctatgttccgggtgaaggtgctgaacacgctcccgtatgaatctgcaagaagtgggaatcggcagcaacagcaagtccttcaggcagcatgaatggagacactggctaccaccactatcatcagccacactgtactgtacagcatccggtaaagacacaacactgcatcacggaaaggatacactcgttctcgaatatttgtcgtctgctagttcaattttaaactaaaacgtgacaaatgaaaaaacgaaggaagtagaagatatgtcaaaacacatgcaatttttgcatccatgaagatgccaaacaggatcttgaatactagcacctagcggattgaaataatgaagttgcagttctgcgtgaactggattgtacgatagggatagacaatttagctgttgtcggactgtgtacatcgttgtaccatcaccggaaatattgtacaccgagaagccatattgtaattacggcatgagaacagtaacactttgatcatgtaatacagtatatagttgtttagcaattagctgagtcagataagatatgatttgttcttccacaagtgccagctcctcgaactgttgaaatttccttaaaatttctgcaggaattgaaaaacttgttcctataaaattatttcatgatccaattaaaaattttactatattatgttggatttaattgggcctagcccattttgaattagtaattaaataaaaaaaataaaaccatag

SEQ ID NO: 25025 - DNA, 2746 bp, Zea Mays
ggccgccatccgcgccatcaccttccttccccacgcgcgcgccgaggccgccacccgcgccataaccttcattccccacgcgcgcgccgaggccaccatcaccttccttccccacgcaccgaggccgccatccgtgccatcgccttccttccttacgtgcgccccccctccgtgtgtgccccgcccttgtccttcgctcaccctatgccctgccacctccgccgtgacagcctcactcacctcggatatccatgggacggcgcagtgcgaccccgacctcagcgttccatggaaggcgcgatccactctgctgagctcctcgtccttgcataggcgtacgcgcaggccgaggagctctccatcgagcgcgagcatctcatcgctgagctccagttctttgcagagcgccagccgcgagcgcgagatctcccaggcccacctccagcagaaccttctcatcagcgatgggggaactagatggtgaggaggaggaggaagtggagcgcatcctgtgacggcgatgcgggtagcactagggaaatccagccgcatctactcgccttcgctcaggcttttcccgctggccacaactctgggaccatccacatctacatctgggacaagggtttacctaaaggaaagggcctacttttgcttgctgaaatgagctcagctggcaaccttgcttggactacactactgcggttgtaaagagtgtcgagcaacatcctgctttgtaataggatgtagatcagtaaatcctgcatcttggtctccagcgccgtcgagcccagcattcatccatgccactcctggagtttagatggctgttggaggagatgcccttgggcaacaatataatactcccatttttgtgagtgcatttttgccattcggttctcgttggatggctcacttgcttcttgtcgactggggattaggtgtgttgggttgtggccactggccggcgacagctaggaacaacaacctgtagtaggtgtcaattgaggcgacattgcgtcaggaagcagaagacatgcacacaattggtgaatgacaactttgcatctgtgatttggcccaagaaaatttgttcttaacacttggtgggaataaaaaggaacagagagatagtgatggatggccaggagaggcgagggccacctcaccgtagatggagcccacggcgcacgcaaggagtggcgcaccttctccggctccttgctctgctccaatggcgtcaatgtccacgtgccacgtcatggagcggatgcagcacaattggctagctgtatacatgcatctgttcaatccatggcttctcgacgctctcctaggttttggacttcaaaactttgtcatggtcaaagctagaagctaaatcacaagcagaaccatccgaattagctggagcagtttcattttcagcaagtgctggtcattcactgatgcaggtgctaccgaggaagaggaggcgctcccggtcctggcttctaaacgttgtgaaccagatcttggtgcggttgcccgagtagtttactcgtctagaggaggggtttggttgtcgacccgatttggtgggggcttcgccactgggataaggggacagtttggcctactggatctttattgccagttgttggttctgtcctttccattgggctggtactttcttgacggattggttaagcgctgtctgtggggttgttgtgctgctcctcccttcatctcgttttgtggtgattggtggagggggaggaggaagagctaggaggattctctcgcttgttcttgggtcagttcttggcgcggcaggatgaagtatatgaagcttggatcaaagccgaatgtcctttagggcttattcggttattttcaatccatatggattggaggggattgatacggattgaaggggattttgacttactagggattgaatccccctcaatcaccctcaatccatatggattggggtagaaccgaacatgcccttagacggaggggagcaatatcaggtgccttcctggtcatcaggcgacgctcttgatggtacatgttttgatggttttcattacataggacatgtgaaatactattagaagaacatccgcgtataaataattatcttttagattttttgtcttgttagcatgagctctctcaaacattgtctctgcagaggactatgatgctgattataaattatgtgttgtttttcttactataatcattgttggctaatattttaacgaatagtttgcgctccgttgcaacgcacgggcactcacctagtatatatataaaccaataaagaaacagagacattcgactcatccactttcacccgtttcggttttactctaaacacgctatcagccactcacttctccaaagaggaaaaaaggcaacgaccaaacaacaattctcagacgaggttttactggaggcaagaactgagggccaagaaagaacaccgacgagaaagtttaacaggaggcaagaacagggaggaggaaaaccataggtacatgttgatcaacaaagatctcttttttactcttctcatcttcatcattcggtctttgaacggcggctctcgtcgatgaggtgctgatgccgtcgcacgcctccttctgcgtgctacgcatcaatatggacaccgccatgccaagaagcgccgcagcaaggacggtcgagccacacttgaccctgagagtattagccggaccggtggcgatctcgg

SEQ ID NO: 25026 - DNA, 2867 bp, Zea Mays
ctgacctatgccattcaccatcgcgcagtcactgcccttccccacgcgcctcggccgccactgtgccatcaccgcccgcccccacgcgcctcggccgccatctgtgcaatcgtcgccatcaccttccttccccacgcgccgaggccgccatccgcgccatcaccttccttccccacgcgcgcgccgaggccgccacccgcgccataaccttcattccccacgcgcgcgccgaggccaccatcaccttccttccccacgcaccgaggccgccatccgtgccatcgccttccttccttacgtgcgccccccctccgtgtgtgccccgcccttgtccttcgctcaccctatgccctgccacctccgccgtgacagcctcactcacctcggatatccatgggacggcgcagtgcgaccccgacctcagcgttccatggaaggcgcgatccactctgctgagctcctcgtccttgcataggcgtacgcgcaggccgaggagctctccatcgagcgcgagcatctcatcgctgagctccagttctttgcagagcgccagccgcgagcgcgagatctcccaggcccacctccagcagaaccttctcatcagcgatgggggaactagatggtgaggaggaggaggaagtggagcgcatcctgtgacggcgatgcgggtagcactagggaaatccagccgcatctactcgccttcgctcaggcttttcccgctggccacaactctgggaccatccacatctacatctgggacaagggtttacctaaaggaaagggcctacttttgcttgctgaaatgagctcagctggcaaccttgcttggactacactactgcggttgtaaagagtgtcgagcaacatcctgctttgtaataggatgtagatcagtaaatcctgcatcttggtctccagcgccgtcgagcccagcattcatccatgccactcctggagtttagatggctgttggaggagatgcccttgggcaacaatataatactcccatttttgtgagtgcatttttgccattcggttctcgttggatggctcacttgcttcttgtcgactggggattaggtgtgttgggttgtggccactggccggcgacagctaggaacaacaacctgtagtaggtgtcaattgaggcgacattgcgtcaggaagcagaagacatgcacacaattggtgaatgacaactttgcatctgtgatttggcccaagaaagtatgttctcctttgcgtccaaaatatatggatggccaggagaggcgagggccacctcaccgtagatggagcccacggcgcacgcaaggagtggcgcaccttctccggctccttgctctgctccaatggcgtcaatgtccacgtgccacgtcatggagcggatgcagcacaattggctagctgtatacatgcatctgttcaatccatggcttctcgacgctctcctaggttttggacttcaaaactttgtcatggtcaaagctagaagctaaatcacaagcagaaccatccgaattagctggagcagtttcattttcagcaagtgctggtcattcactgatgcaggtgctaccgaggaagaggaggcgctcccggtcctggcttctaaacgttgtgaaccagatcttggtgcggttgcccgagtagtttactcgtctagaggaggggtttggttgtcgacccgatttggtgggggcttcgccactgggataaggggacagtttggcctactggatctttattgccagttgttggttctgtcctttccattgggctggtactttcttgacggattggttaagcgctgtctgtggggttgttgtgctgctcctcccttcatctcgttttgtggtgattggtggagggggaggaggaagagctaggaggattctctcgcttgttcttgggtcagttcttggcgcggcaggatgaagtatatgaagcttggatcaaagccgaatgtcctttagggcttattcggttattttcaatccatatggattggaggggattgatacggattgaaggggattttgacttactagggattgaatccccctcaatcaccctcaatccatatggattggggtagaaccgaacatgcccttagacggaggggagcaatatcaggtgccttcctggtcatcaggcgacgctcttgatggtacatgttttgatggttttcattacataggacatgtgaaatactattagaagaacatccgcgtataaataattatcttttagattttttgtcttgttagcatgagctctctcaaacattgtctctgcagaggactatgatgctgattataaattatgtgttgtttttcttactataatcattgttggctaatattttaacgaatagtttgcgctccgttgcaacgcacgggcactcacctagtatatatataaaccaataaagaaacagagacattcgactcatccactttcacccgtttcggttttactctaaacacgctatcagccactcacttctccaaagaggaaaaaaggcaacgaccaaacaacaattctcagacgaggttttactggaggcaagaactgagggccaagaaagaacaccgacgagaaagtttaacaggaggcaagaacagggaggaggaaaaccataggtacatgttgatcaacaaagatctcttttttactcttctcatcttcatcattcggtctttgaacggcggctctcgtcgatgaggtgctgatgccgtcgcacgcctccttctgcgtgctacgcatcaatatggacaccgccatgccaagaagcgccgcagcaaggacggtcgagccacacttgaccctgagagtattagccggaccggtggcgatctcgg

SEQ ID NO: 25027 - DNA, 3001 bp, Zea Mays
ccacactgacctatgccattcaccatcgcgcagtcactgcccttccccacgcgcctcggccgccactgtgccatcaccgcccgcccccacgcgcctcggccgccatctgtgcaatcgtcgccatcaccttccttccccacgcgccgaggccgccatccgcgccatcaccttccttccccacgcgcgcgccgaggccgccacccgcgccataaccttcattccccacgcgcgcgccgaggccaccatcaccttccttccccacgcaccgaggccgccatccgtgccatcgccttccttccttacgtgcgccccccctccgtgtgtgccccgcccttgtccttcgctcaccctatgccctgccacctccgccgtgacagcctcactcacctcggatatccatgggacggcgcagtgcgaccccgacctcagcgttccatggaaggcgcgatccactctgctgagctcctcgtccttgcataggcgtacgcgcaggccgaggagctctccatcgagcgcgagcatctcatcgctgagctccagttctttgcagagcgccagccgcgagcgcgagatctcccaggcccacctccagcagaaccttctcatcagcgatgggggaactagatggtgaggaggaggaggaagtggagcgcatcctgtgacggcgatgcgggtagcactagggaaatccagccgcatctactcgccttcgctcaggcttttcccgctggccacaactctgggaccatccacatctacatctgggacaagggtttacctaaaggaaagggcctacttttgcttgctgaaatgagctcagctggcaaccttgcttggactacactactgcggttgtaaagagtgtcgagcaacatcctgctttgtaataggatgtagatcagtaaatcctgcatcttggtctccagcgccgtcgagcccagcattcatccatgccactcctggagtttagatggctgttggaggagatgcccttgggcaacaatataatactcccatttttgtgagtgcatttttgccattcggttctcgttggatggctcacttgcttcttgtcgactggggattaggtgtgttgggttgtggccactggccggcgacagctaggaacaacaacctgtagtaggtgtcaattgaggcgacattgcgtcaggaagcagaagacatgcacacaattggtgaatgacaactttgcatctgtgatttggcccaagaaaatttgttcttaacacttggtgggaataaaaaggaacagagagatagtgatggatggccaggagaggcgagggccacctcaccgtagatggagcccacggcgcacgcaaggagtggcgcaccttctccggctccttgctctgctccaatggcgtcaatgtccacgtgccacgtcatggagcggatgcagcacaattggctagctgtatacatgcatctgttcaatccatggcttctcgacgctctcctaggttttggacttcaaaactttgtcatggtcaaagctagaagctaaatcacaagcagaaccatccgaattagctggagcagtttcattttcagcaagtgctggtcattcactgttaaggagtttgatccacaaacctgcacttggtctaccttgtgtacttatggaaggtcacttgtatgacagtaaagacacgaccacctaactgaacatgccctcaaagatgcaggtgctaccgaggaagaggaggcgctcccggtcctggcttctaaacgttgtgaaccagatcttggtgcggttgcccgagtagtttactcgtctagaggaggggtttggttgtcgacccgatttggtgggggcttcgccactgggataaggggacagtttggcctactggatctttattgccagttgttggttctgtcctttccattgggctggtactttcttgacggattggttaagcgctgtctgtggggttgttgtgctgctcctcccttcatctcgttttgtggtgattggtggagggggaggaggaagagctaggaggattctctcgcttgttcttgggtcagttcttggcgcggcaggatgaagtatatgaagcttggatcaaagccgaatgtcctttagggcttattcggttattttcaatccatatggattggaggggattgatacggattgaaggggattttgacttactagggattgaatccccctcaatcaccctcaatccatatggattggggtagaaccgaacatgcccttagacggaggggagcaatatcaggtgccttcctggtcatcaggcgacgctcttgatggtacatgttttgatggttttcattacataggacatgtgaaatactattagaagaacatccgcgtataaataattatcttttagattttttgtcttgttagcatgagctctctcaaacattgtctctgcagaggactatgatgctgattataaattatgtgttgtttttcttactataatcattgttggctaatattttaacgaatagtttgcgctccgttgcaacgcacgggcactcacctagtatatatataaaccaataaagaaacagagacattcgactcatccactttcacccgtttcggttttactctaaacacgctatcagccactcacttctccaaagaggaaaaaaggcaacgaccaaacaacaattctcagacgaggttttactggaggcaagaactgagggccaagaaagaacaccgacgagaaagtttaacaggaggcaagaacagggaggaggaaaaccataggtacatgttgatcaacaaagatctcttttttactcttctcatcttcatcattcggtctttgaacggcggctctcgtcgatgaggtgctgatgccgtcgcacgcctccttctgcgtgctacgcatcaatatggacaccgccatgccaagaagcgccgcagcaaggacggtcgagccacacttgaccctgagagtattagccggaccggtggcgatctcgg

SEQ ID NO: 25028 - DNA, 3578 bp, Zea Mays
gccacactgacctatgccattcaccatcgcgcagtcactgcccttccccacgcgcctcggccgccactgtgccatcaccgcccgcccccacgcgcctcggccgccatctgtgcaatcgtcgccatcaccttccttccccacgcgccgaggccgccatccgcgccatcaccttccttccccacgcgcgcgccgaggccgccacccgcgccataaccttcattccccacgcgcgcgccgaggccaccatcaccttccttccccacgcaccgaggccgccatccgtgccatcgccttccttccttacgtgcgccccccctccgtgtgtgccccgcccttgtccttcgctcaccctatgccctgccacctccgccgtgacagcctcactcacctcggatatccatgggacggcgcagtgcgaccccgacctcagcgttccatggaaggcgcgatccactctgctgagctcctcgtccttgcataggcgtacgcgcaggccgaggagctctccatcgagcgcgagcatctcatcgctgagctccagttctttgcagagcgccagccgcgagcgcgagatctcccaggcccacctccagcagaaccttctcatcagcgatgggggaactagatggtgaggaggaggaggaagtggagcgcatcctgtgacggcgatgcgggtagcactagggaaatccagccgcatctactcgccttcgctcaggcttttcccgctggccacaactctgggaccatccacatctacatctgggacaagggtttacctaaaggaaagggcctacttttgcttgctgaaatgagctcagctggcaaccttgcttggactacactactgcggttgtaaagagtgtcgagcaacatcctgctttgtaataggatgtagatcagtaaatcctgcatcttggtctccagcgccgtcgagcccagcattcatccatgccactcctggagtttagatggctgttggaggagatgcccttgggcaacaatataatactcccatttttgtgagtgcatttttgccattcggttctcgttggatggctcacttgcttcttgtcgactggggattaggtgtgttgggttgtggccactggccggcgacagctaggaacaacaacctgtagtaggtgtcaattgaggcgacattgcgtcaggaagcagaagacatgcacacaattggtgaatgacaactttgcatctgtgatttggcccaagaaaatttgttcttaacacttggtgggaataaaaaggaacagagagatagtgatggatggccaggagaggcgagggccacctcaccgtagatggagcccacggcgcacgcaaggagtggcgcaccttctccggctccttgctctgctccaatggcgtcaatgtccacgtgccacgtcatggagcggatgcagcacaattggctagctgtatacatgcatctgttcaatccatggcttctcgacgctctcctaggttttggacttcaaaactttgtcatggtcaaagctagaagctaaatcacaagcagaaccatccgaattagctggagcagtttcattttcagcaagtgctggtcattcactgttaaggagtttgatccacaaacctgcacttggtctaccttgtgtacttatggaaggtcacttgtatgacagtaaagacacgaccacctaactgaacatgccctcaaaggttgcagttcagtttgcatctcttcatttttacagttccaggttgcagtttttcatagcctacttgagacattacagtgtcctacagctgaacctgaaattatcttcaacttgctacttcaagctaaacttgaaaccgtgactaaagaattgcaagccacagaccaggtgcttcaccgcatttctttcatgcaccacctctttcagattatgttaactgaaaataagttgcaaacttcctcaatggtgaggaggctggcaactggctggacatcaagtgatcgagccactggaaatgtttctctgtcaataagtttctctctttttttatataaaaaagtgtccagaaccactggtctgtggcttgcatttctttagtcatggtttgactgcctatatgtgcctaaaacaacacaccaatttcggcatccatccattcatgtgactgctcgcagaactaacgagctaagattcctcccctcaccggcgcttgttcccatggtctcccaacaccgagccgccaattattcccactgtctcctcaccacgagatgctgcccttgtgctctgcatgcagatgcaggtgctaccgaggaagaggaggcgctcccggtcctggcttctaaacgttgtgaaccagatcttggtgcggttgcccgagtagtttactcgtctagaggaggggtttggttgtcgacccgatttggtgggggcttcgccactgggataaggggacagtttggcctactggatctttattgccagttgttggttctgtcctttccattgggctggtactttcttgacggattggttaagcgctgtctgtggggttgttgtgctgctcctcccttcatctcgttttgtggtgattggtggagggggaggaggaagagctaggaggattctctcgcttgttcttgggtcagttcttggcgcggcaggatgaagtatatgaagcttggatcaaagccgaatgtcctttagggcttattcggttattttcaatccatatggattggaggggattgatacggattgaaggggattttgacttactagggattgaatccccctcaatcaccctcaatccatatggattggggtagaaccgaacatgcccttagacggaggggagcaatatcaggtgccttcctggtcatcaggcgacgctcttgatggtacatgttttgatggttttcattacataggacatgtgaaatactattagaagaacatccgcgtataaataattatcttttagattttttgtcttgttagcatgagctctctcaaacattgtctctgcagaggactatgatgctgattataaattatgtgttgtttttcttactataatcattgttggctaatattttaacgaatagtttgcgctccgttgcaacgcacgggcactcacctagtatatatataaaccaataaagaaacagagacattcgactcatccactttcacccgtttcggttttactctaaacacgctatcagccactcacttctccaaagaggaaaaaaggcaacgaccaaacaacaattctcagacgaggttttactggaggcaagaactgagggccaagaaagaacaccgacgagaaagtttaacaggaggcaagaacagggaggaggaaaaccataggtacatgttgatcaacaaagatctcttttttactcttctcatcttcatcattcggtctttgaacggcggctctcgtcgatgaggtgctgatgccgtcgcacgcctccttctgcgtgctacgcatcaatatggacaccgccatgccaagaagcgccgcagcaaggacggtcgagccacacttgaccctgagagtattagccggaccggtggcgatctcgg

SEQ ID NO: 25029 - DNA, 3329 bp, Zea Mays
ccccgccacactgacctatgccattcaccatcgcgcagtcactgcccttccccacgcgcctcggccgccactgtgccatcaccgcccgcccccacgcgcctcggccgccatctgtgcaatcgtcgccatcaccttccttccccacgcgccgaggccgccatccgcgccatcaccttccttccccacgcgcgcgccgaggccgccacccgcgccataaccttcattccccacgcgcgcgccgaggccaccatcaccttccttccccacgcaccgaggccgccatccgtgccatcgccttccttccttacgtgcgccccccctccgtgtgtgccccgcccttgtccttcgctcaccctatgccctgccacctccgccgtgacagcctcactcacctcggatatccatgggacggcgcagtgcgaccccgacctcagcgttccatggaaggcgcgatccactctgctgagctcctcgtccttgcataggcgtacgcgcaggccgaggagctctccatcgagcgcgagcatctcatcgctgagctccagttctttgcagagcgccagccgcgagcgcgagatctcccaggcccacctccagcagaaccttctcatcagcgatgggggaactagatggtgaggaggaggaggaagtggagcgcatcctgtgacggcgatgcgggtagcactagggaaatccagccgcatctactcgccttcgctcaggcttttcccgctggccacaactctgggaccatccacatctacatctgggacaagggtttacctaaaggaaagggcctacttttgcttgctgaaatgagctcagctggcaaccttgcttggactacactactgcggttgtaaagagtgtcgagcaacatcctgctttgtaataggatgtagatcagtaaatcctgcatcttggtctccagcgccgtcgagcccagcattcatccatgccactcctggagtttagatggctgttggaggagatgcccttgggcaacaatataatactcccatttttgtgagtgcatttttgccattcggttctcgttggatggctcacttgcttcttgtcgactggggattaggtgtgttgggttgtggccactggccggcgacagctaggaacaacaacctgtagtaggtgtcaattgaggcgacattgcgtcaggaagcagaagacatgcacacaattggtgaatgacaactttgcatctgtgatttggcccaagaaaatttgttcttaacacttggtgggaataaaaaggaacagagagatagtgatggatggccaggagaggcgagggccacctcaccgtagatggagcccacggcgcacgcaaggagtggcgcaccttctccggctccttgctctgctccaatggcgtcaatgtccacgtgccacgtcatggagcggatgcagcacaattggctagctgtatacatgcatctgttcaatccatggcttctcgacgctctcctaggttttggacttcaaaactttgtcatggtcaaagctagaagctaaatcacaagcagaaccatccgaattagctggagcagtttcattttcagcaagtgctggtcattcactgttaaggagtttgatccacaaacctgcacttggtctaccttgtgtacttatggaaggtcacttgtatgacagtaaagacacgaccacctaactgaacatgccctcaaaggttgcagttcagtttgcatctcttcatttttacagttccaggttgcagtttttcatagcctacttgagacattacagtgtcctacagctgaacctgaaattatcttcaacttgcatttctttagtcatggtttgactgcctatatgtgcctaaaacaacacaccaatttcggcatccatccattcatgtgactgctcgcagaactaacgagctaagattcctcccctcaccggcgcttgttcccatggtctcccaacaccgagccgccaattattcccactgtctcctcaccacgagatgctgcccttgtgctctgcatgcagatgcaggtgctaccgaggaagaggaggcgctcccggtcctggcttctaaacgttgtgaaccagatcttggtgcggttgcccgagtagtttactcgtctagaggaggggtttggttgtcgacccgatttggtgggggcttcgccactgggataaggggacagtttggcctactggatctttattgccagttgttggttctgtcctttccattgggctggtactttcttgacggattggttaagcgctgtctgtggggttgttgtgctgctcctcccttcatctcgttttgtggtgattggtggagggggaggaggaagagctaggaggattctctcgcttgttcttgggtcagttcttggcgcggcaggatgaagtatatgaagcttggatcaaagccgaatgtcctttagggcttattcggttattttcaatccatatggattggaggggattgatacggattgaaggggattttgacttactagggattgaatccccctcaatcaccctcaatccatatggattggggtagaaccgaacatgcccttagacggaggggagcaatatcaggtgccttcctggtcatcaggcgacgctcttgatggtacatgttttgatggttttcattacataggacatgtgaaatactattagaagaacatccgcgtataaataattatcttttagattttttgtcttgttagcatgagctctctcaaacattgtctctgcagaggactatgatgctgattataaattatgtgttgtttttcttactataatcattgttggctaatattttaacgaatagtttgcgctccgttgcaacgcacgggcactcacctagtatatatataaaccaataaagaaacagagacattcgactcatccactttcacccgtttcggttttactctaaacacgctatcagccactcacttctccaaagaggaaaaaaggcaacgaccaaacaacaattctcagacgaggttttactggaggcaagaactgagggccaagaaagaacaccgacgagaaagtttaacaggaggcaagaacagggaggaggaaaaccataggtacatgttgatcaacaaagatctcttttttactcttctcatcttcatcattcggtctttgaacggcggctctcgtcgatgaggtgctgatgccgtcgcacgcctccttctgcgtgctacgcatcaatatggacaccgccatgccaagaagcgccgcagcaaggacggtcgagccacacttgaccctgagagtattagccggaccggtggcgatctcgg

SEQ ID NO: 25030 - DNA, 3199 bp, Zea Mays
gtcaacactgtacaaacatctctttttaagaaaatataataatgttaaggtttttaaaagaaatatagatatagactatatcatccatctaaaactaataatgtacaaaaaaaaaaagtacaacgcgtccgctgccgagacgacgaagagataaacccaaatggaatggaccaccagaaaccaaaccgtcgtcaagaggatcggagggagggccggatcggaggggcgggcgctggaagccacggtctgcttttagggtttctctcccctcgccgagacagacaagtactccaccacacacacgcgccctacccacgaaattcacaaacccaccggaggcacagaaatttcccaggcaaggaaaaatcccgtccgaaatccagcgctccaaatccgttcgtctcctaggcgctcccccgaacccgtcacgaatccctcagatccccgctgaaatccctcaatcctccgtgctcgccgccgccgcctcctccctgcgacagccgcggccgcggatttccacccgagggtttcgtctcgctctcgctctctccgctctactgcctccacagattggcgcgaccgacccgtcatcgaggaccttcttccgcccgagaggccggggctcctcccgcggaaattcactctcgttcagaggcggcgctctcctcttcatcgccgcccccgcgctctgcttgtactggagtggcgcggggtggagatccacccgggcgtggatcgattcctcttcgtttcttcgttcggtggcgcggaataccaatctatagaagtgcacgaggagtttttatatccccgatttttagggggttcaactgaactcccatgccccacgctaagtccgcccctggtggtggtggactgaattggtggacactgttgattttgtcgtgggcatggagcgaagtgagccctcgttgaagccagaatggctgctgcggcccacagtacctgccacgacccataagccggtgacttcgccccgcgcagatgatcacggcaggggtgcttcatcaagaaaccgttcatcgggacgagatcgtgatcggagctcccaacagtcctcgtctcggaggggttcaagctctagtggttcaaggaggaatgatcgcgatggtacagggaaatcaagaggctatggtaattttggaaagcacagcaaggataggatacaagaaaaggacttggattttcgtgaacgggagagtaggttggttcaaccagatgatcctttacgtgatggctttgagtcctttagctcatgcagatctgaaaaggacaggcttaaccgtactcgttcaaaggtggccataccaaatcgggcaggagtaagtttagacaatggtaatgtatctaaaaaagataatggtgtcatctcctttgagcgggaatttccacaccttggttctgaggacaaaaatggaaagcaagacataggtcgagttccgtctcctggaattagcacgccaattcagaacataccattggtagtatctgatggctggaattcagtgcttgcagaagtacctgccttagtagatccaaacattaactctgtttcctcttcctcatcacccgctggttctagtaaaccgattgaagtgtccaactctgggagtgcgttaagcatggctgaaacagtgatgcagtcaccgttaaatatttgtaccacacctcagttatcaattgatgctcagaagattgaagaaagaactatgaggcagtgcattttaagacctctaacaccatcgtcaaacaaaatatctgcatctatttccttggataagttattaaaatccaaaggtgcaagagctggagagtctaatggacctatcaaggttgctccacagctgtcaatacagccatctagcaactctgttcgcactccagtcaaaactgagctcgtaaagcaatctcaatcaggcagccttcaagtccttagccgtgagcagaatggtactgtaaatactgctgccaaagacatcaccagcaacaatcctgttcatttgcagacagaaaagcaagtgcaaaagacaagtacaaattttttgagttgttgcgaatttattgaaaatgggaacagttcctgtgaagaagcaaattcttgtgagggatcacagcgacacttgtcggacaatgaggaaattattccaccttcagaatctcatgacgttttagatgagggatctctggggattcaagttgacgacaagggttccagctcttcaccagtacttggcacacaagatatatcttccaagaagccccaggaagacaatgttgatattgttgtacctgtttatgtaaatgatggttctgtgatgcccaattctgttgacaatgaagcaagattgctgttggaggaagccaatcctgctcaagtgttacagcacattgatgcaagggaggagaatccctgtcctgctcaagagttcgagtccataggggcaggtggggaggaagagttgaacctcctgagatctatgggctgggatgagaatgaagaggttcagcctcttcagcaggaggagattgctgattgtgtaaggcagaacgtcaggctgcagcagaagcttcaggaatgcaggggctgatcgccgaatcaatggagcaacgtcactgtgcgtcaccatgctgagaagatgtgggccgcgtggagggagctgggttttggacttttggtaccttccgggcaaccgatcagataatgattgtctctagcttagcaaatggagagttttgtttttgttaatgcttgttcagcattgtgggggaaggtttcctggtagagctgacaattttcccccattgagaagaggttttagggtttctcttcctcattttcccagaaggaatacaccaaatggaagtcttgtctggtgttggaggcacataggtgtgcgttgctctcaaagaagaataggttgtctcttacttttcgccgctatgttttcttttttggaaaaaagggaaaaaagaatgatccagcttaacatgaaaaaggtgcacagggattgccttggtctttaatcttgctttatttgcgatctttaaagagaacgatcgagcttaacacttaaatagatgactgtcgaaatgatagcagcttgagttgctcaccgaaccaacacattcgtatattgtgataagaagctcccccatgaaaggttctctacttttgttc

SEQ ID NO: 25031 - DNA, 3395 bp, Zea Mays
gtcaacactgtacaaacatctctttttaagaaaatataataatgttaaggtttttaaaagaaatatagatatagactatatcatccatctaaaactaataatgtacaaaaaaaaaaagtacaacgcgtccgctgccgagacgacgaagagataaacccaaatggaatggaccaccagaaaccaaaccgtcgtcaagaggatcggagggagggccggatcggaggggcgggcgctggaagccacggtctgcttttagggtttctctcccctcgccgagacagacaagtactccaccacacacacgcgccctacccacgaaattcacaaacccaccggaggcacagaaatttcccaggcaaggaaaaatcccgtccgaaatccagcgctccaaatccgttcgtctcctaggcgctcccccgaacccgtcacgaatccctcagatccccgctgaaatccctcaatcctccgtgctcgccgccgccgcctcctccctgcgacagccgcggccgcggatttccacccgagggtttcgtctcgctctcgctctctccgctctactgcctccacagattggcgcgaccgacccgtcatcgaggaccttcttccgcccgagaggccggggctcctcccgcggaaattcactctcgttcagaggcggcgctctcctcttcatcgccgcccccgcgctctgcttgtactggagtggcgcggggtggagatccacccgggcgtggatcgattcctcttcgtttcttcgttcggtggcgcggaataccaatctatagaagtgcacgaggagtttttatatccccgatttttagggggttcaactgaactcccatgccccacgctaagtccgcccctggtggtggtggactgaattggtggacactgttgattttgtcgtgggcatggagcgaagtgagccctcgttgaagccagaatggctgctgcggcccacagtacctgccacgacccataagccggtgacttcgccccgcgcagatgatcacggcaggggtgcttcatcaagaaaccgttcatcgggacgagatcgtgatcggagctcccaacagtcctcgtctcggaggggttcaagctctagtggttcaaggaggaatgatcgcgatggtacagggaaatcaagaggctatggtaattttggaaagcacagcaaggataggatacaagaaaaggacttggattttcgtgaacgggagagtaggttggttcaaccagatgatcctttacgtgatggctttgagtcctttagctcatgcagatctgaaaaggacaggcttaaccgtactcgttcaaaggtggccataccaaatcgggcaggagtaagtttagacaatggtaatgtatctaaaaaagataatggtgtcatctcctttgagcgggaatttccacaccttggttctgaggacaaaaatggaaagcaagacataggtcgagttccgtctcctggaattagcacgccaattcagaacataccattggtagtatctgatggctggaattcagtgcttgcagaagtacctgccttagtagatccaaacattaactctgtttcctcttcctcatcacccgctggttctagtaaaccgattgaagtgtccaactctgggagtgcgttaagcatggctgaaacagtgatgcagtcaccgttaaatatttgtaccacacctcagttatcaattgatgctcagaagattgaagaaagaactatgaggcagtgcattttaagacctctaacaccatcgtcaaacaaaatatctgcatctatttccttggataagttattaaaatccaaaggtgcaagagctggagagtctaatggacctatcaaggttgctccacagctgtcaatacagccatctagcaactctgttcgcactccagtcaaaactgagctcgtaaagcaatctcaatcaggcagccttcaagtccttagccgtgagcagaatggtactgtaaatactgctgccaaagacatcaccagcaacaatcctgtgagccctgttttgggtcgatcttcttcaatggaacctatgagaaagtctattgtcaacccaaagcttaaggttggtactaatggccgttctttgcatcctctgcaaggttcatttgcagacagaaaagcaagtgcaaaagacaagtacaaattttttgagttgttgcgaagtaagtctgtaaatggttcaagcgctgctattgagtctccatctagcctgactgatgatcagcagaactctagtcctgaattgcctttcaagtttattgaaaatgggaacagttcctgtgaagaagcaaattcttgtgagggatcacagcgacacttgtcggacaatgaggaaattattccaccttcagaatctcatgacgttttagatgagggatctctggggattcaagttgacgacaagggttccagctcttcaccagtacttggcacacaagatatatcttccaagaagccccaggaagacaatgttgatattgttgtacctgtttatgtaaatgatggttctgtgatgcccaattctgttgacaatgaagcaagattgctgttggaggaagccaatcctgctcaagtgttacagcacattgatgcaagggaggagaatccctgtcctgctcaagagttcgagtccataggggcaggtggggaggaagagttgaacctcctgagatctatgggctgggatgagaatgaagaggttcagcctcttcagcaggaggagattgctgattgtgcagaacgtcaggctgcagcagaagcttcaggaatgcaggggctgatcgccgaatcaatggagcaacgtcactgtgcgtcaccatgctgagaagatgtgggccgcgtggagggagctgggttttggacttttggtaccttccgggcaaccgatcagataatgattgtctctagcttagcaaatggagagttttgtttttgttaatgcttgttcagcattgtgggggaaggtttcctggtagagctgacaattttcccccattgagaagaggttttagggtttctcttcctcattttcccagaaggaatacaccaaatggaagtcttgtctggtgttggaggcacataggtgtgcgttgctctcaaagaagaataggttgtctcttacttttcgccgctatgttttcttttttggaaaaaagggaaaaaagaatgatccagcttaacatgaaaaaggtgcacagggattgccttggtctttaatcttgctttatttgcgatctttaaagagaacgatcgagcttaacacttaaatagatgactgtcgaaatgatagcagcttgagttgctcaccgaaccaacacattcgtatattgtgataagaagctcccccatgaaaggttctctacttttgttc

SEQ ID NO: 25032 - DNA, 3124 bp, Zea Mays
gtcaacactgtacaaacatctctttttaagaaaatataataatgttaaggtttttaaaagaaatatagatatagactatatcatccatctaaaactaataatgtacaaaaaaaaaaagtacaacgcgtccgctgccgagacgacgaagagataaacccaaatggaatggaccaccagaaaccaaaccgtcgtcaagaggatcggagggagggccggatcggaggggcgggcgctggaagccacggtctgcttttagggtttctctcccctcgccgagacagacaagtactccaccacacacacgcgccctacccacgaaattcacaaacccaccggaggcacagaaatttcccaggcaaggaaaaatcccgtccgaaatccagcgctccaaatccgttcgtctcctaggcgctcccccgaacccgtcacgaatccctcagatccccgctgaaatccctcaatcctccgtgctcgccgccgccgcctcctccctgcgacagccgcggccgcggatttccacccgagggtttcgtctcgctctcgctctctccgctctactgcctccacagattggcgcgaccgacccgtcatcgaggaccttcttccgcccgagaggccggggctcctcccgcggaaattcactctcgttcagaggcggcgctctcctcttcatcgccgcccccgcgctctgcttgtactggagtggcgcggggtggagatccacccgggcgtggatcgattcctcttcgtttcttcgttcggtggcgcggaataccaatctatagaagtgcacgaggagtttttatatccccgatttttagggggttcaactgaactcccatgccccacgctaagtccgcccctggtggtggtggactgaattggtggacactgttgattttgtcgtgggcatggagcgaagtgagccctcgttgaagccagaatggctgctgcggcccacagtacctgccacgacccataagccggtgacttcgccccgcgcagatgatcacggcaggggtgcttcatcaagaaaccgttcatcgggacgagatcgtgatcggagctcccaacagtcctcgtctcggaggggttcaagctctagtggttcaaggaggaatgatcgcgatggtacagggaaatcaagaggctatggtaattttggaaagcacagcaaggataggatacaagaaaaggacttggattttcgtgaacgggagagtaggttggttcaaccagatgatcctttacgtgatggctttgagtcctttagctcatgcagatctgaaaaggacaggcttaaccgtactcgttcaaaggtggccataccaaatcgggcaggagtaagtttagacaatggtaatgtatctaaaaaagataatggtgtcatctcctttgagcgggaatttccacaccttggttctgaggacaaaaatggaaagcaagacatagaagtacctgccttagtagatccaaacattaactctgtttcctcttcctcatcacccgctggttctagtaaaccgattgaagtgtccaactctgggagtgcgttaagcatggctgaaacagtgatgcagtcaccgttaaatatttgtaccacacctcagttatcaattgatgctcagaagattgaagaaagaactatgaggcagtgcattttaagacctctaacaccatcgtcaaacaaaatatctgcatctatttccttggataagttattaaaatccaaaggtgcaagagctggagagtctaatggacctatcaaggttgctccacagctgtcaatacagccatctagcaactctgttcgcactccagtcaaaactgagctcgtaaagcaatctcaatcaggcagccttcaagtccttagccgtgagcagaatggtactgtaaatactgctgccaaagacatcaccagcaacaatcctgtgagccctgttttgggtcgatcttcttcaatggaacctatgagaaagtctattgtcaacccaaagcttaagtttattgaaaatgggaacagttcctgtgaagaagcaaattcttgtgagggatcacagcgacacttgtcggacaatgaggaaattattccaccttcagaatctcatgacgttttagatgagggatctctggggattcaagttgacgacaagggttccagctcttcaccagtacttggcacacaagatatatcttccaagaagccccaggaagacaatgttgatattgttgtacctgtttatgtaaatgatggttctgtgatgcccaattctgttgacaatgaagcaagattgctgttggaggaagccaatcctgctcaagtgttacagcacattgatgcaagggaggagaatccctgtcctgctcaagagttcgagtccataggggcaggtggggaggaagagttgaacctcctgagatctatgggctgggatgagaatgaagaggttcagcctcttcagcaggaggagattgctgattgtgtaaggcagaacgtcaggctgcagcagaagcttcaggaatgcaggggctgatcgccgaatcaatggagcaacgtcactgtgcgtcaccatgctgagaagatgtgggccgcgtggagggagctgggttttggacttttggtaccttccgggcaaccgatcagataatgattgtctctagcttagcaaatggagagttttgtttttgttaatgcttgttcagcattgtgggggaaggtttcctggtagagctgacaattttcccccattgagaagaggttttagggtttctcttcctcattttcccagaaggaatacaccaaatggaagtcttgtctggtgttggaggcacataggtgtgcgttgctctcaaagaagaataggttgtctcttacttttcgccgctatgttttcttttttggaaaaaagggaaaaaagaatgatccagcttaacatgaaaaaggtgcacagggattgccttggtctttaatcttgctttatttgcgatctttaaagagaacgatcgagcttaacacttaaatagatgactgtcgaaatgatagcagcttgagttgctcaccgaaccaacacattcgtatattgtgataagaagctcccccatgaaaggttctctacttttgttc

SEQ ID NO: 25033 - DNA, 3374 bp, Zea Mays
gcacaaacagagactagtccaaagcaccataacgagagagagggagagagagaaagagagaaaaaaaaacactcggaaacgatccgcgaactagtccaccggcgatttgttgttttgttcttcagtgcgtcagccaaccttaactgctacgatcggtcgatcaagggggaggaagtttctggagctctgcccatggcgtcggcgatgaagctgctggggagatcttccttggcgagccctgctgccgcggcgcccggacgggagcggcgaggcgggccctgcttcgccgcggtcggaagggaggggagcgcgcacaggaggaggtcgtcgctgaggtcgaccgcgccggtgggcgcgctggccgagcgggtcgtggtgacgccggcgccaccggagagggccggggcgggccccccggagccgcacccccagagcgtggccgcgcgggccgtggtcaccgtgcggcggaggcggaaggaggacgccaagcgccgggtcgccgagcagctggacgcgtacgccgaccgggttggccgcagtgtcctcctcgagctcatcagcacggagaccgacccaagaaaggggggccccaagaagagcaggcgctcggcgctggtgggctggttcgagaagaaggacgtcaagacggagcgggtggtgtacacggcggacttcaccgttgacgggtccttcggcgagccgggcgcggtcaccgtgctcaaccggcaccagcgcgagttcttcatcgagagcatcgtggtggagggctttccctccggccccgcgcacttcacctgcaactcgtgggtgcagcccacccgcgtggaccgcaacccgcgcgtgttcttcaccaacaagccgtacctgccggccgagacgccgccgggcctgcaggagctccgccgccagcagctcagcgacctgaggggcgagggtgccgacaccggcgagcgcaggatcaccgaccgggtgtgggagtatgacgtgtacaacgacctcggcaacccggacaagggcgccgagttcgcgcgcccggtcctcggcggcgagcagcagctgccgtacccgcggcggatgcgaacgggccggcccaagaccatcacagacgaccgcgcggagagccgggtggagtacccggagcccatctacgtgtcccgggacgaggagttcgaggacgggaagaacgagatgctgtcggagggcgcgctcaaggcgctgctccataacttcatgccgctgctggtgagctccgtgtcgcctgacatccgcgacttcgccggcttccacgacgtggacaacctcttcaaggagggcctccgcctgaagcaggccctgcaggaccagctgttccagaagatccccttcgtgcgcaagatccaggagaacagcgagggcctcctccgctacgacactcccgacatcatcaagagtaagccagcgcccatgcgccttcctcctcctccgtccatgatccatggagaggacaagtttgcttggctgcgggacgacgagttcgcgaggcaggcgctggctggcatcaaccccgtcaacatcgaacgtcttcaggcgttcccgccgatgagcaagctggacccggccgtgtacggcccgccggagtcggccatcacggaggagcacatcatcggacagctcgacggcatgtcggtgcagcaggcgctgcaggacgacaggctgtacatgctggactaccacgacatcttcatgccgttcctggaccggatcaacgcgctggacgggcggaaggcctacggcacgcgcacgctcttcttcctgacggccgcgggcacgctgaagcccatcgcgatcgagctgtgcctgccgccgatgaccgacgggtgcgcgcgcgccaagcgggtgttcacgccgcccgccgatgccaccagcaactggctgtggcagctcgccaaggcacacgtctgctccaatgacgccggcgtccaccagctcatcaaccactggctgaggacgcacgcggccatggagccgttcatcatcgcggcgcaccggcacctgagcacgatgcaccccatcttcaagctgctcaagcctcacatgcggtacacgctcaagatcaacgcgctggcgcggcagatcctcatcaacggcgacggcgtcatcgagtccgggttcacccctggccgctactgcatggagatgagctcgttcgcgtaccgggagctctggcggctagaccaggagggcctccctgccgatctcatcagaagaggaatggccgtggaggacccgacgcagccgcacggtctccggctgctcatcgaggactacccgtacgccaccgacgggttgctgctctggtcggccatcaggcggtggtgcgacgcctacgtggccatgtactacccgtccgacgagtccgtgcagggcgacaccgagctgcagtcgtggtacagggaggccgtgcacacggggcacgcggacaagcgcgacgcgccgtggtggccgcgcctgtcgacgcccgcggacctggcgtcgctgctgacgacgctgctgtggctcacctcggcgcagcacgcggcgctcaacttcgggcagtacccgctgggcggctacatcccgaaccggccgccgctgatgcggcggctggtgcccgccgagggcgacccggagtacgcgcacctggtggccgacccgcaccgcttcttcctgtcggcgctgcccagcctgacgcagaccaccacgttcatgaccgtcatcgacacgctgtccacgcactccgccgacgagcagtacctcggggagcggcctgatgaggcgtggacggccgacccggcggcgttggcggccgcgcgcgagttcgcggacgaggtgcgccgcgccgaggaggagatcgaacggcgcaacgctgacactggccgccgcaaccggtgcggcgctggcgtgctgccgtacgagctcatggcgcccacgtcggggccgggcatcacctgccgcggcgtccccaacagcgttaccatttagcctctcagtaccgacagacagccatgggcgcatgacagagatgatctgaaaggagaatttttttccactcattatagtcgggtggggagaaatctaagcagaagcaaatgaattttgcattatttctccccccattgccaaattgccattgatttggtggtccgaacaggtaaaatttgatttttgactaggggcaagactgtgaggaactgaatgggtgtaaataatttgttatatacaaaaatcaatggaatataatcattatagagttctctggataaagcaatgtcgttatacagaaatgtttgctatgctttgtattgctcaacctgtgttttcttcaaatactacggcattcttaccggcgacatttt

SEQ ID NO: 25034 - DNA, 2795 bp, Zea Mays
gcacaaacagagactagtccaaagcaccataacgagagagagggagagagagaaagagagaaaaaaaaacactcggaaacgatccgcgaactagtccaccggcgatttgttgttttgttcttcagtgcgtcagccaaccttaactgctacgatcggtcgatcaagggggaggaagtttctggagctctgcccatggcgtcggcgatgaagctgctggggagatcttccttggcgagccctgctgccgcggcgcccggacgggagcggcgaggcgggccctgcttcgccgcggtcggaagggaggggagcgcgcacaggaggaggtcgtcgctgaggtcgaccgcgccggtgggcgcgctggccgagcgggtcgtggtgacgccggcgccaccggagagggccggggcgggccccccggagccgcacccccagagcgtggccgcgcgggccgtggtcaccgtgcggcggaggcggaaggaggacgccaagcgccgggtcgccgagcagctggacgcgtacgccgaccgggttggccgcagtgtcctcctcgagctcatcagcacggagaccgacccaaacgaccgcgcggagagccgggtggagtacccggagcccatctacgtgtcccgggacgaggagttcgaggacgggaagaacgagatgctgtcggagggcgcgctcaaggcgctgctccataacttcatgccgctgctggtgagctccgtgtcgcctgacatccgcgacttcgccggcttccacgacgtggacaacctcttcaaggagggcctccgcctgaagcaggccctgcaggaccagctgttccagaagatccccttcgtgcgcaagatccaggagaacagcgagggcctcctccgctacgacactcccgacatcatcaagaaggacaagtttgcttggctgcgggacgacgagttcgcgaggcaggcgctggctggcatcaaccccgtcaacatcgaacgtcttcaggcgttcccgccgatgagcaagctggacccggccgtgtacggcccgccggagtcggccatcacggaggagcacatcatcggacagctcgacggcatgtcggtgcagcaggcgctgcaggacgacaggctgtacatgctggactaccacgacatcttcatgccgttcctggaccggatcaacgcgctggacgggcggaaggcctacggcacgcgcacgctcttcttcctgacggccgcgggcacgctgaagcccatcgcgatcgagctgtgcctgccgccgatgaccgacgggtgcgcgcgcgccaagcgggtgttcacgccgcccgccgatgccaccagcaactggctgtggcagctcgccaaggcacacgtctgctccaatgacgccggcgtccaccagctcatcaaccactggctgaggacgcacgcggccatggagccgttcatcatcgcggcgcaccggcacctgagcacgatgcaccccatcttcaagctgctcaagcctcacatgcggtacacgctcaagatcaacgcgctggcgcggcagatcctcatcaacggcgacggcgtcatcgagtccgggttcacccctggccgctactgcatggagatgagctcgttcgcgtaccgggagctctggcggctagaccaggagggcctccctgccgatctcatcagaagaggaatggccgtggaggacccgacgcagccgcacggtctccggctgctcatcgaggactacccgtacgccaccgacgggttgctgctctggtcggccatcaggcggtggtgcgacgcctacgtggccatgtactacccgtccgacgagtccgtgcagggcgacaccgagctgcagtcgtggtacagggaggccgtgcacacggggcacgcggacaagcgcgacgcgccgtggtggccgcgcctgtcgacgcccgcggacctggcgtcgctgctgacgacgctgctgtggctcacctcggcgcagcacgcggcgctcaacttcgggcagtacccgctgggcggctacatcccgaaccggccgccgctgatgcggcggctggtgcccgccgagggcgacccggagtacgcgcacctggtggccgacccgcaccgcttcttcctgtcggcgctgcccagcctgacgcagaccaccacgttcatgaccgtcatcgacacgctgtccacgcactccgccgacgagcagtacctcggggagcggcctgatgaggcgtggacggccgacccggcggcgttggcggccgcgcgcgagttcgcggacgaggtgcgccgcgccgaggaggagatcgaacggcgcaacgctgacactggccgccgcaaccggtgcggcgctggcgtgctgccgtacgagctcatggcgcccacgtcggggccgggcatcacctgccgcggcgtccccaacagcgttaccatttagcctctcagtaccgacagacagccatgggcgcatgacagagatgatctgaaaggagaatttttttccactcattatagtcgggtggggagaaatctaagcagaagcaaatgaattttgcattatttctccccccattgccaaattgccattgatttggtggtccgaacaggtaaaatttgatttttgactaggggcaagactgtgaggaactgaatgggtgtaaataatttgttatatacaaaaatcaatggaatataatcattatagagttctctggataaagcaatgtcgttatacagaaatgtttgctatgctttgtattgctcaacctgtgttttcttcaaatactacggcattcttaccggcgacatttt

SEQ ID NO: 25035 - DNA, 3425 bp, Zea Mays
gtgcaggactgcaggccccagcgagtcctcacttactcccagaccggcgcccctatatatggtgctgctcccaccgcgagcaaggtggtagctcgcgccactgcacaaacagagactagtccaaagcaccataacgagagagagggagagagagaaagagagaaaaaaaaacactcggaaacgatccgcgaactagtccaccggcgatttgttgttttgttcttcagtgcgtcagccaaccttaactgctacgatcggtcgatcaagggggaggaagtttctggagctctgcccatggcgtcggcgatgaagctgctggggagatcttccttggcgagccctgctgccgcggcgcccggacgggagcggcgaggcgggccctgcttcgccgcggtcggaagggaggggagcgcgcacaggaggaggtcgtcgctgaggtcgaccgcgccggtgggcgcgctggccgagcgggtcgtggtgacgccggcgccaccggagagggccggggcgggccccccggagccgcacccccagagcgtggccgcgcgggccgtggtcaccgtgcggcggaggcggaaggaggacgccaagcgccgggtcgccgagcagctggacgcgtacgccgaccgggttggccgcagtgtcctcctcgagctcatcagcacggagaccgacccaagaaaggggggccccaagaagagcaggcgctcggcgctggtgggctggttcgagaagaaggacgtcaagacggagcgggtggtgtacacggcggacttcaccgttgacgggtccttcggcgagccgggcgcggtcaccgtgctcaaccggcaccagcgcgagttcttcatcgagagcatcgtggtggagggctttccctccggccccgcgcacttcacctgcaactcgtgggtgcagcccacccgcgtggaccgcaacccgcgcgtgttcttcaccaacaagccgtacctgccggccgagacgccgccgggcctgcaggagctccgccgccagcagctcagcgacctgaggggcgagggtgccgacaccggcgagcgcaggatcaccgaccgggtgtgggagtatgacgtgtacaacgacctcggcaacccggacaagggcgccgagttcgcgcgcccggtcctcggcggcgagcagcagctgccgtacccgcggcggatgcgaacgggccggcccaagaccatcacagacgaccgcgcggagagccgggtggagtacccggagcccatctacgtgtcccgggacgaggagttcgaggacgggaagaacgagatgctgtcggagggcgcgctcaaggcgctgctccataacttcatgccgctgctggtgagctccgtgtcgcctgacatccgcgacttcgccggcttccacgacgtggacaacctcttcaaggagggcctccgcctgaagcaggccctgcaggaccagctgttccagaagatccccttcgtgcgcaagatccaggagaacagcgagggcctcctccgctacgacactcccgacatcatcaagaaggacaagtttgcttggctgcgggacgacgagttcgcgaggcaggcgctggctggcatcaaccccgtcaacatcgaacgtcttcaggcgttcccgccgatgagcaagctggacccggccgtgtacggcccgccggagtcggccatcacggaggagcacatcatcggacagctcgacggcatgtcggtgcagcaggcgctgcaggacgacaggctgtacatgctggactaccacgacatcttcatgccgttcctggaccggatcaacgcgctggacgggcggaaggcctacggcacgcgcacgctcttcttcctgacggccgcgggcacgctgaagcccatcgcgatcgagctgtgcctgccgccgatgaccgacgggtgcgcgcgcgccaagcgggtgttcacgccgcccgccgatgccaccagcaactggctgtggcagctcgccaaggcacacgtctgctccaatgacgccggcgtccaccagctcatcaaccactggctgaggacgcacgcggccatggagccgttcatcatcgcggcgcaccggcacctgagcacgatgcaccccatcttcaagctgctcaagcctcacatgcggtacacgctcaagatcaacgcgctggcgcggcagatcctcatcaacggcgacggcgtcatcgagtccgggttcacccctggccgctactgcatggagatgagctcgttcgcgtaccgggagctctggcggctagaccaggagggcctccctgccgatctcatcagaagaggaatggccgtggaggacccgacgcagccgcacggtctccggctgctcatcgaggactacccgtacgccaccgacgggttgctgctctggtcggccatcaggcggtggtgcgacgcctacgtggccatgtactacccgtccgacgagtccgtgcagggcgacaccgagctgcagtcgtggtacagggaggccgtgcacacggggcacgcggacaagcgcgacgcgccgtggtggccgcgcctgtcgacgcccgcggacctggcgtcgctgctgacgacgctgctgtggctcacctcggcgcagcacgcggcgctcaacttcgggcagtacccgctgggcggctacatcccgaaccggccgccgctgatgcggcggctggtgcccgccgagggcgacccggagtacgcgcacctggtggccgacccgcaccgcttcttcctgtcggcgctgcccagcctgacgcagaccaccacgttcatgaccgtcatcgacacgctgtccacgcactccgccgacgagcagtacctcggggagcggcctgatgaggcgtggacggccgacccggcggcgttggcggccgcgcgcgagttcgcggacgaggtgcgccgcgccgaggaggagatcgaacggcgcaacgctgacactggccgccgcaaccggtgcggcgctggcgtgctgccgtacgagctcatggcgcccacgtcggggccgggcatcacctgccgcggcgtccccaacagcgttaccatttagcctctcagtaccgacagacagccatgggcgcatgacagagatgatctgaaaggagaatttttttccactcattatagtcgggtggggagaaatctaagcagaagcaaatgaattttgcattatttctccccccattgccaaattgccattgatttggtggtccgaacaggtaaaatttgatttttgactaggggcaagactgtgaggaactgaatgggtgtaaataatttgttatatacaaaaatcaatggaatataatcattatagagttctctggataaagcaatgtcgttatacagaaatgtttgctatgctttgtattgctcaacctgtgttttcttcaaatactacggcattcttaccggcgacatttt

SEQ ID NO: 25036 - DNA, 2879 bp, Zea Mays
cttgggcggctagctgttggacgccagccagagccgctggctgcaagcggcgcgcccggcgcccacacggccacagccacggtccatcgcatcccgagcgccgaaatccaaacgcacaatgacttcgccgcccccgcccccgccccccaccgtgtgcgttctcctccccttctctccctcgtccgccggccgccctcaccactcgcgccaccccgcgcgccgccgcctgtgcgtccgcagctcaaggcccagcccaccgggcatccccaacaccagcaccaggccgcctccgctgccgccgcgccgactgcacggagcagaccgccgcctcagcgccctgatccaccggggcgacctagacgcggcgctccgcctcgtgggctcctcgccgcgcccgcccgacgttccgctcgccaaccggcttgtccgcgacctctgccggcggggccgccccgccgacgccgcgcgcgtcgtcgaggcgtgcgggcccgaggccaccgccgccacctacggcgcgctggtcgacgggtactgccgcgcgggcctgctcgaggacgcgcgccgcgtcgtgggcggaatgcccgcgcacgtgcaggccagcagcgcgtacgcccacaacccactcatccacgcgctctgcgagcgcgggcgggtcgcggacgccctcgtggtgctcgacggcatgctctgccgcgggtgcgcgcccgacgtggtcacctacaacatcctgctccaggcggcgtgcaaggggagaggataccggcaggccctggagctcatcgatttcatgcgcgcagaggggtgtgagcccaacaacgtgacgtacaatgtcatcatcgatgctatgtgcagagaaggtgatgtagaccaggcacgcgagcttctgaacagcttgccttctagaggttgcaagcccaacactgtcaactacaacactgttttgaagggtttctgcagcatcgagcgatgggtggatgctgatgagattctagacgagatggttcgtgagaactgcccaccaaacgaagcaacactcaatgtgatcatcaataccttgtgtcgaaaaggattgctccagaaagttactctgtatctagagaaaatgtcaaagcatggatgcacggcaaatgttgttacatacaatgctgtaatcagtgggatgtgtgagcaaggaaatgtggatagtgccttggagttactcagcaacatgcaatcctttggttgtaaacctgatattgtcacctacaacactgtgctaaagggtttgtgcagtgctgataggtgggaggatgccgaggagctaatgattaagatgtcccagaatgatcgcctcccagataactcgacattcaatactattattagtttctggtgtcaaaagggattgattttgcaggcctttgaagtctttaagcaaatgcctgagaaaggctgcaatcctaattcaactacttacagtacaataataggtggactaaccaaggctggcaagatggaacaagcccttgagttgttgaatgaaatggccaacaaaggattcaacacagataagatgtaccgggtgttaactgagagtctgaataaagaggataaaattgaagaggtagtccaggtggttcataaactgcaagattcaggcatatcaccccagacagtactctacaatacagtactgttagggctttgcagaaatgggaaaacagattatgctattgatgtgcttgctgatatggtgtcatgtggttgtatgcctgatgaatcgacctacattatactcatagaaggtttgttttatgagggctattcgaaggaggcaagagaattgctaagcaggttgtgctcaagagatgtactttctaacagcttgatcaagaatgaagctttgttgttagatcaaaatattcgatcttcttgagtcacgattaattcaagagcatgtgtgcacttttaacatcattgtatgtagtggtggagtaggttagcacttacacattgcttcaattttgatttcttggacagctacagcctacagaaagctctccagcctggatatcttggaagactgaaatcctggtcttcatggtcgccttttacttatcgacatgttgttcattgtctggatgattatcttcctttgaccatttgtgtgtgtgtgtgtgtgtgtgtatagtccacaccttttagttgattgagggggggatagtccttgtaagctactccgctgaagttcctttcgacaacgctggttagatcatcttccgtgtgcagcggttgtctaagttcaaaaaacaaaggtaggctgaagaacaccaaatattttttttccctgagcttatgttgcctttgcagtttacctctacggagctcctgtcctgtgtgctaccagtaccagttcatagcgagtccctgtccctgggcctgaagaccctatgagcttctgttcgtgaggacaagataattggggagatttcccttttcccgtcggtgcttccggttgtcggtaaaagctggctaaccaccaccgccgacatgattgtgaaagcctgaaagggatcgacatacatggtttgctcgttgattcttaacccggctgttcagactcgggcttctggccggctgctgaccatggaccgcgatgtgccactaccaccacaggctgacaggcacatgctcctgcggtgcagtgccgcacgaaactaaaaccgaccgaccaggtcagaaaccgaattttttttttataaaaccacagtgggacaagaatttgacccgcgattactccatcagtgctcctccatctacgtgtacgatatataaactgtaatcatgagcaaacattatttttaccgtgtttaacggcatcaataaattaaagagtaaat

SEQ ID NO: 25037 - DNA, 4124 bp, Zea Mays
cttgggcggctagctgttggacgccagccagagccgctggctgcaagcggcgcgcccggcgcccacacggccacagccacggtccatcgcatcccgagcgccgaaatccaaacgcacaatgacttcgccgcccccgcccccgccccccaccgtgtgcgttctcctccccttctctccctcgtccgccggccgccctcaccactcgcgccaccccgcgcgccgccgcctgtgcgtccgcagctcaaggcccagcccaccgggcatccccaacaccagcaccaggccgcctccgctgccgccgcgccgactgcacggagcagaccgccgcctcagcgccctgatccaccggggcgacctagacgcggcgctccgcctcgtgggctcctcgccgcgcccgcccgacgttccgctcgccaaccggcttgtccgcgacctctgccggcggggccgccccgccgacgccgcgcgcgtcgtcgaggcgtgcgggcccgaggccaccgccgccacctacggcgcgctggtcgacgggtactgccgcgcgggcctgctcgaggacgcgcgccgcgtcgtgggcggaatgcccgcgcacgtgcaggccagcagcgcgtacgcccacaacccactcatccacgcgctctgcgagcgcgggcgggtcgcggacgccctcgtggtgctcgacggcatgctctgccgcgggtgcgcgcccgacgtggtcacctacaacatcctgctccaggcggcgtgcaaggggagaggataccggcaggccctggagctcatcgatttcatgcgcgcagaggggtgtgagcccaacaacgtgacgtacaatgtcatcatcgatgctatgtgcagagaaggtgatgtagaccaggcacgcgagcttctgaacagcttgccttctagaggttgcaagcccaacactgtcaactacaacactgttttgaagggtttctgcagcatcgagcgatgggtggatgctgatgagattctagacgagatggttcgtgagaactgcccaccaaacgaagcaacactcaatgtgatcatcaataccttgtgtcgaaaaggattgctccagaaagttactctgtatctagagaaaatgtcaaagcatggatgcacggcaaatgttgttacatacaatgctgtaatcagtgggatgtgtgagcaaggaaatgtggatagtgccttggagttactcagcaacatgcaatcctttggttgtaaacctgatattgtcacctacaacactgtgctaaagggtttgtgcagtgctgataggtgggaggatgccgaggagctaatgattaagatgtcccagaatgatcgcctcccagataactcgacattcaatactattattagtttctggtgtcaaaagggattgattttgcaggcctttgaagtctttaagcaaatgcctgagaaaggctgcaatcctaattcaactacttacagtacaataataggtggactaaccaaggctggcaagatggaacaagcccttgagttgttgaatgaaatggccaacaaaggattcaacacagataagatgtaccgggtgttaactgagagtctgaataaagaggataaaattgaagaggtagtccaggtggttcataaactgcaagattcaggcatatcaccccagacagtactctacaatacagtactgttagggctttgcagaaatgggaaaacagattatgctattgatgtgcttgctgatatggtgtcatgtggttgtatgcctgatgaatcgacctacattatactcatagaaggtttgttttatgagggctattcgaaggaggcaagagaattgctaagcaggttgtgctcaagagatgtactttctaacagcttgatcaagaatgaagctttgttgttagatcaaaatattcgatcttcttgagtcacgattaattcaagagcatgtgtgcacttttaacatcattgtatgtagtggtggagtaggttagcacttacacattgcttcaattttgattgatgtgagcacattggattgtacacatggtttgatgtttactttctggattcacgtttagccaaggcatcctcatatccaaaatataagtcgtttcaggcctgtactttggatcagtattctctatttctgtctggaggtacttgcctctgaatttaggttaagatggaatgtgtagccaagtttaaggaacaagatattgtaggattgcacctgtagaagcgaaagaacaagggatgagcactttgttgctcaagtgcatgcgttttattgctcctttctatacgcaattctccactgaacccattgacctaggtaccgagtctgttatgcatacgtcttctcggactctttattcatttgttgacaacataaattcaaacatgagaaagggggtgagtattacaggagttcctggattactttgtttagaaacaagtgatccatttttttagttgtttgatatacaataaaacacataaatggacattagccctttgcctctgagatcagcatagtaactattcctttgttttaatagactagaaaagttgggtttgggtccaatgtgagatcaattcctagttatgatttacttactttagagtagcagaagtgggatttaaagaaccaccacacaactggagctcaagttacttctgacggatggctgattggctgaccccatgtttgtgccatttcaagaaaaatcagccttgtgatatttattgtttttattatgataataaagatgcaggctcatgctctgttatattaaccatatgctcagttagattaatccattgaattcgatcaaattccccttctatgccaattatattaacctctgcctcctaggtgaaaatatagcagtgctaaacactattttctaggacaccacttctgtacattacatgcgtgtggccttgttttctgtggctgcggtaggagctaaggcataaggcagctaactgctaacatgctttggaaagctgtataagcactacgcgctaatgctatggacattgcattagtggatagccctctaatttctctgttatggccatcgcattgcatttcatgagtccatactccacatacatcttttcctctactttcatcgatggcagtgtccaaccttacattgctgcatttctatcttacagcctagactggttaggttagcacgtcgtctcatttgaatattgtttcgctgtggtgtaatttcctgaactgtgcagtgcagtcttggacagctacagcctacagaaagctctccagcctggatatcttggaagactgaaatcctggtcttcatggtcgccttttacttatcgacatgttgttcattgtctggatgattatcttcctttgaccatttgtgtgtgtgtgtgtgtgtgtgtatagtccacaccttttagttgattgagggggggatagtccttgtaagctactccgctgaagttcctttcgacaacgctggttagatcatcttccgtgtgcagcggttgtctaagttcaaaaaacaaaggtaggctgaagaacaccaaatattttttttccctgagcttatgttgcctttgcagtttacctctacggagctcctgtcctgtgtgctaccagtaccagttcatagcgagtccctgtccctgggcctgaagaccctatgagcttctgttcgtgaggacaagataattggggagatttcccttttcccgtcggtgcttccggttgtcggtaaaagctggctaaccaccaccgccgacatgattgtgaaagcctgaaagggatcgacatacatggtttgctcgttgattcttaacccggctgttcagactcgggcttctggccggctgctgaccatggaccgcgatgtgccactaccaccacaggctgacaggcacatgctcctgcggtgcagtgccgcacgaaactaaaaccgaccgaccaggtcagaaaccgaattttttttttataaaaccacagtgggacaagaatttgacccgcgattactccatcagtgctcctccatctacgtgtacgatatataaactgtaatcatgagcaaacattatttttaccgtgtttaacggcatcaataaattaaagagtaaat

SEQ ID NO: 25038 - DNA, 823 bp, Zea Mays
attaaaatggtcacggaaaatggttcagaaaagatttgtgtgcttcatcagaatagagcatagaccattttcctatccaggaagtccattgaacatgttaaggtgtgctgtaatcatctgtgtcaagtatgatgccaacatgccataaacatgttaaggtagagaggttacactagctgacattgtcagataatcaacatggctgaactcaaaaatggttggcattggccacaattttcaactgaatgcaactggatggaagtggaagctttctacttgcctggggggagatggtgtgtctcagataagaaacaagtcaaaactcagcttgttcccagggtttgatttgaggattggatggaaagcagagtatgtgcttcctgagattcatggggctgttggcacaggagaaccagccttcagtatgaactatggaaggttgcatgcatcgatagatcgggtcgaggctatcgttactcagtcagatcagtattgatcttccagtgcggaaaggcaagggagtttcttgatcaataacaaacacgttgagtagatcccagggttacaagaagcattctgaagctccgtgcctgatgtacagcaaataccaaagtttaggaccacgctttgagaagctgtttgagttctccaaagcttttgactttgagcggcttctgttgcttctgaaagcgtaactataaataatgtttatcctgcttgtgtacgaaacaccagagtatcagtaattcagtatagtgagcgacgtcaaagcatgatctctatgcatcaagatttgtcttctaagctattcggaagtacgctt

SEQ ID NO: 25039 - DNA, 798 bp, Zea Mays
ctcaaacctgatgaaaatcgtatcgatgtagtagaaactttctacaatcttgaggtcaatgactttgaggcaaagatagtactgaagcctctagattacgagcggaaatggaagttccagtacaagcccatcagtggcgacatacagctgctttccaagaagataccagtcacaaagtttctaaatctacaggttggcattggccacaattttcaactgaatgcaactggatggaagtggaagctttctacttgcctggggggagatggtgtgtctcagataagaaacaagtcaaaactcagcttgttcccagggtttgatttgaggattggatggaaagcagagtatgtgcttcctgagattcatggggctgttggcacaggagaaccagccttcagtatgaactatggaaggttgcatgcatcgatagatcgggtcgaggctatcgttactcagtcagatcagtattgatcttccagtgcggaaaggcaagggagtttcttgatcaataacaaacacgttgagtagatcccagggttacaagaagcattctgaagctccgtgcctgatgtacagcaaataccaaagtttaggaccacgctttgagaagctgtttgagttctccaaagcttttgactttgagcggcttctgttgcttctgaaagcgtaactataaataatgtttatcctgcttgtgtacgaaacaccagagtatcagtaattcagtatagtgagcgacgtcaaagcatgatctctatgcatcaagatttgtcttctaagctattcggaagtacgctt

SEQ ID NO: 25040 - DNA, 1198 bp, Zea Mays
gaggcaaggcagacaaacagaaacaggggttcagatacaagtaatctctctctctccaattcgtgagctacatcaagcaaaatggacaagagcattcctgtagttagcaagattttttgctcaggcactccaacaatgctgatgataaggatgagacctattgtagtgaacggtggtggttttgttgttactgacctcagtcataacattgtattcgtcgtagatggttgtggaatacttggatccaagggagagcttatggtcaaagacggtgaaggagaaccaatattattcatctctaaaaagggaggaattgtccaggcgctaagcacaaggaacaaatggaatggatactccatggattaccaagggaaaaacaagttggtttttagcctaactgatccgaaattatgcacagcacaagatgggcacgaaagagccaataggaggcaaggacttctaccatgtggaagtgcagtcaggatatgaccaagctttcatcattggggtgatggcaattcttgacaacatacatggagaatccactagatgctgataacatgaattagagaatttgctcttgtttataagagtagactaatgttcaatagcacttatcttgcaacatactttcatcttcaagtaagaaacagacacatgctggcaccatcataatgattgtatgactatgacccgcattgaataatatccacaggccagctgataatatgagcctaactttcactgccacttaactatatctctttaataaacatagagatgtgactaattgactaaatgtacagcagcatagagcatccctattccaatgttacaaacctggtgcttcatataattctatacacaagaattgtgattttcatgaattgtgaacaaagtaactaaatgtgtacattgtaccacagccatcagaaatctggaacgatttggccatggatcgtgggtgtctaaaaagtccaacgaagtgatatctcttaagcagagaaaacaaagaaaggatgggaaatgtcttgacttagtaattgaaattatgaagaatgctactgccttaaattggacttcactcgaacaacttaaaattaattttaattctgaggccaacttaaaacctcccaaaaagacaaaaagtgtgatattggaggtccagtagacaaacaaatgtgcaactttcatgaag

SEQ ID NO: 25041 - DNA, 1368 bp, Zea Mays
gaggcaaggcagacaaacagaaacaggggttcagatacaaatggttgtggaatacttggatccaagggagagcttatggtcaaagacggtgaaggagaaccaatattattcatctctaaaaaggctagctcttaaattttgaagagatgtgggaattcctttctgtttcagctcacatttatgataatgagactagctctagacaacaaaataacaaggacacagaactactttttcttgagaaatggaagaaagataagttgtgaaaaacacatgacatatttgccctacaatgtcttcatttcctgttttttttgtgtgtgctcaccatattaatactctacaccgcagggaggaattgtccaggcgctaagcacaaggaacaaatggaatggatactccatggattaccaagggaaaaacaagttggtttttagcctaactgatccgaaattatgcacagcacaaggtgctccaattagaattcatattgaacctaagaggcactgcaaaaattgggatttcgaaattggtggatcttttgcagatagagactgtacaatagttgattgcaccagaaaaatagtagcccagatgggcacgaaagagccaataggaggcaaggacttctaccatgtggaagtgcagtcaggatatgaccaagctttcatcattggggtgatggcaattcttgacaacatacatggagaatccactagatgctgataacatgaattagagaatttgctcttgtttataagagtagactaatgttcaatagcacttatcttgcaacatactttcatcttcaagtaagaaacagacacatgctggcaccatcataatgattgtatgactatgacccgcattgaataatatccacaggccagctgataatatgagcctaactttcactgccacttaactatatctctttaataaacatagagatgtgactaattgactaaatgtacagcagcatagagcatccctattccaatgttacaaacctggtgcttcatataattctatacacaagaattgtgattttcatgaattgtgaacaaagtaactaaatgtgtacattgtaccacagccatcagaaatctggaacgatttggccatggatcgtgggtgtctaaaaagtccaacgaagtgatatctcttaagcagagaaaacaaagaaaggatgggaaatgtcttgacttagtaattgaaattatgaagaatgctactgccttaaattggacttcactcgaacaacttaaaattaattttaattctgaggccaacttaaaacctcccaaaaagacaaaaagtgtgatattggaggtccagtagacaaacaaatgtgcaactttcatgaag

SEQ ID NO: 25042 - DNA, 1224 bp, Zea Mays
gaggcaaggcagacaaacagaaacaggggttcagatacaagtaatctctctctctccaattcgtgagctacatcaagcaaaatggacaagagcattcctgtagttagcaagattttttgctcagatggttgtggaatacttggatccaagggagagcttatggtcaaagacggtgaaggagaaccaatattattcatctctaaaaagggaggaattgtccaggcgctaagcacaaggaacaaatggaatggatactccatggattaccaagggaaaaacaagttggtttttagcctaactgatccgaaattatgcacagcacaaggtgctccaattagaattcatattgaacctaagaggcactgcaaaaattgggatttcgaaattggtggatcttttgcagatagagactgtacaatagttgattgcaccagaaaaatagtagcccagatgggcacgaaagagccaataggaggcaaggacttctaccatgtggaagtgcagtcaggatatgaccaagctttcatcattggggtgatggcaattcttgacaacatacatggagaatccactagatgctgataacatgaattagagaatttgctcttgtttataagagtagactaatgttcaatagcacttatcttgcaacatactttcatcttcaagtaagaaacagacacatgctggcaccatcataatgattgtatgactatgacccgcattgaataatatccacaggccagctgataatatgagcctaactttcactgccacttaactatatctctttaataaacatagagatgtgactaattgactaaatgtacagcagcatagagcatccctattccaatgttacaaacctggtgcttcatataattctatacacaagaattgtgattttcatgaattgtgaacaaagtaactaaatgtgtacattgtaccacagccatcagaaatctggaacgatttggccatggatcgtgggtgtctaaaaagtccaacgaagtgatatctcttaagcagagaaaacaaagaaaggatgggaaatgtcttgacttagtaattgaaattatgaagaatgctactgccttaaattggacttcactcgaacaacttaaaattaattttaattctgaggccaacttaaaacctcccaaaaagacaaaaagtgtgatattggaggtccagtagacaaacaaatgtgcaactttcatgaag

SEQ ID NO: 25043 - DNA, 1396 bp, Zea Mays
accagacagatgatgctttataaaagttagaaaaaattatattaagccagaacagtttttctgcaattactttatgcagggctttcgtccaattgcaagaaaaaggttcttgcagtgactttccattgcagactcttgaaccacaccaacctactgaactctcctcgttgcttcttagcttgggagactgtcttgtttgaaacaatcatccattgctccaatataagtactcacctgctggccacagaacttgctcgaggcaaggcagacaaacagaaacaggggttcagatacaaatggttgtggaatacttggatccaagggagagcttatggtcaaagacggtgaaggagaaccaatattattcatctctaaaaagggaggaattgtccaggcgctaagcacaaggaacaaatggaatggatactccatggattaccaagggaaaaacaagttggtttttagcctaactgatccgaaattatgcacagcacaaggtgctccaattagaattcatattgaacctaagaggcactgcaaaaattgggatttcgaaattggtggatcttttgcagatagagactgtacaatagttgattgcaccagaaaaatagtagcccagatgggcacgaaagagccaataggaggcaaggacttctaccatgtggaagtgcagtcaggatatgaccaagctttcatcattggggtgatggcaattcttgacaacatacatggagaatccactagatgctgataacatgaattagagaatttgctcttgtttataagagtagactaatgttcaatagcacttatcttgcaacatactttcatcttcaagtaagaaacagacacatgctggcaccatcataatgattgtatgactatgacccgcattgaataatatccacaggccagctgataatatgagcctaactttcactgccacttaactatatctctttaataaacatagagatgtgactaattgactaaatgtacagcagcatagagcatccctattccaatgttacaaacctggtgcttcatataattctatacacaagaattgtgattttcatgaattgtgaacaaagtaactaaatgtgtacattgtaccacagccatcagaaatctggaacgatttggccatggatcgtgggtgtctaaaaagtccaacgaagtgatatctcttaagcagagaaaacaaagaaaggatgggaaatgtcttgacttagtaattgaaattatgaagaatgctactgccttaaattggacttcactcgaacaacttaaaattaattttaattctgaggccaacttaaaacctcccaaaaagacaaaaagtgtgatattggaggtccagtagacaaacaaatgtgcaactttcatgaag

SEQ ID NO: 25044 - DNA, 1122 bp, Zea Mays
gccaagtctccatccattgctgatggttgtggaatacttggatccaagggagagcttatggtcaaagacggtgaaggagaaccaatattattcatctctaaaaagggaggaattgtccaggcgctaagcacaaggaacaaatggaatggatactccatggattaccaagggaaaaacaagttggtttttagcctaactgatccgaaattatgcacagcacaaggtgctccaattagaattcatattgaacctaagaggcactgcaaaaattgggatttcgaaattggtggatcttttgcagatagagactgtacaatagttgattgcaccagaaaaatagtagcccagatgggcacgaaagagccaataggaggcaaggacttctaccatgtggaagtgcagtcaggatatgaccaagctttcatcattggggtgatggcaattcttgacaacatacatggagaatccactagatgctgataacatgaattagagaatttgctcttgtttataagagtagactaatgttcaatagcacttatcttgcaacatactttcatcttcaagtaagaaacagacacatgctggcaccatcataatgattgtatgactatgacccgcattgaataatatccacaggccagctgataatatgagcctaactttcactgccacttaactatatctctttaataaacatagagatgtgactaattgactaaatgtacagcagcatagagcatccctattccaatgttacaaacctggtgcttcatataattctatacacaagaattgtgattttcatgaattgtgaacaaagtaactaaatgtgtacattgtaccacagccatcagaaatctggaacgatttggccatggatcgtgggtgtctaaaaagtccaacgaagtgatatctcttaagcagagaaaacaaagaaaggatgggaaatgtcttgacttagtaattgaaattatgaagaatgctactgccttaaattggacttcactcgaacaacttaaaattaattttaattctgaggccaacttaaaacctcccaaaaagacaaaaagtgtgatattggaggtccagtagacaaacaaatgtgcaactttcatgaag

SEQ ID NO: 25045 - DNA, 764 bp, Zea Mays
agaggttcgtctctatcaagggagtaccaaacccttttatctgcttcgtcccctcccctgtgcgtgggggtataaagcaccgggctctgcttccgtcacgcgagacggcgagagcacaacattagcagcggttgtaccttgggggccgctaaagcagcttggtccaagctgtctgtagaacttaagcaactccgatcccagccacgggacacggcagattgaagccatcagctccggtttctggcgccggatttgggatccgcgcgatgtcttggtccgcgcccgacgacatcctcctctccacctcactcgcgggcttcctggacagctgagaaggcggagcgggaagcaagggatctgaaaggcacgatgaggaaacggatggagttcctagacttcgactgataataaacccgttcccgtggtggttgctgctcccctcccattgcggccgcggagtttttagtggcggcctgtgccatacctgatgactagcagtgatgttttctacgtacttttgatgccacatcagatcctttgagcgcctcctgatacggctgtcacttctctctgattattactactgcctggggagatgccatgtgctctcctccgtcgtcgtttgcaacagtgcattcgccctatctcgtgatttatttatttatttatttatataactggtattactgtactacacctgactggattggatctgctgggggccggaggccggagcccggagctagctcatcgatcaacctgcc

SEQ ID NO: 25046 - DNA, 1161 bp, Zea Mays
aaaagtatttgaaacgagtatcttttttctatgtttgctcctgggcccaccggtcagaggttcgtctctatcaagggagtaccaaacccttttatctgcttcgtcccctcccctgtgcgtgggggtataaagcaccgggctctgcttccgtcacgcgagacggcgagagcacaacattagcagcggttgtaccttgggggccgctaaagcagcttggtccaagctgtctgtagaacttaagcaactccgatcccagccacgggacacggcagattgaagccatcagctccggtttctggcgccggatttgggatccgcgcgatgtcttggtccgcgcccgacgacatcctcctctccacctcactcgcgggcttcctggacaagaaacttattgtcctgctaagagatggacggaaacttcttggcaccctctgctcatttgatcagtttgcaaatgttgttcttcagggtgcttgtgaacgagtaattgtaggggaacaatattgtgatgttcctcttggtctgtatgtgatccggggagagaacgttgttttaatcggagaattggatcacgaaaaggatgaactccccgctcacatgacatgtgttttagaagcagaaattagaaagattgttcatgaacaaccctgtgttttcccgaagataattctaactgtggctctaaaaagtttgttgtcttgctcctttactgggtgtttcactggctgagaaggcggagcgggaagcaagggatctgaaaggcacgatgaggaaacggatggagttcctagacttcgactgataataaacccgttcccgtggtggttgctgctcccctcccattgcggccgcggagtttttagtggcggcctgtgccatacctgatgactagcagtgatgttttctacgtacttttgatgccacatcagatcctttgagcgcctcctgatacggctgtcacttctctctgattattactactgcctggggagatgccatgtgctctcctccgtcgtcgtttgcaacagtgcattcgccctatctcgtgatttatttatttatttatttatataactggtattactgtactacacctgactggattggatctgctgggggccggaggccggagcccggagctagctcatcgatcaacctgcc

SEQ ID NO: 25047 - DNA, 2171 bp, Zea Mays
aaatgaaaattttatttgccttgcatggagtcagaaaagggaggatgttgtaggtctgaaagctcccaaaaaggagaagcgagtgaagaaagaaaatagaacacaacctcctgtagaagcaccatatgttgcaccaaaaacgaagatatctatcaaacctgtaccagataaaactgttgagatttttgacgggatgactttgcttgacctttctaaacgaactggtgcgtatattagtacacttcaaggcatacttgcagatcttggtgaaaaggttgaatctgagtttgactctatcagcattgatcttgctgagttggttgctatggaacttggcgttaatagcagaagaatgcacactggtgaaggcaagaatgagccacgccctgctgttgtgacggtaatgggacatgttgaccatggtaaaacatcacttttggatgctctccgtcaaacatctgttgctgccaaggaagctggtggtatcactcagcatataggtgccttcgttgttgagatgtcgtcaggagcatctataacattccttgatactccaggacatgctgcatttagtgccatgcgggctaggggcgctgctgttacggatattgtagtccttgtggttgcagcagatgatggtattatgcctcagacactagaagctatgtctcatgcaaaagcagcaaatgttcctattgtagttgcaataaacaaatgtgacaaatctggagctgatcctgagagggtcagaattcaacttggttcagaaggtttacttttggaggatatgggtggggatgtgcaggttgttgaaatctctgcagttacaaaaactggtttggataaattggaagaggctttgctccttcaagctgagatgatggacctgaaagccagaatagatggccctgctcaggcttttgtggtggaggcaagggtggacaggggcaggggtccactcgcaacagctatagtcaagtatggcacattagttagtgggcaacacattgttgtgggagcagagtggggaagaattaggtctcttagagacacagcagggaatataacgcagtctgcaaaacctgcaatgcctattgaaattgaggggttaaagggccttccaatggctggggatgacgttgtagttgttgactcagaggagagggcaagaatgctaagtcatgggcggaagaagaagcaggagaaagacaggcttcgaaaaattgatgaggggatggcagaggagctagaaattaaagaagagactcctgaaagagttgaaatgaccattattgtcaaagccgatgtacaaggcagtgttcaagctgtcacagatgctttaagaagtcttaatagcgcacaggtgttcgtgaatgttgttcatgtaggtgttggcccaatcagtcagcatgacattgatctggcacaagcgtgtggagcatatatagttggtttcaacattcgcagtccacctagtcctatcactcaagcagcagcaagagccaacataaaggttttgcttcacaaggtcatctatcaccttcttgaggagatgggaaaggccattgtggagaaggcaccgggaactgctgaaacccaggtttcaggagaggctgaggttctgaacatatttgagctgaaagggcgcagcaagtcaaaaggaccggatgtcaaaattgctggctgccgtataactgatggccacttcagcaaatccggaaccatgagactgttgaggagcggagatgttgtctttgagggtccatgcgagtctctgaagcgggagaagaaggacgcagaaacagtcgaaaagggtaacgactgtgggctggtgattcaggattgcgatgatttccaggtaggggatatcatacagtgcgtggagcaggtgattaggaagcccaagttcatctcgacgcagagtggttcggttcggattgaatgctgaaatgtagtaatggttgtggctgacactactgttccatttccctattaattcagctagttgtgctttactgaccaaaggtttcgagtgtaacaagattttgttggctagcaacttgttgcaactgcaaccaaacccctttctgatatgagataattaggacaaaacaacagagttaagttgcttttttttggggtcatgttaaacaatgtatgcagtattgctc

SEQ ID NO: 25048 - DNA, 2432 bp, Zea Mays
tctgtgtccagggctccagcgcgctctcctcgtccctgttcttccctagccgccgcaggctgcagagcccccggcgagctgccgcccctgccacatatactcagcctccgtccctcgccggtcccaataccctgtcgtccccagacgaagccgacgagcgtgaccctcgcttgcctgaatctgacgcctccgggctcgggctatagttcaatcggtgccggcggggcaagaggaatggcgtggcggatgatgcgaaggaaggattttcacacgggccttgtgactttggcgttccgaaaggatcttgggttcaaaaagtttttctccagtggaaaaatcggaaatctgtcccaggtctacggcagtgataagcccaaatactctgctaattgcatgccctctaaccatttcactatcagaaaagggaggatgttgtaggtctgaaagctcccaaaaaggagaagcgagtgaagaaagaaaatagaacacaacctcctgtagaagcaccatatgttgcaccaaaaacgaagatatctatcaaacctgtaccagataaaactgttgagatttttgacgggatgactttgcttgacctttctaaacgaactgaagaatgcacactggtgaaggcaagaatgagccacgccctgctgttgtgacggtaatgggacatgttgaccatggtaaaacatcacttttggatgctctccgtcaaacatctgttgctgccaaggaagctggtggtatcactcagcatataggtgccttcgttgttgagatgtcgtcaggagcatctataacattccttgatactccaggacatgctgcatttagtgccatgcgggctaggggcgctgctgttacggatattgtagtccttgtggttgcagcagatgatggtattatgcctcagacactagaagctatgtctcatgcaaaagcagcaaatgttcctattgtagttgcaataaacaaatgtgacaaatctggagctgatcctgagagggtcagaattcaacttggttcagaaggtttacttttggaggatatgggtggggatgtgcaggttgttgaaatctctgcagttacaaaaactggtttggataaattggaagaggctttgctccttcaagctgagatgatggacctgaaagccagaatagatggccctgctcaggcttttgtggtggaggcaagggtggacaggggcaggggtccactcgcaacagctatagtcaagtatggcacattagttagtgggcaacacattgttgtgggagcagagtggggaagaattaggtctcttagagacacagcagggaatataacgcagtctgcaaaacctgcaatgcctattgaaattgaggggttaaagggccttccaatggctggggatgacgttgtagttgttgactcagaggagagggcaagaatgctaagtcatgggcggaagaagaagcaggagaaagacaggcttcgaaaaattgatgaggggatggcagaggagctagaaattaaagaagagactcctgaaagagttgaaatgaccattattgtcaaagccgatgtacaaggcagtgttcaagctgtcacagatgctttaagaagtcttaatagcgcacaggtgttcgtgaatgttgttcatgtaggtgttggcccaatcagtcagcatgacattgatctggcacaagcgtgtggagcatatatagttggtttcaacattcgcagtccacctagtcctatcactcaagcagcagcaagagccaacataaaggttttgcttcacaaggtcatctatcaccttcttgaggagatgggaaaggccattgtggagaaggcaccgggaactgctgaaacccaggtttcaggagaggctgaggttctgaacatatttgagctgaaagggcgcagcaagtcaaaaggaccggatgtcaaaattgctggctgccgtataactgatggccacttcagcaaatccggaaccatgagactgttgaggagcggagatgttgtctttgagggtccatgcgagtctctgaagcgggagaagaaggacgcagaaacagtcgaaaagggtaacgactgtgggctggtgattcaggattgcgatgatttccaggtaggggatatcatacagtgcgtggagcaggtgattaggaagcccaagttcatctcgacgcagagtggttcggttcggattgaatgctgaaatgtagtaatggttgtggctgacactactgttccatttccctattaattcagctagttgtgctttactgaccaaaggtttcgagtgtaacaagattttgttggctagcaacttgttgcaactgcaaccaaacccctttctgatatgagataattaggacaaaacaacagagttaagttgcttttttttggggtcatgttaaacaatgtatgcagtattgctc

SEQ ID NO: 25049 - DNA, 2493 bp, Zea Mays
ttctgtgtccagggctccagcgcgctctcctcgtccctgttcttccctagccgccgcaggctgcagagcccccggcgagctgccgcccctgccacatatactcagcctccgtccctcgccggtcccaataccctgtcgtccccagacgaagccgacgagcgtgaccctcgcttgcctgaatctgacgcctccgggctcgggctatagttcaatcggtgccggcggggcaagaggaatggcgtggcggatgatgcgaaggaaggattttcacacgggccttgtgactttggcgttccgaaaggatcttgggttcaaaaagtttttctccagtggaaaaatcggaaatctgtcccaggtctacggcagtgataagcccaaatactctgctaattgcatgccctctaaccatttcactatcaggaattttaatgcaggtgtttatttgttagcatggagtcagaaaagggaggatgttgtaggtctgaaagctcccaaaaaggagaagcgagtgaagaaagaaaatagaacacaacctcctgtagaagcaccatatgttgcaccaaaaacgaagatatctatcaaacctgtaccagataaaactgttgagatttttgacgggatgactttgcttgacctttctaaacgaactggaacttggcgttaatagcagaagaatgcacactggtgaaggcaagaatgagccacgccctgctgttgtgacggtaatgggacatgttgaccatggtaaaacatcacttttggatgctctccgtcaaacatctgttgctgccaaggaagctggtggtatcactcagcatataggtgccttcgttgttgagatgtcgtcaggagcatctataacattccttgatactccaggacatgctgcatttagtgccatgcgggctaggggcgctgctgttacggatattgtagtccttgtggttgcagcagatgatggtattatgcctcagacactagaagctatgtctcatgcaaaagcagcaaatgttcctattgtagttgcaataaacaaatgtgacaaatctggagctgatcctgagagggtcagaattcaacttggttcagaaggtttacttttggaggatatgggtggggatgtgcaggttgttgaaatctctgcagttacaaaaactggtttggataaattggaagaggctttgctccttcaagctgagatgatggacctgaaagccagaatagatggccctgctcaggcttttgtggtggaggcaagggtggacaggggcaggggtccactcgcaacagctatagtcaagtatggcacattagttagtgggcaacacattgttgtgggagcagagtggggaagaattaggtctcttagagacacagcagggaatataacgcagtctgcaaaacctgcaatgcctattgaaattgaggggttaaagggccttccaatggctggggatgacgttgtagttgttgactcagaggagagggcaagaatgctaagtcatgggcggaagaagaagcaggagaaagacaggcttcgaaaaattgatgaggggatggcagaggagctagaaattaaagaagagactcctgaaagagttgaaatgaccattattgtcaaagccgatgtacaaggcagtgttcaagctgtcacagatgctttaagaagtcttaatagcgcacaggtgttcgtgaatgttgttcatgtaggtgttggcccaatcagtcagcatgacattgatctggcacaagcgtgtggagcatatatagttggtttcaacattcgcagtccacctagtcctatcactcaagcagcagcaagagccaacataaaggttttgcttcacaaggtcatctatcaccttcttgaggagatgggaaaggccattgtggagaaggcaccgggaactgctgaaacccaggtttcaggagaggctgaggttctgaacatatttgagctgaaagggcgcagcaagtcaaaaggaccggatgtcaaaattgctggctgccgtataactgatggccacttcagcaaatccggaaccatgagactgttgaggagcggagatgttgtctttgagggtccatgcgagtctctgaagcgggagaagaaggacgcagaaacagtcgaaaagggtaacgactgtgggctggtgattcaggattgcgatgatttccaggtaggggatatcatacagtgcgtggagcaggtgattaggaagcccaagttcatctcgacgcagagtggttcggttcggattgaatgctgaaatgtagtaatggttgtggctgacactactgttccatttccctattaattcagctagttgtgctttactgaccaaaggtttcgagtgtaacaagattttgttggctagcaacttgttgcaactgcaaccaaacccctttctgatatgagataattaggacaaaacaacagagttaagttgcttttttttggggtcatgttaaacaatgtatgcagtattgctc

SEQ ID NO: 25050 - DNA, 2592 bp, Zea Mays
gtttttttttctgtgtccagggctccagcgcgctctcctcgtccctgttcttccctagccgccgcaggctgcagagcccccggcgagctgccgcccctgccacatatactcagcctccgtccctcgccggtcccaataccctgtcgtccccagacgaagccgacgagcgtgaccctcgcttgcctgaatctgacgcctccgggctcgggctatagttcaatcggtgccggcggggcaagaggaatggcgtggcggatgatgcgaaggaaggattttcacacgggccttgtgactttggcgttccgaaaggatcttgggttcaaaaagtttttctccagtggaaaaatcggaaatctgtcccaggtctacggcagtgataagcccaaatactctgctaattgcatgccctctaaccatttcactatcagggtgtttatttgttagcatggagtcagaaaagggaggatgttgtaggtctgaaagctcccaaaaaggagaagcgagtgaagaaagaaaatagaacacaacctcctgtagaagcaccatatgttgcaccaaaaacgaagatatctatcaaacctgtaccagataaaactgttgagatttttgacgggatgactttgcttgacctttctaaacgaactggtgcgtatattagtacacttcaaggcatacttgcagatcttggtgaaaaggttgaatctgagtttgactctatcagcattgatcttgctgagttggttgctatggaacttggcgttaatagcagaagaatgcacactggtgaaggcaagaatgagccacgccctgctgttgtgacggtaatgggacatgttgaccatggtaaaacatcacttttggatgctctccgtcaaacatctgttgctgccaaggaagctggtggtatcactcagcatataggtgccttcgttgttgagatgtcgtcaggagcatctataacattccttgatactccaggacatgctgcatttagtgccatgcgggctaggggcgctgctgttacggatattgtagtccttgtggttgcagcagatgatggtattatgcctcagacactagaagctatgtctcatgcaaaagcagcaaatgttcctattgtagttgcaataaacaaatgtgacaaatctggagctgatcctgagagggtcagaattcaacttggttcagaaggtttacttttggaggatatgggtggggatgtgcaggttgttgaaatctctgcagttacaaaaactggtttggataaattggaagaggctttgctccttcaagctgagatgatggacctgaaagccagaatagatggccctgctcaggcttttgtggtggaggcaagggtggacaggggcaggggtccactcgcaacagctatagtcaagtatggcacattagttagtgggcaacacattgttgtgggagcagagtggggaagaattaggtctcttagagacacagcagggaatataacgcagtctgcaaaacctgcaatgcctattgaaattgaggggttaaagggccttccaatggctggggatgacgttgtagttgttgactcagaggagagggcaagaatgctaagtcatgggcggaagaagaagcaggagaaagacaggcttcgaaaaattgatgaggggatggcagaggagctagaaattaaagaagagactcctgaaagagttgaaatgaccattattgtcaaagccgatgtacaaggcagtgttcaagctgtcacagatgctttaagaagtcttaatagcgcacaggtgttcgtgaatgttgttcatgtaggtgttggcccaatcagtcagcatgacattgatctggcacaagcgtgtggagcatatatagttggtttcaacattcgcagtccacctagtcctatcactcaagcagcagcaagagccaacataaaggttttgcttcacaaggtcatctatcaccttcttgaggagatgggaaaggccattgtggagaaggcaccgggaactgctgaaacccaggtttcaggagaggctgaggttctgaacatatttgagctgaaagggcgcagcaagtcaaaaggaccggatgtcaaaattgctggctgccgtataactgatggccacttcagcaaatccggaaccatgagactgttgaggagcggagatgttgtctttgagggtccatgcgagtctctgaagcgggagaagaaggacgcagaaacagtcgaaaagggtaacgactgtgggctggtgattcaggattgcgatgatttccaggtaggggatatcatacagtgcgtggagcaggtgattaggaagcccaagttcatctcgacgcagagtggttcggttcggattgaatgctgaaatgtagtaatggttgtggctgacactactgttccatttccctattaattcagctagttgtgctttactgaccaaaggtttcgagtgtaacaagattttgttggctagcaacttgttgcaactgcaaccaaacccctttctgatatgagataattaggacaaaacaacagagttaagttgcttttttttggggtcatgttaaacaatgtatgcagtattgctc

SEQ ID NO: 25051 - DNA, 2589 bp, Zea Mays
cctgaacctgatcgtttttttttctgtgtccagggctccagcgcgctctcctcgtccctgttcttccctagccgccgcaggctgcagagcccccggcgagctgccgcccctgccacatatactcagcctccgtccctcgccggtcccaataccctgtcgtccccagacgaagccgacgagcgtgaccctcgcttgcctgaatctgacgcctccgggctcgggctatagttcaatcggtgccggcggggcaagaggaatggcgtggcggatgatgcgaaggaaggattttcacacgggccttgtgactttggcgttccgaaaggatcttgggttcaaaaagtttttctccagtggaaaaatcggaaatctgtcccaggtctacggcagtgataagcccaaatactctgctaattgcatgccctctaaccatttcactatcagcatggagtcagaaaagggaggatgttgtaggtctgaaagctcccaaaaaggagaagcgagtgaagaaagaaaatagaacacaacctcctgtagaagcaccatatgttgcaccaaaaacgaagatatctatcaaacctgtaccagataaaactgttgagatttttgacgggatgactttgcttgacctttctaaacgaactggtgcgtatattagtacacttcaaggcatacttgcagatcttggtgaaaaggttgaatctgagtttgactctatcagcattgatcttgctgagttggttgctatggaacttggcgttaatagcagaagaatgcacactggtgaaggcaagaatgagccacgccctgctgttgtgacggtaatgggacatgttgaccatggtaaaacatcacttttggatgctctccgtcaaacatctgttgctgccaaggaagctggtggtatcactcagcatataggtgccttcgttgttgagatgtcgtcaggagcatctataacattccttgatactccaggacatgctgcatttagtgccatgcgggctaggggcgctgctgttacggatattgtagtccttgtggttgcagcagatgatggtattatgcctcagacactagaagctatgtctcatgcaaaagcagcaaatgttcctattgtagttgcaataaacaaatgtgacaaatctggagctgatcctgagagggtcagaattcaacttggttcagaaggtttacttttggaggatatgggtggggatgtgcaggttgttgaaatctctgcagttacaaaaactggtttggataaattggaagaggctttgctccttcaagctgagatgatggacctgaaagccagaatagatggccctgctcaggcttttgtggtggaggcaagggtggacaggggcaggggtccactcgcaacagctatagtcaagtatggcacattagttagtgggcaacacattgttgtgggagcagagtggggaagaattaggtctcttagagacacagcagggaatataacgcagtctgcaaaacctgcaatgcctattgaaattgaggggttaaagggccttccaatggctggggatgacgttgtagttgttgactcagaggagagggcaagaatgctaagtcatgggcggaagaagaagcaggagaaagacaggcttcgaaaaattgatgaggggatggcagaggagctagaaattaaagaagagactcctgaaagagttgaaatgaccattattgtcaaagccgatgtacaaggcagtgttcaagctgtcacagatgctttaagaagtcttaatagcgcacaggtgttcgtgaatgttgttcatgtaggtgttggcccaatcagtcagcatgacattgatctggcacaagcgtgtggagcatatatagttggtttcaacattcgcagtccacctagtcctatcactcaagcagcagcaagagccaacataaaggttttgcttcacaaggtcatctatcaccttcttgaggagatgggaaaggccattgtggagaaggcaccgggaactgctgaaacccaggtttcaggagaggctgaggttctgaacatatttgagctgaaagggcgcagcaagtcaaaaggaccggatgtcaaaattgctggctgccgtataactgatggccacttcagcaaatccggaaccatgagactgttgaggagcggagatgttgtctttgagggtccatgcgagtctctgaagcgggagaagaaggacgcagaaacagtcgaaaagggtaacgactgtgggctggtgattcaggattgcgatgatttccaggtaggggatatcatacagtgcgtggagcaggtgattaggaagcccaagttcatctcgacgcagagtggttcggttcggattgaatgctgaaatgtagtaatggttgtggctgacactactgttccatttccctattaattcagctagttgtgctttactgaccaaaggtttcgagtgtaacaagattttgttggctagcaacttgttgcaactgcaaccaaacccctttctgatatgagataattaggacaaaacaacagagttaagttgcttttttttggggtcatgttaaacaatgtatgcagtattgctc

SEQ ID NO: 25052 - DNA, 2658 bp, Zea Mays
cctagctctaaaagataaaaactgggtttctttggaagaggccctatgtggttgcctgaacctgatcgtttttttttctgtgtccagggctccagcgcgctctcctcgtccctgttcttccctagccgccgcaggctgcagagcccccggcgagctgccgcccctgccacatatactcagcctccgtccctcgccggtcccaataccctgtcgtccccagacgaagccgacgagcgtgaccctcgcttgcctgaatctgacgcctccgggctcgggctatagttcaatcggtgccggcggggcaagaggaatggcgtggcggatgatgcgaaggaaggattttcacacgggccttgtgactttggcgttccgaaaggatcttgggttcaaaaagtttttctccagtggaaaaatcggaaatctgtcccaggtctacggcagtgataagcccaaatactctgctaattgcatgccctctaaccatttcactatcaggtgtttatttgttagcatggagtcagaaaagggaggatgttgtaggtctgaaagctcccaaaaaggagaagcgagtgaagaaagaaaatagaacacaacctcctgtagaagcaccatatgttgcaccaaaaacgaagatatctatcaaacctgtaccagataaaactgttgagatttttgacgggatgactttgcttgacctttctaaacgaactggtgcgtatattagtacacttcaaggcatacttgcagatcttggtgaaaaggttgaatctgagtttgactctatcagcattgatcttgctgagttggttgctatggaacttggcgttaatagcagaagaatgcacactggtgaaggcaagaatgagccacgccctgctgttgtgacggtaatgggacatgttgaccatggtaaaacatcacttttggatgctctccgtcaaacatctgttgctgccaaggaagctggtggtatcactcagcatataggtgccttcgttgttgagatgtcgtcaggagcatctataacattccttgatactccaggacatgctgcatttagtgccatgcgggctaggggcgctgctgttacggatattgtagtccttgtggttgcagcagatgatggtattatgcctcagacactagaagctatgtctcatgcaaaagcagcaaatgttcctattgtagttgcaataaacaaatgtgacaaatctggagctgatcctgagagggtcagaattcaacttggttcagaaggtttacttttggaggatatgggtggggatgtgcaggttgttgaaatctctgcagttacaaaaactggtttggataaattggaagaggctttgctccttcaagctgagatgatggacctgaaagccagaatagatggccctgctcaggcttttgtggtggaggcaagggtggacaggggcaggggtccactcgcaacagctatagtcaagtatggcacattagttagtgggcaacacattgttgtgggagcagagtggggaagaattaggtctcttagagacacagcagggaatataacgcagtctgcaaaacctgcaatgcctattgaaattgaggggttaaagggccttccaatggctggggatgacgttgtagttgttgactcagaggagagggcaagaatgctaagtcatgggcggaagaagaagcaggagaaagacaggcttcgaaaaattgatgaggggatggcagaggagctagaaattaaagaagagactcctgaaagagttgaaatgaccattattgtcaaagccgatgtacaaggcagtgttcaagctgtcacagatgctttaagaagtcttaatagcgcacaggtgttcgtgaatgttgttcatgtaggtgttggcccaatcagtcagcatgacattgatctggcacaagcgtgtggagcatatatagttggtttcaacattcgcagtccacctagtcctatcactcaagcagcagcaagagccaacataaaggttttgcttcacaaggtcatctatcaccttcttgaggagatgggaaaggccattgtggagaaggcaccgggaactgctgaaacccaggtttcaggagaggctgaggttctgaacatatttgagctgaaagggcgcagcaagtcaaaaggaccggatgtcaaaattgctggctgccgtataactgatggccacttcagcaaatccggaaccatgagactgttgaggagcggagatgttgtctttgagggtccatgcgagtctctgaagcgggagaagaaggacgcagaaacagtcgaaaagggtaacgactgtgggctggtgattcaggattgcgatgatttccaggtaggggatatcatacagtgcgtggagcaggtgattaggaagcccaagttcatctcgacgcagagtggttcggttcggattgaatgctgaaatgtagtaatggttgtggctgacactactgttccatttccctattaattcagctagttgtgctttactgaccaaaggtttcgagtgtaacaagattttgttggctagcaacttgttgcaactgcaaccaaacccctttctgatatgagataattaggacaaaacaacagagttaagttgcttttttttggggtcatgttaaacaatgtatgcagtattgctc

SEQ ID NO: 25053 - DNA, 1999 bp, Zea Mays
ctgatcgtttttttttctgtgtccagggctccagcgcgctctcctcgtccctgttcttccctagccgccgcaggctgcagagcccccggcgagctgccgcccctgccacatatactcagcctccgtccctcgccggtcccaataccctgtcgtccccagacgaagccgacgagcgtgaccctcgcttgcctgaatctgacgcctccgggctcgggctatagttcaatcggtgccggcggggcaagaggaatggcgtggcggatgatgcgaaggaaggattttcacacgggccttgtgactttggcgttccgaaaggatcttgggttcaaaaagtttttctccagtggaaaaatcggaaatctgtcccaggtctacggcagtgataagcccaaatactctgctaattgcatgccctctaaccatttcactatcaggtgtttatttgttagcatggagtcagaaaagggaggatgttgtaggtctgaaagctcccaaaaaggagaagcgagtgaagaaagaaaatagaacacaacctcctgtagaagcaccatatgttgcaccaaaaacgaagatatctatcaaacctgtaccagataaaactgttgagatttttgacgggatgactttgcttgacctttctaaacgaactggtgcgtatattagtacacttcaaggcatacttgcagatcttggtgaaaaggttgaatctgagtttgactctatcagcattgatcttgctgagttggttgctatggaacttggcgttaatagcagaagaatgcacactggtgaaggcaagaatgagccacgccctgctgttgtgacggtaatgggacatgttgaccatggtaaaacatcacttttggatgctctccgtcaaacatctgttgctgccaaggaagctggtggtatcactcagcatataggtgccttcgttgttgagatgtcgtcaggagcatctataacattccttgatactccaggacatgctgcatttagtgccatgcgggctaggggcgctgctgttacggatattgtagtccttgtggttgcagcagatgatggtattatgcctcagacactagaagctatgtctcatgcaaaagcagcaaatgttcctattgtagttgcaataaacaaatgtgacaaatctggagctgatcctgagagggtcagaattcaacttggttcagaaggtttacttttggaggatatgggtggggatgtgcaggttgttgaaatctctgcagttacaaaaactggtttggataaattggaagaggctttgctccttcaagctgagatgatggacctgaaagccagaatagatggccctgctcaggcttttgtggtggaggcaagggtggacaggggcaggggtccactcgcaacagctatagtcaagtatggcacattagttagtgggcaacacattgttgtgggagcagagtggggaagaattaggtctcttagagacacagcagggaatataacgcagtctgcaaaacctgcaatgcctattgaaattgaggggttaaagggccttccaatggctggggatgacgttgtagttgttgactcagaggagagggcaagaatgctaagtcatgggcggaagaagaagcaggagaaagacaggcttcgaaaaattgatgaggggatggcagaggagctagaaattaaagaagagactcctgaaagagttgaaatgaccattattgtcaaagccgatgtacaaggcagtgttcaagctgtcacagatgctttaagaagtcttaatagcgcacaggtgttcgtgaatgttgttcatgtaggtgttggcccaatcagtcagcatgacattgatctggcacaagcgtgtggagcatatatagttggtttcaacattcgcagtccacctagtcctatcactcaagcagcagcaagagccaacataaagatgttatggaatcctttgggaagatgatattaagaattttctctgactcgggggaatgag

SEQ ID NO: 25054 - DNA, 723 bp, Zea Mays
ccgtgaggtctgtctttttccttgatgatgaagggtgtaaccgtctcggtctggatatgatttcgacaggcatgttctaccaagggaacactttatataatcattcataagggatctggagatggtctactggcctatctgtgctgccgcttggcaaccgagcagaaggaacttcagggcttgcttagatacgaagataccagggaagaccagtttctgccaacagcagcggcaccttcttcctcacgccaacgccggccagtttccggcaacagcagcggcacctcaggtttgagggctccatggccatgggaagggatcctcgctgctgccatgggagaagagaagagagggatggctccacagcagcgcaccaaggagagcccgagcagaggagagatggcgtgggggaagagaagggagagggcaggggctgccatttatagggccaagctttggacatgtcagactgcaccaacaggtggcaggtgctgcagtgacgaccttggacgacgtgtttcggcatttttcgcttggaatcggatcttggttgctgcacaaaatatcttccttgatctatactctacaattattgtaaaggacttagagagttatagatccacaaaaattggtttgtcactgggttagaaaacagtggaaacttgtgaaaacggaatgtcaaagcatgtcaaacggaatcggatgaatgcgatcttttaatat

SEQ ID NO: 25055 - DNA, 3148 bp, Zea Mays
atggaggcaatcctcatggaaagccacatttttagcactgagtaccagtacattaccaacaactgctcaatttattttttagtaggtgaggtgatctctgaagaaaattctctggaatttggcactgataagatagaaatgcatgttggggctgtacaggccaacgatcgagctcttgtagtcgatgatcttattgccaccagtgcgcagctgtcaaacttatcggtgagctcattttgtgctatatttttttactatgttgtaggctaccagagttatctaattgattttttctgaagttgtgtatttttaaattcgtggtgacaattctcttctcacaactgtagctttcagtaaacattgcactgaactgaatcttctttttgtttcaatatttattctgatattaaaaagcccgtcctgcccccacctcatttatttagcaagctctgctgctgtatatgcctttcaaggaattgtaatttctggcaatctaagtatcatttgacatctctttgctgtggtttgttgtatgaaggggaatcgtatccgccagtgtgcaatgttaaatagctatcacgtgattgagctctcttggaattgattattatcccatatttaagataatggttagttattcttcagaaaatgagacctctatatgcacaaatagatgtttctattcaaaacaggtcatgttagactcataaagagtgtcacaacaaatgttcctactaatgcatataaaagaaaaaccgtcccacattcccttatcttatgcataaaaactgtaataggaccgtctgaaaatgtttatgtactcatgcattgcgtgtaaaaaaactctaggttctctttttttgcatttaggtggtaatgcagatgaattggtaaaccgacgtttttaaagtcaaacctgagaacctggtatgtggtaggagatataatgtcgttatttttcatgcgtgtgtgaggacatgcttccactggcataaataaagcattatgggtagacatggggactgtttaatttaatccactgcccaggtcacctaaaattagctctttttctattatggtatgttgctgtgcaggtaatatccttgtgcagtttagtcatcatgaaaatgaaagaaaacgcctacaccacatttttgacatagtggagctatatgtttgttttactgtgtatacataaccttttgaatgctctggtttctgatgttcctatcagggctctgactattttgtgtttttttgtgattaatgtcccactcagaggtttcttccaaactgttgctagcaggcctgaagaaaaaaattttatgcgacttcattttgactctatgtatgcccatatctgcaatctaactaaaatctgaactactcttgtatacaagaggaggaagaatttgtttgacgtggtgcagatcctgccagagtggggcataggatacaaggttgccaataccacctggtgtgacgtctcctgtcagatcacgaagatcaacctatacaaggtgatctgatctgcccactttccgctcgacagatccatattgtttgaggatactcatagctaccctacaacaatttacttatactacttcaccgagctaatttctttgcttgagctctttgggatttttaaagtcaaacctgagaacctggtatgtggtaggagatataatgtcgttatttttcatgcgtgtgtgaggacatgcttccactggcataaataaagcattatgggtagacatggggactgtttaatttaatccactgcccaggtcacctaaaattagctctttttctattatggtatgttgttgtgcaggtaatatccttgtgcagtttagtcatcatgaaaatgaaagaaaacgcctacaccacatttttgacatagtggagctatatgtttgttttactgtgtatacataaccttttgaatgctctggtttctgatgttcctatcagggctctgactattttgtgtttttttgtgattaatgtcccactcagaggtttcttccaaactgttgctagcaggcctgaaggaaaaaaatttatgcgacttcattttgactctatgtatgcccatatctgcaatctaactaaaatctgaactactcttgtatacaagaggaggaagaatttgtttgacgtggtgcagatcctgccagagtggggcataggatacaaggttgccaataccacctggtgtgacgtctcctgtcagatcacgaagatcaacctatacaagttgaagtatcataatgttttgttcctcagcttctattctttaatttgtagcaaatttggggggctcacatttctagagctatttgttggtttagaataccatttgcagcacacgatctgtattttagccttaggtggtgctttggctgagattgtagagttccagaaaattgaagaggtggctgaccaccctagattaaacttcaaagaccggtacccagagccatacagagattctcatccgactgcccctgttgttgtgccatggatgtcaggatctggagatggtctactggcctatctgtgctgccgcttggcaaccgagcagaaggaacttcagggcttgcttagatacgaagataccagggaagaccagtttctgccaacagcagcggcaccttcttcctcacgccaacgccggccagtttccggcaacagcagcggcacctcaggtttgagggctccatggccatgggaagggatcctcgctgctgccatgggagaagagaagagagggatggctccacagcagcgcaccaaggagagcccgagcagaggagagatggcgtgggggaagagaagggagagggcaggggctgccatttatagggccaagctttggacatgtcagactgcaccaacaggtggcaggtgctgcagtgacgaccttggacgacgtgtttcggcatttttcgcttggaatcggatcttggttgctgcacaaaatatcttccttgatctatactctacaattattgtaaaggacttagagagttatagatccacaaaaattggtttgtcactgggttagaaaacagtggaaacttgtgaaaacggaatgtcaaagcatgtcaaacggaatcggatgaatgcgatcttttaatat

SEQ ID NO: 25056 - DNA, 2525 bp, Zea Mays
atggaggcaatcctcatggaaagccacatttttagcactgagtaccagtacattaccaacaactgctcaatttattttttagtaggtgaggtgatctctgaagaaaattctctggaatttggcactgataagatagaaatgcatgttggggctgtacaggccaacgatcgagctcttgtagtcgatgatcttattgccaccagtgcgcagctgtcaaacttatcggtgagctcattttgtgctatatttttttactatgttgtaggctaccagagttatctaattgattttttctgaagttgtgtatttttaaattcgtggtgacaattctcttctcacaactgtagctttcagtaaacattgcactgaactgaatcttctttttgtttcaatatttattctgatattaaaaagcccgtcctgcccccacctcatttatttagcaagctctgctgctgtatatgcctttcaaggaattgtaatttctggcaatctaagtatcatttgacatctctttgctgtggtttgttgtatgaaggggaatcgtatccgccagtgtgcaatgttaaatagctatcacgtgattgagctctcttggaattgattattatcccatatttaagataatggttagttattcttcagaaaatgagacctctatatgcacaaatagatgtttctattcaaaacaggtcatgttagactcataaagagtgtcacaacaaatgttcctactaatgcatataaaagaaaaaccgtcccacattcccttatcttatgcataaaaactgtaataggaccgtctgaaaatgtttatgtactcatgcattgcgtgtaaaaaaactctaggttctctttttttgcatttaggtggtaatgcagatgaattggtaaaccgacgtttttaaagtcaaacctgagaacctggtatgtggtaggagatataatgtcgttatttttcatgcgtgtgtgaggacatgcttccactggcataaataaagcattatgggtagacatggggactgtttaatttaatccactgcccaggtcacctaaaattagctctttttctattatggtatgttgctgtgcaggtaatatccttgtgcagtttagtcatcatgaaaatgaaagaaaacgcctacaccacatttttgacatagtggagctatatgtttgttttactgtgtatacataaccttttgaatgctctggtttctgatgttcctatcagggctctgactattttgtgtttttttgtgattaatgtcccactcagaggtttcttccaaactgttgctagcaggcctgaagaaaaaaattttatgcgacttcattttgactctatgtatgcccatatctgcaatctaactaaaatctgaactactcttgtatacaagaggaggaagaatttgtttgacgtggtgcagatcctgccagagtggggcataggatacaaggttgccaataccacctggtgtgacgtctcctgtcagatcacgaagatcaacctatacaagaggaggaagaatttgtttgacgtggtgcagatcctgccagagtggggcataggatacaaggttgccaataccacctggtgtgacgtctcctgtcagatcacgaagatcaacctatacaagttgaagtatcataatgttttgttcctcagcttctattctttaatttgtagcaaatttggggggctcacatttctagagctatttgttggtttagaataccatttgcagcacacgatctgtattttagccttaggtggtgctttggctgagattgtagagttccagaaaattgaagaggtggctgaccaccctagattaaacttcaaagaccggtacccagagccatacagagattctcatccgactgcccctgttgttgtgccatggatgtcaggatctggagatggtctactggcctatctgtgctgccgcttggcaaccgagcagaaggaacttcagggcttgcttagatacgaagataccagggaagaccagtttctgccaacagcagcggcaccttcttcctcacgccaacgccggccagtttccggcaacagcagcggcacctcaggtttgagggctccatggccatgggaagggatcctcgctgctgccatgggagaagagaagagagggatggctccacagcagcgcaccaaggagagcccgagcagaggagagatggcgtgggggaagagaagggagagggcaggggctgccatttatagggccaagctttggacatgtcagactgcaccaacaggtggcaggtgctgcagtgacgaccttggacgacgtgtttcggcatttttcgcttggaatcggatcttggttgctgcacaaaatatcttccttgatctatactctacaattattgtaaaggacttagagagttatagatccacaaaaattggtttgtcactgggttagaaaacagtggaaacttgtgaaaacggaatgtcaaagcatgtcaaacggaatcggatgaatgcgatcttttaatat

SEQ ID NO: 25057 - DNA, 4718 bp, Zea Mays
atggaggcaatcctcatggaaagccacatttttagcactgagtaccagtacattaccaacaactgctcaatttattttttagtaggtgaggtgatctctgaagaaaattctctggaatttggcactgataagatagaaatgcatgttggggctgtacaggccaacgatcgagctcttgtagtcgatgatcttattgccaccagtgcgcagctgtcaaacttatcggtgagctcattttgtgctatatttttttactatgttgtaggctaccagagttatctaattgattttttctgaagttgtgtatttttaaattcgtggtgacaattctcttctcacaactgtagctttcagtaaacattgcactgaactgaatcttctttttgtttcaatatttattctgatattaaaaagcccgtcctgcccccacctcatttatttagcaagctctgctgctgtatatgcctttcaaggaattgtaatttctggcaatctaagtatcatttgacatctctttgctgtggtttgttgtatgaaggggaatcgtatccgccagtgtgcaatgttaaatagctatcacgtgattgagctctcttggaattgattattatcccatatttaagataatggttagttattcttcagaaaatgagacctctatatgcacaaatagatgtttctattcaaaacaggtcatgttagactcataaagagtgtcacaacaaatgttcctactaatgcatataaaagaaaaaccgtcccacattcccttatcttatgcataaaaactgtaataggaccgtctgaaaatgtttatgtactcatgcattgcgtgtaaaaaaactctaggttctctttttttgcatttaggtggtaatgcagatgaattggtaaaccgacgtttttaaagtcaaacctgagaacctggtatgtggtaggagatataatgtcgttatttttcatgcgtgtgtgaggacatgcttccactggcataaataaagcattatgggtagacatggggactgtttaatttaatccactgcccaggtcacctaaaattagctctttttctattatggtatgttgctgtgcaggtaatatccttgtgcagtttagtcatcatgaaaatgaaagaaaacgcctacaccacatttttgacatagtggagctatatgtttgttttactgtgtatacataaccttttgaatgctctggtttctgatgttcctatcagggctctgactattttgtgtttttttgtgattaatgtcccactcagaggtttcttccaaactgttgctagcaggcctgaagaaaaaaattttatgcgacttcattttgactctatgtatgcccatatctgcaatctaactaaaatctgaactactcttgtatacaagaggaggaagaatttgtttgacgtggtgcagatcctgccagagtggggcataggatacaaggttgccaataccacctggtgtgacgtctcctgtcagatcacgaagatcaacctatacaaggtgatctgatctgcccactttccgctcgacagatccatattgtttgaggatactcatagctaccctacaacaatttacttatactacttcaccgagctaatttctttgcttgagctctttgggatttttaaagtcaaacctgagaacctggtatgtggtaggagatataatgtcgttatttttcatgcgtgtgtgaggacatgcttccactggcataaataaagcattatgggtagacatggggactgtttaatttaatccactgcccaggtcacctaaaattagctctttttctattatggtatgttgttgtgcaggtaatatccttgtgcagtttagtcatcatgaaaatgaaagaaaacgcctacaccacatttttgacatagtggagctatatgtttgttttactgtgtatacataaccttttgaatgctctggtttctgatgttcctatcagggctctgactattttgtgtttttttgtgattaatgtcccactcagaggtttcttccaaactgttgctagcaggcctgaaggaaaaaaatttatgcgacttcattttgactctatgtatgcccatatctgcaatctaactaaaatctgaactactcttgtatacaagaggaggaagaatttgtttgacgtggtgcagatcctgccagagtggggcataggatacaaggttgccaataccacctggtgtgacgtctcctgtcagatcacgaagatcaacctatacaaggtgatctgatctgcccactttccgctcgacagatccatattgtttgaggatactcatagctaccctgcaacaatttacttatactacttcaccgagctaatttctttgcttgagctctttgggatttatatggtatgataatctgtgacctctgctttgtttttgttcagttaagcagcaagcatcaatctttaggatgttcctttttttagctgaaagccaaacatggaccagtgaatagccctgtgcaattttgatgtgtccttgcacagtcatattcatggacttataacatgacgttggattactaccttgccttgacactacaatgttatttatgtaaacttatttgagcataatttgaatcataatccttgcagttgaagtatcatgtgagtagcattgtcttgaacaagaagtcatcttcctcagcattctagaggcccttgttttttgctgattcaattacttttgtttcagtgatcagtaataacaacttctaactgactaaaatgtataatgtaaggcccttaataatttcttttgttttccctgtaaaaaatccttagcgtctgactttggcccttaatattttcattgattggttactctttaatcttcatagaatgttttgttcctcagcttctattctttaatttgtagcaaatttggggggctcacatttctagagctatttgttggtttagaataccatttgcaggtatatgcccgtgtatccatagaaatcctaatgtttgggggctcttttgttgctttagaataccattttttgggcaggactgagaagtggaatgctgacatcttttagacagtttgaaagcaaaccgagaggcatgggtgttcatcaactcttacttcgcgcattgccagagtgagctgcaggacacatggttcgcaccaaattctccatccatagataacaaggctgaccaccctagattaaacttcaaagaccggtacccagagccatacagagattctcatccgactgcccctgttgttgtgccatggatgtcaggtgtcattactgcatgggctgcctgcccacaggatttcgatttggatagaatataaggtcagttgatatatatcgaattgatccagggagcactcgcctgtgggaatgaattaaatctttgtcctattattttacattccactttgtgattgccgtcagcagcgacgtccgtttgttttagtctttgtgttcggggaatttgaaagttgaagatacccgtgaggtctgtctttttccttgatgatgaagggtgtaaccgtctcggtctggatatgatttcgacaggcatgttctaccaagggaacactttatataatcattcataagggttagtttgatcacgttcacttgtatttatggatctgaactttaatgagtggttttattagacattcgaatgcttgatctttcagttattcttgagtttaaatgggttcaaatttacaatgttgtctagacattcgaatgcttgatctttaatttcagttattctcatgtcatatatagccagccaactaagttgtgtatttaatatttgattgacctctttgtctcacaaatatggtgttttctttcttcaacgtcacagcaaatgggaaatacttgaacttgtaaggcattctttacatcaaaggataatttccttaatcctgtatttttcaactatattctgtgaaattcatatatcatcatcctacaaagttcctgcgttccaaaagtagtgattaagagataatttgagcaaatgatacctctcaagaactgcaggatctggagatggtctactggcctatctgtgctgccgcttggcaaccgagcagaaggaacttcagggcttgcttagatacgaagataccagggaagattgttgtgagttctcttcttcctcacaccaacgcagaccagtttctgccaacagcagcggcaccttcttcctcacgccaacgccggccagtttccggcaacagcagcggcacctcaggtttgagggctccatggccatgggaagggatcctcgctgctgccatgggagaagagaagagagggatggctccacagcagcgcaccaaggagagcccgagcagaggagagatggcgtgggggaagagaagggagagggcaggggctgccatttatagggccaagctttggacatgtcagactgcaccaacaggtggcaggtgctgcagtgacgaccttggacgacgtgtttcggcatttttcgcttggaatcggatcttggttgctgcacaaaatatcttccttgatctatactctacaattattgtaaaggacttagagagttatagatccacaaaaattggtttgtcactgggttagaaaacagtggaaacttgtgaaaacggaatgtcaaagcatgtcaaacggaatcggatgaatgcgatcttttaatat

SEQ ID NO: 25058 - DNA, 2920 bp, Zea Mays
cgcaactttcacctgtgaataacgttcttgcataatcgcacgggcgaagccttcagaagcacacgttggttgtgtggctcactggcaccgcgccactcagctcagcaacgatgcaaccacctgacaatggcatctctttgcgcgccctcggcgctcctcgaccacccccatcgccgtcggagacgagacgagcacctatacctagccgtataaaggcggcagggcttagacaagctagtgcaggcttcccgggcccctagattctctctcgcgcttccgctttccttctcctggtcctggccatggcccacgaacgggagccgctcctgcagcaacgacagaccggcgtcggcaatgcctgcggtgccaaggactcgtcctcggcgccggcgccgtcggctgccgcgctgccgtcgctggctaggaccgtgctcaagttcctgatgtgggcggtgttcctcacctgggccgcggggatcttcctctacccgaccaagcccgtgcaggccgtgttcaggaagtgggtcgggctcaccagggactccatgttcggcatcgccgggggtattttcctgaccttcagcgcgccaattctgatcattgcgcttctcgcatatgtgtacatctccttcttcccgagtgagcatgtggtggagaaaaggaagctgcgctcactgagtttcaggctctggactttccctgttcttgtagacggcccctttggagttgtctctgcagttgagttcatcggaattgtcttgtttatagtttttgttgtctactcaatgacctattatgccgtggaagctgtgagccttgtctcgaaatttgatatcccatcaatgactgagagtgaattgatactggatgtcattggcctccgtttaggggcggttgggttgttctgcatgctcttcctcttcctgccagtcgcccgaggctcggttctcttacggcttatcgatattccatttgagcatgctacaagataccacgtctggttggggcatctcacgatggctctatttacattgcatggcttgttctatgtgatctcatggtccatgcaagggcgcctccgtgaagaactgagacagtggaaggaaattggagtagcaaacctgcctggtgtgatcagcttggcagccggcctacttatgtgggtgacatcacttcacccagtgaggaagaggttcttcgagctcttcttctacacccaccagctctacgtcgtcttcgtcgtgttcttggcgtttcatgttggtgacttcatcttcagtatttgtgccggagctgtgttcctcttcatgctcgaccgctttttgaggttctggcaatcaagggccaaagtcgacatcatttcagccgcctgccgcccgtgtgggacggtggagctagtattctcaaaaccagcaagcctccactacaatgctttgagtttcatcttcattcaagtgcgcgagctatcgttcttgcagtggcacccgttcagtgtatcttcaagtcccatggatgggagataccacatgtcggttctcataaaagtactcggcacgtggactgaaaaactgaggagcatcatcaccgatgtacaggagaagaacgggggtgactctgagctgcaatgcgggcgcatgacagcctgcgtggaaggcccatatgggcatgaatcaccctaccacttgatgtacgagaatctcgtcttggtcgcaggaggcattggaatatcgccattcttggcgatcttgagcgacataatccacaggatcgaggagggcaagcaatgcatgcccaagaacgtgctggtcctttggtcagttaagaagtccaaggagctttctctgctgtccgccgttgatgcccagaccatcagctcatctgtctcggacaggttgcaactggatatccaggccttcgtgactcaagaaccccatcctcctttggaggatggcatcgtcggggacgaccagaaagtccctggcatgttcgtcaagaacggtacagccatgtctgggctggtcggcaccggggacaacttctgggcggccatgtacttcctggcgtccacgctcggcttcctcctggcgtacgccctggtgcaggtgtactacgtgaagccgcacaacgtggtggcgtggtggtacctgggcctcctgttcatgctgtgcatggttgccggcgtcgctctacccggcgggctcgtggtcctcctgtggcatctgtcggagaagcagaggttggaggacgacaagtgggacgcctctcagtcaccgcgcgccgagcagacaggccccttggctgcggcgggtggtggtgacgacgacgctgctcccagcgtcagcctcgccgccctgcggacgacccggtacggctgccggccgaacttcgaagacgagcgtagcgagggagtgcagggcgcggaacctccgccgcggcggcttgggggcggccaagagcaggagcggcgcggtcttccatttcaacagccacagcttcgacctgtaaactacgtacgtctcgtttggtcggttcaacgatcatcagtacatgttgcacagcacacacgcacagacgatagttggatgtacatgttgatccgtcataatttgatatcgtgtatatatatgtatagctgatagttaatatagttaagttatataagagatgtataaatctgtatgcgtatactataggtgtagcatatgcatgcatgatagaagcacgaaggttaaatgctgacgaatcacgtgaaatcatgtcatgtttcgcgtctaatgcgtgaatttgtatttttcttatgcgtttgtgagtacgtcaaaactacgttgcaacgcaagatttatctttgggcgcgttggtgtgtaaaattgttttggtggactaagttaccatttttcctcttttccgagtcagaaaaaat

SEQ ID NO: 25059 - DNA, 2913 bp, Zea Mays
cgcaactttcacctgtgaataacgttcttgcataatcgcacgggcgaagccttcagaagcacacgttggttgtgtggctcactggcaccgcgccactcagctcagcaacgatgcaaccacctgacaatggcatctctttgcgcgccctcggcgctcctcgaccacccccatcgccgtcggagacgagacgagcacctatacctagccgtataaaggcggcagggcttagacaagctagtgcaggcttcccgggcccctagattctctctcgcgcttccgctttccttctcctggtcctggccatggcccacgaacgggagccgctcctgcagcaacgacagaccggcgtcggcaatgcctgcggtgccaaggactcgtcctcggcgccggcgccgtcggctgccgcgctgccgtcgctggctaggaccgtgctcaagttcctgatgtgggcggtgttcctcacctgggccgcggggatcttcctctacccgaccaagcccgtgcaggccgtgttcaggaagtgggtcgggctcaccagggactccatgttcggcatcgccgggggtattttcctgaccttcagcgcgccaattctgatcattgcgcttctcgcatatgtgtacatctccttcttcccgagtgagcatgtggtggagaaaaggaagctgcgctcactgagtttcaggctctggactttccctgttcttgtagacggcccctttggagttgtctctgcagttgagttcatcggaattgtcttgtttatagtttttgttgtctactcaatgacctattatgccgtggaagctgtgagccttgtctcgaaatttgatatcccatcaatgactgagagtgaattgatactggatgtcattggcctccgtttaggggcggttgggttgttctgcatgctcttcctcttcctgccagtcgcccgaggctcggttctcttacggcttatcgatattccatttgagcatgctacaagataccacgtctggttggggcatctcacgatggctctatttacattgcatggcttgttctatgtgatctcatggtccatgcaagggcgcctccgtgaagaactgagacagtggaaggaaattggagtagcaaacctgcctggtgtgatcagcttggcagccggcctacttatgtgggtgacatcacttcacccagtgaggaagagtatttgtgccggagctgtgttcctcttcatgctcgaccgctttttgaggttctggcaatcaagggccaaagtcgacatcatttcagccgcctgccgcccgtgtgggacggtggagctagtattctcaaaaccagcaagcctccactacaatgctttgagtttcatcttcattcaagtgcgcgagctatcgttcttgcagtggcacccgttcagtgtatcttcaagtcccatggatgggagataccacatgtcggttctcataaaagtactcggcacgtggactgaaaaactgaggagcatcatcaccgatgtacaggagaagaacgggggtgactctgagctgcaatgcgggcgcatgacagcctgcgtggaaggcccatatgggcatgaatcaccctaccacttgatgtacgagaatctcgtcttggtcgcaggaggcattggaatatcgccattcttggcgatcttgagcgacataatccacaggatcgaggagggcaagcaatgcatgcccaagaacgtgctggtcctttggtcagttaagaagtccaaggagctttctctgctgtccgccgttgatgcccagaccatcagctcatctgtctcggacaggttgcaactggatatccaggccttcgtgactcaagaaccccatcctcctttggaggatggcatcgtcggggacgaccagaaagtccctggcatgttcgtcaagaacggtacagccatgtctgggctggtcggcaccggggacaacttctgggcggccatgtacttcctggcgtccacgctcggcttcctcctggcgtacgccctggtgcaggtgtactacgtgaagccgcacaacgtggtggcgtggtggtacctgggcctcctgttcatgctgtgcatggttgccggcgtcgctctacccggcgggctcgtggtcctcctgtggcatctgtcggagaagcagaggttggaggacgacaagtgggacgcctctcagtcaccgcgcgccgagcagacaggccccttggctgcggcgggtggtggtgacgacgacgctgctcccagcgtcagcctcgccgccctgcggacgacccggtacggctgccggccgaacttcgaagcggagttcgcggcgttcgcggagcgcgccggggacgcggcggacgtgggcgtgctggtgtgcggaccgcaggggctgcagacgagcgtagcgagggagtgcagggcgcggaacctccgccgcggcggcttgggggcggccaagagcaggagcggcgcggtcttccatttcaacagccacagcttcgacctgtaaactacgtacgtctcgtttggtcggttcaacgatcatcagtacatgttgcacagcacacacgcacagacgatagttggatgtacatgttgatccgtcataatttgatatcgtgtatatatatgtatagctgatagttaatatagttaagttatataagagatgtataaatctgtatgcgtatactataggtgtagcatatgcatgcatgatagaagcacgaaggttaaatgctgacgaatcacgtgaaatcatgtcatgtttcgcgtctaatgcgtgaatttgtatttttcttatgcgtttgtgagtacgtcaaaactacgttgcaacgcaagatttatctttgggcgcgttggtgtgtaaaattgttttggtggactaagttaccatttttcctcttttccgagtcagaaaaaat

SEQ ID NO: 25060 - DNA, 1377 bp, Zea Mays
cttaatttttggttgacggcatatactgagacagtggaaggaaattggagtagcaaacctgcctggtgtgatcagcttggcagccggcctacttatgtgggtgacatcacttcacccagtgaggaagaggttcttcgagctcttcttctacacccaccagctctacgtcgtcttcgtcgtgttcttggcgtttcatgttggtgacttcatcttcagtatttgtgccggagctgtgttcctcttcatgctcgaccgctttttgaggttctggcaatcaagggccaaagtcgacatcatttcagccgcctgccgcccgtgtgggacggtggagctagtattctcaaaaccagcaagcctccactacaatgctttgagtttcatcttcattcaagtgcgcgagctatcgttcttgcagtggcacccgttcagtgtatcttcaagtcccatggatgggagataccacatgtcggttctcataaaagtactcggcacgtggactgaaaaactgaggagcatcatcaccgatgtacaggagaagaacgggggtgactctgagctgcaatgcgggcgcatgacagcctgcgtggaaggcccatatgggcatgaatcaccctaccacttgatgtacgagaatctcgtcttggtcgcaggaggcattggaatatcgccattcttggcgatcttgagcgacataatccacaggatcgaggagggcaagcaatgcatgcccaagaacgtgctggtcctttggtcagttaagaagtccaaggagctttctctgctgtccgccgttgatgcccagaccatcagctcatctgtctcggacaggttgcaactggatatccaggccttcgtgactcaagaaccccatcctcctttggaggatggcatcgtcggggacgaccagaaagtccctggcatgttcgtcaagaacggtacagccatgtctgggctggtcggcaccggggacaacttctgggcggccatgtacttcctggcgtccacgctcggcttcctcctggcgtacgccctggtgcaggtgtactacgtgaagccgcacaacgtggtggcgtggtggtacctgggcctcctgttcatgctgtgcatggttgccggcgtcgctctacccggcgggctcgtggtcctcctgtggcatctgtcggagaagcagaggttggaggacgacaagtgggacgcctctcagtcaccgcgcgccgagcagacaggccccttggctgcggcgggtggtggtgacgacgacgctgctcccagcgtcagcctcgccgccctgcggacgacccggtacggctgccggccgaacttcgaagcgaggccgggcgaattaaacgaccgaccgatttgtttgtggactaattt

SEQ ID NO: 25061 - DNA, 1898 bp, Zea Mays
gttctcctggattgaattcacaaaacaactgtttgttattttcttctcccgttcacttctctttggcccgaaaccgagagctagtgcttgattcggtcgtttttgggcaccgaacacgttcttgggaccgccgccgccgccctacttccagtcccagctgctcaggtctccatcggcctcgagccctttgccggcgacgagcactcacaacaccagggtgtaacaatgtcttcttcaatggaatcgtcataccttcctgctacaactgagtcattagcccaagctcaagaggctaaggatgcttcagagtccatttcaatcctttaccgtgtcattcaggacccatcttcttctgctgatgcactgagaacaaaagaagttgcaattacaaatcttacaaactacctcactaaagaaaacagagctgaggagctgcgtaatcttttgacccagctcagaccattttttgcagttattcctaaggcaaagactgcaaaaattgtccgtggaataattgatgctgtcgccaagatacctggaacatcagatcttcagatttcactctgcaaggaaatggtagaatggacccgtgcagagaagcgtactttcctccggcaacgtgtggaggcaaggttggcagctctcctgttagagaatcaggagtatactgaagcccttaccctgcttactagtcttatcaaggaagtcaggagacttgatgacaagttacttcttgtggacattgaccttttggaaagcaaacttcacttctccctgagaaatctgccaaaggccaaagcctccttaactgctgctagaacagcagcaaatgccatttatgttccacctgctcagcaaggcactattgatctccagagtggaatcctccatgctgaagaaaaggattacaagactgcttacagctacttctttgaagcatttgaagctttcagtgcactggaggacccgaaggccatctttagcctgaagtacatgctcttgtgtaagataatggttaaccaagctgacgatgttgcaggaataatctcgtctaaggctggcctaaaatatctgggtcctgatgttgatgctatgaaggctggcctaaaatatctgggtcctgatgttgatgctatgaaggctgttgctgatgcatactctaaaagatctctcaagtattttgaaactgcccttcgtgattataagtcccagctggaggaggaccctattgtccacaggcatctttcttctctgtatgatacactgctggagcagaatctctgcaggttgattgagccctactcaagggtggagattgcacatatagcggagatgattgaattgccgattgaccatgttgagaagaagctgtcgcagatgatccttgacaagaaatttgctgggacactagatcaaggtgctggctgcctcattatctttgaggattctaagaccgaggaaatcttccctgccactctcgaaaccatttcgaatgtcgggaaggttgtggacagcctttatgtgaggtcggccaagatcatggcttgaaagcagctagtcttacctgtttgctctgatttcatttccagtctgtcgatgtcctcagacatttattccttcaatattgacagtttattgtgaccgctacaggttcatgtgaccaaaggctagctatttttacgactgaatgagttatgcatgtattggtcttttaatatcagcgtgcagagtcggacggatgttattgtgtgttaattaatctaccatgttatcgaaatgcatgtctttagctccactgcggcttctgtctacagatggacaattagcacttatacgatgtgctgaattaggcacaacacaaaaaagcaccaggctaaccgtcatctcggcccgagcac

SEQ ID NO: 25062 - DNA, 2243 bp, Zea Mays
cctatatccagtgtctcgtgtgtttcctctgtcgtgcttatggaagggagacgagttctctacatcttcttgcgcctctactgctgacgagagggaagcgagcgaatctggtgatccgtgataacgtagttctcaacaaaacgaaccggtttcatcgaccgctctcgcttgcaaagaaaaagaaataaagaaattggtccagtagccctggaagaattgttctcctggattgaattcacaaaacaactgtttgttattttcttctcccgttcacttctctttggcccgaaaccgagagctagtgcttgattcggtcgtttttgggcaccgaacacgttcttgggaccgccgccgccgccctacttccagtcccagctgctcaggtctccatcggcctcgagccctttgccggcgacgagcactcacaacaccagttttgtaagaggggatctgtaccagtcaggctgagcagcagcagcagtggtgtgttctggcttgtgtgggacctagaggaagcttacacaacagggaagagtattgtgttagggtgtaacaatgtcttcttcaatggaatcgtcataccttcctgctacaactgagtcattagcccaagctcaagaggctaaggatgcttcagagtccatttcaatcctttaccgtgtcattcaggacccatcttcttctgctgatgcactgagaacaaaagaagttgcaattacaaatcttacaaactacctcactaaagaaaacagagctgaggagctgcgtaatcttttgacccagctcagaccattttttgcagttattcctaaggcaaagactgcaaaaattgtccgtggaataattgatgctgtcgccaagatacctggaacatcagatcttcagatttcactctgcaaggaaatggtagaatggacccgtgcagagaagcgtactttcctccggcaacgtgtggaggcaaggttggcagctctcctgttagagaatcaggagtatactgaagcccttaccctgcttactagtcttatcaaggaagtcaggagacttgatgacaagttacttcttgtggacattgaccttttggaaagcaaacttcacttctccctgagaaatctgccaaaggccaaagcctccttaactgctgctagaacagcagcaaatgccatttatgttccacctgctcagcaaggcactattgatctccagagtggaatcctccatgctgaagaaaaggattacaagactgcttacagctacttctttgaagcatttgaagctttcagtgcactggaggacccgaaggccatctttagcctgaagtacatgctcttgtgtaagataatggttaaccaagctgacgatgttgcaggaataatctcgtctaaggctggcctaaaatatctgggtcctgatgttgatgctatgaaggctgttgctgatgcatactctaaaagatctctcaagtattttgaaactgcccttcgtgattataagtcccagctggaggaggaccctattgtccacaggcatctttcttctctgtatgatacactgctggagcagaatctctgcaggttgattgagccctactcaagggtggagattgcacatatagcggagatgattgaattgttgattgagccctactcaagggtggagattgcacatatagcggagatgattgaattgccgattgaccatgttgagaagaagctgtcgcagatgatccttgacaagaaatttgctgggacactagatcaaggtgctggctgcctcattatctttgaggattctaagaccgaggaaatcttccctgccactctcgaaaccatttcgaatgtcgggaaggttgtggacagcctttatgtgaggtcggccaagatcatggcttgaaagcagctagtcttacctgtttgctctgatttcatttccagtctgtcgatgtcctcagacatttattccttcaatattgacagtttattgtgaccgctacaggttcatgtgaccaaaggctagctatttttacgactgaatgagttatgcatgtattggtcttttaatatcagcgtgcagagtcggacggatgttattgtgtgttaattaatctaccatgttatcgaaatgcatgtctttagctccactgcggcttctgtctacagatggacaattagcacttatacgatgtgctgaattaggcacaacacaaaaaagcaccaggctaaccgtcatctcggcccgagcac

SEQ ID NO: 25063 - DNA, 2183 bp, Zea Mays
cctatatccagtgtctcgtgtgtttcctctgtcgtgcttatggaagggagacgagttctctacatcttcttgcgcctctactgctgacgagagggaagcgagcgaatctggtgatccgtgataacgtagttctcaacaaaacgaaccggtttcatcgaccgctctcgcttgcaaagaaaaagaaataaagaaattggtccagtagccctggaagaattgttctcctggattgaattcacaaaacaactgtttgttattttcttctcccgttcacttctctttggcccgaaaccgagagctagtgcttgattcggtcgtttttgggcaccgaacacgttcttgggaccgccgccgccgccctacttccagtcccagctgctcaggtctccatcggcctcgagccctttgccggcgacgagcactcacaacaccagggtgtaacaatgtcttcttcaatggaatcgtcataccttcctgctacaactgagtcattagcccaagctcaagaggctaaggatgcttcagagtccatttcaatcctttaccgtgtcattcaggacccatcttcttctgctgatgcactgagaacaaaagaagttgcaattacaaatcttacaaactacctcactaaagaaaacagagctgaggagctgcgtaatcttttgacccagctcagaccattttttgcagttattcctaaggcaaagactgcaaaaattgtccgtggaataattgatgctgtcgccaagatacctggaacatcagatcttcagatttcactctgcaaggaaatggtagaatggacccgtgcagagaagcgtactttcctccggcaacgtgtggaggcaaggttggcagctctcctgttagagaatcaggagtatactgaagcccttaccctgcttactagtcttatcaaggaagtcaggagacttgatgacaagttacttcttgtggacattgaccttttggaaagcaaacttcacttctccctgagaaatctgccaaaggccaaagcctccttaactgctgctagaacagcagcaaatgccatttatgttccacctgctcagcaaggcactattgatctccagagtggaatcctccatgctgaagaaaaggattacaagactgcttacagctacttctttgaagcatttgaagctttcagtgcactggaggacccgaaggccatctttagcctgaagtacatgctcttgtgtaagataatggttaaccaagctgacgatgttgcaggaataatctcgtctaaggctggcctaaaatatctgggtcctgatgttgatgctatgaaggctgttgctgatgcatactctaaaagatctctcaagtattttgaaactgcccttcgtgattataagtcccagctggaggaggaccctattgtccacaggcatctttcttctctgtatgatacactgctggagcagaatctctgcaggttgattgagccctactcaagggtggagattgcacatatagcggagatgattgaattgccgattgaccatgttgagaagaagctgtcgcagatgatcgttgacaagaaatttgctgggacactagatcaaggtgctgattgcacatatagcggagatgattgaattgccgattgaccatgttgagaagaagctgtcgcagatgatccttgacaagaaatttgctgggacactagatcaaggtgctggctgcctcattatctttgaggattctaagaccgaggaaatcttccctgccactctcgaaaccatttcgaatgtcgggaaggttgtggacagcctttatgtgaggtcggccaagatcatggcttgaaagcagctagtcttacctgtttgctctgatttcatttccagtctgtcgatgtcctcagacatttattccttcaatattgacagtttattgtgaccgctacaggttcatgtgaccaaaggctagctatttttacgactgaatgagttatgcatgtattggtcttttaatatcagcgtgcagagtcggacggatgttattgtgtgttaattaatctaccatgttatcgaaatgcatgtctttagctccactgcggcttctgtctacagatggacaattagcacttatacgatgtgctgaattaggcacaacacaaaaaagcaccaggctaaccgtcatctcggcccgagcac

SEQ ID NO: 25064 - DNA, 1836 bp, Zea Mays
cctatatccagtgtctcgtgtgtttcctctgtcgtgcttatggaagggagacgagttctctacatcttcttgcgcctctactgctgacgagagggaagcgagcgaatctggtgatccgtgataacgtagttctcaacaaaacgaaccggtttcatcgaccgctctcgcttgcaaagaaaaagaaataaagaaattggtccagtagccctggaagaattgttctcctggattgaattcacaaaacaactgtttgttattttcttctcccgttcacttctctttggcccgaaaccgagagctagtgcttgattcggtcgtttttgggcaccgaacacgttcttgggaccgccgccgccgccctacttccagtcccagctgctcaggtctccatcggcctcgagccctttgccggcgacgagcactcacaacaccagttttgtaagaggggatctgtaccagtcaggctgagcagcagcagcagtggtgtgttctggcttgtgtgggacctagaggaagcttacacaacagggaagagtattgtgttagggtgtaacaatgtcttcttcaatggaatcgtcataccttcctgctacaactgagtcattagcccaagctcaagaggctaaggatgcttcagagtccatttcaatcctttaccgtgtcattcaggacccatcttcttctgctgatgcactgagaacaaaagaagttgcaattacaaatcttacaaactacctcactaaagaaaacagagctgaggagctgcgtaatcttttgacccagctcagaccattttttgcagttattcctaaggcaaagactgcaaaaattgtccgtggaataattgatgctgtcgccaagatacctggaacatcagatcttcagatttcactctgcaaggaaatggtagaatggacccgtgcagagaagcgtactttcctccggcaacgtgtggaggcaaggttggcagctctcctgttagagaatcaggagtatactgaagcccttaccctgcttactagtcttatcaaggaagtcaggagacttgatgacaagttacttcttgtggacattgaccttttggaaagcaaacttcacttctccctgagaaatctgccaaaggccaaagcctccttaactgctgctagaacagcagcaaatgccatttatgttccacctgctcagcaaggcactattgatctccagagtggaatcctccatgctgaagaaaaggattacaagactgcttacagctacttctttgaagcatttgaagctttcagtgcactggaggacccgaaggccatctttagcctgaagtacatgctcttgtgtaagataatggttaaccaagctgacgatgttgcaggaataatctcgtctaaggctggcctaaaatatctgggtcctgatgttgatgctatgaaggctgttgctgatgcatactctaaaagatctctcaagtattttgaaactgcccttcgtgattataagtcccagctggaggaggaccctattgtccacaggcatctttcttctctgtatgatacactgctggagcagaatctctgcaggttgattgagccctactcaagggtggagattgcacatatagcggagatgattgaattgccgattgaccatgttgagaagaagctgtcgcagatgatcgttgacaagaaatttgctgggacactagatcaaggtgctggctgcctcattatctttgaggattctaagaccgaggaaatcttccctgccactctcgaaaccatttcgaatgtcgggaaggttgtggacagcctttatgtgaggtcggccaagatcatggcttga

SEQ ID NO: 25065 - DNA, 3119 bp, Zea Mays
ggccaaaggcgaaagccgggcacgcacacccaccccacagatctccctcctctctctgcccgtgctgttgctgtccccgtcgttcgcgctcgcccaagtcgtcgcccagtcgctgcgccgctcagctccaaagccagcagaaccgcgcaagcgcgcgcgtgtccctcctccgctcctccattccgcgccgctggactggacgcgtcgctgtgcggacttcttgcttgcgccggctgctacgggcacggtccacgggacctgactggcggctccgggccgggggaggcgagcgacagagcgatgcagaggcaggggagacacctggagcggtccaactcgaagcgagccctcgaccatggcggcggtggtgacgacgacgaccgcccgtctaagcgcccgcgcgtccccgccctcgccagtgtcattgtagaagcactcaaggtagactgtttacaaaagctttgctcatcactggaaccaattctgcgcagaattgtcagtgaagaagtagagcgtgctttagccaaattgggccctgcaggtcctgctaggatccaaggaaggggctcacccaaacgaattgaaggccctgatggtagaagcctccagcttcagtttaggactaggttatcccttccgctctttactggagggaaagtagaaggcgagcagggagcagcaattcatgttgtgctgcttgatgcgaacactggacatgttgttacttcaggacctgagtcatctgtgaaactggatattctggtgcttgagggtgattttaataaagaggaagacgagggctggactgaagaagactttgaaagtcacattgttaaagaacgagaagggaagaggcctattttaactggggacctgcaggtaacccttaaagaaggtgttgggactataggagagcttattttcactgataattccagctggataagaagccgaaaatttagacttgggttgagagtctcgtcagggttttgtcaaggaattcgtgttatggaagcaaaaacagaggcttttactgttaaagatcacagaggcgaattgtataagaagcattatcctcctgcactaaaggatgaggtatggagattagaaaagattggaaaggatggttcattccacaagagattaaactcaagtggaatctatacagttgaacactttcttcaattccttgttagagaccaacagaaattaagaagtattcttggcagtaacatgtcaaataggatgtgggaaagtcttattgagcatgcaaagacatgtgttttgagtggcaaccattatatatattactcaagtgatgcaagaaatgtgggtgcaatattcaacaacatatatgagttcactggtttgattgctgatgatcaatttatttcagctgaaaatctcactgaaaaccagagggtgtttgctgacacgttggttaagcaagcatatgctgattggatcaatgttctagaatatgatggcaaggcgctattaaagttcaaccagaaaaagaaatatgttacaactagaagtgaaacagcgaaagcttcagcaagctaccctgcatcaaacggtttagtgaactcacagaaagaactgcctggaggtcctgtgaatgctgagcaatcttccctgaacaatgctagccaagatagaactagaatcccatccatgtccatggggaaccaggtagcaagagagtatgcaggcaatcctcagcacatgacaccaagtattaccatgcaatgcgacacgaggtcattgatccccggaggccagttcagtggtggttcctccgtgcagactcaaacttcacgaagctccaacatgcttgcgctgcggccaacgcagcagcctcaaaacttggacttctctgggctaggtcagtccacacagccttcagggaccaaccctttcgccgactggtctcggttgcaggagagcagcgtcgatgagtacttgatggatgagataagggcgaggagccacgagctattggagaacgatgagatgcagcatatgctgcggttcctgagcgtgggcggggcgccgaccggcctgaacaacgttgacggctttctttcatacccgtctcctgccccagccttcggatttgatgaggacgaccgcgctcgctcgtccggcaaagctgttgtcgggtggctgaagatcaaggctgcgatgcggtggggtatctttgtcaggaggaaagctgccgagagacgggctcagcttgttgagctggaagactagcagtcgcaggtgcttgggctcggtgttgcacatatttatgcggaagggttactagaactgcaaaatattgtataatacgcttcccttttggctgatctttttaatttgcacaatagccccgttggtattgtatattactgggtacagacgtacagtacatgtacatgggaggacgatcaggatcggggcttttttacgaatgaagtcacgttggttgtatagaaaaaagaagatcaagcggaactttggcaggaagattaagtatgcttgtaggaaggctctggcagacagccagccaagggtgagagggagatttgccaagatcgaagaatgcgacttgctgctgctgaattcaggcacttatatggaggttcaatcgatcattcagctgttcaaaatccacctcctctacccagccgttttggtgcgagccgagggagtgaagagctgaaagtggtggtagtctagttggttagctagcccctgtacaaaggcttgaatgaagatggcaataaaactcagctctcccctctgcttgcttggcactgcactccttgtgccttaatgaaaacaagagcaaaaacagactcatgaagattaacaaatttcacggtgtattccttcctttccttgtgccttactgcaccacaatcaatccaactcaaaagtaataggtgacagtagctactttattacatcctgccttggtctgtcggcaattatgtgaaaactgaaaagaaaaaaagcaaacctcaagagatttagtcgctggttaattcaccccatagacccacttctccgcattgctggtataagagaccagctccttgggttcaaaccacaaggcgatctcatccttt

SEQ ID NO: 25066 - DNA, 2214 bp, Zea Mays
atgcagaggcaggggagacacctggagcggtccaactcgaagcgagccctcgaccatggcggcggtggtgacgacgacgaccgcccgtctaagcgcccgcgcgtccccgccctcgccagtgtcattgtagaagcactcaaggtagactgtttacaaaagctttgctcatcactggaaccaattctgcgcagaattgtcagtgaagaagtagagcgtgctttagccaaattgggccctgcaggtcctgctaggatccaaggaaggccctgatggtagaagcctccagcttcagtttaggactaggttatcccttccgctctttactggagggaaagtagaaggcgagcagggagcagcaattcatgttgtgctgcttgatgcgaacactggacatgttgttacttcaggacctgagtcatctgtgaaactggatattctggtgcttgagggtgattttaataaagaggaagacgagggctggactgaagaagactttgaaagtcacattgttaaagaacgagaagggaagaggcctattttaactggggacctgcaggtaacccttaaagaaggtgttgggactataggagagcttattttcactgataattccagctggataagaagccgaaaatttagacttgggttgagagtctcgtcagggttttgtcaaggaattcgtgttatggaagcaaaaacagaggcttttactgttaaagatcacagaggcgaattgtataagaagcattatcctcctgcactaaaggatgaggtatggagattagaaaagattggaaaggatggttcattccacaagagattaaactcaagtggaatctatacagttgaacactttcttcaattccttgttagagaccaacagaaattaagaagtattcttggcagtaacatgtcaaataggatgtgggaaagtcttattgagcatgcaaagacatgtgttttgagtggcaaccattatatatattactcaagtgatgcaagaaatgtgggtgcaatattcaacaacatatatgagttcactggtttgattgctgatgatcaatttatttcagctgaaaatctcactgaaaaccagagggtgtttgctgacacgttggttaagcaagcatatgctgattggatcaatgttctagaatatgatggcaaggcgctattaaagttcaaccagaaaaagaaatatgttacaactagaagtgaaacagcgaaagcttcagcaagctaccctgcatcaaacggtttagtgaactcacagaaagaactgcctggaggtcctgtgaatgctgagcaatcttccctgaacaatgctagccaagatagaactagaatcccatccatgtccatggggaaccaggtagcaagagagtatgcaggcaatcctcagcacatgacaccaagtattaccatgcaatgcgacacgaggtcattgatccccggaggccagttcagtggtggttcctccgtgcagactcaaacttcacgaagctccaacatgcttgcgctgcggccaacgcagcagcctcaaaacttggacttctctgggctaggtcagtccacacagccttcagggaccaaccctttcgccgactggtctcggttgcaggagagcagcgtcgatgagtacttgatggatgagataagggcgaggagccacgagctattggagaacgatgagatgcagcatatgctgcggttcctgagcgtgggcggggcgccgaccggcctgaacaacgttgacggctttctttcatacccgtctcctgccccagccttcggatttgatgaggacgaccgcgctcgctcgtccggcaaagctgttgtcgggtggctgaagatcaaggctgcgatgcggtggggtatctttgtcaggaggaaagctgccgagagacgggctcagcttgttgagctggaagactagcagtcgcaggtgcttgggctcggtgttgcacatatttatgcggaagggttactagaactgcaaaatattgtataatacgcttcccttttggctgatctttttaatttgcacaatagccccgttggtattgtatattactgggtacagacgtacagtacatgtacatgggaggacgatcaggatcggggcttttttacgaatgaagtcacgttggttgtatacgtgtctgatacgcttgaccttacttgtgctttgaaatattcttgtcggagactttc

SEQ ID NO: 25067 - DNA, 2059 bp, Zea Mays
atgcagaggcaggggagacacctggagcggtccaactcgaagcgagccctcgaccatggcggcggtggtgacgacgacgaccgcccgtctaagcgcccgcgcgtccccgccctcgccagtgtcattgtagaagcactcaaggtagactgtttacaaaagctttgctcatcactggaaccaattctgcgcagaattgtcagtgaagaagtagagcgtgctttagccaaattgggccctgcaggtcctgctaggatccaaggaaggggctcacccaaacgaattgaaggccctgatggtagaagcctccagcttcagtttaggactaggttatcccttccgctctttactggagggaaagtagaaggcgagcagggagcagcaattcatgttgtgctgcttgatgcgaacactggacatgttgttacttcaggacctgagtcatctgtgaaactggatattctggtgcttgagggtgattttaataaagaggaagacgagggctggactgaagaagactttgaaagtcacattgttaaagaacgagaagggaagaggcctattttaactggggacctgcagtgtataagaagcattatcctcctgcactaaaggatgaggtatggagattagaaaagattggaaaggatggttcattccacaagagattaaactcaagtggaatctatacagttgaacactttcttcaattccttgttagagaccaacagaaattaagaagtattcttggcagtaacatgtcaaataggatgtgggaaagtcttattgagcatgcaaagacatgtgttttgagtggcaaccattatatatattactcaagtgatgcaagaaatgtgggtgcaatattcaacaacatatatgagttcactggtttgattgctgatgatcaatttatttcagctgaaaatctcactgaaaaccagagggtgtttgctgacacgttggttaagcaagcatatgctgattggatcaatgttctagaatatgatggcaaggcgctattaaagttcaaccagaaaaagaaatatgttacaactagaagtgaaacagcgaaagcttcagcaagctaccctgcatcaaacggtttagtgaactcacagaaagaactgcctggaggtcctgtgaatgctgagcaatcttccctgaacaatgctagccaagatagaactagaatcccatccatgtccatggggaaccaggtagcaagagagtatgcaggcaatcctcagcacatgacaccaagtattaccatgcaatgcgacacgaggtcattgatccccggaggccagttcagtggtggttcctccgtgcagactcaaacttcacgaagctccaacatgcttgcgctgcggccaacgcagcagcctcaaaacttggacttctctgggctaggtcagtccacacagccttcagggaccaaccctttcgccgactggtctcggttgcaggagagcagcgtcgatgagtacttgatggatgagataagggcgaggagccacgagctattggagaacgatgagatgcagcatatgctgcggttcctgagcgtgggcggggcgccgaccggcctgaacaacgttgacggctttctttcatacccgtctcctgccccagccttcggatttgatgaggacgaccgcgctcgctcgtccggcaaagctgttgtcgggtggctgaagatcaaggctgcgatgcggtggggtatctttgtcaggaggaaagctgccgagagacgggctcagcttgttgagctggaagactagcagtcgcaggtgcttgggctcggtgttgcacatatttatgcggaagggttactagaactgcaaaatattgtataatacgcttcccttttggctgatctttttaatttgcacaatagccccgttggtattgtatattactgggtacagacgtacagtacatgtacatgggaggacgatcaggatcggggcttttttacgaatgaagtcacgttggttgtatacgtgtctgatacgcttgaccttacttgtgctttgaaatattcttgtcggagactttc

SEQ ID NO: 25068 - DNA, 1402 bp, Zea Mays
ccgggggaggcgagcgacagagcgatgcagaggcaggggagacacctggagcggtccaactcgaagcgagccctcgaccatggcggcggtggtgacgacgacgaccgcccgtctaagcgcccgcgcgtccccgccctcgccagtgtcattgtagaagcactcaaggtagactgtttacaaaagctttgctcatcactggaaccaattctgcgcagaattgtcagtgaagaagtagagcgtgctttagccaaattgggccctgcaggtcctgctaggatccaaggaaggtgtttgctgacacgttggttaagcaagcatatgctgattggatcaatgttctagaatatgatggcaaggcgctattaaagttcaaccagaaaaagaaatatgttacaactagaagtgaaacagcgaaagcttcagcaagctaccctgcatcaaacggtttagtgaactcacagaaagaactgcctggaggtcctgtgaatgctgagcaatcttccctgaacaatgctagccaagatagaactagaatcccatccatgtccatggggaaccaggtagcaagagagtatgcaggcaatcctcagcacatgacaccaagtattaccatgcaatgcgacacgaggtcattgatccccggaggccagttcagtggtggttcctccgtgcagactcaaacttcacgaagctccaacatgcttgcgctgcggccaacgcagcagcctcaaaacttggacttctctgggctaggtcagtccacacagccttcagggaccaaccctttcgccgactggtctcggttgcaggagagcagcgtcgatgagtacttgatggatgagataagggcgaggagccacgagctattggagaacgatgagatgcagcatatgctgcggttcctgagcgtgggcggggcgccgaccggcctgaacaacgttgacggctttctttcatacccgtctcctgccccagccttcggatttgatgaggacgaccgcgctcgctcgtccggcaaagctgttgtcgggtggctgaagatcaaggctgcgatgcggtggggtatctttgtcaggaggaaagctgccgagagacgggctcagcttgttgagctggaagactagcagtcgcaggtgcttgggctcggtgttgcacatatttatgcggaagggttactagaactgcaaaatattgtataatacgcttcccttttggctgatctttttaatttgcacaatagccccgttggtattgtatattactgggtacagacgtacagtacatgtacatgggaggacgatcaggatcggggcttttttacgaatgaagtcacgttggttgtatacgtgtctgatacgcttgaccttacttgtgctttgaaatattcttgtcggagactttc

SEQ ID NO: 25069 - DNA, 2513 bp, Zea Mays
ggccaaaggcgaaagccgggcacgcacacccaccccacagatctccctcctctctctgcccgtgctgttgctgtccccgtcgttcgcgctcgcccaagtcgtcgcccagtcgctgcgccgctcagctccaaagccagcagaaccgcgcaagcgcgcgcgtgtccctcctccgctcctccattccgcgccgctggactggacgcgtcgctgtgcggacttcttgcttgcgccggctgctacgggcacggtccacgggacctgactggcggctccgggccgggggaggcgagcgacagagcgatgcagaggcaggggagacacctggagcggtccaactcgaagcgagccctcgaccatggcggcggtggtgacgacgacgaccgcccgtctaagcgcccgcgcgtccccgccctcgccagtgtcattgtagaagcactcaaggtagactgtttacaaaagctttgctcatcactggaaccaattctgcgcagaattgtcagtgaagaagtagagcgtgctttagccaaattgggccctgcaggtcctgctaggatccaaggaaggggctcacccaaacgaattgaaggccctgatggtagaagcctccagcttcagtttaggactaggttatcccttccgctctttactggagggaaagtagaaggcgagcagggagcagcaattcatgttgtgctgcttgatgcgaacactggacatgttgttacttcaggacctgagtcatctgtgaaactggatattctggtgcttgagggtgattttaataaagaggaagacgagggctggactgaagaagactttgaaagtcacattgttaaagaacgagaagggaagaggcctattttaactggggacctgcaggtaacccttaaagaaggtgttgggactataggagagcttattttcactgataattccagctggataagaagccgaaaatttagacttgggttgagagtctcgtcagggttttgtcaaggaattcgtgttatggaagcaaaaacagaggcttttactgttaaagatcacagaggcgaattgtataagaagcattatcctcctgcactaaaggatgaggtatggagattagaaaagattggaaaggatggttcattccacaagagattaaactcaagtggaatctatacagttgaacactttcttcaattccttgttagagaccaacagaaattaagaagtattcttggcagtaacatgtcaaataggatgtgggaaagtcttattgagcatgcaaagacatgtgttttgagtggcaaccattatatatattactcaagtgatgcaagaaatgtgggtgcaatattcaacaacatatatgagttcactggtttgattgctgatgatcaatttatttcagctgaaaatctcactgaaaaccagaggcaagcatatgctgattggatcaatgttctagaatatgatggcaaggcgctattaaagttcaaccagaaaaagaaatatgttacaactagaagtgaaacagcgaaagcttcagcaagctaccctgcatcaaacggtttagtgaactcacagaaagaactgcctggaggtcctgtgaatgctgagcaatcttccctgaacaatgctagccaagatagaactagaatcccatccatgtccatggggaaccaggtagcaagagagtatgcaggcaatcctcagcacatgacaccaagtattaccatgcaatgcgacacgaggtcattgatccccggaggccagttcagtggtggttcctccgtgcagactcaaacttcacgaagctccaacatgcttgcgctgcggccaacgcagcagcctcaaaacttggacttctctgggctaggtcagtccacacagccttcagggaccaaccctttcgccgactggtctcggttgcaggagagcagcgtcgatgagtacttgatggatgagataagggcgaggagccacgagctattggagaacgatgagatgcagcatatgctgcggttcctgagcgtgggcggggcgccgaccggcctgaacaacgttgacggctttctttcatacccgtctcctgccccagccttcggatttgatgaggacgaccgcgctcgctcgtccggcaaagctgttgtcgggtggctgaagatcaaggctgcgatgcggtggggtatctttgtcaggaggaaagctgccgagagacgggctcagcttgttgagctggaagactagcagtcgcaggtgcttgggctcggtgttgcacatatttatgcggaagggttactagaactgcaaaatattgtataatacgcttcccttttggctgatctttttaatttgcacaatagccccgttggtattgtatattactgggtacagacgtacagtacatgtacatgggaggacgatcaggatcggggcttttttacgaatgaagtcacgttggttgtatacgtgtctgatacgcttgaccttacttgtgctttgaaatattcttgtcggagactttc

SEQ ID NO: 25070 - DNA, 2627 bp, Zea Mays
ggccaaaggcgaaagccgggcacgcacacccaccccacagatctccctcctctctctgcccgtgctgttgctgtccccgtcgttcgcgctcgcccaagtcgtcgcccagtcgctgcgccgctcagctccaaagccagcagaaccgcgcaagcgcgcgcgtgtccctcctccgctcctccattccgcgccgctggactggacgcgtcgctgtgcggacttcttgcttgcgccggctgctacgggcacggtccacgggacctgactggcggctccgggccgggggaggcgagcgacagagcgatgcagaggcaggggagacacctggagcggtccaactcgaagcgagccctcgaccatggcggcggtggtgacgacgacgaccgcccgtctaagcgcccgcgcgtccccgccctcgccagtgtcattgtagaagcactcaaggtagactgtttacaaaagctttgctcatcactggaaccaattctgcgcagaattgtcagtgaagaagtagagcgtgctttagccaaattgggccctgcaggtcctgctaggatccaaggaaggggctcacccaaacgaattgaaggccctgatggtagaagcctccagcttcagtttaggactaggttatcccttccgctctttactggagggaaagtagaaggcgagcagggagcagcaattcatgttgtgctgcttgatgcgaacactggacatgttgttacttcaggacctgagtcatctgtgaaactggatattctggtgcttgagggtgattttaataaagaggaagacgagggctggactgaagaagactttgaaagtcacattgttaaagaacgagaagggaagaggcctattttaactggggacctgcaggtaacccttaaagaaggtgttgggactataggagagcttattttcactgataattccagctggataagaagccgaaaatttagacttgggttgagagtctcgtcagggttttgtcaaggaattcgtgttatggaagcaaaaacagaggcttttactgttaaagatcacagaggcgaattgtataagaagcattatcctcctgcactaaaggatgaggtatggagattagaaaagattggaaaggatggttcattccacaagagattaaactcaagtggaatctatacagttgaacactttcttcaattccttgttagagaccaacagaaattaagaagtattcttggcagtaacatgtcaaataggatgtgggaaagtcttattgagcatgcaaagacatgtgttttgagtggcaaccattatatatattactcaagtgatgcaagaaatgtgggtgcaatattcaacaacatatatgagttcactggtttgattgctgatgatcaatttatttcagctgaaaatctcactgaaaaccagagggttagtgtattttgaatgccttttataatgctagtcgtgggaattcttggaatttcagcactctgtaatctacggtttgaatttattgaggtgtttgctgacacgttggttaagcaagcatatgctgattggatcaatgttctagaatatgatggcaaggcgctattaaagttcaaccagaaaaagaaatatgttacaactagaagtgaaacagcgaaagcttcagcaagctaccctgcatcaaacggtttagtgaactcacagaaagaactgcctggaggtcctgtgaatgctgagcaatcttccctgaacaatgctagccaagatagaactagaatcccatccatgtccatggggaaccaggtagcaagagagtatgcaggcaatcctcagcacatgacaccaagtattaccatgcaatgcgacacgaggtcattgatccccggaggccagttcagtggtggttcctccgtgcagactcaaacttcacgaagctccaacatgcttgcgctgcggccaacgcagcagcctcaaaacttggacttctctgggctaggtcagtccacacagccttcagggaccaaccctttcgccgactggtctcggttgcaggagagcagcgtcgatgagtacttgatggatgagataagggcgaggagccacgagctattggagaacgatgagatgcagcatatgctgcggttcctgagcgtgggcggggcgccgaccggcctgaacaacgttgacggctttctttcatacccgtctcctgccccagccttcggatttgatgaggacgaccgcgctcgctcgtccggcaaagctgttgtcgggtggctgaagatcaaggctgcgatgcggtggggtatctttgtcaggaggaaagctgccgagagacgggctcagcttgttgagctggaagactagcagtcgcaggtgcttgggctcggtgttgcacatatttatgcggaagggttactagaactgcaaaatattgtataatacgcttcccttttggctgatctttttaatttgcacaatagccccgttggtattgtatattactgggtacagacgtacagtacatgtacatgggaggacgatcaggatcggggcttttttacgaatgaagtcacgttggttgtatacgtgtctgatacgcttgaccttacttgtgctttgaaatattcttgtcggagactttc

SEQ ID NO: 25071 - DNA, 1210 bp, Zea Mays
cgcgcgccggctcccgtccggccgctgccctccccggacttggtcagctccaactttggaacttccaggtgattagttcaatgttttcgggcatccagtgcgctccctgtccccgtctcctcttctctcgcgggtcaaaacccttcccttccccccacgccccaacgcccctcgttcgatcggtgggtcggccatggctcccttcgcgctcggatctcaggtggtcgccgtagcctcggtgtctgtcggcttgaactcttccgtcaagggtgtcgcactcaaggaatgtgaacaccctcttgcggcacgacagagaaagtttgttagagtgcaacttctaagatcaggatggtgtattaggaaaatcccaggcagggatgcatgccaaatcacggtgctgcatcatgaggacaatggaatgaatatagagatggcaaagctagctttttccaagggcatctggagttacatatgtaaaatgagcaatgctctacgtcggtatcctcagcatggcagtccatcagtgtcaattctgaccatgcagaaacttatgaagaaggatttggagactgccgacgcaagcctttctgcttctcagaacactgcagcatcggtcgttccttccacaccgacttccaggacttcaccatgcaagcttgcggggaggaagtctcgccaaatgatcgcgagcgggattctgctggttggaagcatcgtttgtctatctcgaggccgatccaacctcggggcgcagctcgcgatggccttcttcctgaaaaaggccttcaagcaagagaggcaatcaggctcctcatcgacatgaatggtgaaaacagacgtgactagatgcaggtggtagccgtactggtttgaccctttgagccgtgcagactccagataacgtattattagtatttttaacctttctctgattacagaatacgtgactagataacctttgaccctgagccgtgcagacaagttgtaaagagttttttccggaactagatgcttgtcaatattagtaatacaccaatgctacctgaagctaaatgcttgtcaatattggtcttatttcgttgctagagagtagagacatctgtaattcacttgagttttagtcaggtctgttaatgggtatgtgcaaaggtagtctttttgatacaaagtgttgcctattattttctaaatttctggatattgatctgat

SEQ ID NO: 25072 - DNA, 1080 bp, Zea Mays
gatcacatgaaaattattgaagacgacggtccaggtgcagccttctatgccagtgctaaggccatgactaatggaaatcacactttctatgtggtcgccgtagcctcggtgtctgtcggcttgaactcttccgtcaagggtgtcgcactcaaggaatgtgaacaccctcttgcggcacgacagagaaagtttgttagagtgcaacttctaagatcaggatggtgtattaggaaaatcccaggcagggatgcatgccaaatcacggtgctgcatcatgaggacaatggaatgaatatagagatggcaaagctagctttttccaagggcatctggagttacatatgtaaaatgagcaatgctctacgtcggtatcctcagcatggcagtccatcagtgtcaattctgaccatgcagaaacttatgaagaaggatttggagactgccgacgcaagcctttctgcttctcagaacactgcagcatcggtcgttccttccacaccgacttccaggacttcaccatgcaagcttgcggggaggaagtctcgccaaatgatcgcgagcgggattctgctggttggaagcatcgtttgtctatctcgaggccgatccaacctcggggcgcagctcgcgatggccttcttcctgaaaaaggccttcaagcaagagaggcaatcaggctcctcatcgacatgaatggtgaaaacagacgtgactagatgcaggtggtagccgtactggtttgaccctttgagccgtgcagactccagataacgtattattagtatttttaacctttctctgattacagaatacgtgactagataacctttgaccctgagccgtgcagacaagttgtaaagagttttttccggaactagatgcttgtcaatattagtaatacaccaatgctacctgaagctaaatgcttgtcaatattggtcttatttcgttgctagagagtagagacatctgtaattcacttgagttttagtcaggtctgttaatgggtatgtgcaaaggtagtctttttgatacaaagtgttgcctattattttctaaatttctggatattgatctgat

SEQ ID NO: 25073 - DNA, 466 bp, Zea Mays
gccgcagatcccgtgctccgcccccacgcccagcaggctctctcccttcccccgctgtgtctgcgtccgcggatctctccattccccaacagtgctgcatcaaggccaccattgcaaaatcgctggtcacgcccgcggatctctccgccttgccctcgcccgcctgctgttaaaaggatgaagcctgggcgaggttctgttcaactcccacaccgattcgacgagtttctattcaactcatatgaaggacaagcctccacgtcgatacaagcaaatcaacccatttcgtttgacaagtactaattgcacacgtcgatagaatcatatcttgtcaccacatagcaaggaagtcatctccatttcgtttgacaagaaggacaagcctccacgtcgatagaagcaaattaatccatttcgtttgacaagggcactcttcttgttatggatcagataggatacaatgctg

SEQ ID NO: 25074 - DNA, 1659 bp, Zea Mays
cttattctctaatcctaaaaaaggagatattgtgaagtacctgttcaggaactatggacaaggaaggagtccttcacctggtctccttgagagtacgattttcacaggatgggtgcccactcttctcagagctggaagagggatgacactgtgggacaaagccggtgctgtacctgcagagaagctggagctcttctcgtacgagaataatccctgtgcaaggatagttcgagaggctctctgtgaactggagcttccttatgttctccagaacgtcggagagggatcgtcgaggacggatttgcttctaaggaagtcgggctctaagcaggtgccatatctgatcgaccctaacactggattccagtcgggcgaccataagaagatactaccttacttattccagcagtacccagttagtagtatctagcagaaaaagcagacgtccacaactttaactgtgtatggtttatgtgatcttacatatgtatctgcgggtttagcatcttcttctctctctctcagtctcaccctgtccctcgcaaaagcatctccatccttcgctcctctcttcccgcactgttctcggaatcgctcttctcctccgcgctgttcttggaatcgaaaggtgggaagcgcaatgagcaacgagttcgattacctgttcaagcttctcctgatcggcgactcctcggtgggcaagtcctgcttcctcctccgcttcgctgacgactcctacgtggacagctacatcagcacgatcggcgtcgactttaaaatccgcacggtcgaggtggagggcaagaccgtaaagctgcagatttgggacacagcagggcaggagcggttcaggaccatcacgagcagctactacagaggagctcacgggataattattgtttatgacatcacggacatggagagcttcaacaacgtgaagcagtggcttgacgagatcgaccgatacgccaacgacagcgtgcgcaagcttcttgttggtaacaaatgtgatctggccgagaacagggctgtcgatacttcagtagcacaggcttacgctgaagaggtaggcatcccgttcctcgaaacgagcgctaaggagtcgatcaacgtcgaggaggcgttcttggcaatgtctgctgcaattaagaaaagtaaagcagggagtcaggcagccctggagaggaagccctccaatgtagttcagatgaaagggcggccgatccagcaagagcagcagaagagtagtagatgctgttcaacatgaggcacagcaatgtctgtctttggagaatcagtaaaatgattatctgctagactagatgtgtttctctgtcttcgtttgttttgagacacatatatatagttgcgaaaatgcggtggtgagaaactcgaaatgaatctgagccagaactcggaccgccaaatttcatcatttttactcacaaatttctaccatattgaacagcgagataatccaaccttgaaaaggtagtttatttacacatgcagagcttgcgtagatacaaatactaattttccccaagatgggagcggcagagcttatgcgttactttctcgttgggtttgattttgtcctaagtcaaaattttctagctttgaccaaatttgttgaaaaatatgacaacattaacttag

SEQ ID NO: 25075 - DNA, 2350 bp, Zea Mays
tgcgaccaaaaagcccattgcgctggtccgagagggggccacgacgactcagtggcctggtccacagagccagccgaactgcccgtccgcctcccgcgacggccgccacacgccgggtgccagtggtcacgctcacgccgactcccagctccagggcgccctcaaaccagcgctggctgccatgctgccgctcgcacactccgccggctgcagccatctccacctccctcccgctccgagtcgagcttaccttcccaatcgccgccgcgtccgatccctcgtccgagcgcgccctcccagcgcgggggcgtccggaactgaaaccacctctaccactagcggcagcgttatgtcgttcctgtgcccgctcctcaaactcctcgggggaggcgatccttcgcagcaacggaacgacgttgtggaggtcacgacatcttcaatttcaagtttatccagactgccatggggatcaaaagtggctactagcagcggggagaacatcgattcagcaataagcattccaactcttcaactaggcatgtcccttctgtaggagagttcgggaggccatgaccgagcttgacctttctgcagaggtttatccttgtccaaaagggtcgctaaggcacagggacatagtcaagaaaattggagggaaggagcagtttccactccttgttgacgccagtactggtatctcaatgtatgaaagtggagatattgtgaagtacctgttcaggaactatggacaaggaaggagtccttcacctggtctccttgagagtacgattttcacaggatgggtgcccactcttctcagagctggaagagggatgacactgtgggacaaagccggtgctgtacctgcagagaagctggagctcttctcgtacgagaataatccctgtgcaaggatagttcgagaggctctctgtgaactggagcttccttatgttctccagaacgtcggagagggatcgtcgaggacggatttgcttctaaggaagtcgggctctaagcaggtgccatatctgatcgaccctaacactggattccagtcgggcgaccataagaagatactaccttacttattccagcagtacccagttagtagtatctagcagaaaaagcagacgtccacaactttaactgtgtatggtttatgtgatcttacatatgtatctgcgggtttagcatcttcttctctctctctcagtctcaccctgtccctcgcaaaagcatctccatccttcgctcctctcttcccgcactgttctcggaatcgctcttctcctccgcgctgttcttggaatcgaaaggtgggaagcgcaatgagcaacgagttcgattacctgttcaagcttctcctgatcggcgactcctcggtgggcaagtcctgcttcctcctccgcttcgctgacgactcctacgtggacagctacatcagcacgatcggcgtcgactttaaaatccgcacggtcgaggtggagggcaagaccgtaaagctgcagatttgggacacagcagggcaggagcggttcaggaccatcacgagcagctactacagaggagctcacgggataattattgtttatgacatcacggacatggagagcttcaacaacgtgaagcagtggcttgacgagatcgaccgatacgccaacgacagcgtgcgcaagcttcttgttggtaacaaatgtgatctggccgagaacagggctgtcgatacttcagtagcacaggcttacgctgaagaggtaggcatcccgttcctcgaaacgagcgctaaggagtcgatcaacgtcgaggaggcgttcttggcaatgtctgctgcaattaagaaaagtaaagcagggagtcaggcagccctggagaggaagccctccaatgtagttcagatgaaagggcggccgatccagcaagagcagcagaagagtagtagatgctgttcaacatgaggcacagcaatgtctgtctttggagaatcagtaaaatgattatctgctagactagatgtgtttctctgtcttcgtttgttttgagacacatatatatagttgcgaaaatgcggtggtgagaaactcgaaatgaatctgagccagaactcggaccgccaaatttcatcatttttactcacaaatttctaccatattgaacagcgagataatccaaccttgaaaaggtagtttatttacacatgcagagcttgcgtagatacaaatactaattttccccaagatgggagcggcagagcttatgcgttactttctcgttgggtttgattttgtcctaagtcaaaattttctagctttgaccaaatttgttgaaaaatatgacaacattaacttag

SEQ ID NO: 25076 - DNA, 1400 bp, Zea Mays
aagggctgcacttgaataaaccagtgtgaaatgcttattttgtgaaattaagagttgctacttgctagtgcatcttgttgtatgtctggagcaatccttctggaacttttcataattgatcttggttcttggctttcatttgctctagcagcaagtcaaatgaaggacaaggctcgtgttgttgccatggatctaagggggcatggaaaatcaacaacgaatgatgatctggatttgtccattgaaactcttaccaatgatgtcatagctgttatacgtacaatgtatggagatttgccaccagcaattatacttgttgggcatagcatgggcggttcagtggctatacatgtggctgcaagaaaagaaattagaaatcttcatgggcttgttgtcgttgatgttgtcgagggaacagcaatggcttcattagttcatatgcagaagatcttagcaaaccgggcacagcattttcctagcattgaaaaagcaattgaatggagtgtcaaaggtgggccattaaggaacatcgagtctgctcgtgtgtccattccatctaccctgaaatacgatgaatcacgagaatgctatacatatcgcactcctcttgagcaaacagaaaagtactggaaaggatggtatgaaggtctttcagacaagttcctatcttgcccagtgcaaaagatcctgttgttagctggtaccgacagactggacagttggtttacaatttgcagagctttaacaatcggtcaaatgcaaggaaaatttcaaatggtggtgattcggcacactggacatgctatacaggaagatgtacctgaagaatttgcatcgcacatactgaagttcatatcccgcaacaaaatagggcctaatggtgtcgagatacctgggctcattaaaaaatggcagcagtagacataatgtacaagttaccgttctggaaaatgttcaggaaaatgatgagtaggtctgcctatccgagttctcttcatatcgaattaaaaaaaggttcaagatgatcatgcgatcgttaacaatcagtcattggtttcgtcatctgttggcaactctcccatgtcgcttgagttgctttgtttctgacatcactctgcgacctgccggcgtcttttgtacgagggttcttgtatgtttttaggtagagctgagtgcagtgcgttgtaatgctttccgtgaggttactatactgctatcaagcaggatcagctcgttatgacagctctgtttcgaatttctgctggcctcggcaagcttgatgggagtaaatcgaagaagcctttgataattatctatttatcttccgcttcaacggagccgagatgtgcaaaaaaaaaacaaacatgagaaatgagcataggtacataaagaaaattgag

SEQ ID NO: 25077 - DNA, 1666 bp, Zea Mays
cagagacagaaccgcttcctctcggaatcgggcgttctgggctcctctgtttcctttcgtcaccgtcctcgccgttgtgttcctctctcagtctcggggcttcttctcgcgggcacctccggctgcttcctttgccaccgcagcaccagcgctgtccatggagcccccgccgctctcctcgttgcaggaggagggggaggaggggcctaccgtcgaggactcgtccgtcttctccgccgccgttgtgccgcctcgccccgccacgcaccactcgctccacaagtacgcgcctctggactggtccgcctacttcgacgaggagcgccgcgtagccatccccgacaccgacaacgttttcaatgcgtacacgaccggatcggaggggcccgtcgtgttctgcctgcacggaggcggttattcggggctttcatttgctctagcagcaagtcaaatgaaggacaaggctcgtgttgttgccatggatctaagggggcatggaaaatcaacaacgaatgatgatctggatttgtccattgaaactcttaccaatgatgtcatagctgttatacgtacaatgtatggagatttgccaccagcaattatacttgttgggcatagcatgggcggttcagtggctatacatgtggctgcaagaaaagaaattagaaatcttcatgggcttgttgtcgttgatgttgtcgagggaacagcaatggcttcattagttcatatgcagaagatcttagcaaaccgggcacagcattttcctagcattgaaaaagcaattgaatggagtgtcaaaggtgggccattaaggaacatcgagtctgctcgtgtgtccattccatctaccctgaaatacgatgaatcacgagaatgctatacatatcgcactcctcttgagcaaacagaaaagtactggaaaggatggtctttcagacaagttcctatcttgcccagtgcaaaagatcctgttgttagctggtaccgacagactggacagagctttaacaatcggtcaaatgcaaggaaaatttcaaatggtggtgattcggcacactggacatgctatacaggaagatgtacctgaagaatttgcatcgcacatactgaagttcatatcccgcaacaaaatagggcctaatggtgtcgagatacctgggctcattaaaaaatggcagcagtagacataatgtacaagttaccgttctggaaaatgttcaggaaaatgatgagtaggtctgcctatccgagttctcttcatatcgaattaaaaaaaggttcaagatgatcatgcgatcgttaacaatcagtcattggtttcgtcatctgttggcaactctcccatgtcgcttgagttgctttgtttctgacatcactctgcgacctgccggcgtcttttgtacgagggttcttgtatgtttttaggtagagctgagtgcagtgcgttgtaatgctttccgtgaggttactatactgctatcaagcaggatcagctcgttatgacagctctgtttcgaatttctgctggcctcggcaagcttgatgggagtaaatcgaagaagcctttgataattatctatttatcttccgcttcaacggagccgagatgtgcaaaaaaaaaacaaacatgagaaatgagcataggtacataaagaaaattgag

SEQ ID NO: 25078 - DNA, 1673 bp, Zea Mays
cagagacagaaccgcttcctctcggaatcgggcgttctgggctcctctgtttcctttcgtcaccgtcctcgccgttgtgttcctctctcagtctcggggcttcttctcgcgggcacctccggctgcttcctttgccaccgcagcaccagcgctgtccatggagcccccgccgctctcctcgttgcaggaggagggggaggaggggcctaccgtcgaggactcgtccgtcttctccgccgccgttgtgccgcctcgccccgccacgcacagccactcgctccacaagtacgcgcctctggactggtccgcctacttcgacgaggagcgccgcgtagccatccccgacaccgacaacgttttcaatgcgtacacgaccggatcggaggggcccgtcgtgttctgcctgcacggaggcggttattcggggctttcatttgctctagcagcaagtcaaatgaaggacaaggctcgtgttgttgccatggatctaagggggcatggaaaatcaacaacgaatgatgatctggatttgtccattgaaactcttaccaatgatgtcatagctgttatacgtacaatgtatggagatttgccaccagcaattatacttgttgggcatagcatgggcggttcagtggctatacatgtggctgcaagaaaagaaattagaaatcttcatgggcttgttgtcgttgatgttgtcgagggaacagcaatggcttcattagttcatatgcagaagatcttagcaaaccgggcacagcattttcctagcattgaaaaagcaattgaatggagtgtcaaaggtgggccattaaggaacatcgagtctgctcgtgtgtccattccatctaccctgaaatacgatgaatcacgagaatgctatacatatcgcactcctcttgagcaaacagaaaagtactggaaaggatggtatgaaggtctttcagacaagttcctatcttgcccagtgcaaaagatcctgttgttagctggtaccgacagactggacagagctttaacaatcggtcaaatgcaaggaaaatttcaaatggtggtgattcggcacactggacatgctatacagatgtacctgaagaatttgcatcgcacatactgaagttcatatcccgcaacaaaatagggcctaatggtgtcgagatacctgggctcattaaaaaatggcagcagtagacataatgtacaagttaccgttctggaaaatgttcaggaaaatgatgagtaggtctgcctatccgagttctcttcatatcgaattaaaaaaaggttcaagatgatcatgcgatcgttaacaatcagtcattggtttcgtcatctgttggcaactctcccatgtcgcttgagttgctttgtttctgacatcactctgcgacctgccggcgtcttttgtacgagggttcttgtatgtttttaggtagagctgagtgcagtgcgttgtaatgctttccgtgaggttactatactgctatcaagcaggatcagctcgttatgacagctctgtttcgaatttctgctggcctcggcaagcttgatgggagtaaatcgaagaagcctttgataattatctatttatcttccgcttcaacggagccgagatgtgcaaaaaaaaaacaaacatgagaaatgagcataggtacataaagaaaattgag

SEQ ID NO: 25079 - DNA, 2647 bp, Zea Mays
cacacacccaccgcgcgcagcgcagtccatccatccacgcacacgcgcacccgtccctctcggcgcccctctcccccctcctccactccgctgctgcctgcttgcctcctccttgccgccgcgaccgcgaccgccgttcgctgtcgaggccagaggagaggagtggtcaagtccgaggccacctgcccaggctcagacctcccccgccacaacgcgagccgcatcgcctcgtctcctccacgccatacacgcccgccttcccttccccggcgaccaggacccctcgcccgcggcgccagcgagctcccccggccagtcgtaggcctcccggagctcagcacgcacgcaggtgggtccagtgaggcctggttgtgcgcgttcctgcgggcgtcgtcggggcagatccatggaactcagccgcccgcagcgcggatagtactgcacttgtgcaccagccaccagcggatcgccaggactgcccacctgctgctgcttgtgtcgctagccatttttcgggcgtctggcttggaggatatggccgcggcgatggacgcgcccaaccctggagcggctgctggcccaggaatgcctagtgacgccctgtaccaggagctgtggcatgcgtgtgctggcccgttggtcacagtacctagacaaggcgagcgtgtctattacttccctcagggccatatggagcagctcgaggcgtctgcacaccaccagcagcttgatcagtacttaccgatgttcgatctaccacccaagatcctatgcagagtagtcaacgtggaactacgggccgaagctgattcagatgaagtttatgctcaaattatgttgcagccagaagctgatcaaaatgaactcaccagcctggacgctgaaccacaagaacgtgaaaaatgcactgcccattccttctgcaagacactgacagcttcagatacgagcactcacggcgggttttctgttcttcggaggcatgctgaggaatgtcttcctcagctggacatgtctcaaaatccaccttgccaagaactggttgccaaagatctccatggcactgaatggcattttcggcacatttttcgagggcaacccaagaggcatctccttaccaccggctggagtgtctttgttagctcaaaaagattggtttctggggatgcattcatcttcatgagaggtgaaaatggtgagctacgggttggtgtaaggaggctcatgagacaagtaaatagcatgccgtcatctgtcatatcaagccacagcatgcatcttggagtattggccacagcctcccatgccatctccactggaaccctcttttctgttttctacaaaccaagaactagtcgctctgattttattgtgagtgtgaacaagtaccttgaagctaagaagcagaaaatatctgttggaatgaggtttaagatgagatttgaaggtgatgatgctcctgaaagaaggttcagcggaacaatcattggcatcgggagtttgccggcaatgtcaaaatctctgtgggcagattctgactggagatctctaaaggttcaatgggatgaaccttcatccattcttcgtccagatagaatctcaccatgggaagtggagccactggatgcagctaatccacaatcccctcaacctccactaagggctaagcgtccacgacccccagcttcaccttgtatggtttcggaactgccttcaggttttggactctggaaatccccaattgaatcatcctgtacactctcattttcggaacctcaacgggctcgagagttatttccttcaatccccacgtcaaccttgtcatcttcatcaaatgtcagttttaattcaaagaatgagccgtccatgctaaccagtcagttctactggtcagcaaggcatacaagagctgactcctgcgctgctagcaccaacacagtcgtaattgaaaagaagcaagagccaagttctggtggttgtagattgtttggaattaatatatgctcagctgaggaagaagtattacctgaggttactgctccaggtgttggttatgagcagactgctgcctctgtagagttgaactcggataagctctcacagccatctgatgtcaacaattctgatgccctagcagctagcagtgaacgttcacctcttgaatcccaaagccggcaagtgaggagctgtaccaaggtaattatgcaaggaatggcagtaggaagggctgtagacctgacaaagcttagtggctacagcgatctttgccagaagctggaggagatgtttgacatccagggggagctgggttccacactaaagaaatggcgggtcattttcactgatgatgaggatgacatgatgcttgttggagatgatccttgggatgagttttgcaggatggtgaaaaggatttacatttacacatacgaggaggcaaagaagctgacatccaagtcaaagttaccggtgggagaagttgtatgtttctttcagtaacaatctttgtgcaagtgatctgtatatagtctactgttttaataagcaatgttgtgcaacttgcgctcctacaccctacagtacagtggggcttttcttgtgcttactgttcgcttgatgactgtctacatttggctgtgcctttttg

SEQ ID NO: 25080 - DNA, 3162 bp, Zea Mays
cacacacccaccgcgcgcagcgcagtccatccatccacgcacacgcgcacccgtccctctcggcgcccctctcccccctcctccactccgctgctgcctgcttgcctcctccttgccgccgcgaccgcgaccgccgttcgctgtcgaggccagaggagaggagtggtcaagtccgaggccacctgcccaggctcagacctcccccgccacaacgcgagccgcatcgcctcgtctcctccacgccatacacgcccgccttcccttccccggcgaccaggacccctcgcccgcggcgccagcgagctcccccggccagtcgtaggcctcccggagctcagcacgcacgcaggtgggtccagtgaggcctggttgtgcgcgttcctgcgggcgtcgtcggggcagatccatggaactcagccgcccgcagcgcggatagtactgcacttgtgcaccagccaccagcggatcgccaggactgcccacctgctgctgcttgtgtcgctagccatttttcgggcgtctggcttggaggatatggccgcggcgatggacgcgcccaaccctggagcggctgctggcccaggaatgcctagtgacgccctgtaccaggagctgtggcatgcgtgtgctggcccgttggtcacagtacctagacaaggcgagcgtgtctattacttccctcagggccatatggagcagctcgaggcgtctgcacaccaccagcagcttgatcagtacttaccgatgttcgatctaccacccaagatcctatgcagagtagtcaacgtggaactacgggccgaagctgattcagatgaagtttatgctcaaattatgttgcagccagaagctgatcaaaatgaactcaccagcctggacgctgaaccacaagaacgtgaaaaatgcactgcccattccttctgcaagacactgacagcttcagatacgagcactcacggcgggttttctgttcttcggaggcatgctgaggaatgtcttcctcagctggacatgtctcaaaatccaccttgccaagaactggttgccaaagatctccatggcactgaatggcattttcggcacatttttcgagggcaacccaagaggcatctccttaccaccggctggagtgtctttgttagctcaaaaagattggtttctggggatgcattcatcttcatgagaggtgaaaatggtgagctacgggttggtgtaaggaggctcatgagacaagtaaatagcatgccgtcatctgtcatatcaagccacagcatgcatcttggagtattggccacagcctcccatgccatctccactggaaccctcttttctgttttctacaaaccaagaactagtcgctctgattttattgtgagtgtgaacaagtaccttgaagctaagaagcagaaaatatctgttggaatgaggtttaagatgagatttgaaggtgatgatgctcctgaaagaaggttcagcggaacaatcattggcatcgggagtttgccggcaatgtcaaaatctctgtgggcagattctgactggagatctctaaaggttcaatgggatgaaccttcatccattcttcgtccagatagaatctcaccatgggaagtggagccactggatgcagctaatccacaatcccctcaacctccactaagggctaagcgtccacgacccccagcttcaccttgtatggtttcggaactgccttcaggactctggaaatccccaattgaatcatcctgtacactctcattttcggaacctcaacgggctcgagagttatttccttcaatccccacgtcaaccttgtcatcttcatcaaatgtcagttttaattcaaagaatgagccgtccatgctaaccagtcagttctactggtcagcaaggcatacaagagctgactcctgcgctgctagcaccaacacagtcgtaattgaaaagaagcaagagccaagttctggtggttgtagattgtttggaattaatatatgctcagctgaggaagaagtattacctgaggttactgctccaggtgttggttatgagcagactgctgcctctgtagagttgaactcggataagctctcacagccatctgatgtcaacaattctgatgccctagcagctagcagtgaacgttcacctcttgaatcccaaagccggcaagtgaggagctgtaccaaggtaattatgcaaggaatggcagtaggaagggctgtagacctgacaaagcttagtggctacagcgatctttgccagaagctggaggagatgtttgacatccagggggagctgggttccacactaaagaaatggcgggtcattttcactgatgatgaggatgacatgatgcttgttggagatgatccttgggatgagttttgcaggatggtgaaaaggatttacatttacacatacgaggaggcaaagaagctgacatccaagtcaaagttaccggttagcagtgacagcagcaagctgagcgctgcgaactcactgtctgaatgactatgaacaaaaactgcagagtgctaacgtccctctaattttgttatttccatcatttgattatgggggtgaatgctcacggttgctccgtgggctgaagttgtggttggcattcaactgccttgagttttggaggcttttggactgccttgccagcatgagcctcctggaagaggcaccctggcatctgcgtgccatttcccatttgttcgtgccgtttggtaggagtatccattggcttatttagcaggtccctggtttgaagaaagaagcggtcagctgcaagatggacggtgccttgcctcttcttcgactacttagctagtaattaggactatgtatgtaatgaatgtatatagtgccattaagacgcccatgccctggtattgaggtcccggcatttgtatgaatcaattgttcggaaattgttacctttagcagcaacgaacctgagggtgtagggtggccaggtgggagaagttgtatgtttctttcagtaacaatctttgtgcaagtgatctgtatatagtctactgttttaataagcaatgttgtgcaacttgcgctcctacaccctacagtacagtggggcttttcttgtgcttactgttcgcttgatgactgtctacatttggctgtgcctttttg

SEQ ID NO: 25081 - DNA, 3167 bp, Zea Mays
cacccatgtagccaccccccacccacccacaccacacacacacccaccgcgcgcagcgcagtccatccatccacgcacacgcgcacccgtccctctcggcgcccctctcccccctcctccactccgctgctgcctgcttgcctcctccttgccgccgcgaccgcgaccgccgttcgctgtcgaggccagaggagaggagtggtcaagtccgaggccacctgcccaggctcagacctcccccgccacaacgcgagccgcatcgcctcgtctcctccacgccatacacgcccgccttcccttccccggcgaccaggacccctcgcccgcggcgccagcgagctcccccggccagtcgtaggcctcccggagctcagcacgcacgcaggtgggtccagtgaggcctggttgtgcgcgttcctgcgggcgtcgtcggggcagatccatggaactcagccgcccgcagcgcggatagtactgcacttgtgcaccagccaccagcggatcgccaggactgcccacctgctgctgcttgtgtcgctagccatttttcgggcgtctggcttggaggatatggccgcggcgatggacgcgcccaaccctggagcggctgctggcccaggaatgcctagtgacgccctgtaccaggagctgtggcatgcgtgtgctggcccgttggtcacagtacctagacaaggcgagcgtgtctattacttccctcagggccatatggagcagctcgaggcgtctgcacaccaccagcagcttgatcagtacttaccgatgttcgatctaccacccaagatcctatgcagagtagtcaacgtggaactacgggccgaagctgattcagatgaagtttatgctcaaattatgttgcagccagaagctgatcaaaatgaactcaccagcctggacgctgaaccacaagaacgtgaaaaatgcactgcccattccttctgcaagacactgacagcttcagatacgagcactcacggcgggttttctgttcttcggaggcatgctgaggaatgtcttcctcagctggacatgtctcaaaatccaccttgccaagaactggttgccaaagatctccatggcactgaatggcattttcggcacatttttcgagggcaacccaagaggcatctccttaccaccggctggagtgtctttgttagctcaaaaagattggtttctggggatgcattcatcttcatgagaggtgaaaatggtgagctacgggttggtgtaaggaggctcatgagacaagtaaatagcatgccgtcatctgtcatatcaagccacagcatgcatcttggagtattggccacagcctcccatgccatctccactggaaccctcttttctgttttctacaaaccaagaactagtcgctctgattttattgtgagtgtgaacaagtaccttgaagctaagaagcagaaaatatctgttggaatgaggtttaagatgagatttgaaggtgatgatgctcctgaaagaaggttcagcggaacaatcattggcatcgggagtttgccggcaatgtcaaaatctctgtgggcagattctgactggagatctctaaagatagaatctcaccatgggaagtggagccactggatgcagctaatccacaatcccctcaacctccactaagggctaagcgtccacgacccccagcttcaccttgtatggtttcggaactgccttcaggttttggactctggaaatccccaattgaatcatcctgtacactctcattttcggaacctcaacgggctcgagagttatttccttcaatccccacgtcaaccttgtcatcttcatcaaatgtcagttttaattcaaagaatgagccgtccatgctaaccagtcagttctactggtcagcaaggcatacaagagctgactcctgcgctgctagcaccaacacagtcgtaattgaaaagaagcaagagccaagttctggtggttgtagattgtttggaattaatatatgctcagctgaggaagaagtattacctgaggttactgctccaggtgttggttatgagcagactgctgcctctgtagagttgaactcggataagctctcacagccatctgatgtcaacaattctgatgccctagcagctagcagtgaacgttcacctcttgaatcccaaagccggcaagtgaggagctgtaccaaggtaattatgcaaggaatggcagtaggaagggctgtagacctgacaaagcttagtggctacagcgatctttgccagaagctggaggagatgtttgacatccagggggagctgggttccacactaaagaaatggcgggtcattttcactgatgatgaggatgacatgatgcttgttggagatgatccttgggatgagttttgcaggatggtgaaaaggatttacatttacacatacgaggaggcaaagaagctgacatccaagtcaaagttaccggttagcagtgacagcagcaagctgagcgctgcgaactcactgtctgaatgactatgaacaaaaactgcagagtgctaacgtccctctaattttgttatttccatcatttgattatgggggtgaatgctcacggttgctccgtgggctgaagttgtggttggcattcaactgccttgagttttggaggcttttggactgccttgccagcatgagcctcctggaagaggcaccctggcatctgcgtgccatttcccatttgttcgtgccgtttggtaggagtatccattggcttatttagcaggtccctggtttgaagaaagaagcggtcagctgcaagatggacggtgccttgcctcttcttcgactacttagctagtaattaggactatgtatgtaatgaatgtatatagtgccattaagacgcccatgccctggtattgaggtcccggcatttgtatgaatcaattgttcggaaattgttacctttagcagcaacgaacctgagggtgtagggtggccaggtgggagaagttgtatgtttctttcagtaacaatctttgtgcaagtgatctgtatatagtctactgttttaataagcaatgttgtgcaacttgcgctcctacaccctacagtacagtggggcttttcttgtgcttactgttcgcttgatgactgtctacatttggctgtgcctttttg

SEQ ID NO: 25082 - DNA, 3530 bp, Zea Mays
cacccatgtagccaccccccacccacccacaccacacacacacccaccgcgcgcagcgcagtccatccatccacgcacacgcgcacccgtccctctcggcgcccctctcccccctcctccactccgctgctgcctgcttgcctcctccttgccgccgcgaccgcgaccgccgttcgctgtcgaggccagaggagaggagtggtcaagtccgaggccacctgcccaggctcagacctcccccgccacaacgcgagccgcatcgcctcgtctcctccacgccatacacgcccgccttcccttccccggcgaccaggacccctcgcccgcggcgccagcgagctcccccggccagtcgtaggcctcccggagctcagcacgcacgcaggtgggtccagtgaggcctggttgtgcgcgttcctgcgggcgtcgtcggggcagatccatggaactcagccgcccgcagcgcggatagtactgcacttgtgcaccagccaccagcggatcgccaggactgcccacctgctgctgcttgtgtcgctagccatttttcgggcgtctggcttggaggatatggccgcggcgatggacgcgcccaaccctggagcggctgctggcccaggaatgcctagtgacgccctgtaccaggagctgtggcatgcgtgtgctggcccgttggtcacagtacctagacaaggcgagcgtgtctattacttccctcagggccatatggagcagctcgaggcgtctgcacaccaccagcagcttgatcagtacttaccgatgttcgatctaccacccaagatcctatgcagagtagtcaacgtggaactacgggccgaagctgattcagatgaagtttatgctcaaattatgttgcagccagaagctgatcaaaatgaactcaccagcctggacgctgaaccacaagaacgtgaaaaatgcactgcccattccttctgcaagacactgacagcttcagatacgagcactcacggcgggttttctgttcttcggaggcatgctgaggaatgtcttcctcagctggacatgtctcaaaatccaccttgccaagaactggttgccaaagatctccatggcactgaatggcattttcggcacatttttcgagggcaacccaagaggcatctccttaccaccggctggagtgtctttgttagctcaaaaagattggtttctggggatgcattcatcttcatgagaggtgaaaatggtgagctacgggttggtgtaaggaggctcatgagacaagtaaatagcatgccgtcatctgtcatatcaagccacagcatgcatcttggagtattggccacagcctcccatgccatctccactggaaccctcttttctgttttctacaaaccaaggtttgatgttgttttgctttatctatacatatgtctgcagtgcacttcttattaatggatgtgcaactgtcctgatttgactgtactttctgtttgctaatttcactctgtttcaaatttcaaagtcagttctgtactctgctttagttgtaaacaagctttttgattgtagctactgcatccattgagtgatgtcttatcccttgccccttcctttgcaccaaagatacacactatggttgtcctagttagcattatcgtgtgcatgttttgtttccttcataatcttgctcgctaaactttatgctccttttatgtgttcccagaactagtcgctctgattttattgtgagtgtgaacaagtaccttgaagctaagaagcagaaaatatctgttggaatgaggtttaagatgagatttgaaggtgatgatgctcctgaaagaaggttcagcggaacaatcattggcatcgggagtttgccggcaatgtcaaaatctctgtgggcagattctgactggagatctctaaaggttcaatgggatgaaccttcatccattcttcgtccagatagaatctcaccatgggaagtggagccactggatgcagctaatccacaatcccctcaacctccactaagggctaagcgtccacgacccccagcttcaccttgtatggtttcggaactgccttcaggttttggactctggaaatccccaattgaatcatcctgtacactctcattttcggaacctcaacgggctcgagagttatttccttcaatccccacgtcaaccttgtcatcttcatcaaatgtcagttttaattcaaagaatgagccgtccatgctaaccagtcagttctactggtcagcaaggcatacaagagctgactcctgcgctgctagcaccaacacagtcgtaattgaaaagaagcaagagccaagttctggtggttgtagattgtttggaattaatatatgctcagctgaggaagaagtattacctgaggttactgctccaggtgttggttatgagcagactgctgcctctgtagagttgaactcggataagctctcacagccatctgatgtcaacaattctgatgccctagcagctagcagtgaacgttcacctcttgaatcccaaagccggcaagtgaggagctgtaccaaggtaattatgcaaggaatggcagtaggaagggctgtagacctgacaaagcttagtggctacagcgatctttgccagaagctggaggagatgtttgacatccagggggagctgggttccacactaaagaaatggcgggtcattttcactgatgatgaggatgacatgatgcttgttggagatgatccttgggatgagttttgcaggatggtgaaaaggatttacatttacacatacgaggaggcaaagaagctgacatccaagtcaaagttaccggttagcagtgacagcagcaagctgagcgctgcgaactcactgtctgaatgactatgaacaaaaactgcagagtgctaacgtccctctaattttgttatttccatcatttgattatgggggtgaatgctcacggttgctccgtgggctgaagttgtggttggcattcaactgccttgagttttggaggcttttggactgccttgccagcatgagcctcctggaagaggcaccctggcatctgcgtgccatttcccatttgttcgtgccgtttggtaggagtatccattggcttatttagcaggtccctggtttgaagaaagaagcggtcagctgcaagatggacggtgccttgcctcttcttcgactacttagctagtaattaggactatgtatgtaatgaatgtatatagtgccattaagacgcccatgccctggtattgaggtcccggcatttgtatgaatcaattgttcggaaattgttacctttagcagcaacgaacctgagggtgtagggtggccaggtgggagaagttgtatgtttctttcagtaacaatctttgtgcaagtgatctgtatatagtctactgttttaataagcaatgttgtgcaacttgcgctcctacaccctacagtacagtggggcttttcttgtgcttactgttcgcttgatgactgtctacatttggctgtgcctttttg

SEQ ID NO: 25083 - DNA, 3166 bp, Zea Mays
tcccacccatgtagccaccccccacccacccacaccacacacacacccaccgcgcgcagcgcagtccatccatccacgcacacgcgcacccgtccctctcggcgcccctctcccccctcctccactccgctgctgcctgcttgcctcctccttgccgccgcgaccgcgaccgccgttcgctgtcgaggccagaggagaggagtggtcaagtccgaggccacctgcccaggctcagacctcccccgccacaacgcgagccgcatcgcctcgtctcctccacgccatacacgcccgccttcccttccccggcgaccaggacccctcgcccgcggcgccagcgagctcccccggccagtcgtaggcctcccggagctcagcacgcacgcaggtgggtccagtgaggcctggttgtgcgcgttcctgcgggcgtcgtcggggcagatccatggaactcagccgcccgcagcgcggatagtactgcacttgtgcaccagccaccagcggatcgccaggactgcccacctgctgctgcttgtgtcgctagccatttttcgggcgtctggcttggaggatatggccgcggcgatggacgcgcccaaccctggagcggctgctggcccaggaatgcctagtgacgccctgtaccaggagctgtggcatgcgtgtgctggcccgttggtcacagtacctagacaaggcgagcgtgtctattacttccctcagggccatatggagcagctcgaggcgtctgcacaccaccagcagcttgatcagtacttaccgatgttcgatctaccacccaagatcctatgcagagtagtcaacgtggaactacgggccgaagctgattcagatgaagtttatgctcaaattatgttgcagccagaagctgatcaaaatgaactcaccagcctggacgctgaaccacaagaacgtgaaaaatgcactgcccattccttctgcaagacactgacagcttcagatacgagcactcacggcgggttttctgttcttcggaggcatgctgaggaatgtcttcctcagctggacatgtctcaaaatccaccttgccaagaactggttgccaaagatctccatggcactgaatggcattttcggcacatttttcgagggcaacccaagaggcatctccttaccaccggctggagtgtctttgttagctcaaaaagattggtttctggggatgcattcatcttcatgagaggtgaaaatggtgagctacgggttggtgtaaggaggctcatgagacaagtaaatagcatgccgtcatctgtcatatcaagccacagcatgcatcttggagtattggccacagcctcccatgccatctccactggaaccctcttttctgttttctacaaaccaagaactagtcgctctgattttattgtgagtgtgaacaagtaccttgaagctaagaagcagaaaatatctgttggaatgaggtttaagatgagatttgaaggtgatgatgctcctgaaagaaggttcagcggaacaatcattggcatcgggagtttgccggcaatgtcaaaatctctgtgggcagattctgactggagatctctaaagaatctcaccatgggaagtggagccactggatgcagctaatccacaatcccctcaacctccactaagggctaagcgtccacgacccccagcttcaccttgtatggtttcggaactgccttcaggttttggactctggaaatccccaattgaatcatcctgtacactctcattttcggaacctcaacgggctcgagagttatttccttcaatccccacgtcaaccttgtcatcttcatcaaatgtcagttttaattcaaagaatgagccgtccatgctaaccagtcagttctactggtcagcaaggcatacaagagctgactcctgcgctgctagcaccaacacagtcgtaattgaaaagaagcaagagccaagttctggtggttgtagattgtttggaattaatatatgctcagctgaggaagaagtattacctgaggttactgctccaggtgttggttatgagcagactgctgcctctgtagagttgaactcggataagctctcacagccatctgatgtcaacaattctgatgccctagcagctagcagtgaacgttcacctcttgaatcccaaagccggcaagtgaggagctgtaccaaggtaattatgcaaggaatggcagtaggaagggctgtagacctgacaaagcttagtggctacagcgatctttgccagaagctggaggagatgtttgacatccagggggagctgggttccacactaaagaaatggcgggtcattttcactgatgatgaggatgacatgatgcttgttggagatgatccttgggatgagttttgcaggatggtgaaaaggatttacatttacacatacgaggaggcaaagaagctgacatccaagtcaaagttaccggttagcagtgacagcagcaagctgagcgctgcgaactcactgtctgaatgactatgaacaaaaactgcagagtgctaacgtccctctaattttgttatttccatcatttgattatgggggtgaatgctcacggttgctccgtgggctgaagttgtggttggcattcaactgccttgagttttggaggcttttggactgccttgccagcatgagcctcctggaagaggcaccctggcatctgcgtgccatttcccatttgttcgtgccgtttggtaggagtatccattggcttatttagcaggtccctggtttgaagaaagaagcggtcagctgcaagatggacggtgccttgcctcttcttcgactacttagctagtaattaggactatgtatgtaatgaatgtatatagtgccattaagacgcccatgccctggtattgaggtcccggcatttgtatgaatcaattgttcggaaattgttacctttagcagcaacgaacctgagggtgtagggtggccaggtgggagaagttgtatgtttctttcagtaacaatctttgtgcaagtgatctgtatatagtctactgttttaataagcaatgttgtgcaacttgcgctcctacaccctacagtacagtggggcttttcttgtgcttactgttcgcttgatgactgtctacatttggctgtgcctttttg

SEQ ID NO: 25084 - DNA, 3580 bp, Zea Mays
tttttactggtgcggtgaggcgaggccaggcaattccgtgaatggttggcctgcaaagcaaggaagaagccacggagcccgtcgtggtcctctcaagaagaagaccatgggcagcgccttgaagcgaagcttctggctgctgagcataaaaggctaatccttcttggcgaaggcacataaccgactcgaccaagttggatgaactcagacaagctgctaagaatgatgtggatatgaggtttgagaaggaaagggaagactcgagaccagagttgagtctcgtgtccgacaggcagaggagaaccgcatgcgccttctgcatgccgatatgcagaagcgggccgcactgaaggagaggacagcgaggtccctggtgcagaaggcaaaatcagagagcaaatacatggagcaggtgcgctctgcaatttctctgaagcgcgctgctgctgagaagaaacgactgaggttgctggaagctgaaaagaccaaggctcaagctaggcttttacgcatccaaaaagctgccatgactgtatgcagccggagagaatcagagaggagaaaactgaaagaacagctggacaacaaacttcaaagggcgaagaggcagagggctgagtatttgaaacaaagaggaagtcctcgtggttcaacccatgctgattacttaaagcatgcatatgccctttcaagaaaactagcaagacactggagaatatttgtgaagtccaggaagacaacatttgctttggctcaagcttatgatgccttggggattaatgagaagtctgtgaaaaatatgccttttgaaaaattagccatgtcaatggaatctcctgtagttcttcggagcacgaaggcattactcgaccgattggagaaacgccttgtcatttctcattcagtagcatcttcatcagtagaaaatgttgatcatcttctgaaacgccttggttctcccccaaggaggaaggctcctcctagcagagaaggaaaaactcgggcagtggtaaaaagaccagctaaaagttctgaggcaagcatcaaattgcccagatactcactgagggtggtgctctgtgcttacatgatactggctcatcccagtgctgttttaagtgggcaaggtgagcgggagaaacagcttatcgagtcggcagcaaactttatcaaggagttcgagctgttgattaaggtaattcttgatggaccagggcagtcatctggtgttactggccagaggaagttcagggcacagttggctaattttgacaaggcgtggtgttcgtatctttacagctttgtggtgtggaaggtaaaagatgcaagattattggaggaagatcttgtcagggctgcatgcaagcttgagttgtcaatgatgcaaacatgcaagctaactgcagacaggcactcgcaaaacaatcttacacatgacatgaaggcaattcagaaacaggttattgatgatcaaaagcttttacgagataaggttcaacacctgagtggcgatgctggccttgagcggatgaactctgctctttccgatacgagatcaaagttctttgaagcaaaggagaatgggagtccattgacagcacctgttgcaaatgtgtctacccctttgagcatcaattcgtctgggaaagcaccactttctgaggttcctgaaagttccaggacaaatgttgttgggacaagctctgtagtccgttctttgttcagtgcttcttcgtcatcagtcagttcatcaccagaaaagcagccgacagagaatgaaaaaatggtcaatgaaatgcttcatgaggatgccagtgcttttgctggcaggtctgatagtgctagtactgctgaggaggagttccagaacaaagtgagagaaaccatggagaaagctttctgggatatggtcaccaactccatgaggggagaaagacctgattatagtcaattgatcaacctagtaaaggaagtgagggattcgttgcatgacctggctccaaaagaatggaaggagaaaattcttgagaacattgaccttgaaattctgtctcaggtacttgggtcaggttcccaggatgcacaatacttggggcagattttggagtattctctggatatggttcgcaagctctctgctgctgcaaaggaggatgagatgaagaaaaaccatgataaattattgagtgaattgtctacgaattctgaagttaacggcgatggcatcaactcatttgtcattgctgttatcaagggccttcgtttcatcctggaagaaataaaggaactgaaagcagaagtgagtaaagcacgtatccagatgatgcaacagatcataaaagagtcggctggggttgagtacctgcagaaggcttttgctgatcgctatggacctcctgagacagcaccagcttctcttcccctaactctgcaatggattttgacatcgaagaacattgcggaagaagaatggagtgaacattcagactgtctttcagtaatgccagcagcagggcaggctcctgctcttgttccggtactccgatctggtcatggagctccagtagggcaaccatctccttctgcaggagacacctctggtcaaccagagtgcaagggtgagaagcttgacaagctaataaggattggcctgttgcaactcattagtagtgtggagggcttgcaattgcagtcaactcctgaaagttttcagattaatctgctgaggctgagggctgtgcagagccaattccaacaggtgatcgtgatcgccacaacatgctcgtcctgcgccaagttctgatgagcgagaactcgagggccactcctctggaactggaaaatgccatctcagaactcgtcaaggctctcgcggacatactgcacagctcacccgattccggcacggaagagattgtgcaggcgatggtcaatgcatcagcctcagttggctcaccatcagaggagaaggttcaggccaggatgcagatgatcacccgggtgttcctcaagagcctccagcccggtgacgtggtcttcaagaaggtatcccgtgcggtctactgcgccttccgtggcatcatcttaggtggcagtggtcccaagggccagaagctggcggacgctgcattgcgccgcatcggcgccaccaatgttgtcgacagggtgttgaaggctgctgaggtgctgatcaaggtggcaacggtatcagagaaggtccacggcccctggtacaaagctctgatagtctgatgtgagcatgaatgtgaatggtttggcttttgtgaatacagacggtgaaagtgtaaatccttgttccactgggtgggatgggagatatggtgttgtacagcaatttatagttgttggtcagtaggcagttcaggatgtgaagaattctggtgagctgggcgaatatggatgctctttcaccaggatttagtcaggctcgatggatggatgctaaaacgcgtctggaaatgtaaattgtggcaccttgtttgattttcgaactgaaataatgtaaataattgattgcaagttatttgtgctctgcacatattggttgtttcggccgagg

SEQ ID NO: 25085 - DNA, 3874 bp, Zea Mays
tcccgaaccgcttcccacggcagctcgctccctatatgaatcgagcggcgcgcgatcatccattaacggaacaaagtacttgcgaggcaacgggaaggaggtagaagagggagagtaaagtagcgcgccgcagccgcagcggaggaaaggcaagggcggcgagggaacacgcggttgcttgcggaaacccgctcgactcggtctctccgcccgcgagttgggttgatcggagggtttgatgacgggggcgcgggagccggtggccatggagataccagcggaggaagggccagcggcggcgagggcgccgccgcggcggattaggaggaggctggtggagggggcgcgcggcggtggggcgccggcgagcgtggaggagatcgaggccaggcttagggaggccgagctccggaggcagcaattccgtgaatggttggcctgcaaagcaaggaagaagccacggagcccgtcgtggtcctctcaagaagaagaccatgggcagcgccttgaagcgaagcttctggctgctgagcataaaaggctaatccttcttggcgaaggcacataaccgactcgaccaagttggatgaactcagacaagctgctaagaatgatgtggatatgaggtttgagaaggaaagggaagactcgagaccagagttgagtctcgtgtccgacaggcagaggagaaccgcatgcgccttctgcatgccgatatgcagaagcgggccgcactgaaggagaggacagcgaggtccctggtgcagaaggcaaaatcagagagcaaatacatggagcaggtgcgctctgcaatttctctgaagcgcgctgctgctgagaagaaacgactgaggttgctggaagctgaaaagaccaaggctcaagctaggcttttacgcatccaaaaagctgccatgactgtatgcagccggagagaatcagagaggagaaaactgaaagaacagctggacaacaaacttcaaagggcgaagaggcagagggctgagtatttgaaacaaagaggaagtcctcgtggttcaacccatgctgattacttaaagcatgcatatgccctttcaagaaaactagcaagacactggagaatatttgtgaagtccaggaagacaacatttgctttggctcaagcttatgatgccttggggattaatgagaagtctgtgaaaaatatgccttttgaaaaattagccatgtcaatggaatctcctgtagttcttcggagcacgaaggcattactcgaccgattggagaaacgccttgtcatttctcattcagtagcatcttcatcagtagaaaatgttgatcatcttctgaaacgccttggttctcccccaaggaggaaggctcctcctagcagagaaggaaaaactcgggcagtggtaaaaagaccagctaaaagttctgaggcaagcatcaaattgcccagatactcactgagggtggtgctctgtgcttacatgatactggctcatcccagtgctgttttaagtgggcaaggtgagcgggagaaacagcttatcgagtcggcagcaaactttatcaaggagttcgagctgttgattaaggtaattcttgatggaccagggcagtcatctggtgttactggccagaggaagttcagggcacagttggctaattttgacaaggcgtggtgttcgtatctttacagctttgtggtgtggaaggtaaaagatgcaagattattggaggaagatcttgtcagggctgcatgcaagcttgagttgtcaatgatgcaaacatgcaagctaactgcagacaggcactcgcaaaacaatcttacacatgacatgaaggcaattcagaaacaggttattgatgatcaaaagcttttacgagataaggttcaacacctgagtggcgatgctggccttgagcggatgaactctgctctttccgatacgagatcaaagttctttgaagcaaaggagaatgggagtccattgacagcacctgttgcaaatgtgtctacccctttgagcatcaattcgtctgggaaagcaccactttctgaggttcctgaaagttccaggacaaatgttgttgggacaagctctgtagtccgttctttgttcagtgcttcttcgtcatcagtcagttcatcaccagaaaagcagccgacagagaatgaaaaaatggtcaatgaaatgcttcatgaggatgccagtgcttttgctggcaggtctgatagtgctagtactgctgaggaggagttccagaacaaagtgagagaaaccatggagaaagctttctgggatatggtcaccaactccatgaggggagaaagacctgattatagtcaattgatcaacctagtaaaggaagtgagggattcgttgcatgacctggctccaaaagaatggaaggagaaaattcttgagaacattgaccttgaaattctgtctcaggtacttgggtcaggttcccaggatgcacaatacttggggcagattttggagtattctctggatatggttcgcaagctctctgctgctgcaaaggaggatgagatgaagaaaaaccatgataaattattgagtgaattgtctacgaattctgaagttaacggcgatggcatcaactcatttgtcattgctgttatcaagggccttcgtttcatcctggaagaaataaaggaactgaaagcagaagtgagtaaagcacgtatccagatgatgcaacagatcataaaagagtcggctggggttgagtacctgcagaaggcttttgctgatcgctatggacctcctgagacagcaccagcttctcttcccctaactctgcaatggattttgacatcgaagaacattgcggaagaagaatggagtgaacattcagactgtctttcagtaatgccagcagcagggcaggctcctgctcttgttccggtactccgatctggtcatggagctccagtagggcaaccatctccttctgcaggagacacctctggtcaaccagagtgcaaggattaatctgctgaggctgagggctgtgcagagccaattccaacaggtgatcgtgatcgccacaagcatgctcgtcctgcgccaagttctgatgagcgagaactcgagggccactcctctggaactggaaaatgccatctcagaactcgtcaaggctctcgcggacatactgcacagctcacccgattccggcacggaagagattgtgcaggcgatggtcaatgcatcagcctcagttggctcaccatcagaggagaaggttcaggccaggatgcagatgatcacccgggtgttcctcaagagcctccagcccggtgacgtggtcttcaagaaggtatcccgtgcggtctactgcgccttccgtggcatcatcttaggtggcagtggtcccaagggccagaagctggcggacgctgcattgcgccgcatcggcgccaccaatgttgtcgacagggtgttgaaggctgctgaggtgctgatcaaggtggcaacggtatcagagaaggtccacggcccctggtacaaagctctgatagtctgatgtgagcatgaatgtgaatggtttggcttttgtgaatacagacggtgaaagtgtaaatccttgttccactgggtgggatgggagatatggtgttgtacagcaatttatagttgttggtcagtaggcagttcaggatgtgaagaattctggtgagctgggcgaatatggatgctctttcaccaggatttagtcaggctcgatggatggatgctaaaacgcgtctggaaatgtaaattgtggcaccttgtttgattttcgaactgaaataatgtaaataattgattgcaagttatttgtgctctgcacatattggttgtttcggccgagg

SEQ ID NO: 25086 - DNA, 1852 bp, Zea Mays
gtacttgcgaggcaacgggaaggaggtagaagagggagagtaaagtagcgcgccgcagccgcagcggaggaaaggcaagggcggcgagggaacacgcggttgcttgcggaaacccgctcgactcggtctctccgcccgcgagttgggttgatcggagggtttgatgacgggggcgcgggagccggtggccatggagataccagcggaggaagggccagcggcggcgagggcgccgccgcggcggattaggaggaggctggtggagggggcgcgcggcggtggggcgccggcgagcgtggaggagatcgaggccaggcttagggaggccgagctccggaggcagcaattccgtgaatggttggcctgcaaagcaaggaagaagccacggagcccgtcgtggtcctctcaagaagaagaccatgggcagcgccttgaagcgaagcttctggctgctgagcataaaaggctaatccttcttggcgaaggcacataaccgactcgaccaagttggatgaactcagacaagctgctaagaatgatgtggatatgaggtttgagaaggaaagggaagactcgagaccagagttgagtctcgtgtccgacaggcagaggagaaccgcatgcgccttctgcatgccgatatgcagaagcgggccgcactgaaggagaggacagcgaggtccctggtgcagaaggcaaaatcagagagcaaatacatggagcaggtgcgctctgcaatttctctgaagcgcgctgctgctgagaagaaacgactgaggttgctggaagctgaaaagaccaaggctcaagctaggcttttacgcatccaaaaagctgccatgactgtatgcagccggagagaatcagagaggagaaaactgaaagaacagctggacaacaaacttcaaaggggcgaagaggcagagggctgagtatttgaaacaaagaggaagtcctcgtggttcaacccatgctgattacttaaagcatgcatatgccctttcaagaaaactagcaagacactggagaatatttgtgaagtccaggaagacaacatttgctttggctcaagcttatgatgccttggggattaatgagaagtctgtgaaaaatatgccttttgaaaaattagccatgtcaatggaatctcctgtagttcttcggagcacgaaggcattactcgaccgattggagaaacgccttgtcatttctcattcagtagcatcttcatcagtagaaaatgttgatcatcttctgaaacgccttggttctcccccaaggaggaaggctcctcctagcagagaaggaaaaactcgggcagtggtaaaaagaccagctaaaagttctgaggcaagcatcaaattgcccagatactcactgagggtggtgctctgtgcttacatgatactggctcatcccagtgctgttttaagtgggcaaggtgagcgggagaaacagcttatcgagtcggcagcaaactttatcaaggagttcgagctgttgattaaggtaattcttgatggaccagggcagtcatctggtgttactggccagaggaagttcagggcacagttggctaattttgacaaggcgtggtgttcgtatctttacagctttgtggtgtggaaggtaaaagatgcaagattattggaggaagatcttgtcagggctgcatgcaagcttgagttgtcaatgatgcaaacatgcaagctaactgcagacaggcactcgcaaaacaatcttacacatgacatgaaggcaattcagaaacaggttattgatgatcaaaagcttttacgagataaggttcaacacctgagtggcgatgctggccttgagcggatgaactctg

SEQ ID NO: 25087 - DNA, 822 bp, Zea Mays
ggcttgtctttgattggcatggaagaaaaaagaaaagaggctgcaggagctgtacctgctggacccagccacgtactcgaccctgacggggatagtggagaaggaagtgaaggagggcacagcgaggaaggtcgacagctgcgcaagggcgatcctgtggcttgctagatccatggatttcacagctgcgctgttacagaggctggaggaggactctacgcagcagcagcagcagagcctcgcgcagctcgtggaggccgcgtacgaggccaccctgaagccgtggcacggctggatctcctcggcggcgtgcaagcccaagccatggacatggacatggtccgatccccgtccttcgctgtgaatactgcctgccctggcttccgtcttcgagtcgcatttgcttgcggttaggtctagtttagacgctgctgctctctagtctgtacataggtcttttgcttgtagaatagactcccaagatctgcatgcggtgcccttttttcgtggtaggctacgtttggacagcgcccctcctcaattgcctctgcctgtgccaatacgttggccggccaaactttggctgcccaagaaacggccaactttggcagggaaaatgaactagcaagttgttcacgatgccaaactttggcaggcagcaaccatccaaacatacaagatgccaatagtcaacgaccttttattggtttggctggctggtaatgggctctaaattttacgctataaaatttaagaatcgagttatatttttatttatttttaaactaaaattaccttttaggccgaagaaacatttgaatc

SEQ ID NO: 25088 - DNA, 1165 bp, Zea Mays
tatctcccctccagacctccacacgccgcgatggcctccgccgaaatccccaactccagccctgatgccaccaaccccgccgccgccgccgccaccgccaccgccactgccaccggccccgacatctcctcttcgccgccactcccgccgcggaagcgccgcctttcgccttcctcatctcccacgcgctccgcgtcacgctctcggtcgccccgctcccgctccccgcgcggccgccgctcccgctcccgcagccggagccggagccggagccgcagccgcagcccgcagtacccgcccgacggcaagcggcagcggcacaacgaccttaccgtggaggcgtgccgcgacttcctgcgcgataggtgcacccgctccgacctcgagtgcagatacgcgcaccctcacaactcagcttccgtcgaccgggacaacaaggtgacggcgtgcgcggattctcttaggaacaattgcttccgggggatgacatgccgttactaccacccccctccacaaatccaggagcaattgctgagatcaattggtatggaagatccaaatgtgaagacgcagatctgcagagattttacacgtgggaagtgttcaaggtcagcaaatgagtgccgattcttgcaccattcatctgttgaagatgctgcaattgtttgccaagattttttgcgtggacaatgcaatcgcatagcatgtaggtactctcatgtagtagcacatccggtgccaccaatgagccatgttcctatgccataccctgagatgctttacatgccaccaccaccaccaccacctcttggagtaccaatgatggggcctccgccttcaccatttgctgataataagaacagggttgaagtttgtagggacttcttgaagaacatgtgcaatagagaatcctgccggtttttacaccctgggacacatacagcggctgcgagcgccaatgttgaagtatgccgtgattttaaacgaggagaatgcaatcgacctgcctgtcgctttttgcatccatatacaagttgaagttttctgttagctaaataccagctaccgagttgattgaaacggcaaggtatctgaaaggctggttggttgatgggctcctatgcaaagcgtgaggcagagctgctgttcggatgcggacacaaat

SEQ ID NO: 25089 - DNA, 1096 bp, Zea Mays
tatctcccctccagacctccacacgccgcgatggcctccgccgaaatccccaactccagccctgatgccaccaaccccgccgccgccgccgccaccgccaccgccactgccaccggccccgacatctcctcttcgccgccactcccgccgcggaagcgccgcctttcgccttcctcatctcccacgcgctccgcgtcacgctctcggtcgccccgctcccgctccccgcgcggccgccgctcccgctcccgcagccggagccggagccggagccgcagccgcagcccgcagtacccgcccgacggcaagcggcagcggcacaacgaccttaccgtggaggcgtgccgcgacttcctgcgcgataggtgcacccgctccgacctcgagtgcagatacgcgcaccctcacaactcagcttccgtcgaccgggacaacaaggtgacggcgtgcgcggattctcttaggaacaattgcttccgggggatgacatgccgttactaccacccccctccacaaatccaggagcaattgctgagatcaattggtatggaagatccaaatgtgaagacgcagatctgcagagattttacacgtgggaagtgttcaaggtcagcaaatgagtgccgattcttgcaccattcatctgttgaagatgctgcaattgtttgccaagattttttgcgtggacaatgcaatcgcatagcatgtaggtactctcatgtagtagcacatccggtgccaccaatgagccatgttcctatgccataccctgagatgctttacatgccaccaccaccaccaccacctcttggagtaccaatgatggggcctccgccttcaccatttgctgataataagaacagggttgaagtttgtagggacttcttgaagaacatgtgcaatagagaatcctgccggtttttacaccctgggacacatacagcggctgcgagcgccaatgttgaagtatgccgtgattttaaacgaggagaatgcaatcgacctgcctgtcgctttttgcatccatatacaagttgaagttttctgttagctaaagcctgccgctgtttcaaacaggcaccgccagagaacattc

SEQ ID NO: 25090 - DNA, 1435 bp, Zea Mays
tatctcccctccagacctccacacgccgcgatggcctccgccgaaatccccaactccagccctgatgccaccaaccccgccgccgccgccgccaccgccaccgccactgccaccggccccgacatctcctcttcgccgccactcccgccgcggaagcgccgcctttcgccttcctcatctcccacgcgctccgcgtcacgctctcggtcgccccgctcccgctccccgcgcggccgccgctcccgctcccgcagccggagccggagccggagccgcagccgcagcccgcagtacccgcccgacggcaagcggcagcggcacaacgaccttaccgtggaggcgtgccgcgacttcctgcgcgataggtgcacccgctccgacctcgagtgcagatacgcgcaccctcacaactcagcttccgtcgaccgggacaacaaggtgacggcgtgcgcggattctcttaggaacaattgcttccgggggatgacatgccgttactaccacccccctccacaaatccaggagcaattgctgagatcaattggtatggaagatccaaatgtgaagacgcagatctgcagagattttacacgtgggaagtgttcaaggtcagcaaatgagtgccgattcttgcaccattcatctgttgaagatgctgcaattgtttgccaagattttttgcgtggacaatgcaatcgcatagcatgtaggtactctcatgtagtagcacatccggtgccaccaatgagccatgttcctatgccataccctgagatgctttacatgccaccaccaccaccaccacctcttggagtaccaatgatggggcctccgccttcaccatttgctgggacttcttgaagaacatgtgcaatagagaatcctgccggtttttacaccctgggacacatacagcggctgcgagcgccaatgttgaagtatgccgtgattttaaacgaggagaatgcaatcgacctgcctgtcgctttttgcatccatatacaagttgaagttttctgttagctaaacttgagtgctctgcccaccgccgccgctactgctgtgctgctgctgctgccgccgccgccgccgccgctgctgcgccaccaccacccattctgcttctgccaccaaagagctgctgcgctggctgttgcgtcgctaaggtgccatagagcaaggaagccatagaaggcgctatgtatgcatcgaataaaagattctaatatcctgggatattcagatggttgcttgaacttgctttactcaatgcttgagcagtgcccccttcactataggggctgtgtgtggttttgtatttgttgtcataaaagatattttttgactctagctaatttgatgtctacgctattgccttccccttagcatcacactttattgtttgtataagttattgagcaaatgtttcgccacg

SEQ ID NO: 25091 - DNA, 1460 bp, Zea Mays
tatctcccctccagacctccacacgccgcgatggcctccgccgaaatccccaactccagccctgatgccaccaaccccgccgccgccgccgccaccgccaccgccactgccaccggccccgacatctcctcttcgccgccactcccgccgcggaagcgccgcctttcgccttcctcatctcccacgcgctccgcgtcacgctctcggtcgccccgctcccgctccccgcgcggccgccgctcccgctcccgcagccggagccggagccggagccgcagccgcagcccgcagtacccgcccgacggcaagcggcagcggcacaacgaccttaccgtggaggcgtgccgcgacttcctgcgcgataggtgcacccgctccgacctcgagtgcagatacgcgcaccctcacaactcagcttccgtcgaccgggacaacaaggtgacggcgtgcgcggattctcttaggaacaattgcttccgggggatgacatgccgttactaccacccccctccacaaatccaggagcaattgctgagatcaattggtatggaagatccaaatgtgaagacgatctgcagagattttacacgtgggaagtgttcaaggtcagcaaatgagtgccgattcttgcaccattcatctgttgaagatgctgcaattgtttgccaagattttttgcgtggacaatgcaatcgcatagcatgtaggtactctcatgtagtagcacatccggtgccaccaatgagccatgttcctatgccataccctgagatgctttacatgccaccaccaccaccaccacctcttggagtaccaatgatggggcctccgccttcaccatttgctgataataagaacagggttgaagtttgtagggacttcttgaagaacatgtgcaatagagaatcctgccggtttttacaccctgggacacatacagcggctgcgagcgccaatgttgaagtatgccgtgattttaaacgaggagaatgcaatcgacctgcctgtcgctttttgcatccatatacaagttgaagttttctgttagctaaacttgagtgctctgcccaccgccgccgctactgctgtgctgctgctgctgccgccgccgccgccgccgctgctgcgccaccaccacccattctgcttctgccaccaaagagctgctgcgctggctgttgcgtcgctaaggtgccatagagcaaggaagccatagaaggcgctatgtatgcatcgaataaaagattctaatatcctgggatattcagatggttgcttgaacttgctttactcaatgcttgagcagtgcccccttcactataggggctgtgtgtggttttgtatttgttgtcataaaagatattttttgactctagctaatttgatgtctacgctattgccttccccttagcatcacactttattgtttgtataagttattgagcaaatgtttcgccacg

SEQ ID NO: 25092 - DNA, 1364 bp, Zea Mays
tatctcccctccagacctccacacgccgcgatggcctccgccgaaatccccaactccagccctgatgccaccaaccccgccgccgccgccgccaccgccaccgccactgccaccggccccgacatctcctcttcgccgccactcccgccgcggaagcgccgcctttcgccttcctcatctcccacgcgctccgcgtcacgctctcggtcgccccgctcccgctccccgcgcggccgccgctcccgctcccgcagccggagccggagccggagccgcagccgcagcccgcagtacccgcccgacggcaagcggcagcggcacaacgaccttaccgtggaggcgtgccgcgacttcctgcgcgataggtgcacccgctccgacctcgagtgcagatacgcgcaccctcacaactcagcttccgtcgaccggcaattgctgagatcaattggtatggaagatccaaatgtgaagacgatctgcagagattttacacgtgggaagtgttcaaggtcagcaaatgagtgccgattcttgcaccattcatctgttgaagatgctgcaattgtttgccaagattttttgcgtggacaatgcaatcgcatagcatgtaggtactctcatgtagtagcacatccggtgccaccaatgagccatgttcctatgccataccctgagatgctttacatgccaccaccaccaccaccacctcttggagtaccaatgatggggcctccgccttcaccatttgctgataataagaacagggttgaagtttgtagggacttcttgaagaacatgtgcaatagagaatcctgccggtttttacaccctgggacacatacagcggctgcgagcgccaatgttgaagtatgccgtgattttaaacgaggagaatgcaatcgacctgcctgtcgctttttgcatccatatacaagttgaagttttctgttagctaaacttgagtgctctgcccaccgccgccgctactgctgtgctgctgctgctgccgccgccgccgccgccgctgctgcgccaccaccacccattctgcttctgccaccaaagagctgctgcgctggctgttgcgtcgctaaggtgccatagagcaaggaagccatagaaggcgctatgtatgcatcgaataaaagattctaatatcctgggatattcagatggttgcttgaacttgctttactcaatgcttgagcagtgcccccttcactataggggctgtgtgtggttttgtatttgttgtcataaaagatattttttgactctagctaatttgatgtctacgctattgccttccccttagcatcacactttattgtttgtataagttattgagcaaatgtttcgccacg

SEQ ID NO: 25093 - DNA, 1415 bp, Zea Mays
cctctccccaacgcagtcacctagatcccatcttgtcaggggtacgtctatctcccctccagacctccacacgccgcgatggcctccgccgaaatccccaactccagccctgatgccaccaaccccgccgccgccgccgccaccgccaccgccactgccaccggccccgacatctcctcttcgccgccactcccgccgcggaagcgccgcctttcgccttcctcatctcccacgcgctccgcgtcacgctctcggtcgccccgctcccgctccccgcgcggccgccgctcccgctcccgcagccggagccggagccggagccgcagccgcagcccgcagtacccgcccgacggcaagcggcagcggcacaacgaccttaccgtggaggcgtgccgcgacttcctgcgcgataggtgcacccgctccgacctcgagtgcagatacgcgcaccctcacaactcagcttccgtcgaccggcaattgctgagatcaattggtatggaagatccaaatgtgaagacgcagatctgcagagattttacacgtgggaagtgttcaaggtcagcaaatgagtgccgattcttgcaccattcatctgttgaagatgctgcaattgtttgccaagattttttgcgtggacaatgcaatcgcatagcatgtaggtactctcatgtagtagcacatccggtgccaccaatgagccatgttcctatgccataccctgagatgctttacatgccaccaccaccaccaccacctcttggagtaccaatgatggggcctccgccttcaccatttgctgataataagaacagggttgaagtttgtagggacttcttgaagaacatgtgcaatagagaatcctgccggtttttacaccctgggacacatacagcggctgcgagcgccaatgttgaagtatgccgtgattttaaacgaggagaatgcaatcgacctgcctgtcgctttttgcatccatatacaagttgaagttttctgttagctaaacttgagtgctctgcccaccgccgccgctactgctgtgctgctgctgctgccgccgccgccgccgccgctgctgcgccaccaccacccattctgcttctgccaccaaagagctgctgcgctggctgttgcgtcgctaaggtgccatagagcaaggaagccatagaaggcgctatgtatgcatcgaataaaagattctaatatcctgggatattcagatggttgcttgaacttgctttactcaatgcttgagcagtgcccccttcactataggggctgtgtgtggttttgtatttgttgtcataaaagatattttttgactctagctaatttgatgtctacgctattgccttccccttagcatcacactttattgtttgtataagttattgagcaaatgtttcgccacg

SEQ ID NO: 25094 - DNA, 989 bp, Zea Mays
tatctcccctccagacctccacacgccgcgatggcctccgccgaaatccccaactccagccctgatgccaccaaccccgccgccgccgccgccaccgccaccgccactgccaccggccccgacatctcctcttcgccgccactcccgccgcggaagcgccgcctttcgccttcctcatctcccacgcgctccgcgtcacgctctcggtcgccccgctcccgctccccgcgcggccgccgctcccgctcccgcagccggagccggagccggagccgcagccgcagcccgcagtacccgcccgacggcaagcggcagcggcacaacgaccttaccgtggaggcgtgccgcgacttcctgcgcgataggtgcacccgctccgacctcgagtgcagatacgcgcaccctcacaactcagcttccgtcgaccggcaattgctgagatcaattggtatggaagatccaaatgtgaagacgatctgcagagattttacacgtgggaagtgttcaaggtcagcaaatgagtgccgattcttgcaccattcatctgttgaagatgctgcaattgtttgccaagattttttgcgtggacaatgcaatcgcatagcatgtaggtactctcatgtagtagcacatccggtgccaccaatgagccatgttcctatgccataccctgagatgctttacatgccaccaccaccaccaccacctcttggagtaccaatgatggggcctccgccttcaccatttgctgataataagaacagggttgaagtttgtagggacttcttgaagaacatgtgcaatagagaatcctgccggtttttacaccctgggacacatacagcggctgcgagcgccaatgttgaagtatgccgtgattttaaacgaggagaatgcaatcgacctgcctgtcgctttttgcatccatatacaagttgaagttttctgttagctaaatgctaaaatgtagaatctgctttttatttttt

SEQ ID NO: 25095 - DNA, 1242 bp, Zea Mays
gtgaagacgatctgcagagattttacacgtgggaagtgttcaaggtttgccaagattttttgcgtggacaatgcaatcgcatagcatgtaggtactctcatgtagtagcacatccggtgccaccaatgagccatgttcctatgccataccctgagatgctttacatgccaccaccaccaccaccacctcttggagtaccaatgatggggcctccgccttcaccatttgctgataataagaacagggttgaagtttgtagggacttcttgaagaacatgtgcaatagagaatcctgccggtttttacaccctgggacacatacagcggctgcgagcgccaatgttgaagtatgccgtgattttaaacgaggagaatgcaatcgacctgcctgtcgctttttgcatccatatacaagttgaagttttctgttagctaaagtaaagtaaattgtaccttgttttcctcttcataatacaaatggctgccaaatacatatagatgaaagaacgctcccctaagaacacatagttatagagttaacttcaacgtcaacttgtggatcttttgtccattcaaaccagctagagcaaaatagattttaattttggtaatttttgtcatttgggtaaattaaggtattttcaatgaaatgcaacttttatctgatctgaacaggcatgcgaatgatcatgttggttctctaagatttccaattggctaagatagcatgcacttgttgaagtgatccactgtttgaccagcttcattatcttttactccacatcaattctgttccttctgggaaagctcttctgctaagtttgatcttagatttatgaaccacaagcccacaacaatggcaaatgacctcttatatgaaaaaaacccgacctgcggggggtaagatcgcccccacgggctgtgcattacattaagaagaccttctcacgtaggtcgagaaaacctccaaacccttgttccacccacatacaatgacaccatagcacatgtgagaataaccgtgactaggaccgaaccttagacatgtgctttggcctcagcctgaaattcgctctcatgaggtcaaacccaggatcttaggagtgctactcaaaccacctaatcaattcagctagaggcccttttgcatggcctattgtatgactccacttttagaatttattactagtttatggtgggctattgataaaatattaaaatttatatggtctgatatgctcc

SEQ ID NO: 25096 - DNA, 1861 bp, Zea Mays
tatctcccctccagacctccacacgccgcgatggcctccgccgaaatccccaactccagccctgatgccaccaaccccgccgccgccgccgccaccgccaccgccactgccaccggccccgacatctcctcttcgccgccactcccgccgcggaagcgccgcctttcgccttcctcatctcccacgcgctccgcgtcacgctctcggtcgccccgctcccgctccccgcgcggccgccgctcccgctcccgcagccggagccggagccggagccgcagccgcagcccgcagtacccgcccgacggcaagcggcagcggcacaacgaccttaccgtggaggcgtgccgcgacttcctgcgcgataggtgcacccgctccgacctcgagtgcagatacgcgcaccctcacaactcagcttccgtcgaccgggacaacaaggtgacggcgtgcgcggattctcttaggaacaattgcttccgggggatgacatgccgttactaccacccccctccacaaatccaggagcaattgctgagatcaattggtatggaagatccaaatgtgaagacgcagatctgcagagattttacacgtgggaagtgttcaaggtcagcaaatgagtgccgattcttgcaccattcatctgttgaagatgctgcaattgtttgccaagattttttgcgtggacaatgcaatcgcatagcatgtaggtactctcatgtagtagcacatccggtgccaccaatgagccatgttcctatgccataccctgagatgctttacatgccaccaccaccaccaccacctcttggagtaccaatgatggggcctccgccttcaccatttgctgataataagaacagggttgaagtttgtagggacttcttgaagaacatgtgcaatagagaatcctgccggtttttacaccctgggacacatacagcggctgcgagcgccaatgttgaagtatgccgtgattttaaacgaggagaatgcaatcgacctgcctgtcgctttttgcatccatatacaagttgaagttttctgttagctaaagtaaagtaaattgtaccttgttttcctcttcataatacaaatggctgccaaatacatatagatgaaagaacgctcccctaagaacacatagttatagagttaacttcaacgtcaacttgtggatcttttgtccattcaaaccagctagagcaaaatagattttaattttggtaatttttgtcatttgggtaaattaaggtattttcaatgaaatgcaacttttatctgatctgaacaggcatgcgaatgatcatgttggttctctaagatttccaattggctaagatagcatgcacttgttgaagtgatccactgtttgaccagcttcattatcttttactccacatcaattctgttccttctgggaaagctcttctgctaagtttgatcttagatttatgaaccacaagcccacaacaatggcaaatgacctcttatatgaaaaaaacccgacctgcggggggtaagatcgcccccacgggctgtgcattacattaagaagaccttctcacgtaggtcgagaaaacctccaaacccttgttccacccacatacaatgacaccatagcacatgtgagaataaccgtgactaggaccgaaccttagacatgtgctttggcctcagcctgaaattcgctctcatgaggtcaaacccaggatcttaggagtgctactcaaaccacctaatcaattcagctagaggcccttttgcatggcctattgtatgactccacttttagaatttattactagtttatggtgggctattgataaaatattaaaatttatatggtctgatatgctcc

SEQ ID NO: 25097 - DNA, 1762 bp, Zea Mays
tatctcccctccagacctccacacgccgcgatggcctccgccgaaatccccaactccagccctgatgccaccaaccccgccgccgccgccgccaccgccaccgccactgccaccggccccgacatctcctcttcgccgccactcccgccgcggaagcgccgcctttcgccttcctcatctcccacgcgctccgcgtcacgctctcggtcgccccgctcccgctccccgcgcggccgccgctcccgctcccgcagccggagccggagccggagccgcagccgcagcccgcagtacccgcccgacggcaagcggcagcggcacaacgaccttaccgtggaggcgtgccgcgacttcctgcgcgataggtgcacccgctccgacctcgagtgcagatacgcgcaccctcacaactcagcttccgtcgaccggcaattgctgagatcaattggtatggaagatccaaatgtgaagacgatctgcagagattttacacgtgggaagtgttcaaggtcagcaaatgagtgccgattcttgcaccattcatctgttgaagatgctgcaattgtttgccaagattttttgcgtggacaatgcaatcgcatagcatgtaggtactctcatgtagtagcacatccggtgccaccaatgagccatgttcctatgccataccctgagatgctttacatgccaccaccaccaccaccacctcttggagtaccaatgatggggcctccgccttcaccatttgctgataataagaacagggttgaagtttgtagggacttcttgaagaacatgtgcaatagagaatcctgccggtttttacaccctgggacacatacagcggctgcgagcgccaatgttgaagtatgccgtgattttaaacgaggagaatgcaatcgacctgcctgtcgctttttgcatccatatacaagttgaagttttctgttagctaaagtaaagtaaattgtaccttgttttcctcttcataatacaaatggctgccaaatacatatagatgaaagaacgctcccctaagaacacatagttatagagttaacttcaacgtcaacttgtggatcttttgtccattcaaaccagctagagcaaaatagattttaattttggtaatttttgtcatttgggtaaattaaggtattttcaatgaaatgcaacttttatctgatctgaacaggcatgcgaatgatcatgttggttctctaagatttccaattggctaagatagcatgcacttgttgaagtgatccactgtttgaccagcttcattatcttttactccacatcaattctgttccttctgggaaagctcttctgctaagtttgatcttagatttatgaaccacaagcccacaacaatggcaaatgacctcttatatgaaaaaaacccgacctgcggggggtaagatcgcccccacgggctgtgcattacattaagaagaccttctcacgtaggtcgagaaaacctccaaacccttgttccacccacatacaatgacaccatagcacatgtgagaataaccgtgactaggaccgaaccttagacatgtgctttggcctcagcctgaaattcgctctcatgaggtcaaacccaggatcttaggagtgctactcaaaccacctaatcaattcagctagaggcccttttgcatggcctattgtatgactccacttttagaatttattactagtttatggtgggctattgataaaatattaaaatttatatggtctgatatgctcc

SEQ ID NO: 25098 - DNA, 1765 bp, Zea Mays
tatctcccctccagacctccacacgccgcgatggcctccgccgaaatccccaactccagccctgatgccaccaaccccgccgccgccgccgccaccgccaccgccactgccaccggccccgacatctcctcttcgccgccactcccgccgcggaagcgccgcctttcgccttcctcatctcccacgcgctccgcgtcacgctctcggtcgccccgctcccgctccccgcgcggccgccgctcccgctcccgcagccggagccggagccggagccgcagccgcagcccgcagtacccgcccgacggcaagcggcagcggcacaacgaccttaccgtggaggcgtgccgcgacttcctgcgcgataggtgcacccgctccgacctcgagtgcagatacgcgcaccctcacaactcagcttccgtcgaccggcaattgctgagatcaattggtatggaagatccaaatgtgaagacgcagatctgcagagattttacacgtgggaagtgttcaaggtcagcaaatgagtgccgattcttgcaccattcatctgttgaagatgctgcaattgtttgccaagattttttgcgtggacaatgcaatcgcatagcatgtaggtactctcatgtagtagcacatccggtgccaccaatgagccatgttcctatgccataccctgagatgctttacatgccaccaccaccaccaccacctcttggagtaccaatgatggggcctccgccttcaccatttgctgataataagaacagggttgaagtttgtagggacttcttgaagaacatgtgcaatagagaatcctgccggtttttacaccctgggacacatacagcggctgcgagcgccaatgttgaagtatgccgtgattttaaacgaggagaatgcaatcgacctgcctgtcgctttttgcatccatatacaagttgaagttttctgttagctaaagtaaagtaaattgtaccttgttttcctcttcataatacaaatggctgccaaatacatatagatgaaagaacgctcccctaagaacacatagttatagagttaacttcaacgtcaacttgtggatcttttgtccattcaaaccagctagagcaaaatagattttaattttggtaatttttgtcatttgggtaaattaaggtattttcaatgaaatgcaacttttatctgatctgaacaggcatgcgaatgatcatgttggttctctaagatttccaattggctaagatagcatgcacttgttgaagtgatccactgtttgaccagcttcattatcttttactccacatcaattctgttccttctgggaaagctcttctgctaagtttgatcttagatttatgaaccacaagcccacaacaatggcaaatgacctcttatatgaaaaaaacccgacctgcggggggtaagatcgcccccacgggctgtgcattacattaagaagaccttctcacgtaggtcgagaaaacctccaaacccttgttccacccacatacaatgacaccatagcacatgtgagaataaccgtgactaggaccgaaccttagacatgtgctttggcctcagcctgaaattcgctctcatgaggtcaaacccaggatcttaggagtgctactcaaaccacctaatcaattcagctagaggcccttttgcatggcctattgtatgactccacttttagaatttattactagtttatggtgggctattgataaaatattaaaatttatatggtctgatatgctcc

SEQ ID NO: 25099 - DNA, 1858 bp, Zea Mays
tatctcccctccagacctccacacgccgcgatggcctccgccgaaatccccaactccagccctgatgccaccaaccccgccgccgccgccgccaccgccaccgccactgccaccggccccgacatctcctcttcgccgccactcccgccgcggaagcgccgcctttcgccttcctcatctcccacgcgctccgcgtcacgctctcggtcgccccgctcccgctccccgcgcggccgccgctcccgctcccgcagccggagccggagccggagccgcagccgcagcccgcagtacccgcccgacggcaagcggcagcggcacaacgaccttaccgtggaggcgtgccgcgacttcctgcgcgataggtgcacccgctccgacctcgagtgcagatacgcgcaccctcacaactcagcttccgtcgaccgggacaacaaggtgacggcgtgcgcggattctcttaggaacaattgcttccgggggatgacatgccgttactaccacccccctccacaaatccaggagcaattgctgagatcaattggtatggaagatccaaatgtgaagacgatctgcagagattttacacgtgggaagtgttcaaggtcagcaaatgagtgccgattcttgcaccattcatctgttgaagatgctgcaattgtttgccaagattttttgcgtggacaatgcaatcgcatagcatgtaggtactctcatgtagtagcacatccggtgccaccaatgagccatgttcctatgccataccctgagatgctttacatgccaccaccaccaccaccacctcttggagtaccaatgatggggcctccgccttcaccatttgctgataataagaacagggttgaagtttgtagggacttcttgaagaacatgtgcaatagagaatcctgccggtttttacaccctgggacacatacagcggctgcgagcgccaatgttgaagtatgccgtgattttaaacgaggagaatgcaatcgacctgcctgtcgctttttgcatccatatacaagttgaagttttctgttagctaaagtaaagtaaattgtaccttgttttcctcttcataatacaaatggctgccaaatacatatagatgaaagaacgctcccctaagaacacatagttatagagttaacttcaacgtcaacttgtggatcttttgtccattcaaaccagctagagcaaaatagattttaattttggtaatttttgtcatttgggtaaattaaggtattttcaatgaaatgcaacttttatctgatctgaacaggcatgcgaatgatcatgttggttctctaagatttccaattggctaagatagcatgcacttgttgaagtgatccactgtttgaccagcttcattatcttttactccacatcaattctgttccttctgggaaagctcttctgctaagtttgatcttagatttatgaaccacaagcccacaacaatggcaaatgacctcttatatgaaaaaaacccgacctgcggggggtaagatcgcccccacgggctgtgcattacattaagaagaccttctcacgtaggtcgagaaaacctccaaacccttgttccacccacatacaatgacaccatagcacatgtgagaataaccgtgactaggaccgaaccttagacatgtgctttggcctcagcctgaaattcgctctcatgaggtcaaacccaggatcttaggagtgctactcaaaccacctaatcaattcagctagaggcccttttgcatggcctattgtatgactccacttttagaatttattactagtttatggtgggctattgataaaatattaaaatttatatggtctgatatgctcc

SEQ ID NO: 25100 - DNA, 1561 bp, Zea Mays
attgtttctggcctattattttttgttgttatggtttctagcttccaatggacacttacactcattatattactatttctagcacggaaagaaatatttcctaatatttgctaatcagtggaaaaagaaaggtcaatgttgcaccttctgtattagctgaatggatactagcagtcaccgatttattcagaacttctgttggtaacattatacttggtatttgcaaattagctttacatctttgcagtcaatagtatagacaacttaagttatctaatgggtgttcctaataactgtacacttgacagtgatttgttatgcaaatttgaacgatttggtcatatcacaaaactatagtaagtaacaaattgtgatgcagcatgagtaccatttagctaagcattggaagttgaacttagatctgaggaggtgctatatgttgttcacaaatcacaaggctacaaaaccatgtgttctcacctatgacaatccaatttgtaacctaaattgactgctaatgctttagagagtttagaattaacactgtctgcctgaacaacagtaccatgtaacaaagttagaagatgttattactaaaaatatggtttgtttttagatgttctgtttttatctttctcttgtggcacacttcctctttgacagaaggcaacgttctcttaaaatcttgggtgcttgttctccggtgcctatcgagaagtgtgctttctttgcttggacaatttctcctttgagactcagtaatgttcatgctattgcgaccctttccaccacccggtccatccgacatatgtggaaatgctgtgctgaggaactgtgatcctccccatcattaagctaaaaatcattttggtggacctttctgcctttcattcagaatgcaaaacttctgcaaaatatggtgtgtgtgtgtggggtggtggtggtcagggaaacctccacctgatatattatagccttggaggccgagtgaacaacccatagagagggacaaaggaattacacttcaacaattgcaaactcttgcaaggtggagcataatgacaggtgtttcacgtccttatgcaatctaaacattccagttgcagtcataatccttgaaacagaactatatctcatgctgacgaaaggggatcaatgacagttgttttcttcgttgccattgtctcagagcacaccatgtgtgaaggaaaacaatgccaccacgagaaggtttcattcagggttcaatcattattacaccggggttgaatgatattatgttatttcctattgtgtggggtaatcaaaattttcttacagtaattaaatcctaccacttatcccattttaccccttgtatctagattgtgtttctatctaagcacaaagttttgcaccataggttccaacactacactaacatgacaattctaggaatgtacaaacatgaatgtaaattgcacaaatgtaaatgaggagggttagggacacaacaatgttttttgaggtatcagatagtcggcactcccgctagtcgttattgcagcacatgcgcaaaggt

SEQ ID NO: 25101 - DNA, 1340 bp, Zea Mays
aggggagcatataaatggagcaaactgcagggaccacaatccccagtcgtcccacaggaagtcagccggaaatcccaaacaggaaaaacaaacatcaccgagttcacaaaatccattaccgccttcgtcttctttggcgtcgtcgaagtcctcctccatctcgtcggtgaaatcatctgcgacctcctcatctggcggatcttcgatatattcattcctcttcttcttggcaaatggcaccaccgctggggcattccgacgaacaatgggtgggcatggacgtccggaaaaggcagcactcagtgccacggtagtggagggcaacgagccgggcagaagaggaaaccttgatggcctgacgggtaagcgcccatgaacgacgctttcgacgaccaaatccatcggttaacagatgacttcagagccaccatggagcgtggtgacgaggccagcttatccttttaagctggtaacggcgtacgccaacaggatgcggaaacgtctttctgaaagtccgccataactgacacgtcctcaccctccttcggtccttcccggttaccaatggagacgaaacgaacgagtactgtacacatcgaagaacacaacgcgaactagtgtcgccacgccgcctccgctccgacgcgcatgtccgccaaatgccgcgcggccacccccacccgctcccacgccgcggtcgcctcctccagttcgccgcggcggcgtccgggctcctgctccttacgctgctcgtcctcctcccggccgcgccgccctgggagcacaccaccgcgcccgcctcgctcctccacgcggccatcgctgcgcacccgtcgccgaattcctacgcgcggccctgcgccgaccacctcgccctctcgctgcaccgcctccgcgcctcgttgtcgtccctggagtccggcgacgtccccgccgcgctccacctcgcctccggctcgctccagtgccagtacgactgctcccacctcctctcgctcccggccttccgctcccaccccctcacgtcccgcttcctcaattcccttgccccacaaaccctaaatgccgccctgaaacctcctccctcttccgcccctgccgccgcattccctgcgaggatccgccccgacgccacggtgtgcaaaccgaattccggtgtgaagccgtgtggctactcgaccgtgcaggccgcggtggacgcagcgccgaaccacaccgctggcgctgggcacttcgccatcgcagttggtgcaggtacgtacaaggaaaatgtcgtgattccgtatgagaaggccaacattttgctgatgggggagggtatgggagctactgttatcact

SEQ ID NO: 25102 - DNA, 926 bp, Zea Mays
aataaatcagcgtgtcctcagatttcaggcggctggaggcatacgatggcacttacatcagagggaaagctttacggatggggatggaacaagttcggacaagtcggagtcggcaacaacgacgaccacagctcccccggacaagtcagttttccagaggatcagaaaatctcccaggttgcatgcggatggaggcatactctggccctctccgagaagaaaaatgtcttctcctgggggaggggcactagcggacagctcggcaacggtgaaatagtcgacaggaacacgcctgtgctgatcgatgccctgagctcagacggttctgcctgcaagaagctggagtcatccacggcagccccattcgcagccaaagtttgggtgtcgccgtcagaacgatacgccatagtccctgacgagaacgtccgtaaagcaggcggaggcacggcacgaggcaacggcgccgacgcgaacgtgccggagaacgacgtgaagaggatgcgcgtgcagtcgtcgtagtaggtcttctactaccgtccactccaccacccccccgttaaccctactagtagtaagtactacgaagacgaaccggtgccccatctagcggcgcccgatttttgtgcgttacgttctgcctaaaagtgctttccgtcgacggacggacctcctggtgttgagatggtagcggtagcactgcctcgcggcgatggtgtgtgtcgtgacgtgattcacctcttagagtagagaggtggctagcccagtcgacctgtgttgtgtgtgttgttaagatgtgtcctggatcttttgtgacattgcatggagggtacaataagcgcttcgtttctcgtttcttcccacttgttgcatgatagccaactgaaaccaagtactccgtgagacgaaagcaacgagcacacaaagac

SEQ ID NO: 25103 - DNA, 2213 bp, Zea Mays
cgccagtgcctttgctagcgcacaggcacagcggcgcacggcgcgggcggggcggcattcgcgtgcgtctcgccgtctcgtcacatggtggtgagggtgggccggtggggcttgtacgctagccattaatacggcaggtcgcccatcccatcccatcgcggccgccgcgcccgccggtctccacccctccccccaccccctgcttaaaatcccgcgtcccggtcgcgcaccccactccgcctccgctccccgctcgccgccgcgattgctggattggctgccgccagcgccccggtgctagctcccgttcctcgcggtggtcactggactagcctggacgccgcggcccgccgcctggtcgaagagatggactcggtcatggccgcccccgactcgccgccgcagactgtcgtgctcgtctctgccggcgccagccactccgtcgcgctcctcacgggcaatgtcctgtgctcgtggggcaggggcgaggacgggcagctcggccacggcgacgcggaggaccggctcgtgcccacggtgcttagcggcttcgacgcgcccgcgatcacgtccgtcatctgcggcgccgaccacaccaccgcctactccgaggacgagctgcaggtctacagctggggctggggagactttgggaggctggggcacggcaactccagcgacgtcttcacgccccagcctgtcaaggcgctgcaggggctcaagatcaaacagattgcctgcggggacagccattgtcttgccgtcaccatggccggagaagtgcagagttggggccgtaaccaaaacggacagctaggccttggaaccactgaagactcgctgctcccacaaaagattcaggcttttgagtaactgaagacggtgacctctacggatggggttggggtcgatatggaaacttaggtcttggtgaccgtaatgaccgtttgcttcctgaaaaagtatcttctgtggagaccatccacctgacaagcaaaagcagggagtcaaaatcacgctggatgttgtcgtcttgaaacatccctcggttaaaaacagtgtcagggggtgagaagatggtgcttgtggcatgtggatggcgccatacaattacggtttctgactctggtaatctgtacacttatggttggagcaaatatggtcagctagggcatggtgattttgaagatcatttagttccacataaagtagaagctttgaaagatagcactatatcccagatttcaggcggctggaggcatacgatggcacttacatcagagggaaagctttacggatggggatggaacaagttcggacaagtcggagtcggcaacaacgacgaccacagctcccccggacaagtcagttttccagaggatcagaaaatctcccaggttgcatgcggatggaggcatactctggccctctccgagaagaaaaatgtcttctcctgggggaggggcactagcggacagctcggcaacggtgaaatagtcgacaggaacacgcctgtgctgatcgatgccctgagctcagacggttctgcctgcaagaagctggagtcatccacggcagccccattcgcagccaaagtttgggtgtcgccgtcagaacgatacgccatagtccctgacgagaacgtgagttcgatcagttgacgcgcgtgttgtctgaactctgaagcgaatcgcttaaactgcagcactagtccgtaaagcaggcggaggcacggcacgaggcaacggcgccgacgcgaacgtgccggagaacgacgtgaagaggatgcgcgtgcagtcgtcgtagtaggtcttctactaccgtccactccaccacccccccgttaaccctactagtagtaagtactacgaagacgaaccggtgccccatctagcggcgcccgatttttgtgcgttacgttctgcctaaaagtgctttccgtcgacggacggacctcctggtgttgagatggtagcggtagcactgcctcgcggcgatggtgtgtgtcgtgacgtgattcacctcttagagtagagaggtggctagcccagtcgacctgtgttgtgtgtgttgttaagatgtgtcctggatcttttgtgacattgcatggagggtacaataagcgcttcgtttctcgtttcttcccacttgttgcatgatagccaactgaaaccaagtactccgtgagacgaaagcaacgagcacacaaagac

SEQ ID NO: 25104 - DNA, 2247 bp, Zea Mays
ctcctcctgccgcccctccagacgcccggacccgtcccgccacctacacaatgacagcaggccccgcagagacgcggccccgcgagtaaggggagcactctggccgccgtcgacgtcgtcgtcgtccacctctccccgctcctccttaatgacgtgctaatcagcgagcttaacccactggctcgggcgagcgccagtgcctttgctagcgcacaggcacagcggcgcacggcgcgggcggggcggcattcgcgtgcgtctcgccgtctcgtcacatggtggtgagggtgggccggtggggcttgtacgctagccattaatacggcaggtcgcccatcccatcccatcgcggccgccgcgcccgccggtctccacccctccccccaccccctgcttaaaatcccgcgtcccggtcgcgcaccccactccgcctccgctccccgctcgccgccgcgattgctggattggctgccgccagcgccccggtgctagctcccgttcctcgcggtggtcactggactagcctggacgccgcggcccgccgcctggtcgaagagatggactcggtcatggccgcccccgactcgccgccgcagactgtcgtgctcgtctctgccggcgccagccactccgtcgcgctcctcacgggcaatgtcctgtgctcgtggggcaggggcgaggacgggcagctcggccacggcgacgcggaggaccggctcgtgcccacggtgcttagcggcttcgacgcgcccgcgatcacgtccgtcatctgcggcgccgaccacaccaccgcctactccgaggacgagctgcaggtctacagctggggctggggagactttgggaggctggggcacggcaactccagcgacgtcttcacgccccagcctgtcaaggcgctgcaggggctcaagatcaaacagattgcctgcggggacagccattgtcttgccgtcaccatggccggagaagtgcagagttggggccgtaaccaaaacggacagctaggccttggaaccactgaagactcgctgctcccacaaaagattcaggcttttgagtaactgaagacggtgacctctacggatggggttggggtcgatatggaaacttaggtcttggtgaccgtaatgaccgtttgcttcctgaaaaagtatcttctgtggagggtgagaagatggtgcttgtggcatgtggatggcgccatacaattacggtttctgactctggtaatctgtacacttatggttggagcaaatatggtcagctagggcatggtgattttgaagatcatttagttccacataaagtagaagctttgaaagatagcactatatcccagatttcaggcggctggaggcatacgatggcacttacatcagagggaaagctttacggatggggatggaacaagttcggacaagtcggagtcggcaacaacgacgaccacagctcccccggacaagtcagttttccagaggatcagaaaatctcccaggttgcatgcggatggaggcatactctggccctctccgagaagaaaaatgtcttctcctgggggaggggcactagcggacagctcggcaacggtgaaatagtcgacaggaacacgcctgtgctgatcgatgccctgagctcagacggttctgcctgcaagaagctggagtcatccacggcagccccattcgcagccaaagtttgggtgtcgccgtcagaacgatacgccatagtccctgacgagaacgtccgtaaagcaggcggaggcacggcacgaggcaacggcgccgacgcgaacgtgccggagaacgacgtgaagaggatgcgcgtgcagtcgtcgtagtaggtcttctactaccgtccactccaccacccccccgttaaccctactagtagtaagtactacgaagacgaaccggtgccccatctagcggcgcccgatttttgtgcgttacgttctgcctaaaagtgctttccgtcgacggacggacctcctggtgttgagatggtagcggtagcactgcctcgcggcgatggtgtgtgtcgtgacgtgattcacctcttagagtagagaggtggctagcccagtcgacctgtgttgtgtgtgttgttaagatgtgtcctggatcttttgtgacattgcatggagggtacaataagcgcttcgtttctcgtttcttcccacttgttgcatgatagccaactgaaaccaagtactccgtgagacgaaagcaacgagcacacaaagac

SEQ ID NO: 25105 - DNA, 1946 bp, Zea Mays
atggggtgtatcatggcttgtacaacctcatttaatatggggtctcttgaagggcagacactcgtcgcaataattagcgaactacctagcgccttgatactcaagaggcatgcccacatcctacgtggcactcgaaatgtgcaagatactccttcgaccgacacggaggacatgagctccacggcctccaacgggattgggcccctagcgtcagtgagcgggtcgtcccactatggcgatgccaaggctagctcaagtgccccggccccaagggaagagctggcggtggaccccgcttcactcgtggcgcctgcggagcatcgcgaggaaagtgtcgaggcaatggtgtcatcctccgctcctgctacgtcggttgggcatggcgaggggaacggtgctggtggcatcgcaccctctgtcgcccattgcgccatcgaagcgtcgcaaggggaaggagctggtgacaacgcctcccccagcatcctccgtgttggcggtggtagttcctttagggcttgtttgggtaatcttggattggagtggattgaggtggtgttgcggcagtgggggttgttggggcccagtcgcccagacctagccttcaccggacatccctccctcctcttctcggggagtggtgctccctgcgctgcccattctcggataagacctagccttcaccggacatccctccctcctcttctcggggagtggtgctccctgcgctgcccattctcggataaggttccgaggggtcaccccatcattctcgaaggcctggaaggagaggatatggatgtggagcaatggcagctcatcgagggagcatctgctagagctgacaaaggtctagagactattgagcgctgcctcgacaatttcgaggaggcgatgttgatagcctgcactatgatgatgtgggacctgctccccatcggccagcgcctattttatcgatcgatggcacagagggaggtgttgctaactgcatgacagaaggtggagcagctgcatgcggaggtctcccattcggaggagagaaagcacgagctcgcctcacttcgtgctgaggctgaaaggctttgtggagaggtgatgtgcttgcgcacgcaacgtagcgagcgcggagcagcgcgaacctccttcgagaggagaggggccatcttcagggggacatgcatgagttgaatcattgggccaaggaggccgagtggaccctgagggtggaaaatgcttgcctagaggaggcaaacttggagctctcaagagagcgcaaggcggtcgaagagctccagaaaatgttctctaatgcccaagacaccgggaaagtggtggaggagctgaagaaggcgacggaggacgagatgtgcaagcccgcgcttgccgatgatgatgttgtcgccacacagcgcgtcgtcgtcgaaggtgcgttccactggagcagcatggccattgggcagatggtctccaacttcgatgagattgatgccactgtgatcgtggagggctttgctgctggccgtagcgatgaggagttggatgacattgaagaacaagtacgccctcatgcctggtcgatcgcgagccttattgacacgaagttcattctgacccggcctccaaatccatgaagcattaggcgagccctagtcatcttcagttcttttgtaaatgaacttagacgatggagctgaatgaatgttgtgcttttattttaatgttattttgctagtgagtccttgtgattggtcattccgagttatcgtagtcgtggccactgggtccttctgggcgtagatgtatcttaggacaggtgagtacgctagagttccttaagatagaagagcgtggatatggccgccattttcttgcccccaagcagaatgtggtgacttggtcgacatgttctgtttgctatagtatgaaagtacatgaatagaaatgac

SEQ ID NO: 25106 - DNA, 1919 bp, Zea Mays
atggggtgtatcatggcttgtacaacctcatttaatatggggtctcttgaagggcagacactcgtcgcaataattagcgaactacctagcgccttgatactcaagaggcatgcccacatcctacgtggcactcgaaatgtgcaagatactccttcgaccgacacggaggacatgagctccacggcctccaacgggattgggcccctagcgtcagtgagcgggtcgtcccactatggcgatgccaaggctagctcaagtgccccggccccaagggaagagctggcggtggaccccgcttcactcgtggcgcctgcggagcatcgcgaggaaagtgtcgaggcaatggtgtcatcctccgctcctgctacgtcggttgggcatggcgaggggaacggtgctggtggcatcgcaccctctgtcgcccattgcgccatcgaagcgtcgcaaggggaaggagctggtgacaacgcctcccccagcatcctccgtgttggcggtggtagttcctttagggcttgtttgggtaatcttggattggagtggattgaggtggtgttgcggcagtgggggttgttggggcccagtcgcccagacctagccttcaccggacatccctccctcctcttctcggggagtggtgctccctgcgctgcccattctcggataagacctagccttcaccggacatccctccctcctcttctcggggagtggtgctccctgcgctgcccattctcggataaggttccgaggggtcaccccatcattctcgaaggcctggaaggagaggatatggatgtggagcaatggcagctcatcgagggagcatctgctagagctgacaaaggtctagagactattgagcgctgcctcgacaatttcgaggaggcgatgttgatagcctgcactatgatgatgtgggacctgctccccatcggccagagggaggtgttgctaactgcatgacagaaggtggagcagctgcatgcggaggtctcccattcggaggagagaaagcacgagctcgcctcacttcgtgctgaggctgaaaggctttgtggagaggtgatgtgcttgcgcacgcaacgtagcgagcgcggagcagcgcgaacctccttcgagaggagaggggccatcttcagggggacatgcatgagttgaatcattgggccaaggaggccgagtggaccctgagggtggaaaatgcttgcctagaggaggcaaacttggagctctcaagagagcgcaaggcggtcgaagagctccagaaaatgttctctaatgcccaagacaccgggaaagtggtggaggagctgaagaaggcgacggaggacgagatgtgcaagcccgcgcttgccgatgatgatgttgtcgccacacagcgcgtcgtcgtcgaaggtgcgttccactggagcagcatggccattgggcagatggtctccaacttcgatgagattgatgccactgtgatcgtggagggctttgctgctggccgtagcgatgaggagttggatgacattgaagaacaagtacgccctcatgcctggtcgatcgcgagccttattgacacgaagttcattctgacccggcctccaaatccatgaagcattaggcgagccctagtcatcttcagttcttttgtaaatgaacttagacgatggagctgaatgaatgttgtgcttttattttaatgttattttgctagtgagtccttgtgattggtcattccgagttatcgtagtcgtggccactgggtccttctgggcgtagatgtatcttaggacaggtgagtacgctagagttccttaagatagaagagcgtggatatggccgccattttcttgcccccaagcagaatgtggtgacttggtcgacatgttctgtttgctatagtatgaaagtacatgaatagaaatgac

SEQ ID NO: 25107 - DNA, 1784 bp, Zea Mays
tgcgctgcggctgtttgtctggcaccggaaagaaaaaatccttctcggctcggcacaccgctgccggccatcgccgcagccggagatggaggacatcgaggacgtgctgggcccggtcggcctctctgtcggcggagcgcctccggtgctccgcctcctgctagcctccgtcgcggcaagctcaagcgccggtcgtccagggctgcgcatgcgcggcctcagctcgaggcccggatccccggcacgcagacgattcacgtcaagactatcgggtgctcacataaccagagtgacagtgaatacatgtcaggtcagctctctgcatttggatatgcaatcattgaagagcccgaaggagcagatttgtggctaattaacactggatcgtgtgaaaactgttgtcggcttgtcgctgaaggtgtccgggagatttggttgagtagccagtagcgaagataccggtgcttatggacaggatatcggtacaatcttccaaatttgttaaacacgattgttgcggagcatcctgttgaccgaagcacattgctccgcataggcatgacaaatccacctttcatactagagcatctgaaggagatatctgccgttttgcgtcacccctgggtttattcgttcctccatgttcctctgcaatctggaagtgatgctgttttaacggcgatgagtggtgaatacactgttggcaagttcagaaaggtagttgatgctttgtgtgagcttgtccctggaatgcaaattgctacagatattatctgcggctttcctggttagctaaacaagttcacggcttagcatttcattcttagttatcatttatgagtacatctgaacgacattttattaactgaatgccccaaaagacgttgctgctaatagtttgcactaaactgacatcccattttgaggtgagactgatgaggatttctctgagactgttaacctcgtaaagcaatatcaactccctcaatacacaacgttccgtaaatctacaagttttggttgttgacattcttttcctacatgtacatcgacaacgtggtttttctagggacgccctgctgctaggatgaagaaggtatcgagcaatgaagtgaaaaaagcggagtcgtgaactgacttcagttttcgaatcattgtcaccgtaccaaggaatggtaggcaaagtagagaggatctggatcactgagatcgcgaccggtggtgttcgcttggtaagtgcataccaattcttccgactaattgctgattatgttcatgcctggcgcaaagcttactcctgcacaggttgggcataccaagggatacatccaggtgctggtaattgcccctgatagcatgttaggagcgtcagcaaatgtgaaggttacatctgttcggcgacgtctttggtgaagtggtggaagaaggatctgttgcggcaggagaagcaccgaagcgaactagcgcgacttgtagtggtggttcttgagcgagcgtgtcgatggtcgattttggcggtttgttttgtttactcggtctgttctgtatggcgttgcaaaattgtgctactgtacaaatacatggttgcgaacaggttaacgcggagtcttctgatgctgcgtcacgacggatcagggtttgatgaaagtgaagaacatggtgcgatttgctaccgtgttcggaaaaatttggtagtgcatcgaaacccaaggcgtgacgtgttctctgtgtcatcactttaaaaaaaaaaagaaaactgtgttcgcacacgaggcaaaacagaa

SEQ ID NO: 25108 - DNA, 1386 bp, Zea Mays
ctgagaggcccaattacattccggccttgcgctgcggctgtttgtctggcaccggaaagaaaaaatccttctcggctcggcacaccgctgccggccatcgccgcagccggagatggaggacatcgaggacgtgctgggcccggtcggcctctctgtcggcggagcgcctccggtgctccgcctcctgctagcctccgtcgcggcaagctcaagcgccggtcgtccagggctgcgcatgcgcggcctcagctcgaggcccggatccccggcacgcagacgattcacgtcaagactatcgggtgctcacataaccagagtgacagtgaatacatgtcagtggatcgtgtgaaaactgttgtcggcttgtcgctgaaggtgtccgggagatttggttgagtagccagtagcgaagataccggtgcttatggacaggatatcggtacaatcttccaaatttgttaaacacgattgttgcggagcatcctgttgaccgaagcacattgctccgcataggcatgacaaatccacctttcatactagagcatctgaaggagatatctgccgttttgcgtcacccctgggtttattcgttcctccatgttcctctgcaatctggaagtgatgctgttttaacggcgatgagtggtgaatacactgttggcaagttcagaaaggtagttgatgctttgtgtgagcttgtccctggaatgcaaattgctacagatattatctgcggctttcctgggacgccctgctgctaggatgaagaaggtatcgagcaatgaagtgaaaaaagcggagtcgtgaactgacttcagttttcgaatcattgtcaccgtaccaaggaatggtaggcaaagtagagaggatctggatcactgagatcgcgaccggtggtgttcgcttggttgggcataccaagggatacatccaggtgctggtaattgcccctgatagcatgttaggagcgtcagcaaatgtgaaggttacatctgttcggcgacgtctttggtgaagtggtggaagaaggatctgttgcggcaggagaagcaccgaagcgaactagcgcgacttgtagtggtggttcttgagcgagcgtgtcgatggtcgattttggcggtttgttttgtttactcggtctgttctgtatggcgttgcaaaattgtgctactgtacaaatacatggttgcgaacaggttaacgcggagtcttctgatgctgcgtcacgacggatcagggtttgatgaaagtgaagaacatggtgcgatttgctaccgtgttcggaaaaatttggtagtgcatcgaaacccaaggcgtgacgtgttctctgtgtcatcactttaaaaaaaaaaagaaaactgtgttcgcacacgaggcaaaacagaa

SEQ ID NO: 25109 - DNA, 1786 bp, Zea Mays
ggcaggtagcacggtcgccgcacgggcggcccaaggagaaccgggttgagatcatgcgcgtctgggcttcataagcaacttgggccggtttcatcagccttgattggtcggcccagtggtaaacaaaacgtccaccattctgctgagaggcccaattacattccggccttgcgctgcggctgtttgtctggcaccggaaagaaaaaatccttctcggctcggcacaccgctgccggccatcgccgcagccggagatggaggacatcgaggacgtgctgggcccggtcggcctctctgtcggcggagcgcctccggtgctccgcctcctgctagcctccgtcgcggcaagctcaagcgccggtcgtccagggctgcgcatgcgcggcctcagctcgaggcccggatccccggcacgcagacgattcacgtcaagactatcgggtgctcacataaccagagtgacagtgaatacatgtcaggtaagaaagaacaagtttattgagattcttcctattaatgttggatgcttgggtgcctgcacatactgtaaaacaaagcatgctcgtggacatttgggaagctatactattgacagctttggatcgtgtgaaaactgttgtcggcttgtcgctgaaggtgtccgggagatttggttgagtagccagtagcgaagataccggtgcttatggacaggatatcggtacaatcttccaaatttgttaaacacgattgttgcggagcatcctgttgaccgaagcacattgctccgcataggcatgacaaatccacctttcatactagagcatctgaaggagatatctgccgttttgcgtcacccctgggtttattcgttcctccatgttcctctgcaatctggaagtgatgctgttttaacggcgatgagtggtgaatacactgttggcaagttcagaaaggtagttgatgctttgtgtgagcttgtccctggaatgcaaattgctacagatattatctgcggctttcctggttagctaaacaagttcacggcttagcatttcattcttagttatcatttatgagtacatctgaacgacattttattaactgaatgccccaaaagacgttgctgctaatagtttgcactaaactgacatcccattttgagggacgccctgctgctaggatgaagaaggtatcgagcaatgaagtgaaaaaagcggagtcgtgaactgacttcagttttcgaatcattgtcaccgtaccaaggaatggtaggcaaagtagagaggatctggatcactgagatcgcgaccggtggtgttcgcttggttgggcataccaagggatacatccaggtgctggtaattgcccctgatagcatgttaggagcgtcagcaaatgtgaaggttacatctgttcggcgacgtctttggtgaagtggtggaagaaggatctgttgcggcaggagaagcaccgaagcgaactagcgcgacttgtagtggtggttcttgagcgagcgtgtcgatggtcgattttggcggtttgttttgtttactcggtctgttctgtatggcgttgcaaaattgtgctactgtacaaatacatggttgcgaacaggttaacgcggagtcttctgatgctgcgtcacgacggatcagggtttgatgaaagtgaagaacatggtgcgatttgctaccgtgttcggaaaaatttggtagtgcatcgaaacccaaggcgtgacgtgttctctgtgtcatcactttaaaaaaaaaaagaaaactgtgttcgcacacgaggcaaaacagaa

SEQ ID NO: 25110 - DNA, 2283 bp, Zea Mays
cagcttgtgtatttgcctgatcgaaagcgggaatactttgtagatgacgatgatgttagtcttgattcagaactttcgcttgaagggaaacttgatctgaacaatccagaggagtcagccaggtttggcagaaggaaccacaaacgtggaatgcttggctggtttaaactaaagaagtccgaccagttatcagggctatcatccagtgtagacggtgatagcactgctagcgtctcaccttcgtgctctaaatcatcacaacaaaaacacttgctgcttgacctgaaggatggtcgaaggaaatctatgactaggaaaggagatgacccatcacttgctgattcttttcttgaaaggactcaagccggtgatttatttagtgctgcgcccagagtacggcaccctctgccgagtggaacaaccatcgtggatcaaatagatcttctacaagagcaggtcaaaatgctggctggggatgttgcactttgtacaagctcactcaaaagattgacagagcaagcagccaacaaccctgataatttgcaaattcaggagcaaattgtgaggttgaaagatgaaatcgcagaaaagaaatcacatatacatatgctagagcagcggatggtacaatcactggaaactacagaaggcccagcaattaagacagagttatcccagctgagtgagaagacatttgaactggagattatgtctgcggataataggattcttcaagaccagctacaagcaaaggtaacagaaaatgcagaactccaagaaacagttgcacacttgaggcaagaaatcagtaatttatcgaaggctgcaaaaagcgaggatagttttgctagcgtgcagtctagtgaaccatcaacagcaagcactgatactagggatcaaacaaatgaaatctcaaaccgtgcaaatatgtcctctagaacaacggacttaaatgagtcaggatttatatctcaagtgctcaaacaggcttcagaaattgaaagtttgaaacaagaaaatctgaggttggtggaagagaaggatggactggaaattcatagtcaaaagttggcggaggaatcatcctatgctaaagaattggcttctgctgctgcaattgaacttaagaatttggcagaagaagtcactaggctttcttatgaaaacgcaaagctgaatgcagacttagctgcggcaagagagctaaatgcatcgatgtcaagaagtaacatccaccctgacccaaagcgtcgtgatcatgagagcggaattttagttgaggagttgcagaaagagttggttgctagttgtcaaagggaggccgtattagaggacacactatctcaaaaggaccgaagagagagtgagcttctaaagattattgatgatgcaaaatgccgtgagcatgagttgaaaaatgaactggcaagcatgggggcccttctttcgaagataaagaaagaaaactctcaacaggatgtatttgaatttaaagcaaagcaaaacggctttcactcatccaagactgatagtggtagactggtaagtgaaatgcaagcatcggataatgggtgctgggatggcctcagtacttttgaagaagcaagagctgcatacaattttgaaagaatgcgctgcaaggaattggaaagcatcgtgtccaaactaaagggtgaggacctcaggggcctagatgttaaagttcttgaagaactacaaaacttccatgtagaagcactgtcaaggatctgccaagaaaagatggcaagtcaggcgctatagcaaaaacctttcctgagacgagtagccgctttcatgcaggccagagcttatttctcagatgtcccttcaacttcatgcccatctctctgaagttccactcacaatttcacatagttgctgctactgcaaccgggacaaccttgattagtccgcctttggacactgattcctgcgtttaaccgacagaaaacgaagcaaaatgcggttagatagcaggcgctaatggtcactgagtagttagcatgcagatactcccctcctgtacagctttttattaaagatagtagcagtggtattgtaggagtacccggattgtatttatactggtaatatatgagccggtaaaacccgaaggtggtgtttctgttatacctggaccgtgctctgcccttcaaaaactgtagtaaacccgaacggacgctgatgtagctttggcaaacttgctgttgatgtgatgcatgactgccgtgcacctggtgccgtgcccgacgatggttgact

SEQ ID NO: 25111 - DNA, 3128 bp, Zea Mays
ttactagatccaacagggcagaatctcagaattcgagaagatgcacagagcacaggcatgttggatcaaacaacttcaatcttgtcagcagtaggagtcacactatcttcacgttgacaatcgagagcagcccctctggtgaaaatgaagcagaagaagtcaagttgtctcagttgaacttgattgatcttgctgggtctgagagttccaaaactgaaacaactggtttacggcgcaaagaaggttcatacataaacaagagtttgctcacccttggaactgttattgctaaacttacagatggtaaggccactcatattccttatagagactcaaagctcacacgcttacttcagtcttctttgagtggacacggacgcatatcactcatttgcacagttacacctgcatccagcaacagtgaggagacacataacacattaaaatttgcccacaggagcaagcatattgagataaaagcttcccaaaacaagataatagatgagaagtccttaataaagaagtatcaaaaggagatatccagcctgaaagaagagctacagcaactcaggcgtggtatgatgggaaatggtggtattctccctacggatcaagaggatcttgttaatttaaaacttcagcttgaagctgggcaagttaaacttcaatcgaggctagaacaggaagaggaagcaaaagcagcattgatgggtaggattcagaggctaacaaaattaatattggtatcaaccaaaagttcgatatcctcaaatgtttctggaaagactaacttccgccgacggcattcatttggagaagatgagcttgtgtatttgcctgatcgaaagcgggaatactttgtagatgacgatgatgttagtcttgattcagaactttcgcttgaagggaaacttgatctgaacaatccagaggagtcagccaggtttggcagaaggaaccacaaacgtggaatgcttggctggtttaaactaaagaagtccgaccagttatcagggctatcatccagtgtagacggtgatagcactgctagcgtctcaccttcgtgctctaaatcatcacaacaaaaacacttgctgcttgacctgaaggatggtcgaaggaaatctatgactaggaaaggagatgacccatcacttgctgattcttttcttgaaaggactcaagccggtgatttatttagtgctgcgcccagagtacggcaccctctgccgagtggaacaaccatcgtggatcaaatagatcttctacaagagcaggtcaaaatgctggctggggatgttgcactttgtacaagctcactcaaaagattgacagagcaagcagccaacaaccctgataatttgcaaattcaggagcaaattgtgaggttgaaagatgaaatcgcagaaaagaaatcacatatacatatgctagagcagcggatggtacaatcactggaaactacagaaggcccagcaattaagacagagttatcccagaccttttcaaagttgagcacgcagctgagtgagaagacatttgaactggagattatgtctgcggataataggattcttcaagaccagctacaagcaaaggtaacagaaaatgcagaactccaagaaacagttgcacacttgaggcaagaaatcagtaatttatcgaaggctgcaaaaagcgaggatagttttgctagcgtgcagtctagtgaaccatcaacagcaagcactgatactagggatcaaacaaatgaaatctcaaaccgtgcaaatatgtcctctagaacaacggacttaaatgagtcaggatttatatctcaagtgctcaaacaggcttcagaaattgaaagtttgaaacaagaaaatctgaggttggtggaagagaaggatggactggaaattcatagtcaaaagttggcggaggaatcatcctatgctaaagaattggcttctgctgctgcaattgaacttaagaatttggcagaagaagtcactaggctttcttatgaaaacgcaaagctgaatgcagacttagctgcggcaagagagctaaatgcatcgatgtcaagaagtaacatccaccctgacccaaagcgtcgtgatcatgagagcggaattttagttgaggagttgcagaaagagttggttgctagttgtcaaagggaggccgtattagaggacacactatctcaaaaggaccgaagagagagtgagcttctaaagattattgatgatgcaaaatgccgtgagcatgagttgaaaaatgaactggcaagcatgggggcccttctttcgaagataaagaaagaaaactctcaacaggatgtatttgaatttaaagcaaagcaaaacggctttcactcatccaagactgatagtggtagactggtaagtgaaatgcaagcatcggataatgggtgctgggatggcctcagtacttttgaagaagcaagagctgcatacaattttgaaagaatgcgctgcaaggaattggaaagcatcgtgtccaaactaaagggtgaggacctcaggggcctagatgttaaagttcttgaagaactacaaaacttccatgtagaagcactgtcaaggatctgccaagaaaagatggcaagtcaggcgctatagcaaaaacctttcctgagacgagtagccgctttcatgcaggccagagcttatttctcagatgtcccttcaacttcatgcccatctctctgaagttccactcacaatttcacatagttgctgctactgcaaccgggacaaccttgattagtccgcctttggacactgattcctgcgtttaaccgacagaaaacgaagcaaaatgcggttagatagcaggcgctaatggtcactgagtagttagcatgcagatactcccctcctgtacagctttttattaaagatagtagcagtggtattgtaggagtacccggattgtatttatactggtaatatatgagccggtaaaacccgaaggtggtgtttctgttatacctggaccgtgctctgcccttcaaaaactgtagtaaacccgaacggacgctgatgtagctttggcaaacttgctgttgatgtgatgcatgactgccgtgcacctggtgccgtgcccgacgatggttgact

SEQ ID NO: 25112 - DNA, 3261 bp, Zea Mays
gtttcccctgttctctctggtcagtgggcttcatacaaggaggttatcaatgatttactagatccaacagggcagaatctcagaattcgagaagatgcacagggaacttatgtggaagggatcaaagaagaggttgttttatcacctgcacatgcgctctctctaatagcatctggagaagagcacaggcatgttggatcaaacaacttcaatcttgtcagcagtaggagtcacactatcttcacgttgacaatcgagagcagcccctctggtgaaaatgaagcagaagaagtcaagttgtctcagttgaacttgattgatcttgctgggtctgagagttccaaaactgaaacaactggtttacggcgcaaagaaggttcatacataaacaagagtttgctcacccttggaactgttattgctaaacttacagatggtaaggccactcatattccttatagagactcaaagctcacacgcttacttcagtcttctttgagtggacacggacgcatatcactcatttgcacagttacacctgcatccagcaacagtgaggagacacataacacattaaaatttgcccacaggagcaagcatattgagataaaagcttcccaaaacaagataatagatgagaagtccttaataaagaagtatcaaaaggagatatccagcctgaaagaagagctacagcaactcaggcgtggtatgatgggaaatggtggtattctccctacggatcaagaggatcttgttaatttaaaacttcagcttgaagctgggcaagttaaacttcaatcgaggctagaacaggaagaggaagcaaaagcagcattgatgggtaggattcagaggctaacaaaattaatattggtatcaaccaaaagttcgatatcctcaaatgtttctggaaagactaacttccgccgacggcattcatttggagaagatgagcttgtgtatttgcctgatcgaaagcgggaatactttgtagatgacgatgatgttagtcttgattcagaactttcgcttgaagggaaacttgatctgaacaatccagaggagtcagccaggtttggcagaaggaaccacaaacgtggaatgcttggctggtttaaactaaagaagtccgaccagttatcagggctatcatccagtgtagacggtgatagcactgctagcgtctcaccttcgtgctctaaatcatcacaacaaaaacacttgctgcttgacctgaaggatggtcgaaggaaatctatgactaggaaaggagatgacccatcacttgctgattcttttcttgaaaggactcaagccggtgatttatttagtgctgcgcccagagtacggcaccctctgccgagtggaacaaccatcgtggatcaaatagatcttctacaagagcaggtcaaaatgctggctggggatgttgcactttgtacaagctcactcaaaagattgacagagcaagcagccaacaaccctgataatttgcaaattcaggagcaaattgtgaggttgaaagatgaaatcgcagaaaagaaatcacatatacatatgctagagcagcggatggtacaatcactggaaactacagaaggcccagcaattaagacagagttatcccagaccttttcaaagttgagcacgcagctgagtgagaagacatttgaactggagattatgtctgcggataataggattcttcaagaccagctacaagcaaaggtaacagaaaatgcagaactccaagaaacagttgcacacttgaggcaagaaatcagtaatttatcgaaggctgcaaaaagcgaggatagttttgctagcgtgcagtctagtgaaccatcaacagcaagcactgatactagggatcaaacaaatgaaatctcaaaccgtgcaaatatgtcctctagaacaacggacttaaatgagtcaggatttatatctcaagtgctcaaacaggcttcagaaattgaaagtttgaaacaagaaaatctgaggttggtggaagagaaggatggactggaaattcatagtcaaaagttggcggaggaatcatcctatgctaaagaattggcttctgctgctgcaattgaacttaagaatttggcagaagaagtcactaggctttcttatgaaaacgcaaagctgaatgcagacttagctgcggcaagagagctaaatgcatcgatgtcaagaagtaacatccaccctgacccaaagcgtcgtgatcatgagagcggaattttagttgaggagttgcagaaagagttggttgctagttgtcaaagggaggccgtattagaggacacactatctcaaaaggaccgaagagagagtgagcttctaaagattattgatgatgcaaaatgccgtgagcatgagttgaaaaatgaactggcaagcatgggggcccttctttcgaagataaagaaagaaaactctcaacaggatgtatttgaatttaaagcaaagcaaaacggctttcactcatccaagactgatagtggtagactggtaagtgaaatgcaagcatcggataatgggtgctgggatggcctcagtacttttgaagaagcaagagctgcatacaattttgaaagaatgcgctgcaaggaattggaaagcatcgtgtccaaactaaagggtgaggacctcaggggcctagatgttaaagttcttgaagaactacaaaacttccatgtagaagcactgtcaaggatctgccaagaaaagatggcaagtcaggcgctatagcaaaaacctttcctgagacgagtagccgctttcatgcaggccagagcttatttctcagatgtcccttcaacttcatgcccatctctctgaagttccactcacaatttcacatagttgctgctactgcaaccgggacaaccttgattagtccgcctttggacactgattcctgcgtttaaccgacagaaaacgaagcaaaatgcggttagatagcaggcgctaatggtcactgagtagttagcatgcagatactcccctcctgtacagctttttattaaagatagtagcagtggtattgtaggagtacccggattgtatttatactggtaatatatgagccggtaaaacccgaaggtggtgtttctgttatacctggaccgtgctctgcccttcaaaaactgtagtaaacccgaacggacgctgatgtagctttggcaaacttgctgttgatgtgatgcatgactgccgtgcacctggtgccgtgcccgacgatggttgact

SEQ ID NO: 25113 - DNA, 4151 bp, Zea Mays
gacgaccctccaaagcaagcacacgagcttccctccctcctcccccacgagctcgtgcttgcttccttccccaaaaccctagtaccccgccccaagtccggctgtgctccccgtctccaccgccgcggcgcggcaatgtcgtcgtcgaggccgacgcgttccagtatatccccattccgatcccgccgctcggctccggcggtgtcggcagcgggacctcctccgccggcgaggacctcatctgggggtcgcccgtccaccccctcttctactgcctctgggcgacccaccaccccctcgtcctccggtggtcgccccgctaccccgtccgccgcgttcgcgcgtcccgccaccccttcgtcgtcatcggcgcggcccgccacgccgtcctctaccgcctccgcgcggcccaccacgccctcgtcgatctcctcgcgcgttgcggtgagggcgccgctcgtggacgcggccaatgccaaggagaacatcatggtcaccgtccgcttccggcccctcagtcctagagagatcaacaagggggacgaggtggcgtggtacgcggatggtgacaacatggtgcgcaacgagtataacctcagcatcgcctatgctttcgataaagtgtttggccctgctactacaactcgccatgtatatgatattgctgctcagcatatttcaattcctatgctagccagtagaaacatatccgatgaacttcataaacaacagatatgggctgtggacaatgcggaaaaggaactgtttttgcatatggagtaactagcagtgggaaaactcacaccatgcatggagaacaaaagtcacctggaatcattccattggcagtaaaggatgtattcagcattattcaagatacacctggacgagagtttcttctgcgggtttcgtatcttgaaatttacaatgaggttatcaatgatttactagatccaacagggcagaatctcagaattcgagaagatgcacagggaacttatgtggaagggatcaaagaagaggttgttttatcacctgcacatgcgctctctctaatagcatctggagaagagcacaggcatgttggatcaaacaacttcaatcttgtcagcagtaggagtcacactatcttcacgttgacaatcgagagcagcccctctggtgaaaatgaagcagaagaagtcaagttgtctcagttgaacttgattgatcttgctgggtctgagagttccaaaactgaaacaactggtttacggcgcaaagaaggttcatacataaacaagagtttgctcacccttggaactgttattgctaaacttacagatggtaaggccactcatattccttatagagactcaaagctcacacgcttacttcagtcttctttgagtggacacggacgcatatcactcatttgcacagttacacctgcatccagcaacagtgaggagacacataacacattaaaatttgcccacaggagcaagcatattgagataaaagcttcccaaaacaagataatagatgagaagtccttaataaagaagtatcaaaaggagatatccagcctgaaagaagagctacagcaactcaggcgtggtatgatgggaaatggtggtattctccctacggatcaagaggatcttgttaatttaaaacttcagcttgaagctgggcaagttaaacttcaatcgaggctagaacaggaagaggaagcaaaagcagcattgatgggtaggattcagaggctaacaaaattaatattggtatcaaccaaaagttcgatatcctcaaatgtttctggaaagactaacttccgccgacggcattcatttggagaagatgagcttgtgtatttgcctgatcgaaagcgggaatactttgtagatgacgatgatgttagtcttgattcagaactttcgcttgaagggaaacttgatctgaacaatccagaggagtcagccaggtttggcagaaggaaccacaaacgtggaatgcttggctggtttaaactaaagaagtccgaccagttatcagggctatcatccagtgtagacggtgatagcactgctagcgtctcaccttcgtgctctaaatcatcacaacaaaaacacttgctgcttgacctgaaggatggtcgaaggaaatctatgactaggaaaggagatgacccatcacttgctgattcttttcttgaaaggactcaagccggtgatttatttagtgctgcgcccagagtacggcaccctctgccgagtggaacaaccatcgtggatcaaatagatcttctacaagagcaggtcaaaatgctggctggggatgttgcactttgtacaagctcactcaaaagattgacagagcaagcagccaacaaccctgataatttgcaaattcaggagcaaattgtgaggttgaaagatgaaatcgcagaaaagaaatcacatatacatatgctagagcagcggatggtacaatcactggaaactacagaaggcccagcaattaagacagagttatcccagaccttttcaaagttgagcacgcagctgagtgagaagacatttgaactggagattatgtctgcggataataggattcttcaagaccagctacaagcaaaggtaacagaaaatgcagaactccaagaaacagttgcacacttgaggcaagaaatcagtaatttatcgaaggctgcaaaaagcgaggatagttttgctagcgtgcagtctagtgaaccatcaacagcaagcactgatactagggatcaaacaaatgaaatctcaaaccgtgcaaatatgtcctctagaacaacggacttaaatgagtcaggatttatatctcaagtgctcaaacaggcttcagaaattgaaagtttgaaacaagaaaatctgaggttggtggaagagaaggatggactggaaattcatagtcaaaagttggcggaggaatcatcctatgctaaagaattggcttctgctgctgcaattgaacttaagaatttggcagaagaagtcactaggctttcttatgaaaacgcaaagctgaatgcagacttagctgcggcaagagagctaaatgcatcgatgtcaagaagtaacatccaccctgacccaaagcgtcgtgatcatgagagcggaattttagttgaggagttgcagaaagagttggttgctagttgtcaaagggaggccgtattagaggacacactatctcaaaaggaccgaagagagagtgagcttctaaagattattgatgatgcaaaatgccgtgagcatgagttgaaaaatgaactggcaagcatgggggcccttctttcgaagataaagaaagaaaactctcaacaggatgtatttgaatttaaagcaaagcaaaacggctttcactcatccaagactgatagtggtagactggtaagtgaaatgcaagcatcggataatgggtgctgggatggcctcagtacttttgaagaagcaagagctgcatacaattttgaaagaatgcgctgcaaggaattggaaagcatcgtgtccaaactaaagggtgaggacctcaggggcctagatgttaaagttcttgaagaactacaaaacttccatgtagaagcactgtcaaggatctgccaagaaaagatggcaagtcaggcgctatagcaaaaacctttcctgagacgagtagccgctttcatgcaggccagagcttatttctcagatgtcccttcaacttcatgcccatctctctgaagttccactcacaatttcacatagttgctgctactgcaaccgggacaaccttgattagtccgcctttggacactgattcctgcgtttaaccgacagaaaacgaagcaaaatgcggttagatagcaggcgctaatggtcactgagtagttagcatgcagatactcccctcctgtacagctttttattaaagatagtagcagtggtattgtaggagtacccggattgtatttatactggtaatatatgagccggtaaaacccgaaggtggtgtttctgttatacctggaccgtgctctgcccttcaaaaactgtagtaaacccgaacggacgctgatgtagctttggcaaacttgctgttgatgtgatgcatgactgccgtgcacctggtgccgtgcccgacgatggttgact

SEQ ID NO: 25114 - DNA, 3446 bp, Zea Mays
cgaaaccccagaaaacttcagagcttcggaccaaaaaaacaccaaaaaggcggcacccgggcgcctaggaggaagacgacgacgaccctccaaagcaagcacacgagcttccctccctcctcccccacgagctcgtgcttgcttccttccccaaaaccctagtaccccgccccaagtccggctgtgctccccgtctccaccgccgcggcgcggcaatgtcgtcgtcgaggccgacgcgttccagtatatccccattccgatcccgccgctcggctccggcggtgtcggcagcgggacctcctccgccggcgaggacctcatctgggggtcgcccgtccaccccctcttctactgcctctgggcgacccaccaccccctcgtcctccggtggtcgccccgctaccccgtccgccgcgttcgcgcgtcccgccaccccttcgtcgtcatcggcgcggcccgccacgccgtcctctaccgcctccgcgcggcccaccacgccctcgtcgatctcctcgcgcgttgcggtgagggcgccgctcgtggacgcggccaatgccaaggagaacatcatggtcaccgtccgcttccggcccctcagtcctagagagatcaacaagggggacgaggtggcgtggtacgcggatggtgacaacatggtgcgcaacgagtataacctcagcatcgcctatgctttcgataaagtgtttggccctgctactacaactcgccatgtatatgatattgctgctcagcatattgtgagtggtgccatgcaaggaatcaatggaactgtttttgcatatggagtaactagcagtgggaaaactcacaccatgcatggagaacaaaagtcacctggaatcattccattggcagtaaaggatgtattcagcattattcaagatacacctggacgagagtttcttctgcgggtttcgtatcttgaaatttacaatgaggttatcaatgatttactagatccaacagggcagaatctcagaattcgagaagatgcacagggaacttatgtggaagggatcaaagaagaggttgttttatcacctgcacatgcgctctctctaatagcatctggagaagagcacaggcatgttggatcaaacaacttcaatcttgtcagcagtaggagtcacactatcttcacgttgacaatcgagagcagcccctctggtgaaaatgaagcagaagaagtcaagttgtctcagttgaacttgattgatcttgctgggtctgagagttccaaaactgaaacaactggtttacggcgcaaagaaggttcatacataaacaagagtttgctcacccttggaactgttattgctaaacttacagatggtaaggccactcatattccttatagagactcaaagctcacacgcttacttcagtcttctttgagtggacacggacgcatatcactcatttgcacagttacacctgcatccagcaacagtgaggagacacataacacattaaaatttgcccacaggagcaagcatattgagataaaagcttcccaaaacaagataatagatgagaagtccttaataaagaagtatcaaaaggagatatccagcctgaaagaagagctacagcaactcaggcgtggtatgatgggaaatggtggtattctccctacggatcaagaggatcttgttaatttaaaacttcaggagcaaattgtgaggttgaaagatgaaatcgcagaaaagaaatcacatatacatatgctagagcagcggatggtacaatcactggaaactacagaaggcccagcaattaagacagagttatcccagaccttttcaaagttgagcacgcagctgagtgagaagacatttgaactggagattatgtctgcggataataggattcttcaagaccagctacaagcaaaggtaacagaaaatgcagaactccaagaaacagttgcacacttgaggcaagaaatcagtaatttatcgaaggctgcaaaaagcgaggatagttttgctagcgtgcagtctagtgaaccatcaacagcaagcactgatactagggatcaaacaaatgaaatctcaaaccgtgcaaatatgtcctctagaacaacggacttaaatgagtcaggatttatatctcaagtgctcaaacaggcttcagaaattgaaagtttgaaacaagaaaatctgaggttggtggaagagaaggatggactggaaattcatagtcaaaagttggcggaggaatcatcctatgctaaagaattggcttctgctgctgcaattgaacttaagaatttggcagaagaagtcactaggctttcttatgaaaacgcaaagctgaatgcagacttagctgcggcaagagagctaaatgcatcgatgtcaagaagtaacatccaccctgacccaaagcgtcgtgatcatgagagcggaattttagttgaggagttgcagaaagagttggttgctagttgtcaaagggaggccgtattagaggacacactatctcaaaaggaccgaagagagagtgagcttctaaagattattgatgatgcaaaatgccgtgagcatgagttgaaaaatgaactggcaagcatgggggcccttctttcgaagataaagaaagaaaactctcaacaggatgtatttgaatttaaagcaaagcaaaacggctttcactcatccaagactgatagtggtagactggtaagtgaaatgcaagcatcggataatgggtgctgggatggcctcagtacttttgaagaagcaagagctgcatacaattttgaaagaatgcgctgcaaggaattggaaagcatcgtgtccaaactaaagggtgaggacctcaggggcctagatgttaaagttcttgaagaactacaaaacttccatgtagaagcactgtcaaggatctgccaagaaaagatggcaagtcaggcgctatagcaaaaacctttcctgagacgagtagccgctttcatgcaggccagagcttatttctcagatgtcccttcaacttcatgcccatctctctgaagttccactcacaatttcacatagttgctgctactgcaaccgggacaaccttgattagtccgcctttggacactgattcctgcgtttaaccgacagaaaacgaagcaaaatgcggttagatagcaggcgctaatggtcactgagtagttagcatgcagatactcccctcctgtacagctttttattaaagatagtagcagtggtattgtaggagtacccggattgtatttatactggtaatatatgagccggtaaaacccgaaggtggtgtttctgttatacctggaccgtgctctgcccttcaaaaactgtagtaaacccgaacggacgctgatgtagctttggcaaacttgctgttgatgtgatgcatgactgccgtgcacctggtgccgtgcccgacgatggttgact

SEQ ID NO: 25115 - DNA, 4111 bp, Zea Mays
cgaaaccccagaaaacttcagagcttcggaccaaaaaaacaccaaaaaggcggcacccgggcgcctaggaggaagacgacgacgaccctccaaagcaagcacacgagcttccctccctcctcccccacgagctcgtgcttgcttccttccccaaaaccctagtaccccgccccaagtccggctgtgctccccgtctccaccgccgcggcgcggcaatgtcgtcgtcgaggccgacgcgttccagtatatccccattccgatcccgccgctcggctccggcggtgtcggcagcgggacctcctccgccggcgaggacctcatctgggggtcgcccgtccaccccctcttctactgcctctgggcgacccaccaccccctcgtcctccggtggtcgccccgctaccccgtccgccgcgttcgcgcgtcccgccaccccttcgtcgtcatcggcgcggcccgccacgccgtcctctaccgcctccgcgcggcccaccacgccctcgtcgatctcctcgcgcgttgcggtgagggcgccgctcgtggacgcggccaatgccaaggagaacatcatggtcaccgtccgcttccggcccctcagtcctagagagatcaacaagggggacgaggtggcgtggtacgcggatggtgacaacatggtgcgcaacgagtataacctcagcatcgcctatgctttcgataaagtgtttggccctgctactacaactcgccatgtatatgatattgctgctcagcatattgtgagtggtgccatgcaaggaatcaatggaactgtttttgcatatggagtaactagcagtgggaaaactcacaccatgcatggagaacaaaagtcacctggaatcattccattggcagtaaaggatgtattcagcattattcaagatacacctggacgagagtttcttctgcgggtttcgtatcttgaaatttacaatgaggttatcaatgatttactagatccaacagggcagaatctcagaattcgagaagatgcacagggaacttatgtggaagggatcaaagaagaggttgttttatcacctgcacatgcgctctctctaatagcatctggagaagagcacaggcatgttggatcaaacaacttcaatcttgtcagcagtaggagtcacactatcttcacgttgacaatcgagagcagcccctctggtgaaaatgaagcagaagaagtcaagttgtctcagttgaacttgattgatcttgctgggtctgagagttccaaaactgaaacaactggtttacggcgcaaagaaggttcatacataaacaagagtttgctcacccttggaactgttattgctaaacttacagatggtaaggccactcatattccttatagagactcaaagctcacacgcttacttcagtcttctttgagtggacacggacgcatatcactcatttgcacagttacacctgcatccagcaacagtgaggagacacataacacattaaaatttgcccacaggagcaagcatattgagataaaagcttcccaaaacaagataatagatgagaagtccttaataaagaagtatcaaaaggagatatccagcctgaaagaagagctacagcaactcaggcgtggtatgatgggaaatggtggtattctccctacggatcaagaggatcttgttaatttaaaacttcagcttgaagctgggcaagttaaacttcaatcgaggctagaacaggaagaggaagcaaaagcagcattgatgggtaggattcagaggctaacaaaattaatattggtatcaaccaaaagttcgatatcctcaaatgtttctggaaagactaacttccgccgacggcattcatttggagaagatgagaactttcgcttgaagggaaacttgatctgaacaatccagaggagtcagccaggtttggcagaaggaaccacaaacgtggaatgcttggctggtttaaactaaagaagtccgaccagttatcagggctatcatccagtgtagacggtgatagcactgctagcgtctcaccttcgtgctctaaatcatcacaacaaaaacacttgctgcttgacctgaaggatggtcgaaggaaatctatgactaggaaaggagatgacccatcacttgctgattcttttcttgaaaggactcaagccggtgatttatttagtgctgcgcccagagtacggcaccctctgccgagtggaacaaccatcgtggatcaaatagatcttctacaagagcaggtcaaaatgctggctggggatgttgcactttgtacaagctcactcaaaagattgacagagcaagcagccaacaaccctgataatttgcaaattcaggagcaaattgtgaggttgaaagatgaaatcgcagaaaagaaatcacatatacatatgctagagcagcggatggtacaatcactggaaactacagaaggcccagcaattaagacagagttatcccagaccttttcaaagttgagcacgcagctgagtgagaagacatttgaactggagattatgtctgcggataataggattcttcaagaccagctacaagcaaaggtaacagaaaatgcagaactccaagaaacagttgcacacttgaggcaagaaatcagtaatttatcgaaggctgcaaaaagcgaggatagttttgctagcgtgcagtctagtgaaccatcaacagcaagcactgatactagggatcaaacaaatgaaatctcaaaccgtgcaaatatgtcctctagaacaacggacttaaatgagtcaggatttatatctcaagtgctcaaacaggcttcagaaattgaaagtttgaaacaagaaaatctgaggttggtggaagagaaggatggactggaaattcatagtcaaaagttggcggaggaatcatcctatgctaaagaattggcttctgctgctgcaattgaacttaagaatttggcagaagaagtcactaggctttcttatgaaaacgcaaagctgaatgcagacttagctgcggcaagagagctaaatgcatcgatgtcaagaagtaacatccaccctgacccaaagcgtcgtgatcatgagagcggaattttagttgaggagttgcagaaagagttggttgctagttgtcaaagggaggccgtattagaggacacactatctcaaaaggaccgaagagagagtgagcttctaaagattattgatgatgcaaaatgccgtgagcatgagttgaaaaatgaactggcaagcatgggggcccttctttcgaagataaagaaagaaaactctcaacaggatgtatttgaatttaaagcaaagcaaaacggctttcactcatccaagactgatagtggtagactggtaagtgaaatgcaagcatcggataatgggtgctgggatggcctcagtacttttgaagaagcaagagctgcatacaattttgaaagaatgcgctgcaaggaattggaaagcatcgtgtccaaactaaagggtgaggacctcaggggcctagatgttaaagttcttgaagaactacaaaacttccatgtagaagcactgtcaaggatctgccaagaaaagatggcaagtcaggcgctatagcaaaaacctttcctgagacgagtagccgctttcatgcaggccagagcttatttctcagatgtcccttcaacttcatgcccatctctctgaagttccactcacaatttcacatagttgctgctactgcaaccgggacaaccttgattagtccgcctttggacactgattcctgcgtttaaccgacagaaaacgaagcaaaatgcggttagatagcaggcgctaatggtcactgagtagttagcatgcagatactcccctcctgtacagctttttattaaagatagtagcagtggtattgtaggagtacccggattgtatttatactggtaatatatgagccggtaaaacccgaaggtggtgtttctgttatacctggaccgtgctctgcccttcaaaaactgtagtaaacccgaacggacgctgatgtagctttggcaaacttgctgttgatgtgatgcatgactgccgtgcacctggtgccgtgcccgacgatggttgact

SEQ ID NO: 25116 - DNA, 4165 bp, Zea Mays
cgaaaccccagaaaacttcagagcttcggaccaaaaaaacaccaaaaaggcggcacccgggcgcctaggaggaagacgacgacgaccctccaaagcaagcacacgagcttccctccctcctcccccacgagctcgtgcttgcttccttccccaaaaccctagtaccccgccccaagtccggctgtgctccccgtctccaccgccgcggcgcggcaatgtcgtcgtcgaggccgacgcgttccagtatatccccattccgatcccgccgctcggctccggcggtgtcggcagcgggacctcctccgccggcgaggacctcatctgggggtcgcccgtccaccccctcttctactgcctctgggcgacccaccaccccctcgtcctccggtggtcgccccgctaccccgtccgccgcgttcgcgcgtcccgccaccccttcgtcgtcatcggcgcggcccgccacgccgtcctctaccgcctccgcgcggcccaccacgccctcgtcgatctcctcgcgcgttgcggtgagggcgccgctcgtggacgcggccaatgccaaggagaacatcatggtcaccgtccgcttccggcccctcagtcctagagagatcaacaagggggacgaggtggcgtggtacgcggatggtgacaacatggtgcgcaacgagtataacctcagcatcgcctatgctttcgataaagtgtttggccctgctactacaactcgccatgtatatgatattgctgctcagcatattgtgagtggtgccatgcaaggaatcaatggaactgtttttgcatatggagtaactagcagtgggaaaactcacaccatgcatggagaacaaaagtcacctggaatcattccattggcagtaaaggatgtattcagcattattcaagatacacctggacgagagtttcttctgcgggtttcgtatcttgaaatttacaatgaggttatcaatgatttactagatccaacagggcagaatctcagaattcgagaagatgcacagggaacttatgtggaagggatcaaagaagaggttgttttatcacctgcacatgcgctctctctaatagcatctggagaagagcacaggcatgttggatcaaacaacttcaatcttgtcagcagtaggagtcacactatcttcacgttgacaatcgagagcagcccctctggtgaaaatgaagcagaagaagtcaagttgtctcagttgaacttgattgatcttgctgggtctgagagttccaaaactgaaacaactggtttacggcgcaaagaaggttcatacataaacaagagtttgctcacccttggaactgttattgctaaacttacagatggtaaggccactcatattccttatagagactcaaagctcacacgcttacttcagtcttctttgagtggacacggacgcatatcattacacctgcatccagcaacagtgaggagacacataacacattaaaatttgcccacaggagcaagcatattgagataaaagcttcccaaaacaagataatagatgagaagtccttaataaagaagtatcaaaaggagatatccagcctgaaagaagagctacagcaactcaggcgtggtatgatgggaaatggtggtattctccctacggatcaagaggatcttgttaatttaaaacttcagcttgaagctgggcaagttaaacttcaatcgaggctagaacaggaagaggaagcaaaagcagcattgatgggtaggattcagaggctaacaaaattaatattggtatcaaccaaaagttcgatatcctcaaatgtttctggaaagactaacttccgccgacggcattcatttggagaagatgagcttgtgtatttgcctgatcgaaagcgggaatactttgtagatgacgatgatgttagtcttgattcagaactttcgcttgaagggaaacttgatctgaacaatccagaggagtcagccaggtttggcagaaggaaccacaaacgtggaatgcttggctggtttaaactaaagaagtccgaccagttatcagggctatcatccagtgtagacggtgatagcactgctagcgtctcaccttcgtgctctaaatcatcacaacaaaaacacttgctgcttgacctgaaggatggtcgaaggaaatctatgactaggaaaggagatgacccatcacttgctgattcttttcttgaaaggactcaagccggtgatttatttagtgctgcgcccagagtacggcaccctctgccgagtggaacaaccatcgtggatcaaatagatcttctacaagagcaggtcaaaatgctggctggggatgttgcactttgtacaagctcactcaaaagattgacagagcaagcagccaacaaccctgataatttgcaaattcaggagcaaattgtgaggttgaaagatgaaatcgcagaaaagaaatcacatatacatatgctagagcagcggatggtacaatcactggaaactacagaaggcccagcaattaagacagagttatcccagaccttttcaaagttgagcacgcagctgagtgagaagacatttgaactggagattatgtctgcggataataggattcttcaagaccagctacaagcaaaggtaacagaaaatgcagaactccaagaaacagttgcacacttgaggcaagaaatcagtaatttatcgaaggctgcaaaaagcgaggatagttttgctagcgtgcagtctagtgaaccatcaacagcaagcactgatactagggatcaaacaaatgaaatctcaaaccgtgcaaatatgtcctctagaacaacggacttaaatgagtcaggatttatatctcaagtgctcaaacaggcttcagaaattgaaagtttgaaacaagaaaatctgaggttggtggaagagaaggatggactggaaattcatagtcaaaagttggcggaggaatcatcctatgctaaagaattggcttctgctgctgcaattgaacttaagaatttggcagaagaagtcactaggctttcttatgaaaacgcaaagctgaatgcagacttagctgcggcaagagagctaaatgcatcgatgtcaagaagtaacatccaccctgacccaaagcgtcgtgatcatgagagcggaattttagttgaggagttgcagaaagagttggttgctagttgtcaaagggaggccgtattagaggacacactatctcaaaaggaccgaagagagagtgagcttctaaagattattgatgatgcaaaatgccgtgagcatgagttgaaaaatgaactggcaagcatgggggcccttctttcgaagataaagaaagaaaactctcaacaggatgtatttgaatttaaagcaaagcaaaacggctttcactcatccaagactgatagtggtagactggtaagtgaaatgcaagcatcggataatgggtgctgggatggcctcagtacttttgaagaagcaagagctgcatacaattttgaaagaatgcgctgcaaggaattggaaagcatcgtgtccaaactaaagggtgaggacctcaggggcctagatgttaaagttcttgaagaactacaaaacttccatgtagaagcactgtcaaggatctgccaagaaaagatggcaagtcaggcgctatagcaaaaacctttcctgagacgagtagccgctttcatgcaggccagagcttatttctcagatgtcccttcaacttcatgcccatctctctgaagttccactcacaatttcacatagttgctgctactgcaaccgggacaaccttgattagtccgcctttggacactgattcctgcgtttaaccgacagaaaacgaagcaaaatgcggttagatagcaggcgctaatggtcactgagtagttagcatgcagatactcccctcctgtacagctttttattaaagatagtagcagtggtattgtaggagtacccggattgtatttatactggtaatatatgagccggtaaaacccgaaggtggtgtttctgttatacctggaccgtgctctgcccttcaaaaactgtagtaaacccgaacggacgctgatgtagctttggcaaacttgctgttgatgtgatgcatgactgccgtgcacctggtgccgtgcccgacgatggttgact

SEQ ID NO: 25117 - DNA, 4158 bp, Zea Mays
cgaaaccccagaaaacttcagagcttcggaccaaaaaaacaccaaaaaggcggcacccgggcgcctaggaggaagacgacgacgaccctccaaagcaagcacacgagcttccctccctcctcccccacgagctcgtgcttgcttccttccccaaaaccctagtaccccgccccaagtccggctgtgctccccgtctccaccgccgcggcgcggcaatgtcgtcgtcgaggccgacgcgttccagtatatccccattccgatcccgccgctcggctccggcggtgtcggcagcgggacctcctccgccggcgaggacctcatctgggggtcgcccgtccaccccctcttctactgcctctgggcgacccaccaccccctcgtcctccggtggtcgccccgctaccccgtccgccgcgttcgcgcgtcccgccaccccttcgtcgtcatcggcgcggcccgccacgccgtcctctaccgcctccgcgcggcccaccacgccctcgtcgatctcctcgcgcgttgcggtgagggcgccgctcgtggacgcggccaatgccaaggagaacatcatggtcaccgtccgcttccggcccctcagtcctagagagatcaacaagggggacgaggtggcgtggtacgcggatggtgacaacatggtgcgcaacgagtataacctcagcatcgcctatgctttcgataaagtgtttggccctgctactacaactcgccatgtatatgatattgctgctcagcatattgtgagtggtgccatgcaaggaatcaatggaactgtttttgcatatggagtaactagcagtgggaaaactcacaccatgcatggagaacaaaagtcacctggaatcattccattggcagtaaaggatgtattcagcattattcaagatacacctggacgagagtttcttctgcgggtttcgtatcttgaaatttacaatgaggttatcaatgatttactagatccaacagggcagaatctcagaattcgagaagatgcacagggaacttatgtggaagggatcaaagaagaggttgttttatcacctgcacatgcgctctctctaatagcatctggagaagagcacaggcatgttggatcaaacaacttcaatcttgtcagcagtaggagtcacactatcttcacgttgacaatcgagagcagcccctctggtgaaaatgaagcagaagaagtcaagttgtctcagttgaacttgattgatcttgctgggtctgagagttccaaaactgaaacaactggtttacggcgcaaagaaggttcatacataaacaagagtttgctcacccttggaactgttattgctaaacttacagatggtaaggccactcatattccttatagagactcaaagctcacacgcttacttcagtcttctttgagtggacacggacgcatatcactcatttgcacagttacacctgcatccagcaacagtgaggagacacataacacattaaaatttgcccacaggagcaagcatattgagataaaagcttcccaaaacaagataatagatgagaagtccttaataaagaagtatcaaaaggagatatccagcctgaaagaagagctacagcaactcaggcgtggtatgatgggaaatggtggtattctccctacggatcaagaggatcttgttaatttaaaacttcagcttgaagctgggcaagttaaacttcaatcgaggctagaacaggaagaggaagcaaaagcagcattgatgggtaggattcagaggctaacaaaattaatattggtatcaaccaaaagttcgatatcctcaaatgtttctggaaagactaacttccgccgacggcattcatttggagaagatgagcttgtgtatttgcctgatcgaaagcgggaatactttgtagatgacgatgatgttagtcttgattcagaactttcgcttgaagggaaacttgatctgaacaatccagaggagtcagccaggtttggcagaaggaaccacaaacgtggaatgcttggctggtttaaactaaagaagtccgaccagttatcagggctatcatccagtgtagacggtgatagcactgctagcgtctcaccttcgtgctctaaatcatcacaacaaaaacacttgctgcttgacctgaaggatggtcgaaggaaatctatgactaggaaaggagatgacccatcacttgctgattcttttcttgaaaggactcaagccggtgatttatttagtgctgcgcccagagtacggcaccctctgccgagtggaacaaccatcgtggatcaaatagatcttctacaagagcaggtcaaaatgctggctggggatgttgcactttgtacaagctcactcaaaagattgacagagcaagcagccaacaaccctgataatttgcaaattcaggagcaaattgtgaggttgaaagatgaaatcgcagaaaagaaatcacatatacatatgctagagcagcggatggtacaatcactggaaactacagaaggcccagcaattaagacagagttatcccagaccttttcaaagttgagcacgcagctgagtgagaagacatttgaactggaggattcttcaagaccagctacaagcaaaggtaacagaaaatgcagaactccaagaaacagttgcacacttgaggcaagaaatcagtaatttatcgaaggctgcaaaaagcgaggatagttttgctagcgtgcagtctagtgaaccatcaacagcaagcactgatactagggatcaaacaaatgaaatctcaaaccgtgcaaatatgtcctctagaacaacggacttaaatgagtcaggatttatatctcaagtgctcaaacaggcttcagaaattgaaagtttgaaacaagaaaatctgaggttggtggaagagaaggatggactggaaattcatagtcaaaagttggcggaggaatcatcctatgctaaagaattggcttctgctgctgcaattgaacttaagaatttggcagaagaagtcactaggctttcttatgaaaacgcaaagctgaatgcagacttagctgcggcaagagagctaaatgcatcgatgtcaagaagtaacatccaccctgacccaaagcgtcgtgatcatgagagcggaattttagttgaggagttgcagaaagagttggttgctagttgtcaaagggaggccgtattagaggacacactatctcaaaaggaccgaagagagagtgagcttctaaagattattgatgatgcaaaatgccgtgagcatgagttgaaaaatgaactggcaagcatgggggcccttctttcgaagataaagaaagaaaactctcaacaggatgtatttgaatttaaagcaaagcaaaacggctttcactcatccaagactgatagtggtagactggtaagtgaaatgcaagcatcggataatgggtgctgggatggcctcagtacttttgaagaagcaagagctgcatacaattttgaaagaatgcgctgcaaggaattggaaagcatcgtgtccaaactaaagggtgaggacctcaggggcctagatgttaaagttcttgaagaactacaaaacttccatgtagaagcactgtcaaggatctgccaagaaaagatggcaagtcaggcgctatagcaaaaacctttcctgagacgagtagccgctttcatgcaggccagagcttatttctcagatgtcccttcaacttcatgcccatctctctgaagttccactcacaatttcacatagttgctgctactgcaaccgggacaaccttgattagtccgcctttggacactgattcctgcgtttaaccgacagaaaacgaagcaaaatgcggttagatagcaggcgctaatggtcactgagtagttagcatgcagatactcccctcctgtacagctttttattaaagatagtagcagtggtattgtaggagtacccggattgtatttatactggtaatatatgagccggtaaaacccgaaggtggtgtttctgttatacctggaccgtgctctgcccttcaaaaactgtagtaaacccgaacggacgctgatgtagctttggcaaacttgctgttgatgtgatgcatgactgccgtgcacctggtgccgtgcccgacgatggttgact

SEQ ID NO: 25118 - DNA, 4251 bp, Zea Mays
atcacattcacaacaaagcagtgctcagcaagtcactgaccagaaggccgcggtgagctcaccaccggtgttccgaaaccccagaaaacttcagagcttcggaccaaaaaaacaccaaaaaggcggcacccgggcgcctaggaggaagacgacgacgaccctccaaagcaagcacacgagcttccctccctcctcccccacgagctcgtgcttgcttccttccccaaaaccctagtaccccgccccaagtccggctgtgctccccgtctccaccgccgcggcgcggcaatgtcgtcgtcgaggccgacgcgttccagtatatccccattccgatcccgccgctcggctccggcggtgtcggcagcgggacctcctccgccggcgaggacctcatctgggggtcgcccgtccaccccctcttctactgcctctgggcgacccaccaccccctcgtcctccggtggtcgccccgctaccccgtccgccgcgttcgcgcgtcccgccaccccttcgtcgtcatcggcgcggcccgccacgccgtcctctaccgcctccgcgcggcccaccacgccctcgtcgatctcctcgcgcgttgcggtgagggcgccgctcgtggacgcggccaatgccaaggagaacatcatggtcaccgtccgcttccggcccctcagtcctagagagatcaacaagggggacgaggtggcgtggtacgcggatggtgacaacatggtgcgcaacgagtataacctcagcatcgcctatgctttcgataaagtgtttggccctgctactacaactcgccatgtatatgatattgctgctcagcatattgtgagtggtgccatgcaaggaatcaatggaactgtttttgcatatggagtaactagcagtgggaaaactcacaccatgcatggagaacaaaagtcacctggaatcattccattggcagtaaaggatgtattcagcattattcaagatacacctggacgagagtttcttctgcgggtttcgtatcttgaaatttacaatgaggttatcaatgatttactagatccaacagggcagaatctcagaattcgagaagatgcacagggaacttatgtggaagggatcaaagaagaggttgttttatcacctgcacatgcgctctctctaatagcatctggagaagagcacaggcatgttggatcaaacaacttcaatcttgtcagcagtaggagtcacactatcttcacgttgacaatcgagagcagcccctctggtgaaaatgaagcagaagaagtcaagttgtctcagttgaacttgattgatcttgctgggtctgagagttccaaaactgaaacaactggtttacggcgcaaagaaggttcatacataaacaagagtttgctcacccttggaactgttattgctaaacttacagatggtaaggccactcatattccttatagagactcaaagctcacacgcttacttcagtcttctttgagtggacacggacgcatatcactcatttgcacagttacacctgcatccagcaacagtgaggagacacataacacattaaaatttgcccacaggagcaagcatattgagataaaagcttcccaaaacaagataatagatgagaagtccttaataaagaagtatcaaaaggagatatccagcctgaaagaagagctacagcaactcaggcgtggtatgatgggaaatggtggtattctccctacggatcaagaggatcttgttaatttaaaacttcagcttgaagctgggcaagttaaacttcaatcgaggctagaacaggaagaggaagcaaaagcagcattgatgggtaggattcagaggctaacaaaattaatattggtatcaaccaaaagttcgatatcctcaaatgtttctggaaagactaacttccgccgacggcattcatttggagaagatgagcttgtgtatttgcctgatcgaaagcgggaatactttgtagatgacgatgatgttagtcttgattcagaactttcgcttgaagggaaacttgatctgaacaatccagaggagtcagccaggtttggcagaaggaaccacaaacgtggaatgcttggctggtttaaactaaagaagtccgaccagttatcagggctatcatccagtgtagacggtgatagcactgctagcgtctcaccttcgtgctctaaatcatcacaacaaaaacacttgctgcttgacctgaaggatggtcgaaggaaatctatgactaggaaaggagatgacccatcacttgctgattcttttcttgaaaggactcaagccggtgatttatttagtgctgcgcccagagtacggcaccctctgccgagtggaacaaccatcgtggatcaaatagatcttctacaagagcaggtcaaaatgctggctggggatgttgcactttgtacaagctcactcaaaagattgacagagcaagcagccaacaaccctgataatttgcaaattcaggagcaaattgtgaggttgaaagatgaaatcgcagaaaagaaatcacatatacatatgctagagcagcggatggtacaatcactggaaactacagaaggcccagcaattaagacagagttatcccagaccttttcaaagttgagcacgcagctgagtgagaagacatttgaactggagattatgtctgcggataataggattcttcaagaccagctacaagcaaaggtaacagaaaatgcagaactccaagaaacagttgcacacttgaggcaagaaatcagtaatttatcgaaggctgcaaaaagcgaggatagttttgctagcgtgcagtctagtgaaccatcaacagcaagcactgatactagggatcaaacaaatgaaatctcaaaccgtgcaaatatgtcctctagaacaacggacttaaatgagtcaggatttatatctcaagtgctcaaacaggcttcagaaattgaaagtttgaaacaagaaaatctgaggttggtggaagagaaggatggactggaaattcatagtcaaaagttggcggaggaatcatcctatgctaaagaattggcttctgctgctgcaattgaacttaagaatttggcagaagaagtcactaggctttcttatgaaaacgcaaagctgaatgcagacttagctgcggcaagagagctaaatgcatcgatgtcaagaagtaacatccaccctgacccaaagcgtcgtgatcatgagagcggaattttagttgaggagttgcagaaagagttggttgctagttgtcaaagggaggccgtattagaggacacactatctcaaaaggaccgaagagagagtgagcttctaaagattattgatgatgcaaaatgccgtgagcatgagttgaaaaatgaactggcaagcatgggggcccttctttcgaagataaagaaagaaaactctcaacaggatgtatttgaatttaaagcaaagcaaaacggctttcactcatccaagactgatagtggtagactggtaagtgaaatgcaagcatcggataatgggtgctgggatggcctcagtacttttgaagaagcaagagctgcatacaattttgaaagaatgcgctgcaaggaattggaaagcatcgtgtccaaactaaagggtgaggacctcaggggcctagatgttaaagttcttgaagaactacaaaacttccatgtagaagcactgtcaaggatctgccaagaaaagatggcaagtcaggcgctatagcaaaaacctttcctgagacgagtagccgctttcatgcaggccagagcttatttctcagatgtcccttcaacttcatgcccatctctctgaagttccactcacaatttcacatagttgctgctactgcaaccgggacaaccttgattagtccgcctttggacactgattcctgcgtttaaccgacagaaaacgaagcaaaatgcggttagatagcaggcgctaatggtcactgagtagttagcatgcagatactcccctcctgtacagctttttattaaagatagtagcagtggtattgtaggagtacccggattgtatttatactggtaatatatgagccggtaaaacccgaaggtggtgtttctgttatacctggaccgtgctctgcccttcaaaaactgtagtaaacccgaacggacgctgatgtagctttggcaaacttgctgttgatgtgatgcatgactgccgtgcacctggtgccgtgcccgacgatggttgact

SEQ ID NO: 25119 - DNA, 1234 bp, Zea Mays
ctggcttcccagagggagccagaatctcctgtgatcttctccctgcgcacaacccagccaggatcacgacggcgccccagcgccgccaccctggtcccaccaaatcccctccctacaatctgcgcaatctgcccggatatcaaagagaaacgagatcaggatcttctggtcctacctacagatgctgctttatttgaggacccaaagttcaaggtctatgcggagaaatatgcagaggaccaagacgcattcttcagagactacgctgaggctcatgctaaactgagcgaattgggtgcaaagttccaaccaccgcagggattctctttggatgattagtgcggcaccagaaccacagtccgtgaaacaggaaaaccctgtccttgaaaaggatcaagagggagcatacaattcattgttcttctcatatcatcgtacaagatggactggtcccccttttcatgatgctatatggagtcttctaatttagctagatttctgaaccgagcttgcaaataaaaaagaaccgacacagtggcactacataattttcagatccattgggagaactgacacagtgctatcagatttggttttatcccttccacatgacgctctgcgctgctgtcaattttctactattagcaccatggttgttgcttccctcctgctgcgattgggcttatccataggccatagcggatctgcagcacttaaaaactctgtaaacacatcagatcctgcttttcctactggcttcttagaaaataaaaagcaaggaaagcaaaaggctgcatcttttgctggtgagtattttaaccaagaaaaagtttcaaaccactgtgactgaaacctccgtggatgattctttggacctgaagggggtaagaaaaaatctggcaacgtaagcctgggtctctttctacaaccaacacaccagtatcttcaaaatttactcgacgaaccttaggagatggctgttctggagcttcctcttgttgtgcagcaagccaattagcaatttcatcttcctcagaatcagaactattttttcttgctctcttgggacatcgacaacaatatctttcttataaaaaatatcaattgttgttcttttgaataccatgattgtcctttaagataaaaaaacataataggacaaattagcatctaccgatacagatattactcaaccaatatcaagtaaattaaaatattaaataaataaagtatt

SEQ ID NO: 25120 - DNA, 2524 bp, Zea Mays
ccaaacccccgagacgcctcaaaacgcaggcaaagtggaagtggaatcgagtcaaatcgaccacttctctggcaagcccgcaggccgcagcccctcctctctccaagagccgccgcggctgctccccccctagcaaacccgccgccaccccattcgcccgccgcgcggcgccggccaaccgcgccttcttctcgccttcgctagctcgcgcgcgcgtcggcctccgcgccgcgccctcttcgctcccacagaaggcgagggcagtgaggtgcgcggctgtggcgatggcgtctgacgcggctcaggtgaaggccgcacgcgaggacatcagggagcttctcaggacgactcactcccaccccatcctggtccgtctaggatggcatgatgctggtacgtatgacaagaatattgaggagtggccacaacgaggtggagctaatggaagtttaagatttgatgttgagttgaaacatggagccaatgctggtctgataaatgctctaaagcttatccaaccaatcaaggacaagtaccctagtatcacttatgcagatttatttcagttggcaagtgctacagcaattgaggaagctggtggcccaaagattccaatgaaatacggacgagttgatgttacaggacctgagcagtgcccccctgaggggaaacttcctgatgctggcccaagttcacctgctgaccacttgagggaggtattctacagaatgggccttaatgacaaggaaattgttgccttgtctggagcacatacacttggaaggtccaggcctgaacggagtggctgggggaaaccagaaacaaaatatactaaaaatggtcctggtgcacctggtgggcaatcatggacagttgaatggctgaggtttgataacagttacttcaaggatatcaaagagaaacgagatcaggatcttctggtcctacctacagatgctgctttatttgaggacccaaagttcaaggtctatgcggagaaatatgcagaggaccaagacgcattcttcagagactacgctgaggctcatgctaaactgagcgaattgggtgcaaagttccaaccaccgcagggattctctttggatgattagtgcggcaccagaaccacagtccgtgaaacaggaaaaccctgtccttgaaaaggatcaagagggagcatacaattcattgttcttctcatatcatcgtacaagatggactggtcccccttttcatgatgctatatggagtcttctaatttagctagatttctgaaccgagcttgcaaataaaaaagaaccgacacagtggcactacataattttcagatccattgggagaactgacacagtgctatcagatttggttttatcccttccacatgacgctctgcgctgctgtcaattttctactattagcaccatggttgttgcttccctcctgctgcgattgggcttatccataggccatagcggatctgcagcacttaaaaactctggtatgtcgaccctacctctggctctctgtctctggggtagctggtcatcagagtgcttcccagcacaacacagccaggagtaaaatcttcatctggccatgctcccagatttgtcgtcacaggcagagggggaatctttaaagcagtagatgggccacttggccgttggccatggacccctggtccacccattcgtgccgcgacctggatttgtaatttttcgtatcgctcgtttggagctactggctggtgggcacccaccacttaggagagaacggagaacagggctggacgatgagacatcattaggacatctgcgtagcgagacatcggacatagatgctgctgataggctacggcgacgagcgcggcattaactcggatcagcgtcacgtgcacgccacgtgccgggcaccagcgggccactctgtggtgcaagcgcaactagccaagttacaaactttcaaagagcccgcagaggtctgcgtctggtcactttaccggtgaccgtagtgtcaatcaccctgccttcccgcccaaacgcaccacaatttttctcattttctttcttattaggacttcagcagcacgtcattttctttcttattaggacttcagcagcacggtgctactctggtgtaggatgcttattttgcgcatccgcgtttagacgaggacgtgcaaaataagagcttgacaactcggttgtccattttcacacaattctctctcggttcgcatgcggtaagaccaactacagcagcctccgtatgtggcttctcatcttctttttttcactgcacagtacactattcatcagtccagcggactctgtattcctctccccaggggcggagccagaaagaagatataggagaggccaacaagaccataacatatagtagtgtaagaaataataataattataagtatcaaatcaatcgtatatatatagtaagtaaaattttagtaattttacattcacataatttaaattcagcaaaacaaattgttaaaagaactcac

SEQ ID NO: 25121 - DNA, 1441 bp, Zea Mays
cgccttctggctcagatacttcgaatccaagagtcggatgattgccgatcaaataaatcatgctcgcgaagtaaatccaaaggtgagacgcttccccttctcctcgccgatggagtcgcttgcctcgcaagcgaggccggcggcggtgctctggctcgccggcttcttccaggccgcgcgcctccaccgcgttgtctccttctgcgccagctcgagggcactatccatcaggattgcacagtgcttcctgctgaacgggcttatcttccttgggagcttgcttacacttacatcggtggtcattccaactctactgtggatactacctgagcgatgcaatcaaacagcaggacatctttgtgaacacagggcagccgtatctatctattcattcttgcgctccggccttgttgagattttttatgtattttggttttatccactttatgtcttcagcttcatattaagtacgatttggtacggattctcatcgtattatcctcaaattatgtataactccgagactgaacaagggagcatgcttttatccattttgtgatgtggaacattttatgccagggttgcacttggtattggggaacaagtctattcaattcttcttttaaccattttctttgttgaggtttcagtgattggttacataccttactttggcaaggcaatgaacttcctgctcctgtcattgatgtacaagtggaacttctttgcagtgagtctgcatgagaggcttgatttctttgaatcaaactgggcgttctttgctggatttggtgctccatgcgtccttccaattttcttcttctctcctcttataagctatgggtttctggctatactttatccgttgtttgtcttgactgccgcaggcactcaagctgagcaagtaattgatgcactgaaacctgcacacgaagggaaactacaaagaatacctgtgttctttgtcgcaaagcgactgacgacaaaagtactgcaactgtttccggtggcacagaaagaacaatgaaggatccacagaaacaaaccaaggagggaaggccgctgtgtgtgttgggtgtgctgctaatcacaatgccccgctcgaacgaacgttgcatccgtaaggtgcgcacgccctctccgctctccgtaacgtggaagggaggggcttgccgccttcacgctgtaaatatcctgtaacaagcatttctgtcgaatgggaactttgaaaatatagagaattgcactttgttatttagcaagtgttgatcattcaagattaggccggcgagtcggcggcaccaaccagtaatgattggttccttggtttcatcttggccatgacagaacagtagtgctctctctctcttttctttttgctgaatgtataactcaagccgcccttgagattaattattattgagaggctgctagctttcgt

SEQ ID NO: 25122 - DNA, 1462 bp, Zea Mays
cgccttctggctcagatacttcgaatccaagagtcggatgattgccgatcaaataaatcatgctcgcgaagtaaatccaaaggtgagacgcttccccttctcctcgccgatggagtcgcttgcctcgcaagcgaggccggcggcggtgctctggctcgccggcttcttccaggccgcgcgcctccaccgcgttgtctccttctgcgccagctcgagggcactatccatcaggattgcacagtgcttcctgctgaacgggcttatcttccttgggagcttgcttacacttacatcggtggtcattccaactctactgtggatactacctgagcgatgcaatcaaacagcaggacatctttgtgaacacagggcagccgtatctatctattcattcttgcgctccggccttgttgagattttttatgtattttggttttatccactttatgtcttcagcttcatattaagtacgatttggtacggattctcatcgtattatcctcaaattatgtataactccgagactgaacaagggagcatgcttttatccattttgtgatgtggaacattttatgccagggttgcacttggtattggggaacaagtctattcaattcttcttttaaccattttctttgttgaggtttcagtgattggttacataccttactttggcaaggcaatgaacttcctgctcctgtcattgatgtatgcctactactgctttgagtacaagtggaacttctttgcagtgagtctgcatgagaggcttgatttctttgaatcaaactgggcgttctttgctggatttggtgctccatgcgtccttccaattttcttcttctctcctcttataagctatgggtttctggctatactttatccgttgtttgtcttgactgccgcaggcactcaagctgagcaagtaattgatgcactgaaacctgcacacgaagggaaactacaaagaatacctgtgttctttgtcgcaaagcgactgacgacaaaagtactgcaactgtttccggtggcacagaaagaacaatgaaggatccacagaaacaaaccaaggagggaaggccgctgtgtgtgttgggtgtgctgctaatcacaatgccccgctcgaacgaacgttgcatccgtaaggtgcgcacgccctctccgctctccgtaacgtggaagggaggggcttgccgccttcacgctgtaaatatcctgtaacaagcatttctgtcgaatgggaactttgaaaatatagagaattgcactttgttatttagcaagtgttgatcattcaagattaggccggcgagtcggcggcaccaaccagtaatgattggttccttggtttcatcttggccatgacagaacagtagtgctctctctctcttttctttttgctgaatgtataactcaagccgcccttgagattaattattattgagaggctgctagctttcgt

SEQ ID NO: 25123 - DNA, 1334 bp, Zea Mays
cgccttctggctcagatacttcgaatccaagagtcggatgattgccgatcaaataaatcatgctcgcgaagtaaatccaaagctcgagggcactatccatcaggattgcacagtgcttcctgctgaacgggcttatcttccttgggagcttgcttacacttacatcggtggtcattccaactctactgtggatactacctgagcgatgcaatcaaacagcaggacatctttgtgaacacagggcagccgtatctatctattcattcttgcgctccggccttgttgagattttttatgtattttggttttatccactttatgtcttcagcttcatattaagtacgatttggtacggattctcatcgtattatcctcaaattatgtataactccgagactgaacaagggagcatgcttttatccattttgtgatgtggaacattttatgccagggttgcacttggtattggggaacaagtctattcaattcttcttttaaccattttctttgttgaggtttcagtgattggttacataccttactttggcaaggcaatgaacttcctgctcctgtcattgatgtatgcctactactgctttgagtacaagtggaacttctttgcagtgagtctgcatgagaggcttgatttctttgaatcaaactgggcgttctttgctggatttggtgctccatgcgtccttccaattttcttcttctctcctcttataagctatgggtttctggctatactttatccgttgtttgtcttgactgccgcaggcactcaagctgagcaagtaattgatgcactgaaacctgcacacgaagggaaactacaaagaatacctgtgttctttgtcgcaaagcgactgacgacaaaagtactgcaactgtttccggtggcacagaaagaacaatgaaggatccacagaaacaaaccaaggagggaaggccgctgtgtgtgttgggtgtgctgctaatcacaatgccccgctcgaacgaacgttgcatccgtaaggtgcgcacgccctctccgctctccgtaacgtggaagggaggggcttgccgccttcacgctgtaaatatcctgtaacaagcatttctgtcgaatgggaactttgaaaatatagagaattgcactttgttatttagcaagtgttgatcattcaagattaggccggcgagtcggcggcaccaaccagtaatgattggttccttggtttcatcttggccatgacagaacagtagtgctctctctctcttttctttttgctgaatgtataactcaagccgcccttgagattaattattattgagaggctgctagctttcgt

SEQ ID NO: 25124 - DNA, 1968 bp, Zea Mays
cgccttctggctcagatacttcgaatccaagagtcggatgattgccgatcaaataaatcatgctcgcgaagtaaatccaaaggtgagacgcttccccttctcctcgccgatggagtcgcttgcctcgcaagcgaggccggcggcggtgctctggctcgccggcttcttccaggccgcgcgcctccaccgcgttgtctccttctgcgccagctcgagggcactatccatcaggattgcacagtgcttcctgctgaacgggcttatcttccttgggaggtaccgtcgttcgtaattgattttgatcctcgattgaattttgtattttttgttactatggtgtgtggaagacttagaattattagagcatgtgagcagggtgtcacaattttttgctcttaagtgttgttcttagttgtcatgtgtactgaaactacatgtgtagcatggcaaatatcagtaaaatgctctgtggttagaatgccgccatgcatttggatgtaggtttgcacgatgaaatagcaaagtggactggatggagtttgatgtgctattcggagtcacagagcatagtgggcttttgatttgtcttagttctctatcacttcagttgtccaattacaatttcttaagcttgaggagattatattatgcatatcatgccagcacttctctgctgatatttctctgaatgttcctccttagctcttctgtgttctttacttctttcttgtgaataccatttaaatatttcttgtgcttcatagcttgcttacacttacatcggtggtcattccaactctactgtggatactacctgagcgatgcaatcaaacagcaggacatctttgtgaacacagggcagccgtatctatctattcattcttgcgctccggccttgttgagattttttatgtattttggttttatccactttatgtcttcagcttcatattaagtacgatttggtataatgacattgccaagcatgcattggatgttgtgaaaagtaagagcctagttttgactcaatcactggatgctcacaacataactgaaacaaaagagcagcctgaaggatttgacagggttgcacttggtattggggaacaagtctattcaattcttcttttaaccattttctttgttgaggtttcagtgattggttacataccttactttggcaaggcaatgaacttcctgctcctgtcattgatgtatgcctactactgctttgagtacaagtggaacttctttgcagtgagtctgcatgagaggcttgatttctttgaatcaaactgggcgttctttgctggatttggtgctccatgcgtccttccaattttcttcttctctcctcttataagctatgggtttctggctatactttatccgttgtttgtcttgactgccgcaggcactcaagctgagcaagtaattgatgcactgaaacctgcacacgaagggaaactacaaagaatacctgtgttctttgtcgcaaagcgactgacgacaaaagtactgcaactgtttccggtggcacagaaagaacaatgaaggatccacagaaacaaaccaaggagggaaggccgctgtgtgtgttgggtgtgctgctaatcacaatgccccgctcgaacgaacgttgcatccgtaaggtgcgcacgccctctccgctctccgtaacgtggaagggaggggcttgccgccttcacgctgtaaatatcctgtaacaagcatttctgtcgaatgggaactttgaaaatatagagaattgcactttgttatttagcaagtgttgatcattcaagattaggccggcgagtcggcggcaccaaccagtaatgattggttccttggtttcatcttggccatgacagaacagtagtgctctctctctcttttctttttgctgaatgtataactcaagccgcccttgagattaattattattgagaggctgctagctttcgt

SEQ ID NO: 25125 - DNA, 973 bp, Zea Mays
atggaatacgccttctggctcagatacttcgaatccaagagtcggatgattgccgatcaaataaatcatgctcgcgaagtaaatccaaagggttgcacttggtattggggaacaagtctattcaattcttcttttaaccattttctttgttgaggtttcagtgattggttacataccttactttggcaaggcaatgaacttcctgctcctgtcattgatgtatgcctactactgctttgagtacaagtggaacttctttgcagtgagtctgcatgagaggcttgatttctttgaatcaaactgggcgttctttgctggatttggtgctccatgcgtccttccaattttcttcttctctcctcttataagctatgggtttctggctatactttatccgttgtttgtcttgactgccgcaggcactcaagctgagcaagtaattgatgcactgaaacctgcacacgaagggaaactacaaagaatacctgtgttctttgtcgcaaagcgactgacgacaaaagtactgcaactgtttccggtggcacagaaagaacaatgaaggatccacagaaacaaaccaaggagggaaggccgctgtgtgtgttgggtgtgctgctaatcacaatgccccgctcgaacgaacgttgcatccgtaaggtgcgcacgccctctccgctctccgtaacgtggaagggaggggcttgccgccttcacgctgtaaatatcctgtaacaagcatttctgtcgaatgggaactttgaaaatatagagaattgcactttgttatttagcaagtgttgatcattcaagattaggccggcgagtcggcggcaccaaccagtaatgattggttccttggtttcatcttggccatgacagaacagtagtgctctctctctcttttctttttgctgaatgtataactcaagccgcccttgagattaattattattgagaggctgctagctttcgt

SEQ ID NO: 25126 - DNA, 1446 bp, Zea Mays
caacattcaaaatatcttcataagaaatttgaaaggaacagacaagaaaacattacgtgaatccatactttccctgtgacaagctggttgggatagcgcacaacaagttctctttttttttagaggttcaatccatacttgatgagctgatgtccttttttttcgtaaacattttaccatcatggttttaactgaccgatgtctatcacaagaggccctcggccctcaggcgcagtcctttcaagcagtcatgttagactgaaatgaaccgctctggttggcctcttgtggtcctttgaagctgttttctactcccccttttcctttttcttttttatcgctgtcagctaccgggaaacagtgcctgcatttcgttgtatcgctcccccaacaaacctataccagtctactcttctgcttccgtttctcctttccagcactgcaaaattggttgcatttgcttgtcagaattcagaaacgacagccgatgtgtggtcctgtggagtcactctttatgtgatgctggtcggtggttacccttttgaggacccagacgacccaaagaatttcagaaagacgatcgggaggatcatgtcaatccaatacaagataccagagtatgtgcacgtgtcgcaagactgcaaggagctgctttcaaggatctttgttgcaaactctgcaaagagaataacgatcagggagatcaggaaccacccctggttcctgaagaacctgcccagagagctcacggaggctgcgcaggccatgtactacaagaaagacaacagcgccccgacctactccgtccagtccgtggaggagatcatgaagatcgtggagaaggcgcggacgccgcctccttcctccacccccgtggctggcttcggttgggcggaggaggacgagcaggaggacagcaaggatccagacgaggaacacgaggacggcgaggacgagtacgagaagcaggtgaagcaagtccacgccagcggggagtttcatctcagctgctgagggttttcgccggcctgctagtctgtggtaccagccgatgatggacctgctagtctgtggtcttgttttcaagttttctttcatttttttctttcttttgctgtggtgccgcatgactgcaacagttgtaaattattgaagggggttccagcgttgcccttgtattgactcattcaagctagcatggggaacataattatggaataaaacaggtcgttgagcatgctgtcgatatgatttctgaaagcactggaatgtgctttcatgccaaccttcaagaattttccggtacaaatcacaagaactgctgatgtaatggttatcaggatacttgctgtggcgagttaagtaaattcgtggtcacttccgagggacgacaaacacataacaatataacaaaagatcttcaatcaatagaagacaatcacatga

SEQ ID NO: 25127 - DNA, 1799 bp, Zea Mays
cacaccatggcgatcgaaagctaaataaactaatcatcgaataaaaacggactcctcagcaccgcacccatacataggtgccggactcgtcccagcgaagaaccggacgagcgagcaagaggcctcctcctcaagcttcgaatcctccccttccgcgctttccctccccctcctcctcctcccctttccagtccccaccccagcgaagcttccaaagccgccccaaccccaacggccgcccggcccgatcgagcagacagctgccgcggccctccccgccccgcacgcgacctcggagccatggagaagtacgagctgctgaaggacatcggcgccggcaacttcggcgtggcgcggctcatgcggaacaaggagaccaaggagctggtcgccatgaagtacatcccccggggccaaaagatcgacgagaatgtggcgagggagatcatcaaccaccgctcgctgcgccaccccaacatcatccggttcaaggaggtggtgctgacgccgacgcacctggcgatcgtgatggagtacgccgccggcggcgagctgttcgaccggatctgcaacgccgggaggttcagcgaggacgaggcgaggtacttcttccagcagctgatttgtggcgtcagctactgccactccatgcaaatctgccaccgagacttgaagctggagaacacgctgctggacggcagcccggcgcctcgcctcaagatctgcgacttcggttactccaagtcgtcgctgctgcactcgaagcccaagtcgacggtcggcacgccggcgtacatcgcccccgaggtgctctcccgccgggaatacgacggcaagccgatgtgtggtcctgtggagtcactctttatgtgatgctggtcggtggttacccttttgaggacccagacgacccaaagaatttcagaaagacgatcgggaggatcatgtcaatccaatacaagataccagagtatgtgcacgtgtcgcaagactgcaaggagctgctttcaaggatctttgttgcaaactctgcaaagagaataacgatcagggagatcaggaaccacccctggttcctgaagaacctgcccagagagctcacggaggctgcgcaggccatgtactacaagaaagacaacagcgccccgacctactccgtccagtccgtggaggagatcatgaagatcgtggagaaggcgcggacgccgcctccttcctccacccccgtggctggcttcggttgggcggaggaggacgagcaggaggacagcaaggatccagacgaggaacacgaggacggcgaggacgagtacgagaagcaggtgaagcaagtccacgccagcggggagtttcatctcagctgctgagggttttcgccggcctgctagtctgtggtaccagccgatgatggacctgctagtctgtggtcttgttttcaagttttctttcatttttttctttcttttgctgtggtgccgcatgactgcaacagttgtaaattattgaagggggttccagcgttgcccttgtattgactcattcaagctagcatggggaacataattatggaataaaacaggtcgttgagcatgctgtcgatatgatttctgaaagcactggaatgtgctttcatgccaaccttcaagaattttccggtacaaatcacaagaactgctgatgtaatggttatcaggatacttgctgtggcgagttaagtaaattcgtggtcacttccgagggacgacaaacacataacaatataacaaaagatcttcaatcaatagaagacaatcacatga

SEQ ID NO: 25128 - DNA, 3078 bp, Zea Mays
aaatatcgaactgttcatacatatcactctcaaacaaacttccttttattttctgtcaaataaaaacaaagcttatataattcaggcacaccaacccgactccgtttgacgcggctccgatggtcacaaccggcgccctcgtcgccggcgccgcagtcaacacctgagacctcgtcctgcctgcctgggaagggcgtgagcttgccgctgccgcgatccgagtacgagcccccgcggatgcattatcagcatgccggtagccgcagccgcatgccgccgttcgcacgcggcggcggcgcctacagccgcggacagaaacagttctacccgccgccacctcctcccctcccggcggccgcgctgcctctgctgccgcagaacaagcatgaggtgctcatggaagccggccgcctcgctgccgagtacctggtggcgaagggcgtgctccctcctggctccttgcagcagcgcggcagcacagtcgtcgctggtgggtggggccagctaccgcctccacctccaccgccgctttcggtgacacaggaagccccagcataccatatcgccaggaatagccggcggcagatcgatgatgagcgtggtattcgtaacgcccgctcacggcggaaccgtggtggcgactacagtagcagcaacggtagtaactataatggaagggggaaaaggaaatttggggctgacaataagtattcagattggacaaaggatagggggaggaacaggcggtattctgatatccggagttatgatgatgaggatgatgatggggctcctcctgggttcaaaagggagcgccaaagcggtggtgggattgacgaggttggtagtagcatgtcgggggtagcttgggaggggccatcatcgaaggtggaggcgatgggggagtcggagctggaggatactgggtcaaaggctagttctaacagcaatatccagcagaaagctagtgctttgcaagaggtggaggatgaaaatgaggcaaacaaaatgcaggagaacagtgtggtgtctaattcagacgtagctgagcaagcattgaatggtgaggataatagcaacaatgattcttctgctggtgttgaagaggcagggacaaaacatttgccagtatcctcaggtgaaaaggtctcagatgggaggcttgaacatagcggtgttctgaatgacaaggttgaagatgacagtactttgcatgagaagtctgaagatgacacaatgtcggaagaggtctctgttatggagagcaatttgcctaatgacgctagaaatttgctaaactattgtagttttgcaagagttccaacaagaccacgaacagtgcttgcaaacaggaatgttggaccaggtcaaagagaaattactgtgtctgaacagctcaatttggttacttctgaagaaatatccaatatggcaatggatggagaagctaacactaattccataactagcatcgaggaaggcagtaaagttgagctggttggccaagaccaagaacatgctgaacaaagcgctatctgcaatcaagtggcagaatcagtggcattccatgaaaaggaaactcgaggtgaaactgaagaaaaggaagaacagaagaacatccctcaacattatgaagttgaggataataaggagacaaacgaactgtgtcctacatttgcttcttctcagaataaccaaagcgctatctgcaatcaagtggcagaatcagtggcatcccatgaaaaggaaacacaaggtgaaactgaagaaatggaagaacagaagaacatccctcaacattatgaagttgaggataataatgagacaaatgaactgtctcctacatttgcttctcagaataacttcaatttgcaagttgagaaaggaatacaaatctacaatttagatacaccgccacaagatgaattgttgatcgatccacccgataaagggaaaacagttgattcggagttattacctaacatcaaagcagaagatgctgttacagtggaagaggaaaagattggccagtctagctcatttaaaatacgtgatctcaacctggttggtagtccagaggttgttgacatgcgaggtgaccctcgtttaggccaaagctctactgctggatgtccagtagacctacaagataatcaacaagttgagtttgaaacagctcttggtaacaacccgaataatactgacacatgtgccccctttctgttgggaaataagtcagttcaagttattgatatcgaagatgacataccaattgaagccggtgcttgtgacacgtcaaaatcaaaaggtgagatggtatattctagcatggagagcatgatgaacccgcctccggtgaacaccgatgctctacatggtatccaagatgggtatagtcttgcaatttcagattaccttggtgctgatatgtcatgctaccaatcaatacaagcagaacttcaagatgggatggacctaaacggttcagagggcattactgtgatggatgatccaatatacagttctcttagtgacataggttttatggaggtttgggaccagcaacctcaagactatgaaaagttcttctgaggcaccaactcgtgttgctgaaactgttctggagttcgactgataaataccagttatacttgcataggcagaaataaagcagtagatcgtgcctaacaaatagaatcccgtgtactcgtgcgacagcagcacctcatgcacttgtatgttccaggccatacatatgtgttcagacatatgtattcagactccctgccttgcccgacagtggtgtaaaaagtagtcgtatagctgtcatgtaattcaagggaattgacctaagcacgatagagcattcatccgaaacaattcttcatttgtaataaacagctctatattccaaattaaaagtgtttatttaaaaaaaaatgaaaacgcggcacgaccgaggaggtgtgggcgagcagccggctgaggagacgcaggcacgagcgtgacctagaaacgtggccacaaagagaggcgccggaggagaaaatggtaggaagacgcgtacaggaacgaaga

SEQ ID NO: 25129 - DNA, 8193 bp, Zea Mays
taacaccccaggtgtttaccgtatgctcgacaacgagtatggacttaagcacgaaatatcagtggataacacggattttaaattttaatcattctcgcttatcgcgattttaatatcgcatttgttccatttgtcgcgggtgcaacatcatttttacttctaattatccgagttcttccgaaattttcgtgctgttcggaacatcgttgttccgaaaatcggtgtgtccggtgattatttaaaattcatcgctcgcgcgaatgcgaatttggaagaccgacccactcggatgatttttatcccaagcaaattagtttgaactcgacgactaaaatatttggggtaaaataatccaaatcgcgcatcgtccgagtgaaatcgtgcgcgaggttatgatccaatttatccttcagcacgcggttttaacgacgaaatcgcgtatatattgcggatcgggtttcggctaacttcgttcgaatcacacagaacaaattatcagtccgaaattagtttatttcggtctattattcttgcccggatccaaatcttcgaatgtaaacaagtattaaataatttggttcctactcgtccaccgtgaaatcgcgtacgagaatccataattgagcctcgattcactggtaaatcatccgtgaccgtggaaccagatgttcagaccgcaggtaaatttatcagatctttgaatcaattcaaacacagtctataatagtttggccaatatcgttttggcacgttctgtttgcatctcatttagacttaaattccagaactcaattatctgtgttctctcgtaaagacaaagtgggaaactagaaaattgtttttctcaaatatctccaccgtataggccatccacatccagtgcatgtgttcagctccctggagatttttattctccacgcgtctgcacttccttgcgatcctctccacgtctggacgtctggtgcatggatccctcgccatcagccttatcccacggctgatttttttgtcttcacaacagattttctttcctcagcctcatcctcacgtctctctctgttagatttttttcaagtcgtgttcatcttctacagccgccgcccctggatttctacaaatccaccaccgagcgttccactctcctcctgagctcctccagccagctcgccctcccaactcctgccgcactgagctcattgcacgctcctgtgcccctgcctcgtctagctccagcgctcggtgtccctcagcccagctgtgtctacgtgctgctcgctccgagctccctgtgccatggcgtcagccgcagttcaccgcgctcggcctcccgtcttgccgcgagtcccggctcgaatctccatggccgcaggcctctggtgccgcgcgcgtgcccttgtcatggtcctgcgcgtcctgcgtcttcttccccgagctcggccgccgagctctctgcgcgcgactctgctcttctgggtgcgcgcctgggtccctgctgagctcggcgtctatctctctatagctctagtttttccccagcacgctttcttccctgctcggccatgggagccgcgccgtcgaccctgcctgaatcccctcggccacgtcttccttcttgctccttgcgcgagccgcaaccctctgaccagtcccagccgaactccctccagtccaaccgctgctcctggctcgcccgtccgtgcggcacttcgtctatagccgctgtccgccgtcgagttcctgtacgcgcgcctctgctcggatctcatcagccaccgttctctaacccgtgtctcggtcggcatcgtggagttttggttgattggctcgccgttgacctcgtcggtgtcgtcgaacactcaatctcgttgaaccccgaatcccggacgttaggcaaaaataagcgaggtccgtgtgcatcgctcatcaagtgctcgacacaaagagctgaatcagaatccttgccgtgttcgcggatagcgcgtcagatttagaatggtacgataattaatcacgtgatgcggaagatgacccaagtcgaccccaagcgcgggctactccgcatggagatgctgatgaacgaacctgcctgatcaagtgctagaacaaggatgatcgctaagtggacgtcgtctaacaacactaacctagtgttacccaggcaagccccggtgcatgcaaccccttccttgtgtttttaaattatttttgcacactttaagtctagtgaaatgtgcattaggtttatagaagttgcttggaaaccctttgatgcattggctaccttgaaatccattccttttatagatacttctggtgaagtatcaaaatataatttacaaaaaatgcttagccctgcttataagcagatagagtttgtcctttgcacttatgcctagctcaggtttatcctgaggaaggatgacttctacctgcaagaatattttcagtgggagcatggtgggatcttactgcaaagttccctataatgctcttttcatccttaggaacacaaaacaatcctaagggtggaagtacttaactcgagacttgggctaggaacaagtgatgttccgtccgggtcaattaaggattggatgcgtatgtaggcctgatagatcaaggactatcttaactagccacatgccctggaaatgggacagggtaagcttgaacccggctattccatacgtgaaaagacaaccgcgcactgggcgtgggagatggtgggagtagcgtgtgccctcctggctagaggctggatggaggagtactgtgctcccgggtagcgcggaccggttcacgttgtggaggatctgtgggaacggttgacatatgcaagggttaagtgctacatatgtcgtgtggttagagatcctcagctgagtaaatcgattcggatcgccgttatatccccggagagtggagacttgatcactgacctgcaacctaagtcgggatgtgaacctcatgaataaaaatgatgttgtattgatgagatggtgaaattagaccagatgcaaacagagtctattaatatttaatctggcgttaaaatattgaaagtaaggactcactttagtaagttatttctgcaaaagtatctaagttgattcttgctaaagcctctccttaattcccaaatccagcatacccttgagagtcttttctttagtcgggtaagtcttgctgagtaattccatactcagggttttattccctgttgtttttcaggtcatagttttgtgctgctgatgatggtgttaaatgccggtgggctcggccttcttataagtctaagtaatccttctatacttcttaatgaggatggtcccttgagctagcatatattttaaacttatacttttgcaatcactccgataaaataatgtaaaatttttgtaacttgtaaaatttggtaacaagatttccgctgcaaaaatattggtgtgtgtgatttgtgttacttaatcccgcggttctggttgtaagtggtttatctgaggtccttgggacactcggacggatcctgttaagttatttggtgcacatgcatagccgtctgaggtctttgagacaaggacaggtgcatgtgggcccaataacttgggaggttctgccacagctggtatcggagcaggattaagtttatacggtcacatacgtattttcaaaacaaaagttttggttttagaaaacctattttcaactaaacccatagtttggttttgaaaaacagatttgaaaaactataatgctagcgacatcctctgttaagccctaaagtaaggactatcaggtggcttagttgaaaaccataacccataaggcctagtttggatactttgggattagagtgttttggagggattggagaggatgtaaatccccaatagatcaaatactctctcaatacatctcaatccacttcaaacctactcattactagagtacccaaactaggcctaaccgggtgggtattgcatacatgtgtattgttatttttgaggccattcaattgtggatggatcgacactcaaggtaaaggtgagatgtgagagtatgaccgaacaaccgtcggtctaggggagtgcttaattgtggcgcttgattatatacatgttttacatatgtatatatgaaggctgcgatgtggagtaattacttttccgagaattcagtaccccatagatgtgtatgggtatacagacatgggaatactgagaagtgtaatgtacttgtaacgacgcacctacgcccaggtaagaaggtgagttaccataatgagttgccctatggtaaaagtgtggcaacggcgcctatgcgtggctcggcgcttaatgatgagctggcctccatatagcaatatatggagtataaactgtgataaactgtcatgtatggattgcatcattgggaaatgggctgtgatggaaattttctgcaggtacactaacctcgaaaacgtatgtgtagttgacgactagaaaaataccgtgagagtcgtaagaatgccaccgatatagaacgttattgccacatttggttggcaaaatcagtgaggacgtgtaggacgagcatgcatcctgattgttgcatcatgtttgtcacctatacacccaaaatgcttctcttgcctctattccagtaaccattgattgtagataatgtggtgtagtgttgaattatgaacttcgatgaaataggtgtcctccattctttaggtaacctattaaggtcttatatggtgtttgctcttgtgcttgatgtgtcgatagaaggttagtaacttgtttgcttaaacccagaattaggccatgttcttatttagtgattcatgacccaaaacttaaaattttccgttatcactccaggaccaaacacataaaaataaatgcctagataatttctttgttgaacataaaatgtacccaagcttaaaacaaggatctcgagtctgtattcttggtaattagcttataactcttttatggtcctatttccaaccaaaaccatgcctttactttgttggtgaaagctgatgtcccttatctagtttgtctgttcttaaggatcgccatgttgctttaccaacctaacctaaggaagacgtacccaatcttttttcttgagttgatgcctttggtttccccatatctatcaaaggcatatcaacttaatccttgacctcgtaatctctgcgatgggcatagaaatatgcttggggctgaattaacagtctcccatcgtactcccttcgtcatccaagttaggttatggccatgtcttgttcattcatcgggctgtgatctatgattggctctctacttgtaaccattcttacaagtggagtctatttttgtatattgtcattcttgctcaatccagttgtgttgtgcgagatttcttattggttacgtctaataatggtgttatgactaaaaccgctggtgccgtgacgaaaccgagggcctccggtgaatgtacacacatggttgcgctacttggcacgcgctggtatcacagttagtagtcataatccattatgagactacatcaatgtgttatcttagcacaatctgtttttgctacgtgagattcattattggtgtcagttcggtgatggtgtcatgattaaggacttatggtgccgcagtgaaactgagagccccttgtgaatgtacacgcgaggttatgctgcttggcgcatgctggtatcaaggtctctagtcatgatccattgtagaactacactgatgtgtgatcttccgtagatatcttccttgaaataatttcggtgttgtttgtcgaagtgaccaagcaacatctatcatctttgttggatcaaaagggcataccacgttcatgtgtggtctcttttcccttgatcttggtagtgactccttatacaagttccctttacgtcctttgtgtaaaggtgaagccttggagcttttagtgttgagagacaactaattagctctcaaaatggagatctgtttcccctgctgctgaaatgcaggagtttgttcattcgctctctcatttagtccatatattccctaaccaagtctgttcatctcgcatgaagaaacggatgaacgacctgaccaaatgaatttctaaccacatacatgatctcgtgttaaccagagtgaactctcaacctttggcttaccgatggtactgagagggctcgctcaatgtcaaaagtagttcaacaagttggttttactaacttgtaactgcattgtgaacaaaggctgagtttagagatcgttctgtcgagttatctaaactcactttggttcaaaccatcctaaagaaagtacttacacggatcaagttaagtcaaccaataaccacctaattatcgctctagtcacgcctcgaccgcctcacgtgtgctttttcagcgtgtgtgatcatgtcgatccatgtctagtgcttgctaaaatggattggttgcaaagacaacatctacagatccctccactggtgattctctcgaatctatatcacctttcagggacatggattttctggctagccacgggtcaactgtgatgttattcgacattcacacccgtctcctgtgctatggatttacggtaaccacttgttggtaaacctctttctgtgtgttttacccaagaggttgcatctgattctgtttggggaagatcgcgtaattgccacttgcccaatagactcagatagtacagtgtcatcagagaaagccaactgcacccatggaaccttatgtgttcctctggcagacatcgtctctactgatggacatatatgatttagcttgtggcgatacatgttatgtccactagagaaacgatattctgagacactcgccttcgcccaagactgccttatgattatcgctgatatggacatggggtacatgcttctctacccttagaagtctttcactccgaatctcgggacgagattcttttaagggggagggctgtaacaccccaggtgtttaccgtatgctcgacaacgagtatggacttaagcacgaaatatcagtggataacacggattttaaattttaatcattctcgcttatcgcgattttaatatcgcatctgttccatttgtcgcgggtgcaacatcatttttacttctaattatccgagttcttccgaaattttcgtgctgttcggaacatcgttgttccgaaaatcggtgtgtccggtgattatttaaaattcatcgctcgcgcgaatgcgaatttggaagaccgacccactcggatgatttttatcccaagcaaattagtttgaactcgacgactaaaatatttggggtaaaataatccaaatcgcgcatcgtccgagtgaaatcgtgcgcgaggttatgatccaatttatccttcagcacgcggttttaacgacgaaatcgcgtatatattgcggatcgggtttcggctaacttcgttcgaatcacacagaacaaattatcagtccgaaattagtttatttcggtctattattcttgcccggatccaaatcttcgaatgtaaacaagtattaaataatttggttcctactcgtccaccgtgaaatcgcgtacgagaatccataattgagcctcgattcactggtaaatcatccgtgaccgtggaaccagatgttcagaccgcaggtaaatttatcagatctttgaatcaattcaaacacagtctataatagtttggccaatatcgttttggcacgttctgtttgcatctcatttagacttaaattccagaactcaattatctgtgttctctcgtaaagacaaagtgggaaactagaaaattgtttttctcaaatatctccaccgtataggtcatccacatccagtgcatgtgttcagctccctggagatttttattctccacgcgtctgcacttccttgcgatcctctccacgtctggacgtctggtgcatggatccctcgccatcagccttatcccacggctgatttttttgtcttcacaacagattttctttcctcagcctcatcctcacgtctctctctgttagatttttttcaagtcgtgttcatcttctacagccgccgcccctggatttctacaaatccaccaccgagcgttccactctcctcctgagctcctccagccagctcgccctcccaactcctgccgcactgagctcattgcacgctcctgtg

SEQ ID NO: 25130 - DNA, 7422 bp, Zea Mays
ccattatataatgtgtgtgtgtttgtactatccactgcaccggcgagacgcgacggcgagtgctctccacttgtagcatccactcactcaactctccactccgctgatgatgatgcataagaagcggcagctctgagcccaagcgtcgattcagctcagcgcgcagctcacttcatccggcgtcgattcagctcagcgtaccagttggggccccgtcccggcggggtggaagggcgcgtgcgaggccggccaggcgttcagggcctccgcgtgcaaccggaagctcatcggggcgcgctctttcagcaagggcctcaagcagcgcggcatcacggtctcgcccgacgactacgactcgccgcgggactactacggccacggctcgcacacgtcgtccacggcggccggcgccgccgtcggcggcgcgagctacttcggctacgccaacggcacggccaccggcatcgccccgaaggccagggtggccatgtacaaggccgtgttctcgggagacacgctggagtccgcgtccaccgacgtgctggccgccatggaccaggccatcgccgacggcgtccacgtgatgtcgttgtctctggggttccccgagacgtcctacgacaccaatgtgatagccattggggccttcgccgccatgcggaagggcatcttcgtcgcgtgctcggccgggaacgacggctccgacgggtacaccatcatgaacggcgcgccctggatcacgaccgtcggcgccgcgagcatcgacagggacttcaccgcgaccgtcacgctcggcagcggcgcggccgtccagggcaagtcggtgtacccgctgagcacgccgaccgtcagcgcgagcctctactacggccatggcaacaggagcaagcagaggtgcgagtactccagcctgagaagcaaggacgtgagggggaagtacgtgctgtgcaccggcggcccgagcaccgagatcgagcagcagatggacgaggtgcagagcaacggcggcctcggcgccatcatcgcgagcgacatgaaggagttcctccagccgacggagtacaccatgccgctggtgctggtcacccagccggacggcgcggccatcgccaagtacgcgacgacggcggcagggtcagccagagccggaggaggggcgcccagggcgagcatccggttcggcggcacggcgctcggcgtcaagccggcgccgaccgtgtcctacttctccgcccgcgggccgggcctgatcagcccgacgatcctgaagccggacatcgtcgcgccgggggtggacatcctcgcggcgtgggtgcccaacaaggagatcatggagctcggaaggcagaagctctacaccaagtacgcgctcgtgtccgggacgtccatgtcgtcgccgcacgccgccggcgtggccgccctcctgcggtcggtgcaccctgactggagcccggcggccatcaggtccgccatgatgacgacggcgtacgtgaaggacagcgccagcaacgtcatcgtcagcatgccgagcgggtcaccgggaacgccgctggacttcggcagcggccacgtcagccccaacgaggccgtggaccctggcctcgtgtacgacgcggcggccgacgactacgtcgacttgctgtgcgccctacgctacagcggcagccagatatccaccatcaccgggcggccgaaccccagctgcgccggagcaaacctggacctgaactacccgtccttcacgatcatcctcaacaggaccaactcggccacgcacacgttcaagagggtactcacaaacgtcgcggccgcaccggctaagtacagtgtgtccgtgacggcgccggcagggatgaaggtgacggtttcgccgacggcgctgtccttcggcggcaagggcagcaagcagccgttcacagtcacggtgcaggtcagcaaggtgaaaaggaactcaaatgactacaactacgctgggaactatgggttcctgagctggaacgaagttggaggcaagcatgttgtcaggagcccgatagtctctgcatttgcccaatgaccggggaagacatgttagcaatgcacgaacaaaaaaataagactataaggtagaaaagataattattatatttacgattcatcctgatcaggaacattaagaaatatagatagactgaacaaaaggtggggagagcatcgacagatactgcagttgacaagtgtattttatacctgataaatcaaattataggtttctcaagtattatttttacactgataaatcaagtgtattttatacctgataaatcaaaaaaaatgcaaaatcctactcattctaaacttataccgaaggtacgaagtcattgtcagctgaacaacacgtgcaaatgattatccatatcacatcaaattcgtttgtcacccacagttaggttcttcaccatgttgttgatcatactaacactaaagaccgtcaagcatagattgggtattgttctgctgacagcatcaagtctgagatgatagtatgataccaacaggtaatgcctcaccaggtacccaaaggctcatgaagttttctgaagccttaaacactgataccagtacacctgactgatgatgacattgacagtgcactgtgcacggacccatggaatacgatataccacggtcatcaatcacatgttttcgtggttcatcatggcacattgtttcagctgttactggattcaacatcagccattaccaccataaactgtacagtcatgcactatgttagtctcagcacatgctattttgcatcagcagttacaaaacttacttgcatggttactttcctggtacccacttgatttcaaatgtttttcgagacctcttaggctcccaatgtacatgttcatatatgtcccagactagatggtataccagttgatatttatgaccaacactaccttcatgtcaattgcggaaagtgacccaatgattttcttatcatggcataagaggccagatgaagtccaagcaacagcagccatgaagtgctcgactagtcactgtggcagatggtgtccatgtactcaagaaccaagcaattttcttatgctaaggctgtatatcaggctcttaaatggtggacataacaagaaattacacagctgcaacacgtgcaccaaagaccaattccatttcagtatttcaccatgccgacttggggctgaaatggataccatgagttgtgacctcatgggcttctgctgagggaattgagtgctgaacaagatgcatggagattggtgacaccaagctgatcatccagtacacattcattctaccataaccattacaaacttacctggtgcatgtcatgcatgaaagtatgtgcagcaaccatcaagtctgccatgacaacatcatatttggtcaataatggcactaacaagatcaatagcattcgaactagagtaggcacaaccctgccatgtattgatgatagctgtgttacgttaacagttcaaccttaaattgtgcacctaatatttttagtaggagcaatgactatgacataccacaccagctccacccgtgcccaatcctgatacagagtacctttcctgatcattcttgagaagacaaaaaattaggaaaggctaaacatgatcttacagaaaatcacttaatctacatccaattaaaatatttacatgggcatccaaaccaacattaaaaaaacagtgttcagaaatatggaggcgatcaggaaaattggctttgcccgtgtgtgtcttcttaagtaatacaataggcagatcccctgctcgttcatttaaaaaatcgggaaaattagccaaaaatgtggtaatcatatagtgtaaactctaaaaaaggtatcatgtatgaccttagcagttagcacaagtagaagtattttttttttctggtatacgcaggagagctgcgcatctttgtattaatagaagaataagaaagggggagagaaccccattacagcacacacaccactagagactaactaaggatcaccgactaacatggaggaaacacaacccacaacgctgttttaagccagcaactcatcgacttggaggaaggacagggccttggctccagtcaaggaccagagcaccgcctcttccctagccaccctaagggctgtgaccaagctaggattacaaccatcaaaaacacatctattcctatgcttccaaatggtccaagcacctaggatcactaaagaattgaaacctttttctcaaaagatcagatgcacgggagctgctagacttccaccacgactaaaaggaatcctcatgagctggacacagctcctgcagccccgctgaactaaggaaatcaaaccagaactgcttggcaaaaacacatttgaccagcaaatgatttatggtttcagcctcttggtcgcacaaggggcacggatctggtcggtctagtcctcttttatgagcctgtcagcagtccagcacctattatgttccacaagccaaataaagaacttgcacttcccaggagcccaagatttccacacacgctctgctggttcgaactgaactgaaccaaggaagagagctttataagcagaactagttgtataatcacctgaagcgctgaatttccataaatgtcgatcccttattccaggctggagcacaactgcatcaagcacttcacaaagttccaggaattcagcaatgactctgactgaaattgccccattcacatcggagatccactggaaattggggagagcatctttgaccaaccgcctgttggcaagacgcaagggcacaaatcaaacattgcagtagctatgtccttaatacatctcccatccaaccatctgtccttccagaaaagggtattggctccatcaccgagcttagtaataatggctgcagcaatcagatttttaccaccttacaaacatgagtggggaagtccgtccaaggcctactgggatctgttttctgcaaccatggccaacgagctctcagagcccaacagaggctctttaactcactaatcccaagaccacccagctccttgggacgggtaaccttaggccaagcgaagaggcaatgaccaccacggaactctttcctgcccctctagaggaagaccttcctcagcttatcgattgctttaatggcccatacaggaaggtcaagtgccaaagctgcataaatcatctttgccatcatgacaaactgcacatgaaatagctctaccagccctggtcataagctcagctttccatcctggcagaaggctggccactctatcaacaatggcctgaacctggtcccttgtgagtttcttgggagacaaaggcaaaccgaggtacttacagggaaaatctgaaatattacatggcagcaagtcatgtaaacaattcacctcttcttccccacagcagattgggaacacactgctcttctggatattagtccttagacctgaagctgaaccaaataaatgaagaatatccataaccatactgatgtccagggcagtaggacttagaaataacactgcgtcatccacgtacaacgagatacggtgctgcatattccttgaagagagaggttgaagaaacccttcctcagaggctcgctgcacgagcagattcaagacatccattacaagaataaacaacataggcgatagaggatcaccctgcctcagtccgcgttgatgcccaatactttcccctggcagaccatttagtaaaatcttggtagaagaggtagctaacaacccgcttattatatcacaccagatctgtccaaaaccaagttttttcaagacctcgagaaggaaggcccacgataccgagtcaaaagccttagaaatgtcaagcttgagaagtatacgagcctgtttctgacaatgcaagaatctggtcgtctgctggactagcataaagttgtcaagaataaaccgtttcttaataaaagcggtttgattgggggaaaccatattttgcagccggcctgctaacctgttagccaacaatttagttaccaacttcgcgaaactatgaaccagacttattgggcggaagtctctcacactagtggccccctccaccttgggcagaagagtaatgaaagttgaattcagcgggcccaagtttctaaaatttctagcccaaatgcagtgaacggccgccatgaaatcagccatgattaccgaccaacaacttttgtaaaatctaccagtgaacccgtcgggacccggggatttgtccgaaggaagggccttaattgcatcccagacttcctcctccgagacaggcgcatcaagggcatcaaggtcataagatggcatccctagagcttccagatcaactgtaacatccctgacttctgcagttccaagtaacccttgataaaaattaaagaaggctgctgcctttccttcatgggcagtccagatttgcccatcctctgagtgtattgctgcaatgaaattctttttcttcctgaaccttgtttgtgcatgaaaaagagaggtattggcatccccttctttgagccacccaatccgcgatttcaaccttgccatggtatgagagatagaggacagggcaagggagtgcttcttgagcatgtttcggagccacaattcggcaggagataaggaacgattgtcctgcgccacctctaattgatgtaggagctccctagccatctcaagctgcagcttaatcttcccaacttttttgtcattccagctctgcagactcctagccgttgtctttaatttcttggccaaagtgataagtgggcaaggccctgctggaacaaacacccaagattgagctaccacatcatgaaatccctccatcctaggccaaaatgctagccatatataggtgtgataacctggaaagacacaaaactacctgcctaacaagtagaaccatgattttataaatatcccacattgaacagattgaagatggtagctaaaaaggtcatgttggcagtgcataccgtaaagatgtggctgaaaatttagccacgtatcaactataaagaagtagcaacagtagcaatcacatagtcacatggtggtgagacaaaccttttgataagaaaaaattcaaatggttagctgctgtagcatattaggtgtgatacaaagtgctacgtttagtgggaataaggatcgtgaaaactaagggcttgttcagttaatccatcccaatcctctccaatccccatgggtaagggattaccctaacaaggcctaggtaaatgcaagatatgcactatctatggaacgcaaaaaggataaaacagataaaaattagatgatagatacaacaataaaattaaggaaacaaaactttaatttcattaaataaggtatcgctgagggcct

SEQ ID NO: 25131 - DNA, 3106 bp, Zea Mays
gggagggcctgccgcctgcgcggctgcgcccggcacgcgcaaagcgaaaaagcgccggcgagcaaaggagagcgagggaatcgggttggcgtcgggtgggcagcctggcatcccattcctgccttcctccccgaagagccggacggacttcgttttctcccccctcacccacactgccactgactgcatgctctccgattccgctcccgcggtcccgaccccgcctcctccttcgtcgggctcgatgcggcggcgcctcgcgccggtgcttcttctcgccgccgcgctgctgctggcggcgcgcccgtggccagcggtgatcgcagcagattgtcctttggatttgagttggcccaactacggactgatagcttccgtgtgctcggaccaaaatggacactcaaagtgttgccgctacatcaatgctgttcttgcggtctcgtctgccatgtatgcaaacacaacaggcactcttggggttccggctcaattttctgattcctgcattgccaatatctctgatacattggtgtcaaaggggatactgcctactgccgcttcgttttgtggtcttgggatcaaaattcaagtgtcctatcagtgtgatgggatgaccaccatccttgagatgttgcagtctccgaatttcattgatatcacaagaagctgtgcaactacactttcagatgatatcacctgcaagagtgaacatatctggaccagctccaactggacttgttgcgccagatatttctcctagtccacttacggtgcaagttcctgtagtgccacccaagcatcatcgcagttacaagcttgttctgttcccagctattggagttttagtcactggtgtagcaattctactaatgatagtactgattttcctaatccgtagaaagaataaagaactcaaaaagatggaaggaaataaccctctggatgcatggagtttttcctgtgtcaagaaaggccaagaaggcaattccaccatttttggcagatttagttacaaagaaatgaagaatgcaacaaggaacttcagcacagtgttaggaggaggtgaaaatggtacagtattcagaggacaactaaatgatggatctgtggttgctatcagacgcgttgagagttcaccaaaacaaagtcacaatgaattttgtaaagaaatggaatttcttgggcggttgcatcatcgacatcttgttggactaaaagggttttgttcaacaagatttgagagatttcaggtgtatgaatacatggaaaatggaagccttcaagatcacctacattcgccaagtaaacatctgctaccatggaaaaatagggtccaaattgccatcgatgttgccaatgctctggagtaccttcatttttattgtgatcctccactataccatggagatgttaagcctagcaatgtcttcttggacaagaattaccttgcaaagcttgctggttgcggtcttgcacaccactctagtagtggcaatacaactcccagttgcacaccagtaaatgtcaaggcccaagcaactcctggctacgtagaccccgagtacatggtgacccaggagttgaccccgaagagcgacgtgtacagctacggcgtgctgttgctggagctggtgacggggaagccggtgatccaggacaacaagagtctggtggagtggtcccgcgagctgatcggcacggactaccggctccacgagctggtcgacccgtctgtggcggacgcgttcgacctggacgagttgcaggtggtggcggacgtgattcactggtgcacgcaccgggacggcgcagcgcggccgtccatgaagcaggtgctccgcatcctgtatgagcggctggacccgctgtccgggcggttcgcgcgcgccgtggagggcgaggaggggtactactactgccacggtggcgggcgggtgaaggggaagcaggcgggcgacggcgtgatccagttcagcggcgacgcggcgcggtcttggctgccgtcgtcgagcagcacgtccaggtcgcactgcagccgcagcgtgctgctggagtgcaactcgcccgagccgcagtcgtccccggcccacggcaacggagcgttcctggcttgatagcaccggtccgtcacccgtgttgcgtccgtttcatggtctgcactgcaccgcaggtctggcttgatggctctgccagctgccattttttgagaggaccttgtgataatggtagggatcgatccgtgcaccgttcatggtggttcgtgatgactgacgagtgacgactgacggatcctgctacgggatcgggagcccgtgcatggctgcatgagagtcatgtggagccagaggcagagagtgatgggagcacaactgtgctctgtgcaagaggtacactgacactgactgctgtttttcggttcgcttccctaggtgttggtggttgtttttcattgatctatgcattgatgtgcttcgggaacatggctacgcattcgaagtcgtgacagggatttcactgatactcctacttccattgttccgtactatactctgttctggcttcatcgtgggcagctgggctctggacttgtgggagagccggagaggcttgctcaagtttcctctgcgagaattttggctactgctccagttctacttgtacgtttcacttctgctttgctgatgcttgcatgatgtcacctgcttgaacgtccttgcctccttggggggtccattctcagtatctgtcaagtgagtccttggaactctgttatagactcttttgtgggccggcaatatgccaggcgccagaataattagacccagctatttgttagatggtggctgagtgttagagaagttttaggaggcttatcctccctggagcttatctccttaataatctcctaagttgttctctggagcttatctcttaataatctcctaagttgttaggccccggagctataagggtgcctcagattgtaatagggttttttatcaaaagaagtcgcacctgcgtgggcggttgcttgatcacaatggcgacccacacgcgccctggtgatcgtgttcctcagccgccacgctgcatgccctattccctg

SEQ ID NO: 25132 - DNA, 3195 bp, Zea Mays
gggagggcctgccgcctgcgcggctgcgcccggcacgcgcaaagcgaaaaagcgccggcgagcaaaggagagcgagggaatcgggttggcgtcgggtgggcagcctggcatcccattcctgccttcctccccgaagagccggacggacttcgttttctcccccctcacccacactgccactgactgcatgctctccgattccgctcccgcggtcccgaccccgcctcctccttcgtcgggctcgatgcggcggcgcctcgcgccggtgcttcttctcgccgccgcgctgctgctggcggcgcgcccgtggccagcggtgatcgcagcagattgtcctttggatttgagttggcccaactacggactgatagcttccgtgtgctcggaccaaaatggacactcaaagtgttgccgctacatcaatgctgttcttgcggtctcgtctgccatgtatgcaaacacaacaggcactcttggggttccggctcaattttctgattcctgcattgccaatatctctgatacattggtgtcaaaggggatactgcctactgccgcttcgttttgtggtcttgggatcaaaattcaagtgtcctatcagtgtgatgggatgaccaccatccttgagatgttgcagtctccgaatttcattgatatcacaagaagctgtgcaactacactttcagatgatatcacctgcaagaggtgcttaaactctggtctgtcgtacctccgccatcttgtcggggaacaagataatgtcaccttgaatacctgccgtgatgctgcttttgttgcacttgtgagtcaagggaatatatctaccgttgatacagctggttgcttttttagtgttcaggggcttagtgctcttcaagtgaacatatctggaccagctccaactggacttgttgcgccagatatttctcctagtccacttacggtgcaagttcctgtagtgccacccaagcatcatcgcagttacaagcttgttctgttcccagctattggagttttagtcactggtgtagcaattctactaatgatagtactgattttcctaatccgtagaaagaataaagaactcaaaaagatggaaggaaataaccctctggatgcatggagtttttcctgtgtcaagaaaggccaagaaggcaattccaccatttttggcagatttagttacaaagaaatgaagaatgcaacaaggaacttcagcacagtgttaggaggaggtgaaaatggtacagtattcagaggacaactaaatgatggatctgtggttgctatcagacgcgttgagagttcaccaaaacaaagtcacaatgaattttgtaaagaaatggaatttcttgggcggttgcatcatcgacatcttgttggactaaaagggttttgttcaacaagatttgagaggtgtatgaatacatggaaaatggaagccttcaagatcacctacattcgccaagtaaacatctgctaccatggaaaaatagggtccaaattgccatcgatgttgccaatgctctggagtaccttcatttttattgtgatcctccactataccatggagatgttaagcctagcaatgtcttcttggacaagaattaccttgcaaagcttgctggttgcggtcttgcacaccactctagtagtggcaatacaactcccagttgcacaccagtaaatgtcaaggcccaagcaactcctggctacgtagaccccgagtacatggtgacccaggagttgaccccgaagagcgacgtgtacagctacggcgtgctgttgctggagctggtgacggggaagccggtgatccaggacaacaagagtctggtggagtggtcccgcgagctgatcggcacggactaccggctccacgagctggtcgacccgtctgtggcggacgcgttcgacctggacgagttgcaggtggtggcggacgtgattcactggtgcacgcaccgggacggcgcagcgcggccgtccatgaagcaggtgctccgcatcctgtatgagcggctggacccgctgtccgggcggttcgcgcgcgccgtggagggcgaggaggggtactactactgccacggtggcgggcgggtgaaggggaagcaggcgggcgacggcgtgatccagttcagcggcgacgcggcgcggtcttggctgccgtcgtcgagcagcacgtccaggtcgcactgcagccgcagcgtgctgctggagtgcaactcgcccgagccgcagtcgtccccggcccacggcaacggagcgttcctggcttgatagcaccggtccgtcacccgtgttgcgtccgtttcatgggatcgatccgtgcaccgttcatggtggttcgtgatgactgacgagtgacgactgacggatcctgctacgggatcgggagcccgtgcatggctgcatgagagtcatgtggagccagaggcagagagtgatgggagcacaactgtgctctgtgcaagaggtacactgacactgactgctgtttttcggttcgcttccctaggtgttggtggttgtttttcattgatctatgcattgatgtgcttcgggaacatggctacgcattcgaagtcgtgacagggatttcactgatactcctacttccattgttccgtactatactctgttctggcttcatcgtgggcagctgggctctggacttgtgggagagccggagaggcttgctcaagtttcctctgcgagaattttggctactgctccagttctacttgtacgtttcacttctgctttgctgatgcttgcatgatgtcacctgcttgaacgtccttgcctccttggggggtccattctcagtatctgtcaagtgagtccttggaactctgttatagactcttttgtgggccggcaatatgccaggcgccagaataattagacccagctatttgttagatggtggctgagtgttagagaagttttaggaggcttatcctccctggagcttatctccttaataatctcctaagttgttctctggagcttatctcttaataatctcctaagttgttaggccccggagctataagggtgcctcagattgtaatagggttttttatcaaaagaagtcgcacctgcgtgggcggttgcttgatcacaatggcgacccacacgcgccctggtgatcgtgttcctcagccgccacgctgcatgccctattccctg

SEQ ID NO: 25133 - DNA, 3171 bp, Zea Mays
accatgagtccacgaccacgaccactcctgtagtctagatgaaaagggagggcctgccgcctgcgcggctgcgcccggcacgcgcaaagcgaaaaagcgccggcgagcaaaggagagcgagggaatcgggttggcgtcgggtgggcagcctggcatcccattcctgccttcctccccgaagagccggacggacttcgttttctcccccctcacccacactgccactgactgcatgctctccgattccgctcccgcggtcccgaccccgcctcctccttcgtcgggctcgatgcggcggcgcctcgcgccggtgcttcttctcgccgccgcgctgctgctggcggcgcgcccgtggccagcggtgatcgcagcagattgtcctttggatttgagttggcccaactacggactgatagcttccgtgtgctcggaccaaaatggacactcaaagtgttgccgctacatcaatgctgttcttgcggtctcgtctgccatgtatgcaaacacaacaggcactcttggggttccggctcaattttctgattcctgcattgccaatatctctgatacattggtgtcaaaggggatactgcctactgccgcttcgttttgtggtcttgggatcaaaattcaagtgtcctatcagtgtgatgggatgaccaccatccttgagatgttgcagtctccgaatttcattgatatcacaagaagctgtgcaactacactttcagatgatatcacctgcaagaggtgcttaaactctggtctgtcgtacctccgccatcttgtcggggaacaagataatgtcaccttgaatacctgccgtgatgctgcttttgttgcactttgaacatatctggaccagctccaactggacttgttgcgccagatatttctcctagtccacttacggtgcaagttcctgtagtgccacccaagcatcatcgcagttacaagcttgttctgttcccagctattggagttttagtcactggtgtagcaattctactaatgatagtactgattttcctaatccgtagaaagaataaagaactcaaaaagatggaaggaaataaccctctggatgcatggagtttttcctgtgtcaagaaaggccaagaaggcaattccaccatttttggcagatttagttacaaagaaatgaagaatgcaacaaggaacttcagcacagtgttaggaggaggtgaaaatggtacagtattcagaggacaactaaatgatggatctgtggttgctatcagacgcgttgagagttcaccaaaacaaagtcacaatgaattttgtaaagaaatggaatttcttgggcggttgcatcatcgacatcttgttggactaaaagggttttgttcaacaagatttgagagatttcaggtgtatgaatacatggaaaatggaagccttcaagatcacctacattcgccaagtaaacatctgctaccatggaaaaatagggtccaaattgccatcgatgttgccaatgctctggagtaccttcatttttattgtgatcctccactataccatggagatgttaagcctagcaatgtcttcttggacaagaattaccttgcaaagcttgctggttgcggtcttgcacaccactctagtagtggcaatacaactcccagttgcacaccagtaaatgtcaaggcccaagcaactcctggctacgtagaccccgagtacatggtgacccaggagttgaccccgaagagcgacgtgtacagctacggcgtgctgttgctggagctggtgacggggaagccggtgatccaggacaacaagagtctggtggagtggtcccgcgagctgatcggcacggactaccggctccacgagctggtcgacccgtctgtggcggacgcgttcgacctggacgagttgcaggtggtggcggacgtgattcactggtgcacgcaccgggacggcgcagcgcggccgtccatgaagcaggtgctccgcatcctgtatgagcggctggacccgctgtccgggcggttcgcgcgcgccgtggagggcgaggaggggtactactactgccacggtggcgggcgggtgaaggggaagcaggcgggcgacggcgtgatccagttcagcggcgacgcggcgcggtcttggctgccgtcgtcgagcagcacgtccaggtcgcactgcagccgcagcgtgctgctggagtgcaactcgcccgagccgcagtcgtccccggcccacggcaacggagcgttcctggcttgatagcaccggtccgtcacccgtgttgcgtccgtttcatgggatcgatccgtgcaccgttcatggtggttcgtgatgactgacgagtgacgactgacggatcctgctacgggatcgggagcccgtgcatggctgcatgagagtcatgtggagccagaggcagagagtgatgggagcacaactgtgctctgtgcaagaggtacactgacactgactgctgtttttcggttcgcttccctaggtgttggtggttgtttttcattgatctatgcattgatgtgcttcgggaacatggctacgcattcgaagtcgtgacagggatttcactgatactcctacttccattgttccgtactatactctgttctggcttcatcgtgggcagctgggctctggacttgtgggagagccggagaggcttgctcaagtttcctctgcgagaattttggctactgctccagttctacttgtacgtttcacttctgctttgctgatgcttgcatgatgtcacctgcttgaacgtccttgcctccttggggggtccattctcagtatctgtcaagtgagtccttggaactctgttatagactcttttgtgggccggcaatatgccaggcgccagaataattagacccagctatttgttagatggtggctgagtgttagagaagttttaggaggcttatcctccctggagcttatctccttaataatctcctaagttgttctctggagcttatctcttaataatctcctaagttgttaggccccggagctataagggtgcctcagattgtaatagggttttttatcaaaagaagtcgcacctgcgtgggcggttgcttgatcacaatggcgacccacacgcgccctggtgatcgtgttcctcagccgccacgctgcatgccctattccctg

SEQ ID NO: 25134 - DNA, 3051 bp, Zea Mays
cccaaccatgagtccacgaccacgaccactcctgtagtctagatgaaaagggagggcctgccgcctgcgcggctgcgcccggcacgcgcaaagcgaaaaagcgccggcgagcaaaggagagcgagggaatcgggttggcgtcgggtgggcagcctggcatcccattcctgccttcctccccgaagagccggacggacttcgttttctcccccctcacccacactgccactgactgcatgctctccgattccgctcccgcggtcccgaccccgcctcctccttcgtcgggctcgatgcggcggcgcctcgcgccggtgcttcttctcgccgccgcgctgctgctggcggcgcgcccgtggccagcggtgatcgcagcagattgtcctttggatttgagttggcccaactacggactgatagcttccgtgtgctcggaccaaaatggacactcaaagtgttgccgctacatcaatgctgttcttgcggtctcgtctgccatgtatgcaaacacaacaggcactcttggggttccggctcaattttctgattcctgcattgccaatatctctgatacattggtgtcaaaggggatactgcctactgccgcttcgttttgtggtcttgggatcaaaattcaagtgtcctatcagtgtgatgggatgaccaccatccttgagatgttgcagtctccgaatttcattgatatcacaagaagctgtgcaactacactttcagatgatatcacctgcaagaggtgcttaaactctggtctgtcgtacctccgccatcttgtcggggaacaagataatgtcaccttgaatacctgccgtgatgctgcttttgttgcacttgtgagtcaagggaatatatctaccgttgatacagctggttgcttttttagtgttcaggggcttagtgctcttcaagtgaacatatctggaccagctccaactggacttgttgcgccagatatttctcctagtccacttacggtgcaagttcctgtagtgccacccaagcatcatcgcaaaagaataaagaactcaaaaagatggaaggaaataaccctctggatgcatggagtttttcctgtgtcaagaaaggccaagaaggcaattccaccatttttggcagatttagttacaaagaaatgaagaatgcaacaaggaacttcagcacagtgttaggaggaggtgaaaatggtacagtattcagaggacaactaaatgatggatctgtggttgctatcagacgcgttgagagttcaccaaaacaaagtcacaatgaattttgtaaagaaatggaatttcttgggcggttgcatcatcgacatcttgttggactaaaagggttttgttcaacaagatttgagagatttcaggtgtatgaatacatggaaaatggaagccttcaagatcacctacattcgccaagtaaacatctgctaccatggaaaaatagggtccaaattgccatcgatgttgccaatgctctggagtaccttcatttttattgtgatcctccactataccatggagatgttaagcctagcaatgtcttcttggacaagaattaccttgcaaagcttgctggttgcggtcttgcacaccactctagtagtggcaatacaactcccagttgcacaccagtaaatgtcaaggcccaagcaactcctggctacgtagaccccgagtacatggtgacccaggagttgaccccgaagagcgacgtgtacagctacggcgtgctgttgctggagctggtgacggggaagccggtgatccaggacaacaagagtctggtggagtggtcccgcgagctgatcggcacggactaccggctccacgagctggtcgacccgtctgtggcggacgcgttcgacctggacgagttgcaggtggtggcggacgtgattcactggtgcacgcaccgggacggcgcagcgcggccgtccatgaagcaggtgctccgcatcctgtatgagcggctggacccgctgtccgggcggttcgcgcgcgccgtggagggcgaggaggggtactactactgccacggtggcgggcgggtgaaggggaagcaggcgggcgacggcgtgatccagttcagcggcgacgcggcgcggtcttggctgccgtcgtcgagcagcacgtccaggtcgcactgcagccgcagcgtgctgctggagtgcaactcgcccgagccgcagtcgtccccggcccacggcaacggagcgttcctggcttgatagcaccggtccgtcacccgtgttgcgtccgtttcatggtctgcactgcaccgcaggtctggcttgatggctctgccagctgccattttttgagaggaccttgtgataatggtagggatcgatccgtgcaccgttcatggtggttcgtgatgactgacgagtgacgactgacggatcctgctacgggatcgggagcccgtgcatggctgcatgagagtcatgtggagccagaggcagagagtgatgggagcacaactgtgctctgtgcaagagctgggctctggacttgtgggagagccggagaggcttgctcaagtttcctctgcgagaattttggctactgctccagttctacttgtacgtttcacttctgctttgctgatgcttgcatgatgtcacctgcttgaacgtccttgcctccttggggggtccattctcagtatctgtcaagtgagtccttggaactctgttatagactcttttgtgggccggcaatatgccaggcgccagaataattagacccagctatttgttagatggtggctgagtgttagagaagttttaggaggcttatcctccctggagcttatctccttaataatctcctaagttgttctctggagcttatctcttaataatctcctaagttgttaggccccggagctataagggtgcctcagattgtaatagggttttttatcaaaagaagtcgcacctgcgtgggcggttgcttgatcacaatggcgacccacacgcgccctggtgatcgtgttcctcagccgccacgctgcatgccctattccctg

SEQ ID NO: 25135 - DNA, 386 bp, Zea Mays
tttcagagttctggcgcaaggcctggctttggccgtggtggtggcagcggctttggcgctggcccgacctcttccatggagtgaacagtgaagctgcccttagtttggacatgatgtttcccctcccgtgaggcgtttaattttgaaggacggttattatgtactagtaatgttttccggatcggctagtgctgacatgcaaaaaaaatgttccatatttatacattggttccagtatagtagtctttgcaaaacgtttggattttcaagtaagtacgttttcgctaatttacgagtaatcagtcctccgtatggtggttgactggtctgaagggttggtgatgctattttgttcttttgttgtttctagttgtttgcctgtttcc

SEQ ID NO: 25136 - DNA, 836 bp, Zea Mays
ccaaatttgtgtgccccctaaactatggaattgaacacagagggcgtgctgtatgccaagaaggactacaacctggcgaagcacccacagattgatgtgcccaacctccaggtgatcaagctcatgcagagcttcaagtccaaggagtatgtcagagagaccttctcctggcagtactactactggtacctcaccaacgatggcattgagcacctacgcaactacctgaacctcccgtctgagatcgtgcctgccacgctcaagaagtctgccaggccactgggccgtccatttggctctggccctcctggtgaccgcccaaggggccctggtcgttttgaagacagaccaaggtttggagacagggatgagtaccgtggtggccctcgtggtgctcccggtgactttggtggcgataagagtggagctcctgctgagttccagccatctttcaggagttctggcgcaaggcctggctttggccgtggtggtggcagcggctttggcgctggcccgacctcttccatggagtgaacagtgaagctgcccttagtttggacatgatgtttcccctcccgtgaggcgtttaattttgaaggacggttattatgtactagtaatgttttccggatcggctagtgctgacatgcaaaaaaaatgttccatatttatacattggttccagtatagtagtctttgcaaaacgtttggattttcaagtaagtacgttttcgctaatttacgagtaatcagtcctccgtatggtggttgactggtctgaagggttggtgatgctattttgttcttttgttgtttctagttgtttgcctgtttcc

SEQ ID NO: 25137 - DNA, 884 bp, Zea Mays
gcgaacttgtgaaatagttttgcactccaaatttgtgtgccccctaaactatggaattgaacacagtttgatgtgtttgctgctgcagagggcgtgctgtatgccaagaaggactacaacctggcgaagcacccacagattgatgtgcccaacctccaggtgatcaagctcatgcagagcttcaagtccaaggagtatgtcagagagaccttctcctggcagtactactactggtacctcaccaacgatggcattgagcacctacgcaactacctgaacctcccgtctgagatcgtgcctgccacgctcaagaagtctgccaggccactgggccgtccatttggctctggccctcctggtgaccgcccaaggggccctggtcgttttgaagacagaccaaggtttggagacagggatgagtaccgtggtggccctcgtggtgctcccggtgactttggtggcgataagagtggagctcctgctgagttccagccatctttcaggagttctggcgcaaggcctggctttggccgtggtggtggcagcggctttggcgctggcccgacctcttccatggagtgaacagtgaagctgcccttagtttggacatgatgtttcccctcccgtgaggcgtttaattttgaaggacggttattatgtactagtaatgttttccggatcggctagtgctgacatgcaaaaaaaatgttccatatttatacattggttccagtatagtagtctttgcaaaacgtttggattttcaagtaagtacgttttcgctaatttacgagtaatcagtcctccgtatggtggttgactggtctgaagggttggtgatgctattttgttcttttgttgtttctagttgtttgcctgtttcc

SEQ ID NO: 25138 - DNA, 1593 bp, Zea Mays
caaaaccttcgttcttcactgcattggttactagcccactgttgtttcatgattctagagccttgatgagataccaaacaaggccctcaggaacaaagatggctcaagagtttgcgaggattttgttagtttagtgcaagagtggcttcaaaagtttcaggcagcagattcattaggtggtgtatttggtgatacaaataaaagtgagctggctgcatttgcatcctacgcattggcttttccaagcaactttcttgctcttgtggacacatatgacgttatacgaagtggtattccgaatttctgtgcagtggctctagcacttcatgacttagggtacaaggcatctggtattagattagattctggtgatctggcctatttgtccattgaagcacgaaaagtgtttcgtgcagtagagaaggaattcaatctacctggttttgcaaagatggtcattactgctagcaacgatctgaacgaggaaacaattgatgccctcaacaaacagggtcatgaggttgatgcctttggaattggaacttaccttgtgacgtgttattcccaggctgctcttggttgtgtctttaagctagttgaaataaataatagacctcgtattaagctgtctgaggacgtggcaaaatgtaataacatgtttcaggtttccattccatgcaaaaagcgatgctttagactgtatgggaaagaaggctacccactggtagatatcatgattcgtgaaagtgaaccatcacctaaggcaggagaaagaatcctctgccgccatccattcattgaatcaaagagagcatatgttgtcccccagcatgttgaggagcttctacagtactattggccggggacatcagataaacctagagcagagctgccctccttggagaagatcagaagccgctgcatgcagcagcttgaaaagctgcgtccggatcacatccggcggctaaatccaacaccgtacaaggtgagcgtgagtgcgaagctgtacgacttcatccactgcctatggctgaacgaggcaccagttggtgaactgcagtagatgatggccacatgaaagaagttttgggtcatctttgacacagcagcaaaccatacaagaggatcagagcttttctgcgcaatatcagcagttgagcccatggcccatggcaggattttgctcttcagatttccatctctaatccccggtatagaggcaggttaatcaagtcgtctagtttatacatcctttgattggtgggatactatacacatcatcatcatgaaaagaacagaaatcatttggagtcaatgggaagattaatagccaaaaatgtcactatatatcctgcgtgtttgtcacatttgcaggtgttagatccaacagaccagcaggcttgaattgctcctgtcaccgttccctgttctcggctgttgtattacgcaaggactgccgtggggacgtggggtgggacgagtccaaacgttggagtcactagagtaaattggtgatgcgttctcaactgccgtgccgccgtgcattagcaaagcagcacttttggctggttatttttctaaactaccattgcg

SEQ ID NO: 25139 - DNA, 1947 bp, Zea Mays
atgacatgcccttgcaggaacacaatcaccattggccatcgagacccacatgttgttgttgtctcttgtcaccagtccgatggagcacatgaccctggcattgatgttgtgggtcgagtcattgttcaggagggcaaggagccagtgaccatggatgtaggcatggaagtgcatgatgtcctcggtgtcaatgttttggctggaaatttgtttggcataccacttcgtggaacacattctcatgcttttgttagctcatatatggtcagtgaagtatccttcctgctatgaacgaatgaaagtttatgcagatgcatttactttcatcgttggagagcattatatctgtatactgtaatttcattggtcaaacaaaaccttcgttcttcactgcattggttactagcccactgttgtttcatgattctagagccttgatgagataccaaacaaggccctcaggaacaaagatggctcaagagtttgcgaggattttgttagtttagtgcaagagtggcttcaaaagtttcaggcagcagattcattaggtggtgtatttggtgatacaaataaaagtgagctggctgcatttgcatcctacgcattggcttttccaagcaactttcttgctcttgtggacacatatgacgttatacgaagtggtattccgaatttctgtgcagtggctctagcacttcatgacttagggtacaaggcatctggtattagattagattctggtgatctggcctatttgtccattgaagcacgaaaagtgtttcgtgcagtagagaaggaattcaatctacctggttttgcaaagatggtcattactgctagcaacgatctgaacgaggaaacaattgatgccctcaacaaacagggtcatgaggttgatgcctttggaattggaacttaccttgtgacgtgttattcccaggctgctcttggttgtgtctttaagctagttgaaataaataatagacctcgtattaagctgtctgaggacgtggcaaaagtttccattccatgcaaaaagcgatgctttagactgtatgggaaagaaggctacccactggtagatatcatgattcgtgaaagtgaaccatcacctaaggcaggagaaagaatcctctgccgccatccattcattgaatcaaagagagcatatgttgtcccccagcatgttgaggagcttctacagtactattggccggggacatcagataaacctagagcagagctgccctccttggagaagatcagaagccgctgcatgcagcagcttgaaaagctgcgtccggatcacatccggcggctaaatccaacaccgtacaaggtgagcgtgagtgcgaagctgtacgacttcatccactgcctatggctgaacgaggcaccagttggtgaactgcagtagatgatggccacatgaaagaagttttgggtcatctttgacacagcagcaaaccatacaagaggatcagagcttttctgcgcaatatcagcagttgagcccatggcccatggcaggattttgctcttcagatttccatctctaatccccggtatagaggcaggttaatcaagtcgtctagtttatacatcctttgattggtgggatactatacacatcatcatcatgaaaagaacagaaatcatttggagtcaatgggaagattaatagccaaaaatgtcactatatatcctgcgtgtttgtcacatttgcaggtgttagatccaacagaccagcaggcttgaattgctcctgtcaccgttccctgttctcggctgttgtattacgcaaggactgccgtggggacgtggggtgggacgagtccaaacgttggagtcactagagtaaattggtgatgcgttctcaactgccgtgccgccgtgcattagcaaagcagcacttttggctggttatttttctaaactaccattgcg

SEQ ID NO: 25140 - DNA, 2051 bp, Zea Mays
agacctcactcaccactgcatggatccgccactgatttcaaacatatcttcgtctcgacatctacagttgatgtttgacctgtactttaggaaaaatccatttggtggggagttcactgtttttgctggccttgaggagtgcatcaaatttatggcgaattttaagttcacagaacatgacatttctttcctgcaatcagtcatgccaacatgtgcgggtgctttcttcgattatctcggggaagttgactgctctgatgtagaggtgtactctattcctgagggatcagtagtttttccaaaagtgcccttgatgagagttgaaggtccggttgctgtagttcaacttcttgagaccccatttgtaaatcttatcaattatgcttctttggtaactactaatgctgcacgtcatcgtcatgttgctggaaagtcaaaagttctgttagaatttggtttaagacgagcacagggacctgatggagcaataagtgcctcaaaatattgttttatgggaggttttgacgcaactagagccttgatgagataccaaacaaggccctcaggaacaaagatggctcaagagtttgcgaggattttgttagtttagtgcaagagtggcttcaaaagtttcaggcagcagattcattaggtggtgtatttggtgatacaaataaaagtgagctggctgcatttgcatcctacgcattggcttttccaagcaactttcttgctcttgtggacacatatgacgttatacgaagtggtattccgaatttctgtgcagtggctctagcacttcatgacttagggtacaaggcatctggtattagattagattctggtgatctggcctatttgtccattgaagcacgaaaagtgtttcgtgcagtagagaaggaattcaatctacctggttttgcaaagatggtcattactgctagcaacgatctgaacgaggaaacaattgatgccctcaacaaacagggtcatgaggttgatgcctttggaattggaacttaccttgtgacgtgttattcccaggctgctcttggttgtgtctttaagctagttgaaataaataatagacctcgtattaagctgtctgaggacgtggcaaaagtttccattccatgcaaaaagcgatgctttagactgtatgggaaagaaggctacccactggtagatatcatgattcgtgaaagtgaaccatcacctaaggcaggagaaagaatcctctgccgccatccattcattgaatcaaagagagcatatgttgtcccccagcatgttgaggagcttctacagtactattggccggggacatcagataaacctagagcagagctgccctccttggagaagatcagaagccgctgcatgcagcagcttgaaaagctgcgtccggatcacatccggcggctaaatccaacaccgtacaaggtgagcgtgagtgcgaagctgtacgacttcatccactgcctatggctgaacgaggcaccagttggtgaactgcagtagatgatggccacatgaaagaagttttgggtcatctttgacacagcagcaaaccatacaagaggatcagagcttttctgcgcaatatcagcagttgagcccatggcccatggcaggattttgctcttcagatttccatctctaatccccggtatagaggcaggttaatcaagtcgtctagtttatacatcctttgattggtgggatactatacacatcatcatcatgaaaagaacagaaatcatttggagtcaatgggaagattaatagccaaaaatgtcactatatatcctgcgtgtttgtcacatttgcaggtgttagatccaacagaccagcaggcttgaattgctcctgtcaccgttccctgttctcggctgttgtattacgcaaggactgccgtggggacgtggggtgggacgagtccaaacgttggagtcactagagtaaattggtgatgcgttctcaactgccgtgccgccgtgcattagcaaagcagcacttttggctggttatttttctaaactaccattgcg

SEQ ID NO: 25141 - DNA, 2561 bp, Zea Mays
cgggtctccagcagtccagctgtttccgctcccgcctcctcctgtcctccttccgggttccggcgcagcctctctcgccccgtccaggacgcaagcgtaccctaggcggagccaccttccactcttccagaaatctctctccggaggccggaggggaggccaggatggcagcaccagcgacgtcggggccgcccgcgagcgccaacggctccctcgcgggggtggccgcggcggtgggagcgcccactaaccccatggcgacggcgatgctcaccgatcaataccagttctctatggcctacgcgtactggaaggccgggaagcacgccgaccgagccgtgtttgacctgtactttaggaaaaatccatttggtggggagttcactgtttttgctggccttgaggagtgcatcaaatttatggcgaattttaagttcacagaacatgacatttctttcctgcaatcagtcatgccaacatgtgcgggtgctttcttcgattatctcggggaagttgactgctctgatgtagaggtgtactctattcctgagggatcagtagtttttccaaaagtgcccttgatgagagttgaaggtccggttgctgtagttcaacttcttgagaccccatttgtaaatcttatcaattatgcttctttggtaactactaatgctgcacgtcatcgtcatgttgctggaaagtcaaaagttctgttagaatttggtttaagacgagcacagggacctgatggagcaataagtgcctcaaaatattgttttatgggaggttttgacgcaactagcaatgttttggctggaaatttgtttggcataccacttcgtggaacacattctcatgcttttgttagctcatatatggtcagtgaagtatccttcctgctatgaacgaatgaaagtttatgcagatgcatttactttcatcgttggagagcattatatctgtatactgtaatttcattggtcaaacaaaaccttcgttcttcactgcattggttactagcccactgttgtttcatgattctagagccttgatgagataccaaacaaggccctcaggaacaaagatggctcaagagtttgcgaggattttgttagtttagtgcaagagtggcttcaaaagtttcaggcagcagattcattaggtggtgtatttggtgatacaaataaaagtgagctggctgcatttgcatcctacgcattggcttttccaagcaactttcttgctcttgtggacacatatgacgttatacgaagtggtattccgaatttctgtgcagtggctctagcacttcatgacttagggtacaaggcatctggtattagattagattctggtgatctggcctatttgtccattgaagcacgaaaagtgtttcgtgcagtagagaaggaattcaatctacctggttttgcaaagatggtcattactgctagcaacgatctgaacgaggaaacaattgatgccctcaacaaacagggtcatgaggttgatgcctttggaattggaacttaccttgtgacgtgttattcccaggctgctcttggttgtgtctttaagctagttgaaataaataatagacctcgtattaagctgtctgaggacgtggcaaaagtttccattccatgcaaaaagcgatgctttagactgtatgggaaagaaggctacccactggtagatatcatgattcgtgaaagtgaaccatcacctaaggcaggagaaagaatcctctgccgccatccattcattgaatcaaagagagcatatgttgtcccccagcatgttgaggagcttctacagtactattggccggggacatcagataaacctagagcagagctgccctccttggagaagatcagaagccgctgcatgcagcagcttgaaaagctgcgtccggatcacatccggcggctaaatccaacaccgtacaaggtgagcgtgagtgcgaagctgtacgacttcatccactgcctatggctgaacgaggcaccagttggtgaactgcagtagatgatggccacatgaaagaagttttgggtcatctttgacacagcagcaaaccatacaagaggatcagagcttttctgcgcaatatcagcagttgagcccatggcccatggcaggattttgctcttcagatttccatctctaatccccggtatagaggcaggttaatcaagtcgtctagtttatacatcctttgattggtgggatactatacacatcatcatcatgaaaagaacagaaatcatttggagtcaatgggaagattaatagccaaaaatgtcactatatatcctgcgtgtttgtcacatttgcaggtgttagatccaacagaccagcaggcttgaattgctcctgtcaccgttccctgttctcggctgttgtattacgcaaggactgccgtggggacgtggggtgggacgagtccaaacgttggagtcactagagtaaattggtgatgcgttctcaactgccgtgccgccgtgcattagcaaagcagcacttttggctggttatttttctaaactaccattgcg

SEQ ID NO: 25142 - DNA, 2347 bp, Zea Mays
ccgcctccacccgcctcattccgtcattcgggtctccagcagtccagctgtttccgctcccgcctcctcctgtcctccttccgggttccggcgcagcctctctcgccccgtccaggacgcaagcgtaccctaggcggagccaccttccactcttccagaaatctctctccggaggccggaggggaggccaggatggcagcaccagcgacgtcggggccgcccgcgagcgccaacggctccctcgcgggggtggccgcggcggtgggagcgcccactaaccccatggcgacggcgatgctcaccgatcaataccagttctctatggcctacgcgtactggaaggccgggaagcacgccgaccgagccgtgtttgacctgtactttaggaaaaatccatttggtggggagttcactgtttttgctggccttgaggagtgcatcaaatttatggcgaattttaagttcacagaacatgacatttctttcctgcaatcagtcatgccaacatgtgcgggtgctttcttcgattatctcggggaagttgactgctctgatgtagaggtgtactctattcctgagggatcagtagtttttccaaaagtgcccttgatgagagttgaaggtccggttgctgtagttcaacttcttgagaccccatttgtaaatcttatcaattatgcttctttggtaactactaatgctgcacgtcatcgtcatgttgctggaaagtcaaaagttctgttagaatttggtttaagacgagcacagggacctgatggagcaataagtgcctcaaaatattgttttatgggaggttttgacgcaactagagccttgatgagataccaaacaaggccctcaggaacaaagatggctcaagagtttgcgaggattttgttagtttagtgcaagagtggcttcaaaagtttcaggcagcagattcattaggtggtgtatttggtgatacaaataaaagtgagctggctgcatttgcatcctacgcattggcttttccaagcaactttcttgctcttgtggacacatatgacgttatacgaagtggtattccgaatttctgtgcagtggctctagcacttcatgacttagggtacaaggcatctggtattagattagattctggtgatctggcctatttgtccattgaagcacgaaaagtgtttcgtgcagtagagaaggaattcaatctacctggttttgcaaagatggtcattactgctagcaacgatctgaacgaggaaacaattgatgccctcaacaaacagggtcatgaggttgatgcctttggaattggaacttaccttgtgacgtgttattcccaggctgctcttggttgtgtctttaagctagttgaaataaataatagacctcgtattaagctgtctgaggacgtggcaaaagtttccattccatgcaaaaagcgatgctttagactgtatgggaaagaaggctacccactggtagatatcatgattcgtgaaagtgaaccatcacctaaggcaggagaaagaatcctctgccgccatccattcattgaatcaaagagagcatatgttgtcccccagcatgttgaggagcttctacagtactattggccggggacatcagataaacctagagcagagctgccctccttggagaagatcagaagccgctgcatgcagcagcttgaaaagctgcgtccggatcacatccggcggctaaatccaacaccgtacaaggtgagcgtgagtgcgaagctgtacgacttcatccactgcctatggctgaacgaggcaccagttggtgaactgcagtagatgatggccacatgaaagaagttttgggtcatctttgacacagcagcaaaccatacaagaggatcagagcttttctgcgcaatatcagcagttgagcccatggcccatggcaggattttgctcttcagatttccatctctaatccccggtatagaggcaggttaatcaagtcgtctagtttatacatcctttgattggtgggatactatacacatcatcatcatgaaaagaacagaaatcatttggagtcaatgggaagattaatagccaaaaatgtcactatatatcctgcgtgtttgtcacatttgcaggtgttagatccaacagaccagcaggcttgaattgctcctgtcaccgttccctgttctcggctgttgtattacgcaaggactgccgtggggacgtggggtgggacgagtccaaacgttggagtcactagagtaaattggtgatgcgttctcaactgccgtgccgccgtgcattagcaaagcagcacttttggctggttatttttctaaactaccattgcg

SEQ ID NO: 25143 - DNA, 2447 bp, Zea Mays
attccattcgggcccctgccttctccgcctccacccgcctcattccgtcattcgggtctccagcagtccagctgtttccgctcccgcctcctcctgtcctccttccgggttccggcgcagcctctctcgccccgtccaggacgcaagcgtaccctaggcggagccaccttccactcttccagaaatctctctccggaggccggaggggaggccaggatggcagcaccagcgacgtcggggccgcccgcgagcgccaacggctccctcgcgggggtggccgcggcggtgggagcgcccactaaccccatggcgacggcgatgctcaccgatcaataccagttctctatggcctacgcgtactggaaggccgggaagcacgccgaccgagccgtgtttgacctgtactttaggaaaaatccatttggtggggagttcactgtttttgctggccttgaggagtgcatcaaatttatggcgaattttaagttcacagaacatgacatttctttcctgcaatcagtcatgccaacatgtgcgggtgctttcttcgattatctcggggaagttgactgctctgatgtagaggtgtactctattcctgagggatcagtagtttttccaaaagtgcccttgatgagagttgaaggtccggttgctgtagttcaacttcttgagaccccatttgtaaatcttatcaattatgcttctttggtaactactaatgctgcacgtcatcgtcatgttgctggaaagtcaaaagttctgttagaatttggtttaagacgagcacagggacctgatggagcaataagtgcctcaaaatattgttttatgggaggttttgacgcaactagcaatgttttggctggaaatttgtttggcataccacttcgtggaacacattctcatgcttttgttagctcatatatgagccttgatgagataccaaacaaggccctcaggaacaaagatggctcaagagtttgcgaggattttgttagtttagtgcaagagtggcttcaaaagtttcaggcagcagattcattaggtggtgtatttggtgatacaaataaaagtgagctggctgcatttgcatcctacgcattggcttttccaagcaactttcttgctcttgtggacacatatgacgttatacgaagtggtattccgaatttctgtgcagtggctctagcacttcatgacttagggtacaaggcatctggtattagattagattctggtgatctggcctatttgtccattgaagcacgaaaagtgtttcgtgcagtagagaaggaattcaatctacctggttttgcaaagatggtcattactgctagcaacgatctgaacgaggaaacaattgatgccctcaacaaacagggtcatgaggttgatgcctttggaattggaacttaccttgtgacgtgttattcccaggctgctcttggttgtgtctttaagctagttgaaataaataatagacctcgtattaagctgtctgaggacgtggcaaaagtttccattccatgcaaaaagcgatgctttagactgtatgggaaagaaggctacccactggtagatatcatgattcgtgaaagtgaaccatcacctaaggcaggagaaagaatcctctgccgccatccattcattgaatcaaagagagcatatgttgtcccccagcatgttgaggagcttctacagtactattggccggggacatcagataaacctagagcagagctgccctccttggagaagatcagaagccgctgcatgcagcagcttgaaaagctgcgtccggatcacatccggcggctaaatccaacaccgtacaaggtgagcgtgagtgcgaagctgtacgacttcatccactgcctatggctgaacgaggcaccagttggtgaactgcagtagatgatggccacatgaaagaagttttgggtcatctttgacacagcagcaaaccatacaagaggatcagagcttttctgcgcaatatcagcagttgagcccatggcccatggcaggattttgctcttcagatttccatctctaatccccggtatagaggcaggttaatcaagtcgtctagtttatacatcctttgattggtgggatactatacacatcatcatcatgaaaagaacagaaatcatttggagtcaatgggaagattaatagccaaaaatgtcactatatatcctgcgtgtttgtcacatttgcaggtgttagatccaacagaccagcaggcttgaattgctcctgtcaccgttccctgttctcggctgttgtattacgcaaggactgccgtggggacgtggggtgggacgagtccaaacgttggagtcactagagtaaattggtgatgcgttctcaactgccgtgccgccgtgcattagcaaagcagcacttttggctggttatttttctaaactaccattgcg

SEQ ID NO: 25144 - DNA, 1266 bp, Zea Mays
aacataccctccatgtaactcaaatcgccaccttccaatgttgcctcttccatcgttctaatctctcatcttaaggattattcagaagcacctagtttagttttttaagaaaccagtttatatagaagatgaggtgcttccaaacaggctgacaaggccaccatagtcggggaggctgtaacctacatcaagactctggaaggcaccgtccagaagctggagaagctgaagctggagcgcaagcgcgcgctggcagcgcagcagcagctgatggctggtgccggcagcaaccgcgcgtcgtccgcgcgccatcccgcaccagcgccgtcgtcaccgtcgtcgtcgtcgagggaggcgaacgtggcggacatggtccacggttggcatgcgcagcaggccgccgcgaacaaggccctggcagcggaggccggggcgggcggctcctcctctgccgccgcctcgctgccccgtggagcggtgcccttccccgcgcccgcggcggggttccagacgtggtccgggcagaacgtcgtggtgagcgtggccagcaacgaggcgtacatcaacctgcactccccgcggcagccggcgggcaccctgaccaaggcgctgttcgtgctggagaggcaccgcatcgacgtcgtcacgacgaccatctccacccaggacggcttccacatgtacggcatccatgcacgcgttaattcggcttccgcttcggctcgctttccggagaatctgtgtgctgaagacaggttcaagctggcggtgtcggagatgctgcagctgatcaacatctgagctaggccaacgcgctcatgctcgccaatgcatctgagctatgctgctgccgtcgtcgtttcgtgttaagtttggtcgtcgtccaactcttttagtttgtttctcttgttcgtgccaagtttggtcgtcgtcggttgaactcttttatgtctcaagacagctggttagtggttcctagcgtatggtaagtactgtttgaggtttaacccgtcgtggatgtagttgtatgatcgggtttcatgtgtgagagttctaaccaatcactagacatcgtagaacatgatgaaggtctactttgagactgagtggagcggccatgagaatgagagttcgggcctgttaggcacggctccgactccttcaaaaacgattctggctctgagccaattgttttagctccggcttctctctataaaaatagctccagctcgtcagcgctctttattgagagttcttttttagacc

SEQ ID NO: 25145 - DNA, 2413 bp, Zea Mays
gtaaatcttttctccatcgcaaatcccccactccccctccgatcccccctgcgaccctgcccaccctcctctcctcctgcatccaccgcgccatgtctcaggaaggagccaacctgccgcaagaagtggtggggagccatgatcaggccaccgccccccacggcagcatccctgcaccggctgattccaaccccagctctgtcagcaacctggccagcgccgtcaacaacggcgggtcgtctgagtgtgccagcccagcggtgctctctgccggcgaggacaacaacgcggcgtcgtccaagaccgccagcccggcggtgctctctgccggcgaggacaacaacgcggcgtcgtccaagaccgccagcccggcggtgctccatgctgccgacgacaacaacgcggcgtccaagatcgcaggcccggcggtgctccttgccggcgaggaaaacaaggccaagctcaagctcgcgagcccggcatcgctccttgccggcgaggagaagggcaacaacgctgatgagttcaagctcgctagcccaaggatgctccatgactgcgacgacaacaatgccgggtcccatgctggcgtgcgcaactgcaacgccgcccagtccaagctcgccaacccggcggttctccatgccggcgatgacaagaagggcggatccaagatcgccggcccggaagtgccccacgccagtgtgaccagcaccaccggatccaagctcaacggcccggcggcgctccatgccggcaatgacaacgacagcggcggatccaggctcccaaaccccgcagtgctccatgccagcaaagacatggacaacaacgccgggcggcccaagttcgccagcccggtgttgctccatgctggcgaggacaacaaagccaggaccaagctcgcaatccaggcgggcggtggcggtaacgccggagccggatcgtccaggctcaccagatcggcggcgctccatgccgggaaggacaacggcgccggatccaagcccgccatccaggtggtgccacgcctccatgccggcggcaaggacaacaacgctgggtcgttcaaggctgccagaccgtcggcggccgactccggcgagagcaacgccaaggagggaaagagcaacgtagctggagaacaacgtgcccgtgaggccggcgtgggctgtggcggcgggaagggcaacgccgccgcggtggaggatgtggaccacgacttgcacatctttacggagagggagcggaggaagaagatgaagaacatgttcagcaccctacacgcgctcctcccgcagctccccgacaaggctgacaaggccaccatagtcggggaggctgtaacctacatcaagactctggaaggcaccgtccagaagctggagaagctgaagctggagcgcaagcgcgcgctggcagcgcagcagcagctgatggctggtgccggcagcaaccgcgcgtcgtccgcgcgccatcccgcaccagcgccgtcgtcaccgtcgtcgtcgtcgagggaggcgaacgtggcggacatggtccacggttggcatgcgcagcaggccgccgcgaacaaggccctggcagcggaggccggggcgggcggctcctcctctgccgccgcctcgctgccccgtggagcggtgcccttccccgcgcccgcggcggggttccagacgtggtccgggcagaacgtcgtggtgagcgtggccagcaacgaggcgtacatcaacctgcactccccgcggcagccggcgggcaccctgaccaaggcgctgttcgtgctggagaggcaccgcatcgacgtcgtcacgacgaccatctccacccaggacggcttccacatgttaattcggcttccgcttcggctcgctttccggagaatctgtgtgctgaagacaggttcaagctggcggtgtcggagatgctgcagctgatcaacatctgagctaggccaacgcgctcatgctcgccaatgcatctgagctatgctgctgccgtcgtcgtttcgtgttaagtttggtcgtcgtccaactcttttagtttgtttctcttgttcgtgccaagtttggtcgtcgtcggttgaactcttttatgtctcaagacagctggttagtggttcctagcgtatggtaagtactgtttgaggtttaacccgtcgtggatgtagttgtatgatcgggtttcatgtgtgagagttctaaccaatcactagacatcgtagaacatgatgaaggtctactttgagactgagtggagcggccatgagaatgagagttcgggcctgttaggcacggctccgactccttcaaaaacgattctggctctgagccaattgttttagctccggcttctctctataaaaatagctccagctcgtcagcgctctttattgagagttcttttttagacc

SEQ ID NO: 25146 - DNA, 2745 bp, Zea Mays
aaggattcaagaataccgccgccgaacagcgatgtatcgccatgtgacccccctagaatgaatgaggatacgcgccaacttgtgtatgggccagtcttatatatttgggcccaataccacgtcccagcccgagtgacatatatagatatatggaacctgatttcaaattgagcgggaagaaggaaccgtagtcctcaacaccaccttctcccgtggatcaagatgcatggaaatggtgagatggatgagttcaggagctcctcttctgaatcagaaatgggtcttgaatgtcagagtgttatgtgtcttggtcataaaaaattctagatatgcaatatcatattagccaatatgtggcgctttatgctatctgtaaccttgatgatgaggcacacaagctgctaaaaatgctgttggtggtgtaaatcttttctccatcgcaaatcccccactccccctccgatcccccctgcgaccctgcccaccctcctctcctcctgcatccaccgcgccatgtctcaggaaggagccaacctgccgcaagaagtggtggggagccatgatcaggccaccgccccccacggcagcatccctgcaccggctgattccaaccccagctctgtcagcaacctggccagcgccgtcaacaacggcgggtcgtctgagtgtgccagcccagcggtgctctctgccggcgaggacaacaacgcggcgtcgtccaagaccgccagcccggcggtgctctctgccggcgaggacaacaacaaggccaagctcaagctcgcgagcccggcatcgctccttgccggcgaggagaagggcaacaacgctgatgagttcaagctcgctagcccaaggatgctccatgactgcgacgacaacaatgccgggtcccatgctggcgtgcgcaactgcaacgccgcccagtccaagctcgccaacccggcggttctccatgccggcgatgacaagaagggcggatccaagatcgccggcccggaagtgccccacgccagtgtgaccagcaccaccggatccaagctcaacggcccggcggcgctccatgccggcaatgacaacgacagcggcggatccaggctcccaaaccccgcagtgctccatgccagcaaagacatggacaacaacgccgggcggcccaagttcgccagcccggtgttgctccatgctggcgaggacaacaaagccaggaccaagctcgcaatccaggcgggcggtggcggtaacgccggagccggatcgtccaggctcaccagatcggcggcgctccatgccgggaaggacaacggcgccggatccaagcccgccatccaggtggtgccacgcctccatgccggcggcaaggacaacaacgctgggtcgttcaaggctgccagaccgtcggcggccgactccggcgagagcaacgccaaggagggaaagagcaacgtagctggagaacaacgtgcccgtgaggccggcgtgggctgtggcggcgggaagggcaacgccgccgcggtggaggatgtggaccacgacttgcacatctttacggagagggagcggaggaagaagatgaagaacatgttcagcaccctacacgcgctcctcccgcagctccccgacaaggctgacaaggccaccatagtcggggaggctgtaacctacatcaagactctggaaggcaccgtccagaagctggagaagctgaagctggagcgcaagcgcgcgctggcagcgcagcagcagctgatggctggtgccggcagcaaccgcgcgtcgtccgcgcgccatcccgcaccagcgccgtcgtcaccgtcgtcgtcgtcgagggaggcgaacgtggcggacatggtccacggttggcatgcgcagcaggccgccgcgaacaaggccctggcagcggaggccggggcgggcggctcctcctctgccgccgcctcgctgccccgtggagcggtgcccttccccgcgcccgcggcggggttccagacgtggtccgggcagaacgtcgtggtgagcgtggccagcaacgaggcgtacatcaacctgcactccccgcggcagccggcgggcaccctgaccaaggcgctgttcgtgctggagaggcaccgcatcgacgtcgtcacgacgaccatctccacccaggacggcttccacatgtacggcatccatgcacgcgttaattcggcttccgcttcggctcgctttccggagaatctgtgtgctgaagacaggttcaagctggcggtgtcggagatgctgcagctgatcaacatctgagctaggccaacgcgctcatgctcgccaatgcatctgagctatgctgctgccgtcgtcgtttcgtgttaagtttggtcgtcgtccaactcttttagtttgtttctcttgttcgtgccaagtttggtcgtcgtcggttgaactcttttatgtctcaagacagctggttagtggttcctagcgtatggtaagtactgtttgaggtttaacccgtcgtggatgtagttgtatgatcgggtttcatgtgtgagagttctaaccaatcactagacatcgtagaacatgatgaaggtctactttgagactgagtggagcggccatgagaatgagagttcgggcctgttaggcacggctccgactccttcaaaaacgattctggctctgagccaattgttttagctccggcttctctctataaaaatagctccagctcgtcagcgctctttattgagagttcttttttagacc

SEQ ID NO: 25147 - DNA, 2787 bp, Zea Mays
aggcttcccttcagcaaacagcctggtagttctattcagccgcttaccgcgcgctctcttgtgcggcaattgggcgaccgccgccgccctaactcaggtgccgaggtcttcgccagtaacttcaacaggtcctcgcctggtccttcgctggcgaggagcatctccaccaggtgcgaatcatggggaagtttatgcatgacaatccaatgctatcatgtagtgaagtaaacagacatcactatagtcttgcggcagttgctgtcggtttgggactaggagttgccgggttatgcaaggcattgtatagtggtctgtccataccatgggtttctccaaggaatttgttttcgggatcagggagggcatactatgttggaggtctgcgaaatcttggcaacaattgctttcttaatgtcatcctccaggcacttgccagctgtgatggttttatttcctttctagataatttgcttgcaactgatggcttgctacctgaagaaaaggctgtaagaatgcctcttcttcttgctttaagttctctcttggaaggtaagatttatactatggactattgaacttcttatcattttcgagatccccactgtgaacttctaaatacgactcagtgtccattgcaagtattgtccttttactgcaggcaatttcaggggggtgggggcttctattgagaattttttagctgtatgtgaacccctataatacagtacatggcttataagttcaaagatcatgtggggtcctcagctgcatatgcaacataatgcattcaccggtggtggaatccatgcaacctataatttttttgacagtgttttctcctatgctctgattttcttgggaattgataggtccttgttatttgcattgcttggattctttgctccacataatatgttcttgcttctatataaaaccactgaatgggacttctttttatctttttcgctttattcttctgacattggtcatgtcctgcaaaatataactgcatggcactctattcttgatgtccgccatttgattataaatgcttttttgttacatgctcacaaattgttattattgtacttgagctttgcatgttgcagacttaatcatagttcgagatgaaaggactgtgttgaatccacatggagtaatgcatgctttgagtttgtatgttggtcacttcaatctgaccagacagcaggatgcttcagaagcttttctccatcttctgatctcattgagggatgaatttgcccattgttatgtaccacataggagttctctggcagacatcaccctttctgactccaaagtatacaagcaaagggaaggtaacctgcctgaatgcaagcgctggaaacaaaacctatttggcccctttgatgggacagttggcagcatattgtcttgcagaaactgttcttctgtgctgtcattggacttcgagaatttccactgcttgcctctttcgccagtccttaatgcaaatggagatatttttggtggattgcctaaagtacttcactgtggtggagcatcttgacaactatcgttgtgaccggtgttggcacatcattgctgccaaatatctttctcttagatcagaagttgatgaggaaaaggttagcaagcttcaatcctgtgtcgactatggcacttgcagttgcagggatatgttccccctggagtcactgccatgttcatcatcttcacgagcaacaaagcagctgattatcagtcagtgcccgaagattctgtgcattcattttctacgcgcttcagtcggtcttgacggcgagcccatcaaacatcagggacatatttctttccctttgcttctcaatctgtccccgtttacgggaggcgcgtcgagtgctggacctttagcaatgaatgcgcaaagagatggccagcaagctctccatctataccggcaactgaatatgcaggctaatgctgacgtgtccagtagttcatcatcaccaccgcagctatcaaggagcaagttatacggtctcgcggccgtcgtggagcactacgggaagtgtggaggagggcactacgcagtctacaggagagtcgcgtcgaatcctgaccctgatgatccaggcaaacctgttgcaggccttggcaagcggtggttttacatctcagacggctacgtgtcagaagttccagaggaggatgtactgcgcgcggaggccacgctccttttctacgagagattgtagccgcttgttgagtagctaacgtgtgcatcataacaaaatctaggacagttttgttgtgaggagtctgatgttcttagcggtaccgtgagcttccaagtagacgaggaaactagctgtggcacaaaaaacaaagcctctcggcatctcgacgtggactgcaggcgtgtcttaggcagtgtggcctactttttttttgggtccttgcaaacgttaaaataattcttcatgcaatacgtcagtgaggtcttcctcttgagaataaatcagatcaccattgttttgcgacattgtaagcagcagatggtggatcgtgtgagttttgttctgctgacgatgaaatgcgtgttaatcaactttcggctcaccgtagtttctgttttctttttatatagggaggtacagcgaacagcgtaataaaatgccaaaatgcagttccactataagtactagtttgggaacatgtttttttaagggatttttatttttctttaaaaaattaatttattttttttagaaaataggaatttcttgaaaaaatgaagtttct

SEQ ID NO: 25148 - DNA, 2121 bp, Zea Mays
aggcttcccttcagcaaacagcctggtagttctattcagccgcttaccgcgcgctctcttgtgcggcaattgggcgaccgccgccgccctaactcaggtgccgaggtcttcgccagtaacttcaacaggtcctcgcctggtccttcgctggcgaggagcatctccaccagttgctgtcggtttgggactaggagttgccgggttatgcaaggcattgtatagtggtctgtccataccatgggtttctccaaggaatttgttttcgggatcagggagggcatactatgttggaggtctgcgaaatcttggcaacaattgctttcttaatgtcatcctccagagataatttgcttgcaactgatggcttgctacctgaagaaaaggctgtaagaatgcctcttcttcttgctttaagttctctcttggaagacttaatcatagttcgagatgaaaggactgtgttgaatccacatggagtaatgcatgctttgagtttgtatgttggtcacttcaatctgaccagacagcaggatgcttcagaagcttttctccatcttctgatctcattgagggatgaatttgcccattgttatgtaccacataggagttctctggcagacatcaccctttctgactccaaagtatacaagcaaagggaaggtaacctgcctgaatgcaagcgctggaaacaaaacctatttggcccctttgatgggacagttggcagcatattgtcttgcagaaactgttcttctgtgctgtcattggacttcgagaatttccactgcttgcctctttcgccagtccttaatgcaaatggagatattaccagtgggtgtagtttggtggattgcctaaagtacttcactgtggtggagcatcttgacaactatcgttgtgaccggtgttggcacatcattgctgccaaatatctttctcttagatcagaagttgatgaggaaaaggttagcaagcttcaatcctgtgtcgactatggcacttgcagttgcagggatatgttccccctggagtcactgccatgttcatcatcttcacgagcaacaaagcagctgattatcagtcagtgcccgaagattctgtgcattcattttctacgcgcttcagtcggtcttgacggcgagcccatcaaacatcagggacatatttctttccctttgcttctcaatctgtccccgtttacgggaggcgcgtcgagtgctggacctttagcaatgaatgcgcaaagagatggccagcaagctctccatctataccggcaactgaatatgcaggctaatgctgacgtgtccagtagttcatcatcaccaccgcagctatcaaggagcaagttatacggtctcgcggccgtcgtggagcactacgggaagtgtggaggagggcactacgcagtctacaggagagtcgcgtcgaatcctgaccctgatgatccaggcaaacctgttgcaggccttggcaagcggtggttttacatctcagacggctacgtgtcagaagttccagaggaggatgtactgcgcgcggaggccacgctccttttctacgagagattgtagccgcttgttgagtagctaacgtgtgcatcataacaaaatctaggacagttttgttgtgaggagtctgatgttcttagcggtaccgtgagcttccaagtagacgaggaaactagctgtggcacaaaaaacaaagcctctcggcatctcgacgtggactgcaggcgtgtcttaggcagtgtggcctactttttttttgggtccttgcaaacgttaaaataattcttcatgcaatacgtcagtgaggtcttcctcttgagaataaatcagatcaccattgttttgcgacattgtaagcagcagatggtggatcgtgtgagttttgttctgctgacgatgaaatgcgtgttaatcaactttcggctcaccgtagtttctgttttctttttatatagggaggtacagcgaacagcgtaataaaatgccaaaatgcagttccactataagtactagtttgggaacatgtttttttaagggatttttatttttctttaaaaaattaatttattttttttagaaaataggaatttcttgaaaaaatgaagtttct

SEQ ID NO: 25149 - DNA, 2698 bp, Zea Mays
aggcttcccttcagcaaacagcctggtagttctattcagccgcttaccgcgcgctctcttgtgcggcaattgggcgaccgccgccgccctaactcaggtgccgaggtcttcgccagtaacttcaacaggtcctcgcctggtccttcgctggcgaggagcatctccaccaggtgcgaatcatggggaagtttatgcatgacaatccaatgctatcatgtagtgaagtaaacagacatcactatagtcttgcggcagttgctgtcggtttgggactaggagttgccgggttatgcaaggcattgtatagtggtctgtccataccatgggtttctccaaggaatttgttttcgggatcagggagggcatactatgttggaggtctgcgaaatcttggcaacaattgctttcttaatgtcatcctccaggcacttgccagctgtgatggttttatttcctttctagataatttgcttgcaactgatggcttgctacctgaagaaaaggctgtaagaatgcctcttcttcttgctttaagttctctcttggaaggtaagatttatactatggactattgaacttcttatcattttcgagatccccactgtgaacttctaaatacgactcagtgtccattgcaagtattgtccttttactgcaggcaatttcaggggggtgggggcttctattgagaattttttagctgtatgtgaacccctataatacagtacatggcttataagttcaaagatcatgtggggtcctcagctgcatatgcaacataatgcattcaccggtggtggaatccatgcaacctataatttttttgacagtgttttctcctatgctctgattttcttgggaattgataggtccttgttatttgcattgcttggattctttgctccacataatatgttcttgcttctatataaaaccactgaatgggacttctttttatctttttcgctttattcttctgacattggtcatgtcctgcaaaatataactgcatggcactctattcttgatgtccgccatttgattataaatgcttttttgttacatgctcacaaattgttattattgtacttgagctttgcatgttgcagacttaatcatagttcgagatgaaaggactgtgttgaatccacatggagtaatgcatgctttgagtttgtatgttggtcacttcaatctgaccagacagcaggatgcttcagaagcttttctccatcttctgatctcattgagggatgaatttgcccattgttatgtaccacataggagttctctggcagacatcaccctttctgactccaaagtatacaagcaaagggaagctgtcattggacttcgagaatttccactgcttgcctctttcgccagtccttaatgcaaatggagatatttgggtgtagtttggtggattgcctaaagtacttcactgtggtggagcatcttgacaactatcgttgtgaccggtgttggcacatcattgctgccaaatatctttctcttagatcagaagttgatgaggaaaaggttagcaagcttcaatcctgtgtcgactatggcacttgcagttgcagggatatgttccccctggagtcactgccatgttcatcatcttcacgagcaacaaagcagctgattatcagtcagtgcccgaagattctgtgcattcattttctacgcgcttcagtcggtcttgacggcgagcccatcaaacatcagggacatatttctttccctttgcttctcaatctgtccccgtttacgggaggcgcgtcgagtgctggacctttagcaatgaatgcgcaaagagatggccagcaagctctccatctataccggcaactgaatatgcaggctaatgctgacgtgtccagtagttcatcatcaccaccgcagctatcaaggagcaagttatacggtctcgcggccgtcgtggagcactacgggaagtgtggaggagggcactacgcagtctacaggagagtcgcgtcgaatcctgaccctgatgatccaggcaaacctgttgcaggccttggcaagcggtggttttacatctcagacggctacgtgtcagaagttccagaggaggatgtactgcgcgcggaggccacgctccttttctacgagagattgtagccgcttgttgagtagctaacgtgtgcatcataacaaaatctaggacagttttgttgtgaggagtctgatgttcttagcggtaccgtgagcttccaagtagacgaggaaactagctgtggcacaaaaaacaaagcctctcggcatctcgacgtggactgcaggcgtgtcttaggcagtgtggcctactttttttttgggtccttgcaaacgttaaaataattcttcatgcaatacgtcagtgaggtcttcctcttgagaataaatcagatcaccattgttttgcgacattgtaagcagcagatggtggatcgtgtgagttttgttctgctgacgatgaaatgcgtgttaatcaactttcggctcaccgtagtttctgttttctttttatatagggaggtacagcgaacagcgtaataaaatgccaaaatgcagttccactataagtactagtttgggaacatgtttttttaagggatttttatttttctttaaaaaattaatttattttttttagaaaataggaatttcttgaaaaaatgaagtttct

SEQ ID NO: 25150 - DNA, 2446 bp, Zea Mays
aggcttcccttcagcaaacagcctggtagttctattcagccgcttaccgcgcgctctcttgtgcggcaattgggcgaccgccgccgccctaactcaggtgccgaggtcttcgccagtaacttcaacaggtcctcgcctggtccttcgctggcgaggagcatctccaccaggtatgcacaccttttctcctcccttcctgctgttcaaaacagcaactgaaccctaacttaggctatctggctatttgcattcggatctgttctgagtcaagtgtatacatgcctgctaacttcgttgtttttcttggaaagacaccccagacacaaccttgtttttttactatttatttgttgacacttggctgccttatttgcagtactatcacatcaatgccccgacaatgatttctttgatttcatcctttggtaaattttcgtattaacaaattctatgaagactttctgctggttcaggtgcgaatcatggggaagtttatgcatgacaatccaatgctatcatgtagtgaagtaaacagacatcactatagtcttgcggcagttgctgtcggtttgggactaggagttgccgggttatgcaaggcattgtatagtggtctgtccataccatgggtttctccaaggaatttgttttcgggatcagggagggcatactatgttggaggtctgcgaaatcttggcaacaattgctttcttaatgtcatcctccaggcacttgccagctgtgatggttttatttcctttctagataatttgcttgcaactgatggcttgctacctgaagaaaaggctgtaagaatgcctcttcttcttgctttaagttctctcttggaagacttaatcatagttcgagatgaaaggactgtgttgaatccacatggagtaatgcatgctttgagtttgtatgttggtcacttcaatctgaccagacagcaggatgcttcagaagcttttctccatcttctgatctcattgagggatgaatttgcccattgttatgtaccacataggagttctctggcagacatcaccctttctgactccaaagtatacaagcaaagggaagctgtcattggacttcgagaatttccactgcttgcctctttcgccagtccttaatgcaaatggagatattaccagtgggtgtagtttggtggattgcctaaagtacttcactgtggtggagcatcttgacaactatcgttgtgaccggtgttggcacatcattgctgccaaatatctttctcttagatcagaagttgatgaggaaaaggttagcaagcttcaatcctgtgtcgactatggcacttgcagttgcagggatatgttccccctggagtcactgccatgttcatcatcttcacgagcaacaaagcagctgattatcagtcagtgcccgaagattctgtgcattcattttctacgcgcttcagtcggtcttgacggcgagcccatcaaacatcagggacatatttctttccctttgcttctcaatctgtccccgtttacgggaggcgcgtcgagtgctggacctttagcaatgaatgcgcaaagagatggccagcaagctctccatctataccggcaactgaatatgcaggctaatgctgacgtgtccagtagttcatcatcaccaccgcagctatcaaggagcaagttatacggtctcgcggccgtcgtggagcactacgggaagtgtggaggagggcactacgcagtctacaggagagtcgcgtcgaatcctgaccctgatgatccaggcaaacctgttgcaggccttggcaagcggtggttttacatctcagacggctacgtgtcagaagttccagaggaggatgtactgcgcgcggaggccacgctccttttctacgagagattgtagccgcttgttgagtagctaacgtgtgcatcataacaaaatctaggacagttttgttgtgaggagtctgatgttcttagcggtaccgtgagcttccaagtagacgaggaaactagctgtggcacaaaaaacaaagcctctcggcatctcgacgtggactgcaggcgtgtcttaggcagtgtggcctactttttttttgggtccttgcaaacgttaaaataattcttcatgcaatacgtcagtgaggtcttcctcttgagaataaatcagatcaccattgttttgcgacattgtaagcagcagatggtggatcgtgtgagttttgttctgctgacgatgaaatgcgtgttaatcaactttcggctcaccgtagtttctgttttctttttatatagggaggtacagcgaacagcgtaataaaatgccaaaatgcagttccactataagtactagtttgggaacatgtttttttaagggatttttatttttctttaaaaaattaatttattttttttagaaaataggaatttcttgaaaaaatgaagtttct

SEQ ID NO: 25151 - DNA, 2657 bp, Zea Mays
aggcttcccttcagcaaacagcctggtagttctattcagccgcttaccgcgcgctctcttgtgcggcaattgggcgaccgccgccgccctaactcaggtgccgaggtcttcgccagtaacttcaacaggtcctcgcctggtccttcgctggcgaggagcatctccaccaggtgcgaatcatggggaagtttatgcatgacaatccaatgctatcatgtagtgaagtaaacagacatcactatagtcttgcggcagttgctgtcggtttgggactaggagttgccgggttatgcaaggcattgtatagtggtctgtccataccatgggtttctccaaggaatttgttttcgggatcagggagggcatactatgttggaggtctgcgaaatcttggcaacaattgctttcttaatgtcatcctccaggcacttgccagctgtgatggttttatttcctttctagataatttgcttgcaactgatggcttgctacctgaagaaaaggctgtaagaatgcctcttcttcttgctttaagttctctcttggaagacttaatcatagttcgagatgaaaggactgtgttgaatccacatggagtaatgcatgctttgagtttgtatgttggtcacttcaatctgaccagacagcaggatgcttcagaagcttttctccatcttctgatctcattgagggatgaatttgcccattgttatgtaccacataggagttctctggcagacatcaccctttctgactccaaagtatacaagcaaagggaaggtaacctgcctgaatgcaagcgctggaaacaaaacctatttggcccctttgatgggacagttggcagcatattgtcttgcagaaactgttcttctgtggtagattcctaatttcctatgcttcttattctgtcactgttgaactgtggcttataaaaaagtaacctactgttgtctttcatatatgaatgcattttgttccggatataccactggatacatagatattgacacgatgtccagtgcatgcccctacctttcctagccgtggtaaaattaaagaattattattatggaagtaatttagccaacaacaagtgatgctattttcatattgccaatcagttattttgcgcattttgacagttagcttaaaatactcctgttttgttaattttaatgttctcccttgttacatatctcacagctgtcattggacttcgagaatttccactgcttgcctctttcgccagtccttaatgcaaatggagatattaccagtgggtgtagtttggtggattgcctaaagtacttcactgtggtggagcatcttgacaactatcgttgtgaccggtgttggcacatcattgctgccaaatatctttctcttagatcagaagttgatgaggaaaaggttagcaagcttcaatcctgtgtcgactatggcacttgcagttgcagggatatgttccccctggagtcactgccatgttcatcatcttcacgagcaacaaagcagctgattatcagtcagtgcccgaagattctgtgcattcattttctacgcgcttcagtcggtcttgacggcgagcccatcaaacatcagggacatatttctttccctttgcttctcaatctgtccccgtttacgggaggcgcgtcgagtgctggacctttagcaatgaatgcgcaaagagatggccagcaagctctccatctataccggcaactgaatatgcaggtgagcagacgtcttacctactggagggtacttaccaagccagccgtgtaaggaggaagcagcgaacaatagtggccactcgattcacgctaatgctgacgtgtccagtagttcatcatcaccaccgcagctatcaaggagcaagttatacggtctcgcggccgtcgtggagcactacgggaagtgtggaggagggcactacgcagtctacaggagagtcgcgtcgaatcctgaccctgatgatccaggcaaacctgttgcaggccttggcaagcggtggttttacatctcagacggctacgtgtcagaagttccagaggaggatgtactgcgcgcggaggccacgctccttttctacgagagattgtagccgcttgttgagtagctaacgtgtgcatcataacaaaatctaggacagttttgttgtgaggagtctgatgttcttagcggtaccgtgagcttccaagtagacgaggaaactagctgtggcacaaaaaacaaagcctctcggcatctcgacgtggactgcaggcgtgtcttaggcagtgtggcctactttttttttgggtccttgcaaacgttaaaataattcttcatgcaatacgtcagtgaggtcttcctcttgagaataaatcagatcaccattgttttgcgacattgtaagcagcagatggtggatcgtgtgagttttgttctgctgacgatgaaatgcgtgttaatcaactttcggctcaccgtagtttctgttttctttttatatagggaggtacagcgaacagcgtaataaaatgccaaaatgcagttccactataagtactagtttgggaacatgtttttttaagggatttttatttttctttaaaaaattaatttattttttttagaaaataggaatttcttgaaaaaatgaagtttct

SEQ ID NO: 25152 - DNA, 2801 bp, Zea Mays
aggcttcccttcagcaaacagcctggtagttctattcagccgcttaccgcgcgctctcttgtgcggcaattgggcgaccgccgccgccctaactcaggtgccgaggtcttcgccagtaacttcaacaggtcctcgcctggtccttcgctggcgaggagcatctccaccaggtgcgaatcatggggaagtttatgcatgacaatccaatgctatcatgtagtgaagtaaacagacatcactatagtcttgcggcagttgctgtcggtttgggactaggagttgccgggttatgcaaggcattgtatagtggtctgtccataccatgggtttctccaaggaatttgttttcgggatcagggagggcatactatgttggaggtctgcgaaatcttggcaacaattgctttcttaatgtcatcctccaggcacttgccagctgtgatggttttatttcctttctagataatttgcttgcaactgatggcttgctacctgaagaaaaggctgtaagaatgcctcttcttcttgctttaagttctctcttggaaggtaagatttatactatggactattgaacttcttatcattttcgagatccccactgtgaacttctaaatacgactcagtgtccattgcaagtattgtccttttactgcaggcaatttcaggggggtgggggcttctattgagaattttttagctgtatgtgaacccctataatacagtacatggcttataagttcaaagatcatgtggggtcctcagctgcatatgcaacataatgcattcaccggtggtggaatccatgcaacctataatttttttgacagtgttttctcctatgctctgattttcttgggaattgataggtccttgttatttgcattgcttggattctttgctccacataatatgttcttgcttctatataaaaccactgaatgggacttctttttatctttttcgctttattcttctgacattggtcatgtcctgcaaaatataactgcatggcactctattcttgatgtccgccatttgattataaatgcttttttgttacatgctcacaaattgttattattgtacttgagctttgcatgttgcagacttaatcatagttcgagatgaaaggactgtgttgaatccacatggagtaatgcatgctttgagtttgtatgttggtcacttcaatctgaccagacagcaggatgcttcagaagcttttctccatcttctgatctcattgagggatgaatttgcccattgttatgtaccacataggagttctctggcagacatcaccctttctgactccaaagtatacaagcaaagggaaggtaacctgcctgaatgcaagcgctggaaacaaaacctatttggcccctttgatgggacagttggcagcatattgtcttgcagaaactgttcttctgtgctgtcattggacttcgagaatttccactgcttgcctctttcgccagtccttaatgcaaatggagatattaccagtgggtgtagtttggtggattgcctaaagtacttcactgtggtggagcatcttgacaactatcgttgtgaccggtgttggcacatcattgctgccaaatatctttctcttagatcagaagttgatgaggaaaaggttagcaagcttcaatcctgtgtcgactatggcacttgcagttgcagggatatgttccccctggagtcactgccatgttcatcatcttcacgagcaacaaagcagctgattatcagtcagtgcccgaagattctgtgcattcattttctacgcgcttcagtcggtcttgacggcgagcccatcaaacatcagggacatatttctttccctttgcttctcaatctgtccccgtttacgggaggcgcgtcgagtgctggacctttagcaatgaatgcgcaaagagatggccagcaagctctccatctataccggcaactgaatatgcaggctaatgctgacgtgtccagtagttcatcatcaccaccgcagctatcaaggagcaagttatacggtctcgcggccgtcgtggagcactacgggaagtgtggaggagggcactacgcagtctacaggagagtcgcgtcgaatcctgaccctgatgatccaggcaaacctgttgcaggccttggcaagcggtggttttacatctcagacggctacgtgtcagaagttccagaggaggatgtactgcgcgcggaggccacgctccttttctacgagagattgtagccgcttgttgagtagctaacgtgtgcatcataacaaaatctaggacagttttgttgtgaggagtctgatgttcttagcggtaccgtgagcttccaagtagacgaggaaactagctgtggcacaaaaaacaaagcctctcggcatctcgacgtggactgcaggcgtgtcttaggcagtgtggcctactttttttttgggtccttgcaaacgttaaaataattcttcatgcaatacgtcagtgaggtcttcctcttgagaataaatcagatcaccattgttttgcgacattgtaagcagcagatggtggatcgtgtgagttttgttctgctgacgatgaaatgcgtgttaatcaactttcggctcaccgtagtttctgttttctttttatatagggaggtacagcgaacagcgtaataaaatgccaaaatgcagttccactataagtactagtttgggaacatgtttttttaagggatttttatttttctttaaaaaattaatttattttttttagaaaataggaatttcttgaaaaaatgaagtttct

SEQ ID NO: 25153 - DNA, 2296 bp, Zea Mays
aggcttcccttcagcaaacagcctggtagttctattcagccgcttaccgcgcgctctcttgtgcggcaattgggcgaccgccgccgccctaactcaggtgccgaggtcttcgccagtaacttcaacaggtcctcgcctggtccttcgctggcgaggagcatctccaccaggtgcgaatcatggggaagtttatgcatgacaatccaatgctatcatgtagtgaagtaaacagacatcactatagtcttgcggcagttgctgtcggtttgggactaggagttgccgggttatgcaaggcattgtatagtggtctgtccataccatgggtttctccaaggaatttgttttcgggatcagggagggcatactatgttggaggtctgcgaaatcttggcaacaattgctttcttaatgtcatcctccaggcacttgccagctgtgatggttttatttcctttctagataatttgcttgcaactgatggcttgctacctgaagaaaaggctgtaagaatgcctcttcttcttgctttaagttctctcttggaaggtaagatttatactatggactattgaacttcttatcattttcgagatccccactgtgaacttctaaatacgactcagtgtccattgcaagtattgtccttttactgcaggcaatttcaggggggtgggggcttctattgagaattttttagctacttaatcatagttcgagatgaaaggactgtgttgaatccacatggagtaatgcatgctttgagtttgtatgttggtcacttcaatctgaccagacagcaggatgcttcagaagcttttctccatcttctgatctcattgagggatgaatttgcccattgttatgtaccacataggagttctctggcagacatcaccctttctgactccaaagtatacaagcaaagggaagctgtcattggacttcgagaatttccactgcttgcctctttcgccagtccttaatgcaaatggagatattaccagtgggtgtagtttggtggattgcctaaagtacttcactgtggtggagcatcttgacaactatcgttgtgaccggtgttggcacatcattgctgccaaatatctttctcttagatcagaagttgatgaggaaaaggttagcaagcttcaatcctgtgtcgactatggcacttgcagttgcagggatatgttccccctggagtcactgccatgttcatcatcttcacgagcaacaaagcagctgattatcagtcagtgcccgaagattctgtgcattcattttctacgcgcttcagtcggtcttgacggcgagcccatcaaacatcagggacatatttctttccctttgcttctcaatctgtccccgtttacgggaggcgcgtcgagtgctggacctttagcaatgaatgcgcaaagagatggccagcaagctctccatctataccggcaactgaatatgcaggctaatgctgacgtgtccagtagttcatcatcaccaccgcagctatcaaggagcaagttatacggtctcgcggccgtcgtggagcactacgggaagtgtggaggagggcactacgcagtctacaggagagtcgcgtcgaatcctgaccctgatgatccaggcaaacctgttgcaggccttggcaagcggtggttttacatctcagacggctacgtgtcagaagttccagaggaggatgtactgcgcgcggaggccacgctccttttctacgagagattgtagccgcttgttgagtagctaacgtgtgcatcataacaaaatctaggacagttttgttgtgaggagtctgatgttcttagcggtaccgtgagcttccaagtagacgaggaaactagctgtggcacaaaaaacaaagcctctcggcatctcgacgtggactgcaggcgtgtcttaggcagtgtggcctactttttttttgggtccttgcaaacgttaaaataattcttcatgcaatacgtcagtgaggtcttcctcttgagaataaatcagatcaccattgttttgcgacattgtaagcagcagatggtggatcgtgtgagttttgttctgctgacgatgaaatgcgtgttaatcaactttcggctcaccgtagtttctgttttctttttatatagggaggtacagcgaacagcgtaataaaatgccaaaatgcagttccactataagtactagtttgggaacatgtttttttaagggatttttatttttctttaaaaaattaatttattttttttagaaaataggaatttcttgaaaaaatgaagtttct

SEQ ID NO: 25154 - DNA, 2796 bp, Zea Mays
aggcttcccttcagcaaacagcctggtagttctattcagccgcttaccgcgcgctctcttgtgcggcaattgggcgaccgccgccgccctaactcaggtgccgaggtcttcgccagtaacttcaacaggtcctcgcctggtccttcgctggcgaggagcatctccaccaggtgcgaatcatggggaagtttatgcatgacaatccaatgctatcatgtagtgaagtaaacagacatcactatagtcttgcggcagttgctgtcggtttgggactaggagttgccgggttatgcaaggcattgtatagtggtctgtccataccatgggtttctccaaggaatttgttttcgggatcagggagggcatactatgttggaggtctgcgaaatcttggcaacaattgctttcttaatgtcatcctccaggcacttgccagctgtgatggttttatttcctttctagataatttgcttgcaactgatggcttgctacctgaagaaaaggctgtaagaatgcctcttcttcttgctttaagttctctcttggaaggtaagatttatactatggactattgaacttcttatcattttcgagatccccactgtgaacttctaaatacgactcagtgtccattgcaagtattgtccttttactgcaggcaatttcaggggggtgggggcttctattgagaattttttagctgtatgtgaacccctataatacagtacatggcttataagttcaaagatcatgtggggtcctcagctgcatatgcaacataatgcattcaccggtggtggaatccatgcaacctataatttttttgacagtgttttctcctatgctctgattttcttgggaattgataggtccttgttatttgcattgcttggattctttgctccacataatatgttcttgcttctatataaaaccactgaatgggacttctttttatctttttcgctttattcttctgacattggtcatgtcctgcaaaatataactgcatggcactctattcttgatgtccgccatttgattataaatgcttttttgttacatgctcacaaattgttattattgtacttgagctttgcatgttgcagacttaatcatagttcgagatgaaaggactgtgttgaatccacatggagtaatgcatgctttgagtttgtatgttggtcacttcaatctgaccagacagcaggatgcttcagaagcttttctccatcttctgatctcattgagggatgaatttgcccattgttatgtaccacataggagttctctggcagacatcaccctttctgactccaaagtatacaagcaaagggaaggtaacctgcctgaatgcaagcgctggaaacaaaacctatttggcccctttgatgggacagttggcagcatattgtcttgcagaaactgttcttctgtgctgtcattggacttcgagaatttccactgcttgcctctttcgccagtccttaatgcaaatggagatatttgggtgtagtttggtggattgcctaaagtacttcactgtggtggagcatcttgacaactatcgttgtgaccggtgttggcacatcattgctgccaaatatctttctcttagatcagaagttgatgaggaaaaggttagcaagcttcaatcctgtgtcgactatggcacttgcagttgcagggatatgttccccctggagtcactgccatgttcatcatcttcacgagcaacaaagcagctgattatcagtcagtgcccgaagattctgtgcattcattttctacgcgcttcagtcggtcttgacggcgagcccatcaaacatcagggacatatttctttccctttgcttctcaatctgtccccgtttacgggaggcgcgtcgagtgctggacctttagcaatgaatgcgcaaagagatggccagcaagctctccatctataccggcaactgaatatgcaggctaatgctgacgtgtccagtagttcatcatcaccaccgcagctatcaaggagcaagttatacggtctcgcggccgtcgtggagcactacgggaagtgtggaggagggcactacgcagtctacaggagagtcgcgtcgaatcctgaccctgatgatccaggcaaacctgttgcaggccttggcaagcggtggttttacatctcagacggctacgtgtcagaagttccagaggaggatgtactgcgcgcggaggccacgctccttttctacgagagattgtagccgcttgttgagtagctaacgtgtgcatcataacaaaatctaggacagttttgttgtgaggagtctgatgttcttagcggtaccgtgagcttccaagtagacgaggaaactagctgtggcacaaaaaacaaagcctctcggcatctcgacgtggactgcaggcgtgtcttaggcagtgtggcctactttttttttgggtccttgcaaacgttaaaataattcttcatgcaatacgtcagtgaggtcttcctcttgagaataaatcagatcaccattgttttgcgacattgtaagcagcagatggtggatcgtgtgagttttgttctgctgacgatgaaatgcgtgttaatcaactttcggctcaccgtagtttctgttttctttttatatagggaggtacagcgaacagcgtaataaaatgccaaaatgcagttccactataagtactagtttgggaacatgtttttttaagggatttttatttttctttaaaaaattaatttattttttttagaaaataggaatttcttgaaaaaatgaagtttct

SEQ ID NO: 25155 - DNA, 2818 bp, Zea Mays
aggcttcccttcagcaaacagcctggtagttctattcagccgcttaccgcgcgctctcttgtgcggcaattgggcgaccgccgccgccctaactcaggtgccgaggtcttcgccagtaacttcaacaggtcctcgcctggtccttcgctggcgaggagcatctccaccagactttctgctggttcaggtgcgaatcatggggaagtttatgcatgacaatccaatgctatcatgtagtgaagtaaacagacatcactatagtcttgcggcagttgctgtcggtttgggactaggagttgccgggttatgcaaggcattgtatagtggtctgtccataccatgggtttctccaaggaatttgttttcgggatcagggagggcatactatgttggaggtctgcgaaatcttggcaacaattgctttcttaatgtcatcctccaggcacttgccagctgtgatggttttatttcctttctagataatttgcttgcaactgatggcttgctacctgaagaaaaggctgtaagaatgcctcttcttcttgctttaagttctctcttggaaggtaagatttatactatggactattgaacttcttatcattttcgagatccccactgtgaacttctaaatacgactcagtgtccattgcaagtattgtccttttactgcaggcaatttcaggggggtgggggcttctattgagaattttttagctgtatgtgaacccctataatacagtacatggcttataagttcaaagatcatgtggggtcctcagctgcatatgcaacataatgcattcaccggtggtggaatccatgcaacctataatttttttgacagtgttttctcctatgctctgattttcttgggaattgataggtccttgttatttgcattgcttggattctttgctccacataatatgttcttgcttctatataaaaccactgaatgggacttctttttatctttttcgctttattcttctgacattggtcatgtcctgcaaaatataactgcatggcactctattcttgatgtccgccatttgattataaatgcttttttgttacatgctcacaaattgttattattgtacttgagctttgcatgttgcagacttaatcatagttcgagatgaaaggactgtgttgaatccacatggagtaatgcatgctttgagtttgtatgttggtcacttcaatctgaccagacagcaggatgcttcagaagcttttctccatcttctgatctcattgagggatgaatttgcccattgttatgtaccacataggagttctctggcagacatcaccctttctgactccaaagtatacaagcaaagggaaggtaacctgcctgaatgcaagcgctggaaacaaaacctatttggcccctttgatgggacagttggcagcatattgtcttgcagaaactgttcttctgtgctgtcattggacttcgagaatttccactgcttgcctctttcgccagtccttaatgcaaatggagatattaccagtgggtgtagtttggtggattgcctaaagtacttcactgtggtggagcatcttgacaactatcgttgtgaccggtgttggcacatcattgctgccaaatatctttctcttagatcagaagttgatgaggaaaaggttagcaagcttcaatcctgtgtcgactatggcacttgcagttgcagggatatgttccccctggagtcactgccatgttcatcatcttcacgagcaacaaagcagctgattatcagtcagtgcccgaagattctgtgcattcattttctacgcgcttcagtcggtcttgacggcgagcccatcaaacatcagggacatatttctttccctttgcttctcaatctgtccccgtttacgggaggcgcgtcgagtgctggacctttagcaatgaatgcgcaaagagatggccagcaagctctccatctataccggcaactgaatatgcaggctaatgctgacgtgtccagtagttcatcatcaccaccgcagctatcaaggagcaagttatacggtctcgcggccgtcgtggagcactacgggaagtgtggaggagggcactacgcagtctacaggagagtcgcgtcgaatcctgaccctgatgatccaggcaaacctgttgcaggccttggcaagcggtggttttacatctcagacggctacgtgtcagaagttccagaggaggatgtactgcgcgcggaggccacgctccttttctacgagagattgtagccgcttgttgagtagctaacgtgtgcatcataacaaaatctaggacagttttgttgtgaggagtctgatgttcttagcggtaccgtgagcttccaagtagacgaggaaactagctgtggcacaaaaaacaaagcctctcggcatctcgacgtggactgcaggcgtgtcttaggcagtgtggcctactttttttttgggtccttgcaaacgttaaaataattcttcatgcaatacgtcagtgaggtcttcctcttgagaataaatcagatcaccattgttttgcgacattgtaagcagcagatggtggatcgtgtgagttttgttctgctgacgatgaaatgcgtgttaatcaactttcggctcaccgtagtttctgttttctttttatatagggaggtacagcgaacagcgtaataaaatgccaaaatgcagttccactataagtactagtttgggaacatgtttttttaagggatttttatttttctttaaaaaattaatttattttttttagaaaataggaatttcttgaaaaaatgaagtttct

SEQ ID NO: 25156 - DNA, 2703 bp, Zea Mays
aggcttcccttcagcaaacagcctggtagttctattcagccgcttaccgcgcgctctcttgtgcggcaattgggcgaccgccgccgccctaactcaggtgccgaggtcttcgccagtaacttcaacaggtcctcgcctggtccttcgctggcgaggagcatctccaccaggtgcgaatcatggggaagtttatgcatgacaatccaatgctatcatgtagtgaagtaaacagacatcactatagtcttgcggcagttgctgtcggtttgggactaggagttgccgggttatgcaaggcattgtatagtggtctgtccataccatgggtttctccaaggaatttgttttcgggatcagggagggcatactatgttggaggtctgcgaaatcttggcaacaattgctttcttaatgtcatcctccaggcacttgccagctgtgatggttttatttcctttctagataatttgcttgcaactgatggcttgctacctgaagaaaaggctgtaagaatgcctcttcttcttgctttaagttctctcttggaaggtaagatttatactatggactattgaacttcttatcattttcgagatccccactgtgaacttctaaatacgactcagtgtccattgcaagtattgtccttttactgcaggcaatttcaggggggtgggggcttctattgagaattttttagctgtatgtgaacccctataatacagtacatggcttataagttcaaagatcatgtggggtcctcagctgcatatgcaacataatgcattcaccggtggtggaatccatgcaacctataatttttttgacagtgttttctcctatgctctgattttcttgggaattgataggtccttgttatttgcattgcttggattctttgctccacataatatgttcttgcttctatataaaaccactgaatgggacttctttttatctttttcgctttattcttctgacattggtcatgtcctgcaaaatataactgcatggcactctattcttgatgtccgccatttgattataaatgcttttttgttacatgctcacaaattgttattattgtacttgagctttgcatgttgcagacttaatcatagttcgagatgaaaggactgtgttgaatccacatggagtaatgcatgctttgagtttgtatgttggtcacttcaatctgaccagacagcaggatgcttcagaagcttttctccatcttctgatctcattgagggatgaatttgcccattgttatgtaccacataggagttctctggcagacatcaccctttctgactccaaagtatacaagcaaagggaagctgtcattggacttcgagaatttccactgcttgcctctttcgccagtccttaatgcaaatggagatattaccagtgggtgtagtttggtggattgcctaaagtacttcactgtggtggagcatcttgacaactatcgttgtgaccggtgttggcacatcattgctgccaaatatctttctcttagatcagaagttgatgaggaaaaggttagcaagcttcaatcctgtgtcgactatggcacttgcagttgcagggatatgttccccctggagtcactgccatgttcatcatcttcacgagcaacaaagcagctgattatcagtcagtgcccgaagattctgtgcattcattttctacgcgcttcagtcggtcttgacggcgagcccatcaaacatcagggacatatttctttccctttgcttctcaatctgtccccgtttacgggaggcgcgtcgagtgctggacctttagcaatgaatgcgcaaagagatggccagcaagctctccatctataccggcaactgaatatgcaggctaatgctgacgtgtccagtagttcatcatcaccaccgcagctatcaaggagcaagttatacggtctcgcggccgtcgtggagcactacgggaagtgtggaggagggcactacgcagtctacaggagagtcgcgtcgaatcctgaccctgatgatccaggcaaacctgttgcaggccttggcaagcggtggttttacatctcagacggctacgtgtcagaagttccagaggaggatgtactgcgcgcggaggccacgctccttttctacgagagattgtagccgcttgttgagtagctaacgtgtgcatcataacaaaatctaggacagttttgttgtgaggagtctgatgttcttagcggtaccgtgagcttccaagtagacgaggaaactagctgtggcacaaaaaacaaagcctctcggcatctcgacgtggactgcaggcgtgtcttaggcagtgtggcctactttttttttgggtccttgcaaacgttaaaataattcttcatgcaatacgtcagtgaggtcttcctcttgagaataaatcagatcaccattgttttgcgacattgtaagcagcagatggtggatcgtgtgagttttgttctgctgacgatgaaatgcgtgttaatcaactttcggctcaccgtagtttctgttttctttttatatagggaggtacagcgaacagcgtaataaaatgccaaaatgcagttccactataagtactagtttgggaacatgtttttttaagggatttttatttttctttaaaaaattaatttattttttttagaaaataggaatttcttgaaaaaatgaagtttct

SEQ ID NO: 25157 - DNA, 2720 bp, Zea Mays
aggcttcccttcagcaaacagcctggtagttctattcagccgcttaccgcgcgctctcttgtgcggcaattgggcgaccgccgccgccctaactcaggtgccgaggtcttcgccagtaacttcaacaggtcctcgcctggtccttcgctggcgaggagcatctccaccagactttctgctggttcaggtgcgaatcatggggaagtttatgcatgacaatccaatgctatcatgtagtgaagtaaacagacatcactatagtcttgcggcagttgctgtcggtttgggactaggagttgccgggttatgcaaggcattgtatagtggtctgtccataccatgggtttctccaaggaatttgttttcgggatcagggagggcatactatgttggaggtctgcgaaatcttggcaacaattgctttcttaatgtcatcctccaggcacttgccagctgtgatggttttatttcctttctagataatttgcttgcaactgatggcttgctacctgaagaaaaggctgtaagaatgcctcttcttcttgctttaagttctctcttggaaggtaagatttatactatggactattgaacttcttatcattttcgagatccccactgtgaacttctaaatacgactcagtgtccattgcaagtattgtccttttactgcaggcaatttcaggggggtgggggcttctattgagaattttttagctgtatgtgaacccctataatacagtacatggcttataagttcaaagatcatgtggggtcctcagctgcatatgcaacataatgcattcaccggtggtggaatccatgcaacctataatttttttgacagtgttttctcctatgctctgattttcttgggaattgataggtccttgttatttgcattgcttggattctttgctccacataatatgttcttgcttctatataaaaccactgaatgggacttctttttatctttttcgctttattcttctgacattggtcatgtcctgcaaaatataactgcatggcactctattcttgatgtccgccatttgattataaatgcttttttgttacatgctcacaaattgttattattgtacttgagctttgcatgttgcagacttaatcatagttcgagatgaaaggactgtgttgaatccacatggagtaatgcatgctttgagtttgtatgttggtcacttcaatctgaccagacagcaggatgcttcagaagcttttctccatcttctgatctcattgagggatgaatttgcccattgttatgtaccacataggagttctctggcagacatcaccctttctgactccaaagtatacaagcaaagggaagctgtcattggacttcgagaatttccactgcttgcctctttcgccagtccttaatgcaaatggagatattaccagtgggtgtagtttggtggattgcctaaagtacttcactgtggtggagcatcttgacaactatcgttgtgaccggtgttggcacatcattgctgccaaatatctttctcttagatcagaagttgatgaggaaaaggttagcaagcttcaatcctgtgtcgactatggcacttgcagttgcagggatatgttccccctggagtcactgccatgttcatcatcttcacgagcaacaaagcagctgattatcagtcagtgcccgaagattctgtgcattcattttctacgcgcttcagtcggtcttgacggcgagcccatcaaacatcagggacatatttctttccctttgcttctcaatctgtccccgtttacgggaggcgcgtcgagtgctggacctttagcaatgaatgcgcaaagagatggccagcaagctctccatctataccggcaactgaatatgcaggctaatgctgacgtgtccagtagttcatcatcaccaccgcagctatcaaggagcaagttatacggtctcgcggccgtcgtggagcactacgggaagtgtggaggagggcactacgcagtctacaggagagtcgcgtcgaatcctgaccctgatgatccaggcaaacctgttgcaggccttggcaagcggtggttttacatctcagacggctacgtgtcagaagttccagaggaggatgtactgcgcgcggaggccacgctccttttctacgagagattgtagccgcttgttgagtagctaacgtgtgcatcataacaaaatctaggacagttttgttgtgaggagtctgatgttcttagcggtaccgtgagcttccaagtagacgaggaaactagctgtggcacaaaaaacaaagcctctcggcatctcgacgtggactgcaggcgtgtcttaggcagtgtggcctactttttttttgggtccttgcaaacgttaaaataattcttcatgcaatacgtcagtgaggtcttcctcttgagaataaatcagatcaccattgttttgcgacattgtaagcagcagatggtggatcgtgtgagttttgttctgctgacgatgaaatgcgtgttaatcaactttcggctcaccgtagtttctgttttctttttatatagggaggtacagcgaacagcgtaataaaatgccaaaatgcagttccactataagtactagtttgggaacatgtttttttaagggatttttatttttctttaaaaaattaatttattttttttagaaaataggaatttcttgaaaaaatgaagtttct

SEQ ID NO: 25158 - DNA, 2106 bp, Zea Mays
aggcttcccttcagcaaacagcctggtagttctattcagccgcttaccgcgcgctctcttgtgcggcaattgggcgaccgccgccgccctaactcaggtgccgaggtcttcgccagtaacttcaacaggtcctcgcctggtccttcgctggcgaggagcatctccaccaggtgcgaatcatggggaagtttatgcatgacaatccaatgctatcatgtagtgaagtaaacagacatcactatagtcttgcggcagttgctgtcggtttgggactaggagttgccgggttatgcaaggcattgtatagtggtctgtccataccatgggtttctccaaggaatttgttttcgggatcagggagggcatactatgttggaggtctgcgaaatcttggcaacaattgctttcttaatgtcatcctccagataatttgcttgcaactgatggcttgctacctgaagaaaaggctgtaagaatgcctcttcttcttgctttaagttctctcttggaagacttaatcatagttcgagatgaaaggactgtgttgaatccacatggagtaatgcatgctttgagtttgtatgttggtcacttcaatctgaccagacagcaggatgcttcagaagcttttctccatcttctgatctcattgagggatgaatttgcccattgttatgtaccacataggagttctctggcagacatcaccctttctgactccaaagtatacaagcaaagggaagctgtcattggacttcgagaatttccactgcttgcctctttcgccagtccttaatgcaaatggagatattaccagtgggtgtagtttggtggattgcctaaagtacttcactgtggtggagcatcttgacaactatcgttgtgaccggtgttggcacatcattgctgccaaatatctttctcttagatcagaagttgatgaggaaaaggttagcaagcttcaatcctgtgtcgactatggcacttgcagttgcagggatatgttccccctggagtcactgccatgttcatcatcttcacgagcaacaaagcagctgattatcagtcagtgcccgaagattctgtgcattcattttctacgcgcttcagtcggtcttgacggcgagcccatcaaacatcagggacatatttctttccctttgcttctcaatctgtccccgtttacgggaggcgcgtcgagtgctggacctttagcaatgaatgcgcaaagagatggccagcaagctctccatctataccggcaactgaatatgcaggctaatgctgacgtgtccagtagttcatcatcaccaccgcagctatcaaggagcaagttatacggtctcgcggccgtcgtggagcactacgggaagtgtggaggagggcactacgcagtctacaggagagtcgcgtcgaatcctgaccctgatgatccaggcaaacctgttgcaggccttggcaagcggtggttttacatctcagacggctacgtgtcagaagttccagaggaggatgtactgcgcgcggaggccacgctccttttctacgagagattgtagccgcttgttgagtagctaacgtgtgcatcataacaaaatctaggacagttttgttgtgaggagtctgatgttcttagcggtaccgtgagcttccaagtagacgaggaaactagctgtggcacaaaaaacaaagcctctcggcatctcgacgtggactgcaggcgtgtcttaggcagtgtggcctactttttttttgggtccttgcaaacgttaaaataattcttcatgcaatacgtcagtgaggtcttcctcttgagaataaatcagatcaccattgttttgcgacattgtaagcagcagatggtggatcgtgtgagttttgttctgctgacgatgaaatgcgtgttaatcaactttcggctcaccgtagtttctgttttctttttatatagggaggtacagcgaacagcgtaataaaatgccaaaatgcagttccactataagtactagtttgggaacatgtttttttaagggatttttatttttctttaaaaaattaatttattttttttagaaaataggaatttcttgaaaaaatgaagtttct

SEQ ID NO: 25159 - DNA, 3132 bp, Zea Mays
gataggcttcccttcagcaaacagcctggtagttctattcagccgcttaccgcgcgctctcttgtgcggcaattgggcgaccgccgccgccctaactcaggtgccgaggtcttcgccagtaacttcaacaggtcctcgcctggtccttcgctggcgaggagcatctccaccaggtgcgaatcatggggaagtttatgcatgacaatccaatgctatcatgtagtgaagtaaacagacatcactatagtcttgcggcagttgctgtcggtttgggactaggagttgccgggttatgcaaggcattgtatagtggtctgtccataccatgggtttctccaaggaatttgttttcgggatcagggagggcatactatgttggaggtctgcgaaatcttggcaacaattgctttcttaatgtcatcctccaggcacttgccagctgtgatggttttatttcctttctagataatttgcttgcaactgatggcttgctacctgaagaaaaggctgtaagaatgcctcttcttcttgctttaagttctctcttggaaggtaagatttatactatggactattgaacttcttatcattttcgagatccccactgtgaacttctaaatacgactcagtgtccattgcaagtattgtccttttactgcaggcaatttcaggggggtgggggcttctattgagaattttttagctgtatgtgaacccctataatacagtacatggcttataagttcaaagatcatgtggggtcctcagctgcatatgcaacataatgcattcaccggtggtggaatccatgcaacctataatttttttgacagtgttttctcctatgctctgattttcttgggaattgataggtccttgttatttgcattgcttggattctttgctccacataatatgttcttgcttctatataaaaccactgaatgggacttctttttatctttttcgctttattcttctgacattggtcatgtcctgcaaaatataactgcatggcactctattcttgatgtccgccatttgattataaatgcttttttgttacatgctcacaaattgttattattgtacttgagctttgcatgttgcagacttaatcatagttcgagatgaaaggactgtgttgaatccacatggagtaatgcatgctttgagtttgtatgttggtcacttcaatctgaccagacagcaggatgcttcagaagcttttctccatcttctgatctcattgagggatgaatttgcccattgttatgtaccacataggagttctctggcagacatcaccctttctgactccaaagtatacaagcaaagggaaggtaacctgcctgaatgcaagcgctggaaacaaaacctatttggcccctttgatgggacagttggcagcatattgtcttgcagaaactgttcttctgtggtagattcctaatttcctatgcttcttattctgtcactgttgaactgtggcttataaaaaagtaacctactgttgtctttcatatatgaatgcattttgttccggatataccactggatacatagatattgacacgatgtccagtgcatgcccctacctttcctagccgtggtaaaattaaagaattattattatggaagtaatttagccaacaacaagtgatgctattttcatattgccaatcagttattttgcgcattttgacagttagcttaaaatactcctgttttgttaattttaatgttctcccttgttacatatctcacagctgtcattggacttcgagaatttccactgcttgcctctttcgccagtccttaatgcaaatggagatattaccagtgggtgtagtttggtggattgcctaaagtacttcactgtggtggagcatcttgacaactatcgttgtgaccggtgttggcacatcattgctgccaaatatctttctcttagatcagaagttgatgaggaaaaggttagcaagcttcaatcctgtgtcgactatggcacttgcagttgcagggatatgttccccctggagtcactgccatgttcatcatcttcacgagcaacaaagcagctgattatcagtcagtgcccgaagattctgtgcattcattttctacgcgcttcagtcggtcttgacggcgagcccatcaaacatcagggacatatttctttccctttgcttctcaatctgtccccgtttacgggaggcgcgtcgagtgctggacctttagcaatgaatgcgcaaagagatggccagcaagctctccatctataccggcaactgaatatgcaggctaatgctgacgtgtccagtagttcatcatcaccaccgcagctatcaaggagcaagttatacggtctcgcggccgtcgtggagcactacgggaagtgtggaggagggcactacgcagtctacaggagagtcgcgtcgaatcctgaccctgatgatccaggcaaacctgttgcaggccttggcaagcggtggttttacatctcagacggctacgtgtcagaagttccagaggaggatgtactgcgcgcggaggccacgctccttttctacgagagattgtagccgcttgttgagtagctaacgtgtgcatcataacaaaatctaggacagttttgttgtgaggagtctgatgttcttagcggtaccgtgagcttccaagtagacgaggaaactagctgtggcacaaaaaacaaagcctctcggcatctcgacgtggactgcaggcgtgtcttaggcagtgtggcctactttttttttgggtccttgcaaacgttaaaataattcttcatgcaatacgtcagtgaggtcttcctcttgagaataaatcagatcaccattgttttgcgacattgtaagcagcagatggtggatcgtgtgagttttgttctgctgacgatgaaatgcgtgttaatcaactttcggctcaccgtagtttctgttttctttttatatagggaggtacagcgaacagcgtaataaaatgccaaaatgcagttccactataagtactagtttgggaacatgtttttttaagggatttttatttttctttaaaaaattaatttattttttttagaaaataggaatttcttgaaaaaatgaagtttct

SEQ ID NO: 25160 - DNA, 3127 bp, Zea Mays
gtttggataggcttcccttcagcaaacagcctggtagttctattcagccgcttaccgcgcgctctcttgtgcggcaattgggcgaccgccgccgccctaactcaggtgccgaggtcttcgccagtaacttcaacaggtcctcgcctggtccttcgctggcgaggagcatctccaccaggtgcgaatcatggggaagtttatgcatgacaatccaatgctatcatgtagtgaagtaaacagacatcactatagtcttgcggcagttgctgtcggtttgggactaggagttgccgggttatgcaaggcattgtatagtggtctgtccataccatgggtttctccaaggaatttgttttcgggatcagggagggcatactatgttggaggtctgcgaaatcttggcaacaattgctttcttaatgtcatcctccaggcacttgccagctgtgatggttttatttcctttctagataatttgcttgcaactgatggcttgctacctgaagaaaaggctgtaagaatgcctcttcttcttgctttaagttctctcttggaaggtaagatttatactatggactattgaacttcttatcattttcgagatccccactgtgaacttctaaatacgactcagtgtccattgcaagtattgtccttttactgcaggcaatttcaggggggtgggggcttctattgagaattttttagctgtatgtgaacccctataatacagtacatggcttataagttcaaagatcatgtggggtcctcagctgcatatgcaacataatgcattcaccggtggtggaatccatgcaacctataatttttttgacagtgttttctcctatgctctgattttcttgggaattgataggtccttgttatttgcattgcttggattctttgctccacataatatgttcttgcttctatataaaaccactgaatgggacttctttttatctttttcgctttattcttctgacattggtcatgtcctgcaaaatataactgcatggcactctattcttgatgtccgccatttgattataaatgcttttttgttacatgctcacaaattgttattattgtacttgagctttgcatgttgcagacttaatcatagttcgagatgaaaggactgtgttgaatccacatggagtaatgcatgctttgagtttgtatgttggtcacttcaatctgaccagacagcagaagcttttctccatcttctgatctcattgagggatgaatttgcccattgttatgtaccacataggagttctctggcagacatcaccctttctgactccaaagtatacaagcaaagggaaggtaacctgcctgaatgcaagcgctggaaacaaaacctatttggcccctttgatgggacagttggcagcatattgtcttgcagaaactgttcttctgtggtagattcctaatttcctatgcttcttattctgtcactgttgaactgtggcttataaaaaagtaacctactgttgtctttcatatatgaatgcattttgttccggatataccactggatacatagatattgacacgatgtccagtgcatgcccctacctttcctagccgtggtaaaattaaagaattattattatggaagtaatttagccaacaacaagtgatgctattttcatattgccaatcagttattttgcgcattttgacagttagcttaaaatactcctgttttgttaattttaatgttctcccttgttacatatctcacagctgtcattggacttcgagaatttccactgcttgcctctttcgccagtccttaatgcaaatggagatattaccagtgggtgtagtttggtggattgcctaaagtacttcactgtggtggagcatcttgacaactatcgttgtgaccggtgttggcacatcattgctgccaaatatctttctcttagatcagaagttgatgaggaaaaggttagcaagcttcaatcctgtgtcgactatggcacttgcagttgcagggatatgttccccctggagtcactgccatgttcatcatcttcacgagcaacaaagcagctgattatcagtcagtgcccgaagattctgtgcattcattttctacgcgcttcagtcggtcttgacggcgagcccatcaaacatcagggacatatttctttccctttgcttctcaatctgtccccgtttacgggaggcgcgtcgagtgctggacctttagcaatgaatgcgcaaagagatggccagcaagctctccatctataccggcaactgaatatgcaggctaatgctgacgtgtccagtagttcatcatcaccaccgcagctatcaaggagcaagttatacggtctcgcggccgtcgtggagcactacgggaagtgtggaggagggcactacgcagtctacaggagagtcgcgtcgaatcctgaccctgatgatccaggcaaacctgttgcaggccttggcaagcggtggttttacatctcagacggctacgtgtcagaagttccagaggaggatgtactgcgcgcggaggccacgctccttttctacgagagattgtagccgcttgttgagtagctaacgtgtgcatcataacaaaatctaggacagttttgttgtgaggagtctgatgttcttagcggtaccgtgagcttccaagtagacgaggaaactagctgtggcacaaaaaacaaagcctctcggcatctcgacgtggactgcaggcgtgtcttaggcagtgtggcctactttttttttgggtccttgcaaacgttaaaataattcttcatgcaatacgtcagtgaggtcttcctcttgagaataaatcagatcaccattgttttgcgacattgtaagcagcagatggtggatcgtgtgagttttgttctgctgacgatgaaatgcgtgttaatcaactttcggctcaccgtagtttctgttttctttttatatagggaggtacagcgaacagcgtaataaaatgccaaaatgcagttccactataagtactagtttgggaacatgtttttttaagggatttttatttttctttaaaaaattaatttattttttttagaaaataggaatttcttgaaaaaatgaagtttct

SEQ ID NO: 25161 - DNA, 1684 bp, Zea Mays
aacaggtcaccaggacagtagggttcaccagaggctgctgcttgggacctcgggtcactcagctgagcggttccaaaaatgtcaatatgccaggacaagacttgtaagaactggagggcgtggatggggccttgtggctgatgagaatattatggctggtcaatttgttatcgaatattgtggagaagtaatatcatggaaggaagccaaacggagagctcaagcttatgaaacccagtgtctgcagatattctctcgcttctcatatttgaattgtggcaaactggcacttttttagctagctataacatctagcttctgtaactgcaggtttaaaggatgcctatatcatttacctcaatgctgatgagtcaattgatgcaacaagaaaagggaaccttgcgagattcatcaaccattcatggaggccacgtacctgtgggaagatgatgatgacaggttttctgttgagaatatccctctttacgattctgctgatgacgaacctacaagcattaacaaggaaatcctcgtatcaagtgatggcatggttacccaatacagcaacatcagcagagtacagagtaccgaaaatcctggaaacactggaacaaatgaatttgcgccaattatcgtcgacgaactgacaagctcaaatggattagcaccaatgaacgttgaaccattgactgtaagctcaaatgagttcacgccatcgaacgccatgccaatggtagctcgtctagtcgagaatgggtcaactggatacagcgcacaggacactcacgacgcttctcagaattcagcgcccaaagctgcaaatcacgcgaaccaaactggacctcagaacaacagcaaccattcagcgttggtccctgtgaagcccgcgccgaaacgccgtggcaggaaaccgaaacgcgttgtgcacaagcagctggacatcccagatatctgcgaccggcttacatcgtctgtggcgtgcgaagaaatactgtactgtgaggtaatggtctgctatgactatgatcagaactcccttctcttaaaacagtgtagtagtggcgaacaatgtgaagtttaagacgcatgcaccatgtaatgatccatctgatctcgccaggaagtgaagaaccaggccgtttctgaaatcgatgccctgtacgacgagataaggcctgcggttgaagagcacgagagggacagccaagatagcgtctccacaagcctcgcggagaagtggatcgaggctagctgccgcaagtacaaggccgaattcgacctgtatgctgcagtactcaagaacgttgcctccactccactacggtcgaaagatgatgtgggcccaagagagcagaacgggttgaagtacctggagaacggctcatgatttttttagctagaagcgtggaatattacgtacgccttcaatttgtagtatagggattgcatttttttttaactgtggttggtcttgtatttaggtagaggcattgtaaggttacatgattttaaatagcgtggaatcatgtcaaacgcacatttgatctcgttctcgtgtttatgctgtcgacctcattctgttttgctaacaccatctgcactctgcaggtaacaagcacacgtggataaattagtctttaggagccgagccggttggatgtgcacgcatctggttggatctcag

SEQ ID NO: 25162 - DNA, 2174 bp, Zea Mays
ctctacctgttggagagaccctgaccgtcgcccagaccgctctctccgcggacgcaccaggcatctcgtgtatcgtcctcggatccccgcggtcatccccatctcagccgccgttgtccgccttcccctcgacaacaagcctgccgccccgagctgcctccctccgtccgttcggtatcctttagccagttagcctcttccttccgtctgccaccggcacgttctctgccctcgggtacctcgtctgttcagtcttcagagctgggttcggtctattcctcatcctctcttgttgatccggagtgccttaagttttggccgtcttgttactgtctgctgttccacagtcgacgaatcacgaatgctaatggaggaagaatgcgtagaggcaccgtcgtacatccacattgacagcaacgctttctcctacagaaagcataagagtcagacagaggaggacatagctgtgtgtgagtgccagtatgatatcttggatccagagagtccatgtggagaccggtgtttaaatttattgactaacacagaatgcacgcctggctattgccgttgtggtgtgtactgcaagaatcaggacaagacttgtaagaactggagggcgtggatggggccttgtggctgatgagaatattatggctggtcaatttgttatcgaatattgtggagaagtaatatcatggaaggaagccaaacggagagctcaagcttatgaaacccagtgtttaaaggatgcctatatcatttacctcaatgctgatgagtcaattgatgcaacaagaaaagggaaccttgcgagattcatcaaccattcatgccaaccgaattgtgagacaaggaaatggaatgtccttggggaagtaagagttggaatttttgctaagcaaaacattccttttggcacggaattatcctatgactacaattttgagtggtatggtggtgtgatggtgcggtgcctctgtggagccgccagctgttctgggtttcttggggctaaatcacgtggtttccaggaggccacgtacctgtgggaagatgatgatgacaggttttctgttgagaatatccctctttacgattctgctgatgacgaacctacaagcattaacaaggaaatcctcgtatcaagtgatggcatggttacccaatacagcaacatcagcagagtacagagtaccgaaaatcctggaaacactggaacaaatgaatttgcgccaattatcgtcgacgaactgacaagctcaaatggattagcaccaatgaacgttgaaccattgactgtaagctcaaatgagttcacgccatcgaacgccatgccaatggtagctcgtctagtcgagaatgggtcaactggatacagcgcacaggacactcacgacgcttctcagaattcagcgcccaaagctgcaaatcacgcgaaccaaactggacctcagaacaacagcaaccattcagcgttggtccctgtgaagcccgcgccgaaacgccgtggcaggaaaccgaaacgcgttgtgcacaagcagctggacatcccagatatctgcgaccggcttacatcgtctgtggcgtgcgaagaaatactgtactgtgaggaagtgaagaaccaggccgtttctgaaatcgatgccctgtacgacgagataaggcctgcggttgaagagcacgagagggacagccaagatagcgtctccacaagcctcgcggagaagtggatcgaggctagctgccgcaagtacaaggccgaattcgacctgtatgctgcagtactcaagaacgttgcctccactccactacggtcgaaagatgatgtgggcccaagagagcagaacgggttgaagtacctggagaacggctcatgatttttttagctagaagcgtggaatattacgtacgccttcaatttgtagtatagggattgcatttttttttaactgtggttggtcttgtatttaggtagaggcattgtaaggttacatgattttaaatagcgtggaatcatgtcaaacgcacatttgatctcgttctcgtgtttatgctgtcgacctcattctgttttgctaacaccatctgcactctgcaggtaacaagcacacgtggataaattagtctttaggagccgagccggttggatgtgcacgcatctggttggatctcag

SEQ ID NO: 25163 - DNA, 2001 bp, Zea Mays
ctctacctgttggagagaccctgaccgtcgcccagaccgctctctccgcggacgcaccaggcatctcgtgtatcgtcctcggatccccgcggtcatccccatctcagccgccgttgtccgccttcccctcgacaacaagcctgccgccccgagctgcctccctccgtccgttcggtatcctttagccagttagcctcttccttccgtctgccaccggcacgttctctgccctcgggtacctcgtctgttcagtcttcagagctgggttcggtctattcctcatcctctcttgttgatccggagtgccttaagttttggccgtcttgttactgtctgctgttccacagtcgacgaatcacgaatgctaatggaggaagaatgcgtagaggcaccgtcgtacatccacattgacagcaacgctttctcctacagaaagcataagagtcagacagaggaggacatagctgtgtgtgagtgccagtatgatatcttggatccagagagtccatgtggagaccggtgtttaaatttattgactaacacagaatgcacgcctggctattgccgttgtggtgtgtactgcaagaatcagcggttccaaaaatgtcaatatgccaggacaagacttgtaagaactggagggcgtggatggggccttgtggctgatgagaatattatggctggtcaatttgttatcgaatattgtggagaagtaatatcatggaaggaagccaaacggagagctcaagcttatgaaacccagtgtttaaaggatgcctatatcatttacctcaatgctgatgagtcaattgatgcaacaagaaaagggaaccttgcgagattcatcaaccattcatggaggccacgtacctgtgggaagatgatgatgacaggttttctgttgagaatatccctctttacgattctgctgatgacgaacctacaagcattaacaaggaaatcctcgtatcaagtgatggcatggttacccaatacagcaacatcagcagagtacagagtaccgaaaatcctggaaacactggaacaaatgaatttgcgccaattatcgtcgacgaactgacaagctcaaatggattagcaccaatgaacgttgaaccattgactgtaagctcaaatgagttcacgccatcgaacgccatgccaatggtagctcgtctagtcgagaatgggtcaactggatacagcgcacaggacactcacgacgcttctcagaattcagcgcccaaagctgcaaatcacgcgaaccaaactggacctcagaacaacagcaaccattcagcgttggtccctgtgaagcccgcgccgaaacgccgtggcaggaaaccgaaacgcgttgtgcacaagcagctggacatcccagatatctgcgaccggcttacatcgtctgtggcgtgcgaagaaatactgtactgtgaggaagtgaagaaccaggccgtttctgaaatcgatgccctgtacgacgagataaggcctgcggttgaagagcacgagagggacagccaagatagcgtctccacaagcctcgcggagaagtggatcgaggctagctgccgcaagtacaaggccgaattcgacctgtatgctgcagtactcaagaacgttgcctccactccactacggtcgaaagatgatgtgggcccaagagagcagaacgggttgaagtacctggagaacggctcatgatttttttagctagaagcgtggaatattacgtacgccttcaatttgtagtatagggattgcatttttttttaactgtggttggtcttgtatttaggtagaggcattgtaaggttacatgattttaaatagcgtggaatcatgtcaaacgcacatttgatctcgttctcgtgtttatgctgtcgacctcattctgttttgctaacaccatctgcactctgcaggtaacaagcacacgtggataaattagtctttaggagccgagccggttggatgtgcacgcatctggttggatctcag

SEQ ID NO: 25164 - DNA, 2193 bp, Zea Mays
ctctacctgttggagagaccctgaccgtcgcccagaccgctctctccgcggacgcaccaggcatctcgtgtatcgtcctcggatccccgcggtcatccccatctcagccgccgttgtccgccttcccctcgacaacaagcctgccgccccgagctgcctccctccgtccgttcggtatcctttagccagttagcctcttccttccgtctgccaccggcacgttctctgccctcgggtacctcgtctgttcagtcttcagagctgggttcggtctattcctcatcctctcttgttgatccggagtgccttaagttttggccgtcttgttactgtctgctgttccacagtcgacgaatcacgaatgctaatggaggaagaatgcgtagaggcaccgtcgtacatccacattgacagcaacgctttctcctacagaaaagtcagacagaggaggacatagctgtgtgtgagtgccagtatgatatcttggatccagagagtccatgtggagaccggtgtttaaatttattgactaacacagaatgcacgcctggctattgccgttgtggtgtgtactgcaagaatcagcggttccaaaaatgtcaatatgccaggacaagacttgtaagaactggagggcgtggatggggccttgtggctgatgagaatattatggctggtcaatttgttatcgaatattgtggagaagtaatatcatggaaggaagccaaacggagagctcaagcttatgaaacccagtgtttaaaggatgcctatatcatttacctcaatgctgatgagtcaattgatgcaacaagaaaagggaaccttgcgagattcatcaaccattcatgccaaccgaattgtgagacaaggaaatggaatgtccttggggaagtaagagttggaatttttgctaagcaaaacattccttttggcacggaattatcctatgactacaattttgagtggtatggtggtgtgatggtgcggtgcctctgtggagccgccagctgttctgggtttcttggggctaaatcacgtggtttccaggaggccacgtacctgtgggaagatgatgatgacaggttttctgttgagaatatccctctttacgattctgctgatgacgaacctacaagcattaacaaggaaatcctcgtatcaagtgatggcatggttacccaatacagcaacatcagcagagtacagagtaccgaaaatcctggaaacactggaacaaatgaatttgcgccaattatcgtcgacgaactgacaagctcaaatggattagcaccaatgaacgttgaaccattgactgtaagctcaaatgagttcacgccatcgaacgccatgccaatggtagctcgtctagtcgagaatgggtcaactggatacagcgcacaggacactcacgacgcttctcagaattcagcgcccaaagctgcaaatcacgcgaaccaaactggacctcagaacaacagcaaccattcagcgttggtccctgtgaagcccgcgccgaaacgccgtggcaggaaaccgaaacgcgttgtgcacaagcagctggacatcccagatatctgcgaccggcttacatcgtctgtggcgtgcgaagaaatactgtactgtgaggaagtgaagaaccaggccgtttctgaaatcgatgccctgtacgacgagataaggcctgcggttgaagagcacgagagggacagccaagatagcgtctccacaagcctcgcggagaagtggatcgaggctagctgccgcaagtacaaggccgaattcgacctgtatgctgcagtactcaagaacgttgcctccactccactacggtcgaaagatgatgtgggcccaagagagcagaacgggttgaagtacctggagaacggctcatgatttttttagctagaagcgtggaatattacgtacgccttcaatttgtagtatagggattgcatttttttttaactgtggttggtcttgtatttaggtagaggcattgtaaggttacatgattttaaatagcgtggaatcatgtcaaacgcacatttgatctcgttctcgtgtttatgctgtcgacctcattctgttttgctaacaccatctgcactctgcaggtaacaagcacacgtggataaattagtctttaggagccgagccggttggatgtgcacgcatctggttggatctcag

SEQ ID NO: 25165 - DNA, 2207 bp, Zea Mays
ctctacctgttggagagaccctgaccgtcgcccagaccgctctctccgcggacgcaccaggcatctcgtgtatcgtcctcggatccccgcggtcatccccatctcagccgccgttgtccgccttcccctcgacaacaagcctgccgccccgagctgcctccctccgtccgttcggtatcctttagccagttagcctcttccttccgtctgccaccggcacgttctctgccctcgggtacctcgtctgttcagtcttcagagctgggttcggtctattcctcatcctctcttgttgatccggagtgccttaagttttggccgtcttgttactgtctgctgttccacagtcgacgaatcacgaatgctaatggaggaagaatgcgtagaggcaccgtcgtacatccacattgacagcaacgctttctcctacagaaagcataagagtcagacagaggaggacatagctgtgtgtgagtgccagtatgatatcttggatccagagagtccatgtggagaccggtgtttaaatttattgactaacacagaatgcacgcctggctattgccgttgtggtgtgtactgcaagaatcagcggttccaaaaatgtcaatatgccaggacaagacttgtaagaactggagggcgtggatggggccttgtggctgatgagaatattatggctggtcaatttgttatcgaatattgtggagaagtaatatcatggaaggaagccaaacggagagctcaagcttatgaaacccagtgtttaaaggatgcctatatcatttacctcaatgctgatgagtcaattgatgcaacaagaaaagggaaccttgcgagattcatcaaccattcatgcatacagccaaccgaattgtgagacaaggaaatggaatgtccttggggaagtaagagttggaatttttgctaagcaaaacattccttttggcacggaattatcctatgactacaattttgagtggtatggtggtgtgatggtgcggtgcctctgtggagccgccagctgttctgggtttcttggggctaaatcacgtggtttccaggaggccacgtacctgtgggaagatgatgatgacaggttttctgttgagaatatccctctttacgattctgctgatgacgaacctacaagcattaacaaggaaatcctcgtatcaagtgatggcatggttacccaatacagcaacatcagcagagtacagagtaccgaaaatcctggaaacactggaacaaatgaatttgcgccaattatcgtcgacgaactgacaagctcaaatggattagcaccaatgaacgttgaaccattgactgtaagctcaaatgagttcacgccatcgaacgccatgccaatggtagctcgtctagtcgagaatgggtcaactggatacagcgcacaggacactcacgacgcttctcagaattcagcgcccaaagctgcaaatcacgcgaaccaaactggacctcagaacaacagcaaccattcagcgttggtccctgtgaagcccgcgccgaaacgccgtggcaggaaaccgaaacgcgttgtgcacaagcagctggacatcccagatatctgcgaccggcttacatcgtctgtggcgtgcgaagaaatactgtactgtgaggaagtgaagaaccaggccgtttctgaaatcgatgccctgtacgacgagataaggcctgcggttgaagagcacgagagggacagccaagatagcgtctccacaagcctcgcggagaagtggatcgaggctagctgccgcaagtacaaggccgaattcgacctgtatgctgcagtactcaagaacgttgcctccactccactacggtcgaaagatgatgtgggcccaagagagcagaacgggttgaagtacctggagaacggctcatgatttttttagctagaagcgtggaatattacgtacgccttcaatttgtagtatagggattgcatttttttttaactgtggttggtcttgtatttaggtagaggcattgtaaggttacatgattttaaatagcgtggaatcatgtcaaacgcacatttgatctcgttctcgtgtttatgctgtcgacctcattctgttttgctaacaccatctgcactctgcaggtaacaagcacacgtggataaattagtctttaggagccgagccggttggatgtgcacgcatctggttggatctcag

SEQ ID NO: 25166 - DNA, 2174 bp, Zea Mays
ctctacctgttggagagaccctgaccgtcgcccagaccgctctctccgcggacgcaccaggcatctcgtgtatcgtcctcggatccccgcggtcatccccatctcagccgccgttgtccgccttcccctcgacaacaagcctgccgccccgagctgcctccctccgtccgttcggtatcctttagccagttagcctcttccttccgtctgccaccggcacgttctctgccctcgggtacctcgtctgttcagtcttcagagctgggttcggtctattcctcatcctctcttgttgatccggagtgccttaagttttggccgtcttgttactgtctgctgttccacagtcgacgaatcacgaatgctaatggaggaagaatgcgtagaggcaccgtcgtacatccacattgacagcaacgctttctcctacagaaaagtcagacagaggaggacatagctgtgtgtgagtgccagtatgatatcttggatccagagagtccatgtggagaccggtgtttaaatttattgactaacacagaatgcacgcctggctattgccgttgtggtgtgtactgcaagaatcaggacaagacttgtaagaactggagggcgtggatggggccttgtggctgatgagaatattatggctggtcaatttgttatcgaatattgtggagaagtaatatcatggaaggaagccaaacggagagctcaagcttatgaaacccagtgtttaaaggatgcctatatcatttacctcaatgctgatgagtcaattgatgcaacaagaaaagggaaccttgcgagattcatcaaccattcatgcatacagccaaccgaattgtgagacaaggaaatggaatgtccttggggaagtaagagttggaatttttgctaagcaaaacattccttttggcacggaattatcctatgactacaattttgagtggtatggtggtgtgatggtgcggtgcctctgtggagccgccagctgttctgggtttcttggggctaaatcacgtggtttccaggaggccacgtacctgtgggaagatgatgatgacaggttttctgttgagaatatccctctttacgattctgctgatgacgaacctacaagcattaacaaggaaatcctcgtatcaagtgatggcatggttacccaatacagcaacatcagcagagtacagagtaccgaaaatcctggaaacactggaacaaatgaatttgcgccaattatcgtcgacgaactgacaagctcaaatggattagcaccaatgaacgttgaaccattgactgtaagctcaaatgagttcacgccatcgaacgccatgccaatggtagctcgtctagtcgagaatgggtcaactggatacagcgcacaggacactcacgacgcttctcagaattcagcgcccaaagctgcaaatcacgcgaaccaaactggacctcagaacaacagcaaccattcagcgttggtccctgtgaagcccgcgccgaaacgccgtggcaggaaaccgaaacgcgttgtgcacaagcagctggacatcccagatatctgcgaccggcttacatcgtctgtggcgtgcgaagaaatactgtactgtgaggaagtgaagaaccaggccgtttctgaaatcgatgccctgtacgacgagataaggcctgcggttgaagagcacgagagggacagccaagatagcgtctccacaagcctcgcggagaagtggatcgaggctagctgccgcaagtacaaggccgaattcgacctgtatgctgcagtactcaagaacgttgcctccactccactacggtcgaaagatgatgtgggcccaagagagcagaacgggttgaagtacctggagaacggctcatgatttttttagctagaagcgtggaatattacgtacgccttcaatttgtagtatagggattgcatttttttttaactgtggttggtcttgtatttaggtagaggcattgtaaggttacatgattttaaatagcgtggaatcatgtcaaacgcacatttgatctcgttctcgtgtttatgctgtcgacctcattctgttttgctaacaccatctgcactctgcaggtaacaagcacacgtggataaattagtctttaggagccgagccggttggatgtgcacgcatctggttggatctcag

SEQ ID NO: 25167 - DNA, 251 bp, Zea Mays
ctcatcttctcggccggagaagtaggtggggttgttgcgctgccccgggtgatagccaagggatggaacggccgggctgcccataaaatcggagctgataaacacctcccctatcccttctgtgcgccgccaccacattgcagcgcacgaattgcacgtgaggtcaaagagggagctgtatactcagccaccgaactccaaaatcgccgccggagctaccctcaaccccgtgaggtcccaagaatctgaag

SEQ ID NO: 25168 - DNA, 839 bp, Zea Mays
tgcaatgattagggcattaaacaaccaaagtagcacaaaacatagacattgcagttcagaagcatggaacaatccatagaagaccggaccatgctcccaaaccatccggctacaaaacttagtacagcaaggttacaaacaaaagtatcacagtttgatgattttgagaaatgggacttgtcgctgcaccgcagcaccttacgccttgagcttgccaaagaacctctgcttctcatcggtagtctggaaacgaccgtgcccaaatttggacgatgtgtcgatgaacttgagcttgatctcctccagcgccagccgggaagtctgcttcaggagggactggcggagggtcaccaccctcttctttggacccacacagcagcccttgatcatcaggtagtcacccttcacgataccataatgggggaagccacccatgggagtgatgtccttctcatacctgtcaaactctgtggaggcatcgtgggtctcttgtccagccttgccgatcttgtaaaccttcttgttcatctcagtgcggtggtggtacccattttgaccagcacgggcaaccgtataggagaccctagccggatgccatgcaccgatacaagcaactttgcggagacccctgtgggtcttgcggggaagccgggtgacaccccaacgagtgaccacaccctcataacctttccccttggtcacaccaatgatgtcaatcatctcatccttctggaagacagcatcaacagggacctctttctcaaagaatttgtagccatagtccaccttgtcagcaatggtaccaccattgacctgaatctccatcaggtgagccttct

SEQ ID NO: 25169 - DNA, 816 bp, Zea Mays
tgcaatgattagggcattaaacaaccaaagtagcacaaaacatagacattgcagttcagaagcatggaacaatccatagaagaccggaccatgctcccaaaccatccggctacaaaacttagtacagcaaggttacaaacaaaagtatcacagtttgatgattttgagaaatgggacttgtcgctgcaccgcagcaccttacgccttgagcttgccaaagaacctctgcttctcatcggtagtctggaaacgaccgtgcccaaatttggacgatgtgtcgatgaacttgagcttgatctcctccagcgccagccgggaagtctgcttcaggagggactggcggagggtcaccaccctcttctttggacccacacagcagcccttgatcatcaggtagtcacccttcacgataccataatgggggaagccacccatgggagtgatgtccttctcatacctgtcaaactctgtggaggcatcgtgggtctcttgtccagccttgccgatcttgtaaaccttcttgttcatctcagtgcggtggtggtacccattttgaccagcacgggcaaccgtataggagaccctagccggatgccatgcaccgatacaagcaactttgcggagacccctgtgggtcttgcggggaagccgggtgacaccccaacgagtgaccacaccctcataacctttccccttggtcacaccaatgatgtcaatcatctcatccttctggaagacagcatcaacagggacctctttctcaaagaatttgtagccatagtccaccttgtcagcaatggtaccaccattgacctg

SEQ ID NO: 25170 - DNA, 4821 bp, Zea Mays
aaggaaatatccatcttctccgcgtcgtttgctggggatttttattccttactcaaccttatcaatacggcagctacaggtgttcatctctccagccgtgatacttcctgccgcgagctcatcttctcctccccagatttttccctcccgccgctcaagtgcttggatatctcaagccgccgctctggtctgggataagatcccgctgcccagtctgtcttcttcccccctgcggcagcttccgcggcgtccgtctccttgctcgcgccctacttctccccaaccacggcgccctctgttccttccagccggtcgactccctctgcagtcatgcgctcgcccagctcccttgcctcccccatggccagcgcccccttcagctcctctgctcgggtctccctcccatggcgcctccctctgccggccgccaatcttcctgcttggatctcgcccagctcgatctctgcgtctcctgctagccgcgagcccctgctccctgatttctccttgctcgctcctgagccatggagttcctgcgcgctccctctgctctctctccagaccgccggctccagctcgtcgagctcctccttgcttctctccacggcgctcggctgttcctactccctcccttcacgcgcgattctctgctctgtgcgcgcggtatttctccagcatgccgcgccgtccctgctcctccagctcgccgcgccctggattccatggctgcgccctggggttttgcacggagctctgcgcgcccagccccctccgttctcctcctcaccacggagctttccctccagctccttcctctccctctcggttctctgttggccgatgctctgctcgaccgcgccccctgctgcgcgcgctcgtgcgctctgcgctttgctcgccgtcgcagccagcgacgcccctgcttctccctcgtccatgccgcggcgtcctgctcgctccctggtgtcgtgcgggcgtgtcctcgagctccccatggcggtcctgtgctcgcgtcggccctagcttggtctctcccatgacgcgcggcttcctgcgcgagttctgttgcgtccaactccatctcttccccagctcggccgcctgcttctctccgctgcttgtcgcgcccagctgcagctcgccgtgccctcactgctcccttctcctcctctgtctgcccagtctccaagctcgccgtcgaagctctcctgccgcgcccctggctcggctctgcgcgccgcgcgcgccgctccccgagctcacccaaatcagacagtgtctccctcagctcgattcctgccgtgcagctctccggctcaccggcgtttcacccgtgcgcgcacgctctggccgagttcggccctgtctatttcgccgcgcttggtctctaactccctgtgcacgccgttgcgagctcgtcagccaccgttgccttgtcacagaaaccccaaccccaacgccgtcatccatggtcacgaccttaccaaatgcgttcgtcgcttggccctgtgtcgtcgtcgaccttgtccgctgtcgcgtgctcttgttcttgatgcgcatcgcgcagtagttaggtctcgcgtgcgtggttttgaagctatgcgcgttcgtcgtgccgcgtcgtgtgccgatattctctcccgacagacctcgccgtcgaccatgttcaagtaattgttcggctcgtcgcatcccgtctattcgataaaacacctaaattcatagactgtcgacgcactgctgccatacgcggctgtctctgtcacttgcgtcagctcgccagacctacagctctacatacgtcaccctctcgtatcgtcgtcgagcttgtcgaacctcgttcttctctgctcgatctcgtcgaaccccgaatcccggacattagacaaaaataagcgaggtccttgtgcatcgtttatcaagtgctcggtcgaagatttcaatcgaagatcgtcgtcgatccgtgcgtcagcaagaaatcccaaaaatcgggtgaagacgaagctagcagcgcgatattccccaagcgctcgataaattgcctagatcggaaaatcgctaccgatcacgcggattcgtgtcagctgtggaaacagtaagctgataaattattcaaaatagttcgatcgttgaataaattaatgtttagtgcgatgctcattaggtgctcgataattgcgtgagtcacgaaactctcgtcaacttcgcgattcctgcgattatcaagccagattcagttttagcgagttattttgctattctgattaattagctgaattagtggaccgagtagaattttggtaggcatgtgtgttgataaaatattttagtcacttataaagatgtagtttaatttataaagcaagtgataagtttagaacttaattaattaattgataagttgtgattgggctaattgtctttcatgtgtatagtttgtggttcgtgatgtttgcgttaggttcgataaacgtgattgttgcgcttagtcgtacgtcgataattagtgtctccgtatgaaattgttcaacgcctcgccgctaggtgtttaattcgctatcataagcactatttaggtttgcgatattcctatctatatgcattcatgtgcataatgcatttcattcaggtacgtgaattaatcacgtgatgcggaagacaaccccaagtagacccaggataatgcggaggttggacatctccacaagacgacgtcgtcagtcggatcaacctgaagatggatggacgaagcaagtatcggaacaaaggctgatcgtcaagtgatcgacgtctaacaaacactaacctagtgtttcttccaggcaagccccggtgcatgcaaccccttcattgtgtttttaaataatttttgcacactttaagtctagtgaaatgtgcattaagtttataggagttgcttggaaaccctttgatgcattgccttccttgaaatccatacctttatagatacttctggtgaagtatcaaaatatgatttacaaaaatgcttagccctactcagatgttgtgaatagaggttgtcttttgcgttaaggccttgctcaggggttatcctgaggaaagatggcttctacctgcaagaatattttcattgagagcgtggtgggatcttactgtaaagttccctgtgatgctcttttcatcctaaggaacacaaacaatcctaagggtggaaatacttaaatcgggacttgggctaggaacaggtgatgttctacccaggttgataaggattgaatgtgtatgtaggcgtgctgatcgaggaccctttaactggtcacatgcctcgtcatgggtaagccttgcctcgggcagactaaggccagaataagataacacgcaatgggcgtggagcggtggcgagagtagcgtgtaccctccgtggcaagagtctatacggtggtgtatctgtgctctttgttggcgtgaacctgatctggtcttaagaaccccggtggcgggttgacatatgcaagggttaagtgctacatatgtcgtgtgatcggagatcctcagctgagtataatcgattcggatcgccgtaccttcgcggttatgaagacttggtcacttccctacaacctaagtcaggatgtgaacctcaagaataaaaatgatgttgtattgatgagatggtgaaattagactagatgcaaacagagtttattaatatttaatcttgtgttaaaacattgaaagtaaggattcactttagtaagctatttctgcaaaagtatctaagttgattcttgctaaagcctctccttgattcccaatttcagcatacccttgagattcttttctttagtcgggtaagtcttgctgagtaattccatactcagggtttattccctattgtttttcaggttatagtcttgtgctgctgttgatggtgttaagtgccagtgggctcggccttcttatataagtataccccgtctttatcttcttattgaggatggtcacttgagctagcatatatttcaaacttatacttttgtaatcactccgataaaataatgtaaaaaatttgtaacctgtaaaatttggtaataagatttcccgctgcaaaaaaatgttgtgtgtgtgattggtgttacttaatcccgcggttctggttgtaagtggtttatccgatgtccttgggcaatcggacggatcctgttaagttatctggtgcacatgcatagctgtctgaggtctttgagacaaggacaggtgcatgtgggcccaataacttgggaggttctgccacagtaggtttatgaacagacatttttaatttaaatttgacgggtttcatcacaccctgaaacattgggcatcacattttgtcccttatttcgttgacgcatttgacgacacttgttattgtactctgttgggggccttcacaatgccgcctaagaagacaacagcgccaggggttgctctacaaccactggacacaaaccaggagacactctccctgcgagaagctaggagccagaagagaaaggctaccatctcgacaccttaggaggaggagttggatcaggagatcagggatctagaagccattcaccagcaagtacaaaggaagaaggaaaagatgcttcggctggctaaacttcagaggaagattgatggagcagctgaggaaatacgtcatctcactcaggatgaccaagaccgaaggccccaacacagggagcttcgtcaagagagcccaatcaatgaagatgaatggtacgacgattttcatcatggtaactttgcttttgatgatgcttctcctctagcagcagagttgcaagctac

SEQ ID NO: 25171 - DNA, 2588 bp, Zea Mays
gaaaataaaatgcgtagtctgaaatatatttggaaccaagtcatttaaactctcacaaatcctagacactagatatttgcatttaattatttaaaaaaaggaaatatccatcttctccgcgtcgtttgctggggatttttattccttactcaaccttatcaatacggcagctacaggtgttcatctctccagccgtgatacttcctgccgcgagctcatcttctcctccccagatttttccctcccgccgctcaagtgcttggatatctcaagccgccgctctggtctgggataagatcccgctgcccagtctgtcttcttcccccctgcggcagcttccgcggcgtccgtctccttgctcgcgccctacttctccccaaccacggcgccctctgttccttccagccggtcgactccctctgcagtcatgcgctcgcccagctcccttgcctcccccatggccagcgcccccttcaactcctctgctcgggtctccctcccatggcgcctccctctgccggccgccaatcttcctgcttggatctcgcccagctcgatctctgcgtctcctgctagccgcgagcccctgctccctgatttctccttgctcgctcctgagccatggagttcctgcgcgctccctctgctctctctccagaccgccggctccagctcgtcgagctcctccttgcttctctccacggcgctcggctgttcctactccctcccttcacgcgcgattctctgctctgtgcgcgcggtatttctccagcatgccgcgccgtccctgctcctccagctcgccgcgccctggattccatggctgcgccctggggttttgcacggagctctgcgcgcccagccccctccgttctcctcctcaccacggagctttccctccagctccttcctctccctctcggttctctgttggccgatgctctgctcgaccgcgccccctgctgcgcgcgctcgtgcgctctgcgctttgctcgccgtcgcagccagcgacgcccctgcttctccctcgtccatgccgcggcgtcctgctcgctccctggtgtcgtgcgggcgtgtcctcgagctcccccatggcggtcctgtgctcgcgtcggccctagcttggtctctcccatgacgcgcggcttcctgcgcgagttctgttgcgtccaactccatctcttccccagctcggccgcctgcttctctccgctgcttgtcgcgcccagctgcaactcgccgtgccctcactgctcccttctcctcctctgtctgcccagtctccaagctcgccgtcgaagctctcctgccgcgcccctggctcggctctgcgcgccgcgcgcgccgctccccgagctcacccaaatcagacagtgtctccctcagctcgatccctgccgtgcggctctccggctcaccggcgtttcacccgtgcgcgcacgctctggccgagttcggccctgtttatttcgccgcgcttggtctttagctccctgtgcacgccgttgcgagctcgtcagccaccattgccttgtcacagaaaccccaaccccaacgccgtcatccatggtcacgacctcgccaaatgcgtttgtcgcttggtcctgtgtcgtttggctcgtcgaccttgtccgctgtcgcgtgcgcttgttcttaatgcgcatcgcgcagtagttgggtctcgcgcgcgtggttttgaagctatgcgcgttcgtcgtgccgcgtcgtgtgccgatattctcttccggcagacctcgccatcgaccatgttgaagtaattgttcggctcctcgtatcccgcctattcgataaaacacctaaattcatagactgtcgacgcactgttgccatacgcggctgtctctgtcacttgcgtcagctcgccagacctacagctctatatacgtcaccctctcgtatcgtcgtcgaacttgtcgaacctcgttcttctctgctcgatctcgtcgaacccctaatcccggacattagacaaaaataagcgagatctttgtgcatcgcttatcaagtgctcggtcgaagacttcaatcgaagatcgtcgtcgatccgtgcgtcagcaagaaatcccaagaatcgggtgaagacgaagctagcagcgcgatattccccaagcgctcgataaattgcctggatcggaaaatcgctaccgatcacgcggattcgtgtcagctgtggaaacgggtgtttcttataaaattcggggctaaaccgcaagactcttcctatagccccggacggcgggttatgttgggactatgcttcgtcgcgccgaaggtctcgaaggaagaagcagcttcagctgaagctgtccgcgtgcgatgaccgaagcttgctcttcataaagcttcggaattatgaaccgacttaaaagtagaaagaccttttagtccataagcgtttgagtcgttattgtaaactttcatgaagggcatggttgtaaattctcacaggctgtgtcctgtgcctataaatagtgaacagtactcctctactgttcacgcttcttttcggggatctcaccacctcatcattttgagaatcaacctttgtcaaggcagaggtataattg

SEQ ID NO: 25172 - DNA, 1484 bp, Zea Mays
ttttttgttttctatatatataagtttcaacttccattgtattatctatcaatgatcatgttgagttcttctgtgatgttacaatccttgtcttgttattaaatttaaacttctattgtacctcagtgcctggagggaagtaggcctatctttcatataattgaaaattgatttttttttctgaggcactaggtattagccaactctcacctcttgtgtatttctttcttttagattaggaagatgaagggtttgaagcagaagaaggctcacctgatggagattcaggtcaatggtggtaccattgctgacaaggtggactacggctataaattttttgagaaagaggtccctgttgatgctgtcttccagaaggatgagatgattgacatcattggtgtgaccaaaggtaaaggttatgagggtgtggtcactcgttggggtgtcacccgccttccccgcaaaacccacaggggtctccgcaaggttgcttgtatcggtgcatggcatccggctagggtctcgtatacggttgcccgtgctggtcagaatgggtaccaccaccgcactgagatgaacaagaaggtctacaagatcggcaaggctggacaagagacccacgatgcctccacagagtttgacaggaccgagaaggacatcactcccatgggtggcttcccccactatggtatcgtgaagggtgactacctgatgatcaagggatgctgtgtgggtccaaagaagagggtggtgaccctccgccagtccctcctgaagcagacttcccggctggcgctggaggagatcaagctcaagttcattgacacatcgtccaaatttgggcacggtcgcttccagactaccgatgagaagcagaggttctttggtaagctcaaggcgtaaggtgctgcggtgcagcgaaagtcccatttgtcaaaatcatcaaactgtgaaacctttgtttgttaccttgctgtaccaagttttgtagcaggatgatttgggagcatgttccggtcttcaatggattgttctacgcttcagaactgcagtgactatgttttgtgctattttggttgttttaatgccctaatcactgcaagtgttttggtgtttgatgatcaacataactatttatattaattgtttgctagtgtttaaaaatatagtttggacggtgcaacgtggatttcgatgaagacatcgtggtgatcaagaaaatcatcttaaagtagtacagtagaagatttattgaagacttatgtagatcatgtaagtgtccacacaagacttctcgttggattttggcaaaaaagaaggaaataatagatctatttgggctcgtcgagaaggactacctttcgatgaagtcgtatgcggatggatgttggttagcttctcgttggagttggaaagatgatcagtgtgcggcgacagtaatcgttggatttcggcaaaaaagataataatagatctaaacgggt

SEQ ID NO: 25173 - DNA, 1294 bp, Zea Mays
gcatttcggtccggcgtgattgaaaccctcgcactgggacccctttatatatataactaacctctcctagggtttacgcgcattgtggctcctcacttctgcgccgccacccactacaggaagaggaggagggcaggatgtcgcaccgtaagttcgagcacccgaggcacggctccctcggcttccttcccaggaagcgctcctcccgccaccgcggcaaggtgaagtcatttcccagggatgaccccaagaagccttgccatctcactgccttccttggctacaaggctggcatgactcacattgtccgtgaggttgagaagccaggatccaaactccataagaaggaaacttgtgaggctgttaccatcattgaaacccctcctcttgtcattgttgggctcgtggcatatgtgaagactcctcgtggcctccgcacactcaactctgtttgggcccaacatcttagcgaagaagtgaggagaaggttctacaagaactggtgcaagagcaagaagaaggctttcacaaagtatgctctcaaatatgaaaatgatgctggcaagaaggaaattcagctgcagcttgagacttcccggctggcgctggaggagatcaagctcaagttcattgacacatcgtccaaatttgggcacggtcgcttccagactaccgatgagaagcagaggttctttggtaagctcaaggcgtaaggtgctgcggtgcagcgaaagtcccatttgtcaaaatcatcaaactgtgaaacctttgtttgttaccttgctgtaccaagttttgtagcaggatgatttgggagcatgttccggtcttcaatggattgttctacgcttcagaactgcagtgactatgttttgtgctattttggttgttttaatgccctaatcactgcaagtgttttggtgtttgatgatcaacataactatttatattaattgtttgctagtgtttaaaaatatagtttggacggtgcaacgtggatttcgatgaagacatcgtggtgatcaagaaaatcatcttaaagtagtacagtagaagatttattgaagacttatgtagatcatgtaagtgtccacacaagacttctcgttggattttggcaaaaaagaaggaaataatagatctatttgggctcgtcgagaaggactacctttcgatgaagtcgtatgcggatggatgttggttagcttctcgttggagttggaaagatgatcagtgtgcggcgacagtaatcgttggatttcggcaaaaaagataataatagatctaaacgggt

SEQ ID NO: 25174 - DNA, 619 bp, Zea Mays
caactggtcatagtgccttgtgtttcgagagctacagacagaggatattcaagctgttgacttctgcatattccacaattagagttgctgatgtggctcatttcatggggatgagtgaggaggatgcgacaaactatgctgtgcaaaacggttggagtttggatgcagcggccaagatgcttactgtcaaaaagccaaagtctcagaccaaccagaagcttgatgctagcaaactgcagcgtttgactgagtgtgttttccaccttgagaactgatgttcactgtcaatcgtgttgtgtccctgtttcttctctgctccacattgtaagaagcatgtttaccatgtgacagctatatgcctgagcgacttggcccctttcggccgaaaaggggtgatctctgaatttgcatcttatgtgatttctgacagcgtgctatgggttaatgtgcctattggtgacccctcctgccagtggctcattgaaatgagtcacactttgtcattagggcaagtataataacagcctataagccggctaaatgctgggttgtatgagagagaagagagaaaaaacgggctgtaaacttatagttaccttagacagaagaacaaaaaaaa

SEQ ID NO: 25175 - DNA, 786 bp, Zea Mays
ggaactgctccgaaatccgaattcaagagtccccgagtcgacaggccacaaatcccaattccaaaaccttttctccgtcccatcgccggcgatcttctccttcgccgccaatggatctctccgctgtccaggctgccctctccgacaagtcctactccaccctcgcctccctctgcgacgaacttctcctccagagagctacagacagaggatattcaagctgttgacttctgcatattccacaattagagttgctgatgtggctcatttcatggggatgagtgaggaggatgcgacaaactatgctgtgcaaaacggttggagtttggatgcagcggccaagatgcttactgtcaaaaagccaaagtctcagaccaaccagaagcttgatgctagcaaactgcagcgtttgactgagtgtgttttccaccttgagaactgatgttcactgtcaatcgtgttgtgtccctgtttcttctctgctccacattgtaagaagcatgtttaccatgtgacagctatatgcctgagcgacttggcccctttcggccgaaaaggggtgatctctgaatttgcatcttatgtgatttctgacagcgtgctatgggttaatgtgcctattggtgacccctcctgccagtggctcattgaaatgagtcacactttgtcattagggcaagtataataacagcctataagccggctaaatgctgggttgtatgagagagaagagagaaaaaacgggctgtaaacttatagttaccttagacagaagaacaaaaaaaa

SEQ ID NO: 25176 - DNA, 863 bp, Zea Mays
ggaactgctccgaaatccgaattcaagagtccccgagtcgacaggccacaaatcccaattccaaaaccttttctccgtcccatcgccggcgatcttctccttcgccgccaatggatctctccgctgtccaggctgccctctccgacaagtcctactccaccctcgcctccctctgcgacgaacttctcctccaggccgcgtcccagggattcaccaccgacgaatggccctactctgtccacctgcttgcccacctctacatcaatgacctagagctacagacagaggatattcaagctgttgacttctgcatattccacaattagagttgctgatgtggctcatttcatggggatgagtgaggaggatgcgacaaactatgctgtgcaaaacggttggagtttggatgcagcggccaagatgcttactgtcaaaaagccaaagtctcagaccaaccagaagcttgatgctagcaaactgcagcgtttgactgagtgtgttttccaccttgagaactgatgttcactgtcaatcgtgttgtgtccctgtttcttctctgctccacattgtaagaagcatgtttaccatgtgacagctatatgcctgagcgacttggcccctttcggccgaaaaggggtgatctctgaatttgcatcttatgtgatttctgacagcgtgctatgggttaatgtgcctattggtgacccctcctgccagtggctcattgaaatgagtcacactttgtcattagggcaagtataataacagcctataagccggctaaatgctgggttgtatgagagagaagagagaaaaaacgggctgtaaacttatagttaccttagacagaagaacaaaaaaaa

SEQ ID NO: 25177 - DNA, 1252 bp, Zea Mays
ttggaatgacttttgaatgctcatgattgattttgaatatggaatatcatttcttattaaataaaaattcacataaataatatagtaaatattagtccaagaattaatatgttatttataaataattttggtttgattcttacgaattttatgattatttaaatatgtattttgaaatttgaaaaggaaataaaaaaaaagaaaaaaaacaaaacctaatctaacctagctggccgaatcggcccaccaaggcccaacagccggccgccgcccctgctaaccctagccgccgctacccctggttccctctcccagccgccaccttcctctctcctctctcccacccggctgtctctctctctctctcctcgcttctctctcccaggcagcgccccgcaggacccgacgcccagctcgccaggcgccatcccgtccgtgccaggccgccgcgcccagagacccgcccctgcagccgaggacgacgcaccaggagcgcctgacgccacgaagccccagccgcgcacactgccctgcgcactgcgcactgcaactgcctcgactcgccgagcagcccgcgtgcacccgagccgcccgcgaccgtgcccagctgcgacgcctcgaagcccttgcgcgcagcgcccgaccgaagccgccacccgcgccgtccgcgtgaatggagccatttctttggcgttaatggagctttaacacgtgcgtttctctcccattactctcatccataaagtcccggccgccattgatggagccgccgaccgttcacttcctcccctcggcgtctctctctccccgtccgctctacaagaccgccggatctctcctctctctccttacccgaacctctctcacgctttctctctcccttgctcgccgttcgccatcgtgctggagcccgtccgtgcagcaccccggcactcgcagcagcgccacgcacccgccacacaaagccctcctctgctctcgccgtgcccaccccgttcgtcgatcgtccgccatccgtggagcctcaccagaactcacgccccaccgtccaaacgcatcgccggagttacgccgtccgtcgtcgacgtgaccgtgcagcatgacgaccacgctcgttccctgcccgacagaccaccccctgctcgtcgacattcacccctgcacatgagcgaacccaagtggttgatctagtagttaagaatcaagatctattccgatccgtggaagaacctcaagttttcagtaagcaagg

SEQ ID NO: 25178 - DNA, 2026 bp, Zea Mays
ttggaatgacttttgaatgctcatgattgattttgaatatggaatatcatttcttattaaataaaaattcacataaataatatagtaaatattagtccaagaattaatatgttatttataaataattttggtttgattcttacgaattttatgattatttaaatatgtattttgaaatttgaaaaggaaataaaaaaaaagaaaaaaaacaaaacctaatctaacctagctggccgaatcggcccaccaaggcccaacagccggccgccgcccctgctaaccctagccgccgctacccctggttccctctcccagccgccaccttcctctctcctctctcccacccggctgtctctctctctctctcctcgcttctctctcccaggcagcgccccgcaggacccgacgcccagctcgccaggcgccatcccgtccgtgccaggccgccgcgcccagagacccgcccctgcagccgaggacgacgcaccaggagcgcctgacgccacgaagccccagccgcgcacactgccctgcgcactgcgcactgcaactgcctcgactcgccgagcagcccgcgtgcacccgagccgcccgcgaccgtgcccagctgcgacgcctcgaagcccttgcgcgcagcgcccgaccgaagccgccacccgcgccgtccgcgtgaatggagccatttctttggcgttaatggagctttaacacgtgcgtttctctcccattactctcatccataaagtcccggccgccattgatggagccgccgaccgttcacttcctcccctcggcgtctctctctccccgtccgctctacaagaccgccggatctctcctctctctccttacccgaacctctctcacgctttctctctcccttgctcgccgttcgccatcgtgctggagcccgtccgtgcagcaccccggcactcgcagcagcgccacgcacccgccacacaaagccctcctctgctctcgccgtgcccaccccgttcgtcgatcgtccgccatccgtggagcctcaccagaactcacgccccaccgtccaaacgcatcgccggagttacgccgtccgtcgtcgacgtgaccgtgcagcatgacgaccacgctcgttccctgcccgacagaccaccccctgctcgtcgacattcacccctgcacatgagcgaacccaaggtttaagacaaccccaacctattaatttattgtctaaattatgtgttgaattaatttatgaatttgtgaattatcgttgtaatattatgcgacttgacgattcatgtatgattttagagattccgatgtttacgtgcaaccaaaattgaaccccgcgataatactttgaatatgcgtaggattttataattctaaaaatgaacacggtcactattcactacttccgtggttttcatactagaaatgtttataattaatttcacttttgtgtgtggaacgataattgttagtagtagtttaagtataaacttatttgcatgaagaaattgaaataggcactaagtcacgtattttctagtcgaatgaaaatatatagattttactattcataataaatgtattcataagtatgacactaaattatgtagaattagtaaagtaattatgtacgtagtaataaccatgaataggttattaaaagtcccatttagtaatttataattaattcttagtatattaatgttagaggaattaaataaacaattttttagttataggtataaattctatttagaaaagaaagaagaaaactgaaatagtagaatttataatgttaaaatgatttaattaggcgctcatgctttcctaataaagaaattgatagttatgttggtaaatataggtttcttactaaagaattagagaatttgattctaacggtaaaatgacccttttaatagacatcatgattttgatttaataagatttattatagatgtttaagtatagccgtactaaatagtaatatgtcatataacttttctaataatgatataatggcttaatt

SEQ ID NO: 25179 - DNA, 1357 bp, Zea Mays
gcccaatccatcctacgaggcgacaaccttggccacttgctgctccactcactcttgcgtcgcgtggacacgatcgagtacgcccttccctgtcggttccggtcctcaccttcggcttgccgaacggtacgcttgaactcacgtgcgcgtcgcatggtcagctaccatgagcaagaggtggacgacgacgaattggagacagaatactcgccctcccctcggttgtcatggccatggcgatcagcgcacacgtgtttggttttgttttattttccttaaatttggtgtggttgccaagagaaaataggagaagataaaaaggtaccaaccattaaagtgcttgaagatagcttctcttctttgacttgcttcgacagaacctcaactttccctattacattcatcatattatcctcgatttgtttcttggccatcatactacaccattaattgaactttgtgtttatgcagcaaatattgtcacttcagccctgttaaccagttaccatttattcagtgccacatatttacttgaatttagtttcatcaaataatttctacatatttaagtgtgattgagtaataccatgtaaatatggattctttactgatgttgcgctacattattctgatataaaaacaatgtaagcagctttgtgattaagcattgtatgccatgcttcgataagtacgtcatcattctttctatcaattcttacataaacaataatggtctatgataaatattatagtcatttgccaacctatatttggttctccactgagcttcctacctggtatcactacaatttatttggccagaatggtcatggagggtgattctgcttgctgtctactactacaagtttacatcatcacattcttcactggttgtatatgttaagaattgttctactactacttatatattaaggatcatcacactcatcgaatcaacttggaagttacatattgtgccactgcatcattctatgatcctattctatgcctcttcactgcttcaaagtactatcagattagatatttaattgtctaaaggtagcaggctgcaaacgttggaaacatactatcattcactcaaggtgaaaagtgtagacaaaaaaaatatttgagaaaaaaacattgtgcacacactcgcgctccatcgactagagggccaagggcgccattgtggagaccaaagaccggcacagttgcaataagcaaggcccggatttttgaaataacacagcgatcaacctgctgggtagttgtcagtttactgcagagagtggcattcttatcaccacatggaattactcttgttctgtttatataatgtcaacctatcctcata

SEQ ID NO: 25180 - DNA, 2470 bp, Zea Mays
cttgctcttgctcttgtattcttgcttatactgtgggccatgctcgggaactagggctgaagattgatgcagtgccattgtgccaataagcaagaaaggcccactaaagggcaattgacgctgggcggcgacggcggggggagactgagcggccgaggagccggtgtggcatcggtgcatcgcagcggcctgaggtcgcgagcagcacagcagggtgcgccaggcgccgacgcggtacggggcaccgcgcgacgcgtgagcgcgtggccggtctcagcaccaagacgcatcaaagccggcgctaggcagggcactatcgcgctgctgcgcagctgtgcctgcgctggtccctggaggattagtgacagcactcaccaatttgtgttttgcagaattgggagaaatcaaataacttcacaacagatcaggaagctttagagcttggcaatggagatgagagcccgggaatctgtaagcatgtcgaaggatctaactggggaaatcacaccttttgccactgccctacatgatgtgttcctccactcccattgctcatcatgcttcaccaagttacttccacaaaccccttgtgtcatgtcttgcatgacatgctgttctcttcgatactgctgttcagagtgcttacgtgcggattcagtggtgcatgtttcctctggtgaatgttgcttttttgtggatcacctcaagagagcctccccttcctatgttactgaaggaacgagtgatttgcgtgctgccctccgccttctgtgtgtgcttgagatacatggtcttgtttcgcctgattcaatcaatcactacagtagaattggtggactttcagcaagtggtattgaggaagctttgaaggaaggtgaggttattgctgagaggatactggaggggagcttattgatgtcatctgctagaaaatcgagggcacagacttgtgttattttttcagacaggcttaaacttgagaagatggcattatgggcagtgattatcaatagcgtcgaggtgcaacttagtgaagggttagctttgggagttgcagtgtatggcccgagtttctcatggttcaaccatagttgctttcccagtgcttcttaccggtttgtactggctccaaggaatgaagactgtgcttcacagaaatcaaaatccagtgtagtccctgctagcaaaggagttgcagctgatgtggaagcaagacattcggatttgtggtcaaagtataaatttatttgttcttgcaggcgatgtattgcatcaccagagccatacactgatcttattctgaattgtgatgtgagggacttggataaagcagaagcagagggtactgttacacctccagcaattgagaatttgggtgatgtcctacaacaggcaatatctgagtacacgtcaaatgatgaccctgaagcttgctgtgatatgattgaaaccatgctttccaacaggttggtgagtggtttgaagcaagaggatatttcagggagaaaacatatactacagcctcttcaccatatctgtcttactgcttacatgacacttgcctctgcttaccggtttcgcgccttaagtttagaagaagctgtccgttcagatggagaaaatactgatgaattttttagaatggctaaagcagcagcagcgtattccctggtacttgcagggagtacacaccatttgttcttatcagaatgttctcttatgatccccctgtctcattttttgttaaacactggacagtctctgttatatcttgttgagtctatcaagggaaagacaaggcaaaatatatccgaggccaggctcagcttttcttcatgtccagcaagttctacagacaatgattctccaccgtaccatgtgttcagatcaacctgtgaagcgtttggcaagcaaatgttatccctgtcactgcggtgctggtcatttctagtgcgaggtttaccctgcctggaaaagataaagagccccatggaatttagtatgcccggaacaacaatatttcagtctgtcctttctgaggaagaccatgccaacctttccgcgcacgagccagtaggtttcacggagagacaagcggggtgcatccttagtttggctctatgttgtatcacctactgcaaatatcttgctaccatatgctacggcccacatcattatctggcagaccatgcaaaatatctacttgaaggtatcgatcctgcacaatgaatcttctttcttggcataggtgtgttgtgaaatcttatgctcttatgagttaatgtaaaacgtgtcgtgattatcaaggctgttgagcttattttctatatgattgtatgctgagctcgttatttattattttgtatggaagcaccatttttctaaaaaaatttggtcactgggaagttgtatcactgatcttgcacctttcctggctttttctgtttgtatgaagaagagttactaattt

SEQ ID NO: 25181 - DNA, 2903 bp, Zea Mays
cttgctcttgctcttgtattcttgcttatactgtgggccatgctcgggaactagggctgaagattgatgcagtgccattgtgccaataagcaagaaaggcccactaaagggcaattgacgctgggcggcgacggcggggggagactgagcggccgaggagccggtgtggcatcggtgcatcgcagcggcctgaggtcgcgagcagcacagcagggtgcgccaggcgccgacgcggtacggggcaccgcgcgacgcgtgagcgcgtggccggtctcagcaccaagacgcatcaaagccggcgctaggcagggcactatcgcgctgctgcgcagctgtgcctgcgctggtccctggaggattagtgacagcactcaccaatttgtgttttgcagaattgggagaaatcaaataacttcacaacagatcaggaagctttagagcttggcaatggagatgagagcccgggaatctgtaagcatgtcgaaggatctaactggggaaatcacaccttttgccactgccctacatgatgtgttcctccactcccattgctcatcatgcttcaccaagttacttccacaaaccccttgtgtcatgtcttgcatgacatgctgttctcttcgatactgctgttcagagtgcttacgtgcggattcagtggtgcatgtttcctctggtgaatgttgcttttttgtggatcacctcaagagagcctccccttcctatgttactgaaggaacgagtgatttgcgtgctgccctccgccttctgtgtgtgcttgagatacatggtcttgtttcgcctgattcaatcaatcactacagtagaattggtggactttcagcaagtggtattgaggaagctttgaaggaaggtgaggttattgctgagaggatactggaggggagcttattgatgtcatctgctagaaaatcgagggcacagacttgtgttattttttcagacaggcttaaacttgagaagatggcattatgggcagtgattatcaatagcgtcgaggtgcaacttagtgaagggttagctttgggagttgcagtgtatggcccgagtttctcatggttcaaccatagttgctttcccagtgcttcttaccggtttgtactggctccaaggaatgaagactgtgcttcacagaaatcaaaatccagtgtagtccctgctagcaaaggagttgcagctgatgtggtaaaggagaataatgaccattttgtttaggacctgctaaaattttgcttgtgtcatacaaagaataagataaaatatttgaatactgttcacaacatactttcattatcataaacaagtgctatttgaatgtttatacataaatggttcctcaaacactttcataggctgaatctaaatattcatgaatatactcattaactcatgtttaaatttcaatagttagacaatatttatatagaatttacttgagagaaaatcattaagcctattattgtgcttgtttttattgcagtggcatgcttggcaatacgaagatcattctactcatgcactgtgcaaatatggcccaagagttgttgttcgttgcataaaaccaattaacaagggagatgaagtgtgcataacatacattgatcttctccagaccagggaagcaagacattcggatttgtggtcaaagtataaatttatttgttcttgcaggcgatgtattgcatcaccagagccatacactgatcttattctgaattgtgatgtgagggacttggataaagcagaagcagagggtactgttacacctccagcaattgagaatttgggtgatgtcctacaacaggcaatatctgagtacacgtcaaatgatgaccctgaagcttgctgtgatatgattgaaaccatgctttccaacaggttggtgagtggtttgaagcaagaggatatttcagggagaaaacatatactacagcctcttcaccatatctgtcttactgcttacatgacacttgcctctgcttaccggtttcgcgccttaagtttagaagaagctgtccgttcagatggagaaaatactgatgaattttttagaatggctaaagcagcagcagcgtattccctggtacttgcagggagtacacaccatttgttcttatcagaatgttctcttatgatccccctgtctcattttttgttaaacactggacagtctctgttatatcttgttgagtctatcaagggaaagacaaggcaaaatatatccgaggccaggctcagcttttcttcatgtccagcaagttctacagacaatgattctccaccgtaccatgtgttcagatcaacctgtgaagcgtttggcaagcaaatgttatccctgtcactgcggtgctggtcatttctagtgcgaggtttaccctgcctggaaaagataaagagccccatggaatttagtatgcccggaacaacaatatttcagtctgtcctttctgaggaagaccatgccaacctttccgcgcacgagccagtaggtttcacggagagacaagcggggtgcatccttagtttggctctatgttgtatcacctactgcaaatatcttgctaccatatgctacggcccacatcattatctggcagaccatgcaaaatatctacttgaaggtatcgatcctgcacaatgaatcttctttcttggcataggtgtgttgtgaaatcttatgctcttatgagttaatgtaaaacgtgtcgtgattatcaaggctgttgagcttattttctatatgattgtatgctgagctcgttatttattattttgtatggaagcaccatttttctaaaaaaatttggtcactgggaagttgtatcactgatcttgcacctttcctggctttttctgtttgtatgaagaagagttactaattt

SEQ ID NO: 25182 - DNA, 2526 bp, Zea Mays
cttgctcttgctcttgtattcttgcttatactgtgggccatgctcgggaactagggctgaagattgatgcagtgccattgtgccaataagcaagaaaggcccactaaagggcaattgacgctgggcggcgacggcggggggagactgagcggccgaggagccggtgtggcatcggtgcatcgcagcggcctgaggtcgcgagcagcacagcagggtgcgccaggcgccgacgcggtacggggcaccgcgcgacgcgtgagcgcgtggccggtctcagcaccaagacgcatcaaagccggcgctaggcagggcactatcgcgctgctgcgcagctgtgcctgcgctggtccctggaggattagtgacagcactcaccaatttgtgttttgcagaattgggagaaatcaaataacttcacaacagatcaggaagctttagagcttggcaatggagatgagagcccgggaatctgtaagcatgtcgaaggatctaactggggaaatcacaccttttgccactgccctacatgatgtgttcctccactcccattgctcatcatgcttcaccaagttacttccacaaaccccttgtgtcatgtcttgcatgacatgctgttctcttcgatactgctgttcagagtgcttacgtgcggattcagtggtgcatgtttcctctggtgaatgttgcttttttgtggatcacctcaagagagcctccccttcctatgttactgaaggaacgagtgatttgcgtgctgccctccgccttctgtgtgtgcttgagatacatggtcttgtttcgcctgattcaatcaatcactacagtagaattggtggactttcagcaagtggtattgaggaagctttgaaggaaggtgaggttattgctgagaggatactggaggggagcttattgatgtcatctgctagaaaatcgagggcacagacttgtgttattttttcagacaggcttaaacttgagaagatggcattatgggcagtgattatcaatagcgtcgaggtgcaacttagtgaagggttagctttgggagttgcagtgtatggcccgagtttctcatggttcaaccatagttgctttcccagtgcttcttaccggtttgtactggctccaaggaatgaagactgtgcttcacagaaatcaaaatccagtgtagtccctgctagcaaaggagttgcagctgatgtgtggcatgcttggcaatacgaagatcattctactcatggtacttcattacgttctacgaagcaagacattcggatttgtggtcaaagtataaatttatttgttcttgcaggcgatgtattgcatcaccagagccatacactgatcttattctgaattgtgatgtgagggacttggataaagcagaagcagagggtactgttacacctccagcaattgagaatttgggtgatgtcctacaacaggcaatatctgagtacacgtcaaatgatgaccctgaagcttgctgtgatatgattgaaaccatgctttccaacaggttggtgagtggtttgaagcaagaggatatttcagggagaaaacatatactacagcctcttcaccatatctgtcttactgcttacatgacacttgcctctgcttaccggtttcgcgccttaagtttagaagaagctgtccgttcagatggagaaaatactgatgaattttttagaatggctaaagcagcagcagcgtattccctggtacttgcagggagtacacaccatttgttcttatcagaatgttctcttatgatccccctgtctcattttttgttaaacactggacagtctctgttatatcttgttgagtctatcaagggaaagacaaggcaaaatatatccgaggccaggctcagcttttcttcatgtccagcaagttctacagacaatgattctccaccgtaccatgtgttcagatcaacctgtgaagcgtttggcaagcaaatgttatccctgtcactgcggtgctggtcatttctagtgcgaggtttaccctgcctggaaaagataaagagccccatggaatttagtatgcccggaacaacaatatttcagtctgtcctttctgaggaagaccatgccaacctttccgcgcacgagccagtaggtttcacggagagacaagcggggtgcatccttagtttggctctatgttgtatcacctactgcaaatatcttgctaccatatgctacggcccacatcattatctggcagaccatgcaaaatatctacttgaaggtatcgatcctgcacaatgaatcttctttcttggcataggtgtgttgtgaaatcttatgctcttatgagttaatgtaaaacgtgtcgtgattatcaaggctgttgagcttattttctatatgattgtatgctgagctcgttatttattattttgtatggaagcaccatttttctaaaaaaatttggtcactgggaagttgtatcactgatcttgcacctttcctggctttttctgtttgtatgaagaagagttactaattt

SEQ ID NO: 25183 - DNA, 2454 bp, Zea Mays
cttgctcttgctcttgtattcttgcttatactgtgggccatgctcgggaactagggctgaagattgatgcagtgccattgtgccaataagcaagaaaggcccactaaagggcaattgacgctgggcggcgacggcggggggagactgagcggccgaggagccggtgtggcatcggtgcatcgcagcggcctgaggtcgcgagcagcacagcagggtgcgccaggcgccgacgcggtacggggcaccgcgcgacgcgtgagcgcgtggccggtctcagcaccaagacgcatcaaagccggcgctaggcagggcactatcgcgctgctgcgcagctgtgcctgcgctggtccctggaggattagtgacagcactcaccaatttgtgttttgcagaattgggagaaatcaaataacttcacaacagatcaggaagctttagagcttggcaatggagatgagagcccgggaatctgtaagcatgtcgaaggatctaactggggaaatcacaccttttgccactgccctacatgatgtgttcctccactcccattgctcatcatgcttcaccaagttacttccacaaaccccttgtgtcatgtcttgcatgacatgctgttctcttcgatactgctgttcagagtgcttacgtgcggattcagtggtgcatgtttcctctggtgaatgttgcttttttgtggatcacctcaagagagcctccccttcctatgttactgaaggaacgagtgatttgcgtgctgccctccgccttctgtgtgtgcttgagatacatggtcttgtttcgcctgattcaatcaatcactacagtagaattggtggactttcagcaagtggtattgaggaagctttgaaggaaggtgaggttattgctgagaggatactggaggggagcttattgatgtcatctgctagaaaatcgagggcacagacttgtgttattttttcagacaggcttaaacttgagaagatggcattatgggcagtgattatcaatagcgtcgaggtgcaacttagtgaagggttagctttgggagttgcagtgtatggcccgagtttctcatggttcaaccatagttgctttcccagtgcttcttaccggtttgtactggctccaaggaatgaagactgtgcttcacagaaatcaaaatccagtgtagtccctgctagcaaaggagttgcagctgatgtgtggcatgcttggcaatacgaagatcattctactcatggcgatgtattgcatcaccagagccatacactgatcttattctgaattgtgatgtgagggacttggataaagcagaagcagagggtactgttacacctccagcaattgagaatttgggtgatgtcctacaacaggcaatatctgagtacacgtcaaatgatgaccctgaagcttgctgtgatatgattgaaaccatgctttccaacaggttggtgagtggtttgaagcaagaggatatttcagggagaaaacatatactacagcctcttcaccatatctgtcttactgcttacatgacacttgcctctgcttaccggtttcgcgccttaagtttagaagaagctgtccgttcagatggagaaaatactgatgaattttttagaatggctaaagcagcagcagcgtattccctggtacttgcagggagtacacaccatttgttcttatcagaatgttctcttatgatccccctgtctcattttttgttaaacactggacagtctctgttatatcttgttgagtctatcaagggaaagacaaggcaaaatatatccgaggccaggctcagcttttcttcatgtccagcaagttctacagacaatgattctccaccgtaccatgtgttcagatcaacctgtgaagcgtttggcaagcaaatgttatccctgtcactgcggtgctggtcatttctagtgcgaggtttaccctgcctggaaaagataaagagccccatggaatttagtatgcccggaacaacaatatttcagtctgtcctttctgaggaagaccatgccaacctttccgcgcacgagccagtaggtttcacggagagacaagcggggtgcatccttagtttggctctatgttgtatcacctactgcaaatatcttgctaccatatgctacggcccacatcattatctggcagaccatgcaaaatatctacttgaaggtatcgatcctgcacaatgaatcttctttcttggcataggtgtgttgtgaaatcttatgctcttatgagttaatgtaaaacgtgtcgtgattatcaaggctgttgagcttattttctatatgattgtatgctgagctcgttatttattattttgtatggaagcaccatttttctaaaaaaatttggtcactgggaagttgtatcactgatcttgcacctttcctggctttttctgtttgtatgaagaagagttactaattt

SEQ ID NO: 25184 - DNA, 2925 bp, Zea Mays
cttgctcttgctcttgtattcttgcttatactgtgggccatgctcgggaactagggctgaagattgatgcagtgccattgtgccaataagcaagaaaggcccactaaagggcaattgacgctgggcggcgacggcggggggagactgagcggccgaggagccggtgtggcatcggtgcatcgcagcggcctgaggtcgcgagcagcacagcagggtgcgccaggcgccgacgcggtacggggcaccgcgcgacgcgtgagcgcgtggccggtctcagcaccaagacgcatcaaagccggcgctaggcagggcactatcgcgctgctgcgcagctgtgcctgcgctggtccctggaggattagtgacagcactcaccaatttgtgttttgcagaattgggagaaatcaaataacttcacaacagatcaggaagctttagagcttggcaatggagatgagagcccgggaatctgtaagcatgtcgaaggatctaactggggaaatcacaccttttgccactgccctacatgatgtgttcctccactcccattgctcatcatgcttcaccaagttacttccacaaaccccttgtgtcatgtcttgcatgacatgctgttctcttcgatactgctgttcagagtgcttacgtgcggattcagtggtgcatgtttcctctggtgaatgttgcttttttgtggatcacctcaagagagcctccccttcctatgttactgaaggaacgagtgatttgcgtgctgccctccgccttctgtgtgtgcttgagatacatggtcttgtttcgcctgattcaatcaatcactacagtagaattggtggactttcagcaagtggtattgaggaagctttgaaggaaggtgaggttattgctgagaggatactggaggggagcttattgatgtcatctgctagaaaatcgagggcacagacttgtgttattttttcagacaggcttaaacttgagaagatggcattatgggcagtgattatcaatagcgtcgaggtgcaacttagtgaagggttagctttgggagttgcagtgtatggcccgagtttctcatggttcaaccatagttgctttcccagtgcttcttaccggtttgtactggctccaaggaatgaagactgtgcttcacagaaatcaaaatccagtgtagtccctgctagcaaaggagttgcagctgatgtggtaaaggagaataatgaccattttgtttaggacctgctaaaattttgcttgtgtcatacaaagaataagataaaatatttgaatactgttcacaacatactttcattatcataaacaagtgctatttgaatgtttatacataaatggttcctcaaacactttcataggctgaatctaaatattcatgaatatactcattaactcatgtttaaatttcaatagttagacaatatttatatagaatttacttgagagaaaatcattaagcctattattgtgcttgtttttattgcagtggcatgcttggcaatacgaagatcattctactcatggtacttcattacgttctacgttagtgtgcaactattaaattcatcactataaactttctccgttactctttatagcactgtgcaaatatggcccaagagttgttgttcgttgcataaaaccaattaacaagggagatgaagtgtgcataacatacattgatcttctccagaccagggcgatgtattgcatcaccagagccatacactgatcttattctgaattgtgatgtgagggacttggataaagcagaagcagagggtactgttacacctccagcaattgagaatttgggtgatgtcctacaacaggcaatatctgagtacacgtcaaatgatgaccctgaagcttgctgtgatatgattgaaaccatgctttccaacaggttggtgagtggtttgaagcaagaggatatttcagggagaaaacatatactacagcctcttcaccatatctgtcttactgcttacatgacacttgcctctgcttaccggtttcgcgccttaagtttagaagaagctgtccgttcagatggagaaaatactgatgaattttttagaatggctaaagcagcagcagcgtattccctggtacttgcagggagtacacaccatttgttcttatcagaatgttctcttatgatccccctgtctcattttttgttaaacactggacagtctctgttatatcttgttgagtctatcaagggaaagacaaggcaaaatatatccgaggccaggctcagcttttcttcatgtccagcaagttctacagacaatgattctccaccgtaccatgtgttcagatcaacctgtgaagcgtttggcaagcaaatgttatccctgtcactgcggtgctggtcatttctagtgcgaggtttaccctgcctggaaaagataaagagccccatggaatttagtatgcccggaacaacaatatttcagtctgtcctttctgaggaagaccatgccaacctttccgcgcacgagccagtaggtttcacggagagacaagcggggtgcatccttagtttggctctatgttgtatcacctactgcaaatatcttgctaccatatgctacggcccacatcattatctggcagaccatgcaaaatatctacttgaaggtatcgatcctgcacaatgaatcttctttcttggcataggtgtgttgtgaaatcttatgctcttatgagttaatgtaaaacgtgtcgtgattatcaaggctgttgagcttattttctatatgattgtatgctgagctcgttatttattattttgtatggaagcaccatttttctaaaaaaatttggtcactgggaagttgtatcactgatcttgcacctttcctggctttttctgtttgtatgaagaagagttactaattt

SEQ ID NO: 25185 - DNA, 2802 bp, Zea Mays
cttgctcttgctcttgtattcttgcttatactgtgggccatgctcgggaactagggctgaagattgatgcagtgccattgtgccaataagcaagaaaggcccactaaagggcaattgacgctgggcggcgacggcggggggagactgagcggccgaggagccggtgtggcatcggtgcatcgcagcggcctgaggtcgcgagcagcacagcagggtgcgccaggcgccgacgcggtacggggcaccgcgcgacgcgtgagcgcgtggccggtctcagcaccaagacgcatcaaagccggcgctaggcagggcactatcgcgctgctgcgcagctgtgcctgcgctggtccctggaggattagtgacagcactcaccaatttgtgttttgcagaattgggagaaatcaaataacttcacaacagatcaggaagctttagagcttggcaatggagatgagagcccgggaatctgtaagcatgtcgaaggatctaactggggaaatcacaccttttgccactgccctacatgatgtgttcctccactcccattgctcatcatgcttcaccaagttacttccacaaaccccttgtgtcatgtcttgcatgacatgctgttctcttcgatactgctgttcagagtgcttacgtgcggattcagtggtgcatgtttcctctggtgaatgttgcttttttgtggatcacctcaagagagcctccccttcctatgttactgaaggaacgagtgatttgcgtgctgccctccgccttctgtgtgtgcttgagatacatggtcttgtttcgcctgattcaatcaatcactacagtagaattggtggactttcagcaagtggtattgaggaagctttgaaggaaggtgaggttattgctgagaggatactggaggggagcttattgatgtcatctgctagaaaatcgagggcacagacttgtgttattttttcagacaggcttaaacttgagaagatggcattatgggcagtgattatcaatagcgtcgaggtgcaacttagtgaagggttagctttgggagttgcagtgtatggcccgagtttctcatggttcaaccatagttgctttcccagtgcttcttaccggtttgtactggctccaaggaatgaagactgtgcttcacagaaatcaaaatccagtgtagtccctgctagcaaaggagttgcagctgatgtggtaaaggagaataatgaccattttgtttaggacctgctaaaattttgcttgtgtcatacaaagaataagataaaatatttgaatactgttcacaacatactttcattatcataaacaagtgctatttgaatgtttatacataaatggttcctcaaacactttcataggctgaatctaaatattcatgaatatactcattaactcatgtttaaatttcaatagttagacaatatttatatagaatttacttgagagaaaatcattaagcctattattgtgcttgtttttattgcagtggcatgcttggcaatacgaagatcattctactcatggaagcaagacattcggatttgtggtcaaagtataaatttatttgttcttgcaggcgatgtattgcatcaccagagccatacactgatcttattctgaattgtgatgtgagggacttggataaagcagaagcagagggtactgttacacctccagcaattgagaatttgggtgatgtcctacaacaggcaatatctgagtacacgtcaaatgatgaccctgaagcttgctgtgatatgattgaaaccatgctttccaacaggttggtgagtggtttgaagcaagaggatatttcagggagaaaacatatactacagcctcttcaccatatctgtcttactgcttacatgacacttgcctctgcttaccggtttcgcgccttaagtttagaagaagctgtccgttcagatggagaaaatactgatgaattttttagaatggctaaagcagcagcagcgtattccctggtacttgcagggagtacacaccatttgttcttatcagaatgttctcttatgatccccctgtctcattttttgttaaacactggacagtctctgttatatcttgttgagtctatcaagggaaagacaaggcaaaatatatccgaggccaggctcagcttttcttcatgtccagcaagttctacagacaatgattctccaccgtaccatgtgttcagatcaacctgtgaagcgtttggcaagcaaatgttatccctgtcactgcggtgctggtcatttctagtgcgaggtttaccctgcctggaaaagataaagagccccatggaatttagtatgcccggaacaacaatatttcagtctgtcctttctgaggaagaccatgccaacctttccgcgcacgagccagtaggtttcacggagagacaagcggggtgcatccttagtttggctctatgttgtatcacctactgcaaatatcttgctaccatatgctacggcccacatcattatctggcagaccatgcaaaatatctacttgaaggtatcgatcctgcacaatgaatcttctttcttggcataggtgtgttgtgaaatcttatgctcttatgagttaatgtaaaacgtgtcgtgattatcaaggctgttgagcttattttctatatgattgtatgctgagctcgttatttattattttgtatggaagcaccatttttctaaaaaaatttggtcactgggaagttgtatcactgatcttgcacctttcctggctttttctgtttgtatgaagaagagttactaattt

SEQ ID NO: 25186 - DNA, 3832 bp, Zea Mays
cttgctcttgctcttgtattcttgcttatactgtgggccatgctcgggaactagggctgaagattgatgcagtgccattgtgccaataagcaagaaaggcccactaaagggcaattgacgctgggcggcgacggcggggggagactgagcggccgaggagccggtgtggcatcggtgcatcgcagcggcctgaggtcgcgagcagcacagcagggtgcgccaggcgccgacgcggtacggggcaccgcgcgacgcgtgagcgcgtggccggtctcagcaccaagacgcatcaaagccggcgctaggcagggcactatcgcgctgctgcgcagctgtgcctgcgctggtccctggaggattagtgacagcactcaccaatttgtgttttgcagaattgggagaaatcaaataacttcacaacagatcaggaagctttagagcttggcaatggagatgagagcccgggaatctgtaagcatgtcgaaggatctaactggggaaatcacaccttttgccactgccctacatgatgtgttcctccactcccattgctcatcatgcttcaccaagttacttccacaaaccccttgtgtcatgtcttgcatgacatgctgttctcttcgatactgctgttcagagtgcttacgtgcggattcagtggtgcatgtttcctctggtgaatgttgcttttttgtggatcacctcaagagagcctccccttcctatgttactgaaggaacgagtgatttgcgtgctgccctccgccttctgtgtgtgcttgagatacatggtcttgtttcgcctgattcaatcaatcactacagtagaattggtggactttcagcaagtggtattgaggaagctttgaaggaaggtgaggttattgctgagaggatactggaggggagcttattgatgtcatctgctagaaaatcgagggcacagacttgtgttattttttcagacaggcttaaacttgagaagatggcattatgggcagtgattatcaatagcgtcgaggtgcaacttagtgaagggttagctttgggagttgcagtgtatggcccgagtttctcatggttcaaccatagttgctttcccagtgcttcttaccggtttgtactggctccaaggaatgaagactgtgcttcacagaaatcaaaatccagtgtagtccctgctagcaaaggagttgcagctgatgtgtggcatgcttggcaatacgaagatcattctactcatggtacttcattacgttctacgttagtgtgcaactattaaattcatcactataaactttctccgttactctttatagcactgtgcaaatatggcccaagagttgttgttcgttgcataaaaccaattaacaagggagatgaagtgtgcataacatacattgatcttctccagaccagggtactatttcttgaattttgctgaacccatattttgagtcaccctgacacatgaagtcagtatacccataatattatagatctccatatattatcaacatcaacatagccttttagtctcaaacaagtcggggtaggctagagttgaaacccaacaagaagtcactaaaaagagaaagagagagaaaggggaggggggaaagcttttgagagaactaaaaggaaaaagacctaatcacggttcaagcacgtggatagcttctttccaagcacttctatccaaacacaactcctttcggatatttcattcattcaattcccttttgattgcctcctctcatgtcaagtttggccgctctctaccgctcttcatatactatgtttccaagaatctaatcatggtttacttgtgcagttcattgtagtgttcgctgcctgagttactgttatacacagtatttaatatttacatgattgacatatcatattttgccttagaattttgggctgtaatttagaacaaaaatatcaaaggagtaaaggacctaacactcgcactcagttttggtatttttgtttcttttgagcagctgttgttgatacatgacagtgccctgattagtagtgtattggtaatttgcttgtgaaaaaagattatcttgactcacatggtcacagtcacacttactgtattctgcaagttacacactagtgcagtagtgcctagttcatagctacgccacttgataaaattgtcaacttatcttgaaaactttggtttctctgctttttagcagaggaatgcaaaatgttgagttgttgaccaaccctgtccgttttgatgtagctttctatacaatagtattaatgtttttcactagcgattagtcaatgtgtactggttatcttagcaaaatttagttgatattgtcgaagttccagattgaggccaccatccatagatggaaaatagacttttgtggtatttgtaccggatgtatttcaaattaaatattttattcgcttatgttgggatgctcataagagttcttttcaggaagcaagacattcggatttgtggtcaaagtataaatttatttgttcttgcaggcgatgtattgcatcaccagagccatacactgatcttattctgaatgaagcaaactgaaacccactgagaaagcagagataaaatgaagaataaaactaacataggaagtccggccagtggaaaactaaagccctatcgtgtgatgtgagggacttggataaagcagaagcagagggtactgttacacctccagcaattgagaatttgggtgatgtcctacaacaggcaatatctgagtacacgtcaaatgatgaccctgaagcttgctgtgatatgattgaaaccatgctttccaacaggttggtgagtggtttgaagcaagaggatatttcagggagaaaacatatactacagcctcttcaccatatctgtcttactgcttacatgacacttgcctctgcttaccggtttcgcgccttaagtttagaagaagctgtccgttcagatggagaaaatactgatgaattttttagaatggctaaagcagcagcagcgtattccctggtacttgcagggagtacacaccatttgttcttatcagaatgttctcttatgatccccctgtctcattttttgttaaacactggacagtctctgttatatcttgttgagtctatcaagggaaagacaaggcaaaatatatccgaggccaggctcagcttttcttcatgtccagcaagttctacagacaatgattctccaccgtaccatgtgttcagatcaacctgtgaagcgtttggcaagcaaatgttatccctgtcactgcggtgctggtcatttctagtgcgaggtttaccctgcctggaaaagataaagagccccatggaatttagtatgcccggaacaacaatatttcagtctgtcctttctgaggaagaccatgccaacctttccgcgcacgagccagtaggtttcacggagagacaagcggggtgcatccttagtttggctctatgttgtatcacctactgcaaatatcttgctaccatatgctacggcccacatcattatctggcagaccatgcaaaatatctacttgaaggtatcgatcctgcacaatgaatcttctttcttggcataggtgtgttgtgaaatcttatgctcttatgagttaatgtaaaacgtgtcgtgattatcaaggctgttgagcttattttctatatgattgtatgctgagctcgttatttattattttgtatggaagcaccatttttctaaaaaaatttggtcactgggaagttgtatcactgatcttgcacctttcctggctttttctgtttgtatgaagaagagttactaattt

SEQ ID NO: 25187 - DNA, 2517 bp, Zea Mays
ctcagttgctcttgctcttgctcttgtattcttgcttatactgtgggccatgctcgggaactagggctgaagattgatgcagtgccattgtgccaataagcaagaaaggcccactaaagggcaattgacgctgggcggcgacggcggggggagactgagcggccgaggagccggtgtggcatcggtgcatcgcagcggcctgaggtcgcgagcagcacagcagggtgcgccaggcgccgacgcggtacggggcaccgcgcgacgcgtgagcgcgtggccggtctcagcaccaagacgcatcaaagccggcgctaggcagggcactatcgcgctgctgcgcagctgtgcctgcgctggtccctggaggattagtgacagcactcaccaatttgtgttttgcagaattgggagaaatcaaataacttcacaacagatcaggaagctttagagcttggcaatggagatgagagcccgggaatctgtaagcatgtcgaaggatctaactggggaaatcacaccttttgccactgccctacatgatgtgttcctccactcccattgctcatcatgcttcaccaagttacttccacaaaccccttgtgtcatgtcttgcatgacatgctgttctcttcgatactgctgttcagagtgcttacgtgcggattcagtggtgcatgtttcctctggtgaatgttgcttttttgtggatcacctcaagagagcctccccttcctatgttactgaaggaacgagtgatttgcgtgctgccctccgccttctgtgtgtgcttgagatacatggtcttgtttcgcctgattcaatcaatcactacagtagaattggtggactttcagcaagtggtattgaggaagctttgaaggaaggtgaggttattgctgagaggatactggaggggagcttattgatgtcatctgctagaaaatcgagggcacagacttgtgttattttttcagacaggcttaaacttgagaagatggcattatgggcagtgattatcaatagcgtcgaggtgcaacttagtgaagggttagctttgggagttgcagtgtatggcccgagtttctcatggttcaaccatagttgctttcccagtgcttcttaccggtttgtactggctccaaggaatgaagactgtgcttcacagaaatcaaaatccagtgtagtccctgctagcaaaggagttgcagctgatgtgtggcatgcttggcaatacgaagatcattctactcatggaagcaagacattcggatttgtggtcaaagtataaatttatttgttcttgcaggcgatgtattgcatcaccagagccatacactgatcttattctgaattgtgatgtgagggacttggataaagcagaagcagagggtactgttacacctccagcaattgagaatttgggtgatgtcctacaacaggcaatatctgagtacacgtcaaatgatgaccctgaagcttgctgtgatatgattgaaaccatgctttccaacaggttggtgagtggtttgaagcaagaggatatttcagggagaaaacatatactacagcctcttcaccatatctgtcttactgcttacatgacacttgcctctgcttaccggtttcgcgccttaagtttagaagaagctgtccgttcagatggagaaaatactgatgaattttttagaatggctaaagcagcagcagcgtattccctggtacttgcagggagtacacaccatttgttcttatcagaatgttctcttatgatccccctgtctcattttttgttaaacactggacagtctctgttatatcttgttgagtctatcaagggaaagacaaggcaaaatatatccgaggccaggctcagcttttcttcatgtccagcaagttctacagacaatgattctccaccgtaccatgtgttcagatcaacctgtgaagcgtttggcaagcaaatgttatccctgtcactgcggtgctggtcatttctagtgcgaggtttaccctgcctggaaaagataaagagccccatggaatttagtatgcccggaacaacaatatttcagtctgtcctttctgaggaagaccatgccaacctttccgcgcacgagccagtaggtttcacggagagacaagcggggtgcatccttagtttggctctatgttgtatcacctactgcaaatatcttgctaccatatgctacggcccacatcattatctggcagaccatgcaaaatatctacttgaaggtatcgatcctgcacaatgaatcttctttcttggcataggtgtgttgtgaaatcttatgctcttatgagttaatgtaaaacgtgtcgtgattatcaaggctgttgagcttattttctatatgattgtatgctgagctcgttatttattattttgtatggaagcaccatttttctaaaaaaatttggtcactgggaagttgtatcactgatcttgcacctttcctggctttttctgtttgtatgaagaagagttactaattt

SEQ ID NO: 25188 - DNA, 3840 bp, Zea Mays
caagtagcccatccccatgcccactccttgctcagttgctcttgctcttgctcttgtattcttgcttatactgtgggccatgctcgggaactagggctgaagattgatgcagtgccattgtgccaataagcaagaaaggcccactaaagggcaattgacgctgggcggcgacggcggggggagactgagcggccgaggagccggtgtggcatcggtgcatcgcagcggcctgaggtcgcgagcagcacagcagggtgcgccaggcgccgacgcggtacggggcaccgcgcgacgcgtgagcgcgtggccggtctcagcaccaagacgcatcaaagccggcgctaggcagggcactatcgcgctgctgcgcagctgtgcctgcgctggtccctggaggattagtgacagcactcaccaatttgtgttttgcagaattgggagaaatcaaataacttcacaacagatcaggaagctttagagcttggcaatggagatgagagcccgggaatctgtaagcatgtcgaaggatctaactggggaaatcacaccttttgccactgccctacatgatgtgttcctccactcccattgctcatcatgcttcaccaagttacttccacaaaccccttgtgtcatgtcttgcatgacatgctgttctcttcgatactgctgttcagagtgcttacgtgcggattcagtggtgcatgtttcctctggtgaatgttgcttttttgtggatcacctcaagagagcctccccttcctatgttactgaaggaacgagtgatttgcgtgctgccctccgccttctgtgtgtgcttgagatacatggtcttgtttcgcctgattcaatcaatcactacagtagaattggtggactttcagcaagtggtattgaggaagctttgaaggaaggtgaggttattgctgagaggatactggaggggagcttattgatgtcatctgctagaaaatcgagggcacagacttgtgttattttttcagacaggcttaaacttgagaagatggcattatgggcagtgattatcaatagcgtcgaggtgcaacttagtgaagggttagctttgggagttgcagtgtatggcccgagtttctcatggttcaaccatagttgctttcccagtgcttcttaccggtttgtactggctccaaggaatgaagactgtgcttcacagaaatcaaaatccagtgtagtccctgctagcaaaggagttgcagctgatgtggtaaaggagaataatgaccattttgtttaggacctgctaaaattttgcttgtgtcatacaaagaataagataaaatatttgaatactgttcacaacatactttcattatcataaacaagtgctatttgaatgtttatacataaatggttcctcaaacactttcataggctgaatctaaatattcatgaatatactcattaactcatgtttaaatttcaatagttagacaatatttatatagaatttacttgagagaaaatcattaagcctattattgtgcttgtttttattgcagtggcatgcttggcaatacgaagatcattctactcatgcactgtgcaaatatggcccaagagttgttgttcgttgcataaaaccaattaacaagggagatgaagtgtgcataacatacattgatcttctccagaccagggtactatttcttgaattttgctgaacccatattttgagtcaccctgacacatgaagtcagtatacccataatattatagatctccatatattatcaacatcaacatagccttttagtctcaaacaagtcggggtaggctagagttgaaacccaacaagaagtcactaaaaagagaaagagagagaaaggggaggggggaaagcttttgagagaactaaaaggaaaaagacctaatcacggttcaagcacgtggatagcttctttccaagcacttctatccaaacacaactcctttcggatatttcattcattcaattcccttttgattgcctcctctcatgtcaagtttggccgctctctaccgctcttcatatactatgtttccaagaatctaatcatggtttacttgtgcagttcattgtagtgttcgctgcctgagttactgttatacacagtatttaatatttacatgattgacatatcatattttgccttagaattttgggctgtaatttagaacaaaaatatcaaaggagtaaaggacctaacactcgcactcagttttggtatttttgtttcttttgagcagctgttgttgatacatgacagtgccctgattagtagtgtattggtaatttgcttgtgaaaaaagattatcttgactcacatggtcacagtcacacttactgtattctgcaagttacacactagtgcagtagtgcctagttcatagctacgccacttgataaaattgtcaacttatcttgaaaactttggtttctctgctttttagcagaggaatgcaaaatgttgagttgttgaccaaccctgtccgttttgatgtagctttctatacaatagtattaatgtttttcactagcgattagtcaatgtgtactggttatcttagcaaaatttagttgatattgtcgaagttccagattgaggccaccatccatagatggaaaatagacttttgtggtatttgtaccggatgtatttcaaattaaatattttattcgcttatgttgggatgctcataagagttcttttcaggaagcaagacattcggatttgtggtcaaagtataaatttatttgttcttgcaggcgatgtattgcatcaccagagccatacactgatcttattctgaattgtgatgtgagggacttggataaagcagaagcagagggtactgttacacctccagcaattgagaatttgggtgatgtcctacaacaggcgttggtgagtggtttgaagcaagaggatatttcagggagaaaacatatactacagcctcttcaccatatctgtcttactgcttacatgacacttgcctctgcttaccggtttcgcgccttaagtttagaagaagctgtccgttcagatggagaaaatactgatgaattttttagaatggctaaagcagcagcagcgtattccctgtctctgttatatcttgttgagtctatcaagggaaagacaaggcaaaatatatccgaggccaggctcagcttttcttcatgtccagcaagttctacagacaatgattctccaccgtaccatgtgttcagatcaacctgtgaagcgtttggcaagcaaatgttatccctgtcactgcggtgctggtcatttctagtgcgaggtttaccctgcctggaaaagataaagagccccatggaatttagtatgcccggaacaacaatatttcagtctgtcctttctgaggaagaccatgccaacctttccgcgcacgagccagtaggtttcacggagagacaagcggggtgcatccttagtttggctctatgttgtatcacctactgcaaatatcttgctaccatatgctacggcccacatcattatctggcagaccatgcaaaatatctacttgaaggtatcgatcctgcacaatgaatcttctttcttggcataggtgtgttgtgaaatcttatgctcttatgagttaatgtaaaacgtgtcgtgattatcaaggctgttgagcttattttctatatgattgtatgctgagctcgttatttattattttgtatggaagcaccatttttctaaaaaaatttggtcactgggaagttgtatcactgatcttgcacctttcctggctttttctgtttgtatgaagaagagttactaattt

SEQ ID NO: 25189 - DNA, 2595 bp, Zea Mays
caagtagcccatccccatgcccactccttgctcagttgctcttgctcttgctcttgtattcttgcttatactgtgggccatgctcgggaactagggctgaagattgatgcagtgccattgtgccaataagcaagaaaggcccactaaagggcaattgacgctgggcggcgacggcggggggagactgagcggccgaggagccggtgtggcatcggtgcatcgcagcggcctgaggtcgcgagcagcacagcagggtgcgccaggcgccgacgcggtacggggcaccgcgcgacgcgtgagcgcgtggccggtctcagcaccaagacgcatcaaagccggcgctaggcagggcactatcgcgctgctgcgcagctgtgcctgcgctggtccctggaggattagtgacagcactcaccaatttgtgttttgcagaattgggagaaatcaaataacttcacaacagatcaggaagctttagagcttggcaatggagatgagagcccgggaatctgtaagcatgtcgaaggatctaactggggaaatcacaccttttgccactgccctacatgatgtgttcctccactcccattgctcatcatgcttcaccaagttacttccacaaaccccttgtgtcatgtcttgcatgacatgctgttctcttcgatactgctgttcagagtgcttacgtgcggattcagtggtgcatgtttcctctggtgaatgttgcttttttgtggatcacctcaagagagcctccccttcctatgttactgaaggaacgagtgatttgcgtgctgccctccgccttctgtgtgtgcttgagatacatggtcttgtttcgcctgattcaatcaatcactacagtagaattggtggactttcagcaagtggtattgaggaagctttgaaggaaggtgaggttattgctgagaggatactggaggggagcttattgatgtcatctgctagaaaatcgagggcacagacttgtgttattttttcagacaggcttaaacttgagaagatggcattatgggcagtgattatcaatagcgtcgaggtgcaacttagtgaagggttagctttgggagttgcagtgtatggcccgagtttctcatggttcaaccatagttgctttcccagtgcttcttaccggtttgtactggctccaaggaatgaagactgtgcttcacagaaatcaaaatccagtgtagtccctgctagcaaaggagttgcagctgatgtgtggcatgcttggcaatacgaagatcattctactcatgcactgtgcaaatatggcccaagagttgttgttcgttgcataaaaccaattaacaagggagatgaagtgtgcataacatacattgatcttctccagaccagggcgatgtattgcatcaccagagccatacactgatcttattctgaattgtgatgtgagggacttggataaagcagaagcagagggtactgttacacctccagcaattgagaatttgggtgatgtcctacaacaggcaatatctgagtacacgtcaaatgatgaccctgaagcttgctgtgatatgattgaaaccatgctttccaacaggttggtgagtggtttgaagcaagaggatatttcagggagaaaacatatactacagcctcttcaccatatctgtcttactgcttacatgacacttgcctctgcttaccggtttcgcgccttaagtttagaagaagctgtccgttcagatggagaaaatactgatgaattttttagaatggctaaagcagcagcagcgtattccctggtacttgcagggagtacacaccatttgttcttatcagaatgttctcttatgatccccctgtctcattttttgttaaacactggacagtctctgttatatcttgttgagtctatcaagggaaagacaaggcaaaatatatccgaggccaggctcagcttttcttcatgtccagcaagttctacagacaatgattctccaccgtaccatgtgttcagatcaacctgtgaagcgtttggcaagcaaatgttatccctgtcactgcggtgctggtcatttctagtgcgaggtttaccctgcctggaaaagataaagagccccatggaatttagtatgcccggaacaacaatatttcagtctgtcctttctgaggaagaccatgccaacctttccgcgcacgagccagtaggtttcacggagagacaagcggggtgcatccttagtttggctctatgttgtatcacctactgcaaatatcttgctaccatatgctacggcccacatcattatctggcagaccatgcaaaatatctacttgaaggtatcgatcctgcacaatgaatcttctttcttggcataggtgtgttgtgaaatcttatgctcttatgagttaatgtaaaacgtgtcgtgattatcaaggctgttgagcttattttctatatgattgtatgctgagctcgttatttattattttgtatggaagcaccatttttctaaaaaaatttggtcactgggaagttgtatcactgatcttgcacctttcctggctttttctgtttgtatgaagaagagttactaattt

SEQ ID NO: 25190 - DNA, 2924 bp, Zea Mays
cttgctcttgctcttgtattcttgcttatactgtgggccatgctcgggaactagggctgaagattgatgcagtgccattgtgccaataagcaagaaaggcccactaaagggcaattgacgctgggcggcgacggcggggggagactgagcggccgaggagccggtgtggcatcggtgcatcgcagcggcctgaggtcgcgagcagcacagcagggtgcgccaggcgccgacgcggtacggggcaccgcgcgacgcgtgagcgcgtggccggtctcagcaccaagacgcatcaaagccggcgctaggcagggcactatcgcgctgctgcgcagctgtgcctgcgctggtccctggaggattagtgacagcactcaccaatttgtgttttgcagaattgggagaaatcaaataacttcacaacagatcaggaagctttagagcttggcaatggagatgagagcccgggaatctgtaagcatgtcgaaggatctaactggggaaatcacaccttttgccactgccctacatgatgtgttcctccactcccattgctcatcatgcttcaccaagttacttccacaaaccccttgtgtcatgtcttgcatgacatgctgttctcttcgatactgctgttcagagtgcttacgtgcggattcagtggtgcatgtttcctctggtgaatgttgcttttttgtggatcacctcaagagagcctccccttcctatgttactgaaggaacgagtgatttgcgtgctgccctccgccttctgtgtgtgcttgagatacatggtcttgtttcgcctgattcaatcaatcactacagtagaattggtggactttcagcaagtggtattgaggaagctttgaaggaaggtgaggttattgctgagaggatactggaggggagcttattgatgtcatctgctagaaaatcgagggcacagacttgtgttattttttcagacaggcttaaacttgagaagatggcattatgggcagtgattatcaatagcgtcgaggtgcaacttagtgaagggttagctttgggagttgcagtgtatggcccgagtttctcatggttcaaccatagttgctttcccagtgcttcttaccggtttgtactggctccaaggaatgaagactgtgcttcacagaaatcaaaatccagtgtagtccctgctagcaaaggagttgcagctgatgtggtaaaggagaataatgaccattttgtttaggacctgctaaaattttgcttgtgtcatacaaagaataagataaaatatttgaatactgttcacaacatactttcattatcataaacaagtgctatttgaatgtttatacataaatggttcctcaaacactttcataggctgaatctaaatattcatgaatatactcattaactcatgtttaaatttcaatagttagacaatatttatatagaatttacttgagagaaaatcattaagcctattattgtgcttgtttttattgcagtggcatgcttggcaatacgaagatcattctactcatggtacttcattacgttctacgttagtgtgcaactattaaattcatcactataaactttctccgttactctttatagcactgtgcaaatatggcccaagagttgttgttcgttgcataaaaccaattaacaagggagatgaagtgtgcataacatacattgatcttctccagaccagggtactatttcttgaattttgctgaacccatattttgagtcaccctgacacatgaagtcagtatacccataatattatagatctccatatattatcaacatcaacatagccttttagtctcaaacaagtcggggtaggctagagttgaaacccaacaagaagtcactaaaaagagaaagagagagaaaggggaggggggaaagcttttgagagaactaaaaggaaaaagacctaatcacggttcaagcacgtggatagcttctttccaagcacttctatccaaacacaactcctttcggatatttcattcattcaattcccttttgattgcctcctctcatgtcaagtttggccgctctctaccgctcttcatatactatgtttccaagaatctaatcatggtttacttgtgcagttcattgtagtgttcgctgcctgagttactgttatacacagtatttaatatttacatgattgacatatcatattttgccttagaattttgggctgtaatttagaacaaaaatatcaaaggagtaaaggacctaacactcgcactcagttttggtatttttgtttcttttgagcagctgttgttgatacatgacagtgccctgattagtagtgtattggtaatttgcttgtgaaaaaagattatcttgactcacatggtcacagtcacacttactgtattctgcaagttacacactagtgcagtagtgcctagttcatagctacgccacttgataaaattgtcaacttatcttgaaaactttggtttctctgctttttagcagaggaatgcaaaatgttgagttgttgaccaaccctgtccgttttgatgtagctttctatacaatagtattaatgtttttcactagcgattagtcaatgtgtactggttatcttagcaaaatttagttgatattgtcgaagttccagattgaggccaccatccatagatggaaaatagacttttgtggtatttgtaccggatgtatttcaaattaaatattttattcgcttatgttgggatgctcataagagttcttttcaggaagcaagacattcggatttgtggtcaaagtataaatttatttgttcttgcaggcgatgtattgcatcaccagagccatacactgatcttattctgaatcaaactgaaacccactgagaaagcagagataaaatgaagaataaaactaacatag

SEQ ID NO: 25191 - DNA, 1401 bp, Zea Mays
ctaaggactgtattgaacttgtactagattgatcacaacagacacatcctcctgtctgcttgtcgtcttgtgcccagccgtggatgaggttcatcacccctgcgtttacctcctatgtgctgtccatgcactcctgctacgtgtccataatcgtgggggctgctggcgtccccggcgtcctcctccatcatgtcctggccgagctctggaacatctgtctccccatccctttgcttaaatactgctgctgtaatccctgctgttctcaagttttagttgcttcacttggtgtcttagcggttcgtgtttgtaagtctaagctcctcttcccagccaccaactcgatctgccctagtcttcccatctcctacttaagtcatggtccagtaggccgtgcagtcctagagctcgagtgatctccttggctcttgtagcctatgtttcctcggagttaatcccctcccaatatcttggtccatctgcccagagcttggtgtaccagtccctaggtggtgaccatcatcggcagttagtccacctcgccgtgaccagaattcccaaaagaagaagatgaaattcaagaagtggtttctgaagaggagtctgcttcagtgcctgttcatcaagtgatgggagccatctaactggggtttaatagagggatttagacctccgtctctgcaacaaaggcaagtcccggtgcatttgccaccttccttgtattacaaaattttatcacttatatgctgcattaggtaataggagttgaataattaaacacttgatgcattaccatccttgaaagattgattatcataccttgttacctgttttataaaaactagtaatgcttagttatgcttatagattaagaaaaatgtttttgatctatgactcatgatttttaaaaagaaaaagggcttgggatgatggaggcatcctccgtggggatgaattcatcattcaagcagggtacctctgccaggtatcaaactttgagaatttgtttaaaatgagaccagacgttgagctggacaggtcgcccgtctgtgtcgattaaggaccgtaccgattgtaggcctcttgatctaggaccttttaactggccacatacctcgtcatgggtaagcctgaacccggctactccatatgtgaaaagacaatcgcgcactgggagtggagagatggcgggagtggcgtgtacccacctggcacgtggctggatggtggagtaccgtactctcgggtggcgcggaccggttcacgtagtggaggacccgtgggaatggtagacatatgcaagggttaagtgctacatatgtcgtgtggctggagatccccagctgggtattaatcgattcggatcgccgttacttctcggatatgaagactggatcgcta

SEQ ID NO: 25192 - DNA, 1443 bp, Zea Mays
ctgttctcaagttttagttgcttcacttggtgtcttagcggttcgtgtttgtaagtctaagctcctcttcccagccaccaactcgatctgccctagtcttcccatctcctacttaagtcatggtccagtaggccgtgcagtcctagagctcgagtgatctccttggctcttgtagcctatgtttcctcggagttaatcccctcccaatatcttggtccatctgcccagagcttggtgtaccagtccctaggtggtgaccatcatcggcagttagtccacctcgccgtgaccagattagctgaaaactggattgcagcagattgctcagtttggagctctcctatgaccagttcatgaggttttgggttaccagttgtatagaaaagtcaaagaccagatgaaggtgaacaagcttcatcagaggagtggggtttactactgtgtaaaatatggagaaatatgtgctgcaattttctatgtcaggtgttgtgttcaggtctttttcagttagctgaaatttagcctttgcgtttccacttcaagtttggtgctctgtaacttgagatctgtttagggttagctagtagctgttgtaacaaagatggagagagattatagaggaaccattcatagtaaggaaatacattgagccctcgtatggaattgcgagaaaatagtgttacaaaaccctctgtcagacttggagtgggctaacctgttcagggtgttgtttagtcaactttggagctctgtggtaattaataaaaccagaattgggttaagagttttatagaaaggtgaaagaccaagtgtaggagaaccagttttatacaagtagattggcttgttgatttatggaatttagagaaaagcctgttgcaaaactctctgtcagacatggtaaggtgttgtttcagatcgaggaactgaacttttcagtgtttttctctaacttttgtgcaccatagttactgttctaagtattttcagcttaggggttttataccaaatgggaagggctatagtaggagagtaatattggttcacaaaggttggttggttgttgagaagaattgttagatatctgggcttgaacaaagaagaaagcaaaagggagcagtattgctaataaactggattcagttaactgaaaactggaatttcactgttggtgctcagtttggagctctttggtgaccaaatcatggggttttaggttaggagttccataacaaagtgaaataccaaggtaaggcaaacaagtttcatgtgaatagttgggcttgttacggtgaagaaattggggagaggaatggagcaatggaagatgaattcagagaactgaaagcaggttcagtgaatcgtggctgattcttggacactataacttgtagtgcatgcagtttggatccttgcttaaggcataaatgaagagcttggttg

SEQ ID NO: 25193 - DNA, 979 bp, Zea Mays
tgctccttcgcttttcacgcagcaagcagcagtgcactgagctgcagagccagcgcgccaaccgaagctaggcctcaacggcctcaaacggccacggccggcagcaaatagcgtcagactcagagcacgctcctgcgtagtgcgtactagtgcgctgccctgcgcccgcgcggcatggcattcgcattgctggtggcagcagcgagagcggagagtgctggaagcactcgcagcccagccgcagccgcaggcggaggccgagcaatgggaggaggatggccgcgtcccggcggggccttggcggcgccgcgcttgctcctccgagcgctgctgctctgctccctcctcgcgcagccgcatccgtcgcgcgccttcttcttcttcggcggcgtgcgcaccagcttgcacgtcccccaggacgacgtggggatgggcacccggcggcttcaggctagggtgttgcagctcgccgtccctcttctcatgatgctgtcttttgcggctacctctgtctctgctggagttgttatgtgatcacaagggctctctctctctctctctctctctctgtactgtagcctccactgacactcatagatcatcatcacctcatctgtaaccaaggtcgccatgcttgctattgctgctgattcctgagttcatgccttatacatgcgtcacgcagagctccgttctctagctagcactcctttcgtttcatcttcacagcgggattgtaggaactggttctttgcagcagtatccaacggtggcacggatggacctcgccagtgaatacaaaatccacctggtgtcaagcagctcgtgggcaaccacacatcactgtggtaacagtgacatctgtgcagccacagctgctgcccgctgctaatagagcaagcccaacaggccctgattctggtttgttggaaacccccacatgcccattaaaaaatggatcgggtatttgcaaacgagc

SEQ ID NO: 25194 - DNA, 773 bp, Zea Mays
tacgtaccccttcggccctcttgcacttctcctccccacccaacgaggcggagctccttttacctccacagcgtcggctgtgcgcctgtacttcacaccgacgtcaccctctcctccagaactcatcaccggagccaccctcacctcgtcacgccctcctccgctaagtgcagcaagtgttgatcagttagcacactctccttcaaatctagagtcacttcttcaaagtgggtgggagggagatggtgctgaggcgggcggcaaccgaatgtcctaagaaggttgtggggctgaaggatttggtgaacctgccgacccagctgtgagagttcaccggaggccggtccaaaatgtcacatatctccttcctccgtgtctgctcgtacatcaaggacaacaaacttcaggacccaacgaataataacattctgaagtgtgatgagaagctgaagaccatattattgggcaggtccaaagcgacaccgtctgaactcccaatgattgtacattgcttggcggttgccgattgttttccccctttggtgccagcttcccagcaaaacttcaacctttggatctcattcttcacgtagaaatcggcatctgccccacaatatttttttccgttatcttgcgaaattctatggttgtggtcatgtgtttgcaggtgaacctcaaggaatgttcattgctactagaattacaaatccatttgagatatttggtgttttaggtttcagctagatggacctttgtcagtagttctacagggg

SEQ ID NO: 25195 - DNA, 682 bp, Zea Mays
tacgtaccccttcggccctcttgcacttctcctccccacccaacgaggcggagctccttttacctccacagcgtcggctgtgcgcctgtacttcacaccgacgtcaccctctcctccagaactcatcaccggagccaccctcacctcgtcacgccctcctccgctaagtgcagcaagtgttgatcagtccagttagcacactctccttcaaatctagagtcacttcttcaaagtgggtgggagggagatggtgctgaggcgggcggcaaccgaatgtcctaagaaggttgtggggctgaaggatttggtgaacctgccgacccagctgtgagagttcaccggaggccggtccaaaatgtcacatatctccttcctccgtgtctgctcgtacatcaaggacaacaaacttcaggtacattgcttggcggttgccgattgttttccccctttggtgccagcttcccagcaaaacttcaacctttggatctcattcttcacgtagaaatcggcatctgccccacaatatttttttccgttatcttgcgaaattctatggttgtggtcatgtgtttgcaggtgaacctcaaggaatgttcattgctactagaattacaaatccatttgagatatttggtgttttaggtttcagctagatggacctttgtcagtagttctacagggg

SEQ ID NO: 25196 - DNA, 1294 bp, Zea Mays
ctaaaattgcaaaacagttggtggatgtctacgcgcgcagtttaaggttccaagtgaagaagaaacagttctttcgaaacttcattactattacactgtttggtgcagttggcaccttgatctcttttactgtaatatcccttggcgctctaggactaatatcaaggcttaatatcggcgcacttgaactgggagactatcttgcacttggggcaatattctcggccacagactcggtttgcaccttgtaggtgttaagccaagatgagacaccattcttgtatagcctcgtgtttggtgaaggtgttgtcaatgacacaacttctgttgtgttgttcaatgcaatccacaactttgatcctggaaatatcagtggtgccaaattactgaacttcattagcagtttcctttatctgttcggctccaacaccattcttggagtagcttctggacttcttagtgcttataccattaagaagttgtactttggcagaaagttcgagggtcacaaccaacccggtaaagtctatcgctttgagcagcaccattttagccttggtgctggtttcaagagttgcttttgttttcccactatcctttctatcaaatttgaccaaaaaactccaaatggaaagatatcttttaggcagcaggttattgtttggtgggcgggtctcatgagaggtgttgtgtctattgcgttggcttacaataaggcgtttgacttaatgtttccaaggttctgtggcagtgcgaggcattttgggaggtgtgcgaggcattttgggagggacatcatcatgcccaacttgaagtcgtccgtgaccacaatagcgagcgcggtggagtacatggatgaagtattgaaggcgttgccgccaggtgaggccaggaatgaggattcacgaacactgcaattcaattatggttcattcaaacataaggcattggataaatccttaactaaaaagggaaaaacactagcaatcttacatgagttccaagttttgcaggtcgttgctgttggtgaatgtggtttggattatgacagacttcagttctgtccgacagatatgcaaaaaaaattccctggtggggttacatattccttcactgacttagcagaagatcaggataggctactttcttttgagaagatgtttatcggcaagttcttgaggtagtggctggaagcaaagaaatttctgacatagaaggcctgagtagaactctgtaccacaacacatgcaggctcttctttcctcaggatcttgacgcgtctgctaatgcgtag

SEQ ID NO: 25197 - DNA, 2172 bp, Zea Mays
atgcctgcccctgcccccgcccccatccctatgatgcccgcggccacaacgccccctcccctcgacgcgctctgcgcgccatgcctgctaaccatgaccacagcgcctggagcaatggagaggatgtcggccttgcatggcaccggagagggtggcccctgcgcgaacgcagcccccgacctcagccccgatggcggcgcgctgccccaccagccccccgacgcgagcgagcgtggtgcggccccacccaacgacgcgagcgaggcacgcggccctcccggcggggtggacgcggcccctggctgtgaggcgacgatggggctgggggctgcgatggcgctgggcgacccgccggcggactacgcatccatcgcggcggtggggctgttcgtggcactcatgtgcgtctgcatcgtcgtcgggcacctcctcgaggagaaccgctggatgaacgagtccatcaccacgctcttcatcgggctgggaactagagcagtcatcctgttcgcgtcgagcgagaagcattcgcgtgtgttggtgttcagtgaggacctcttatttatttacctgctgccgccgatcatattcaatgcagggttccaagtgaagaagaaacagttctttcgaaacttcattactattacactgtttggtgcagttggcaccttgatctcttttactgtaatatcccttggcgctctaggactaatatcaaggcttaatatcggcgcacttgaactgggagactatcttgcacttggggcaatattctcggccacagactcggtttgcaccttgtaggtgttaagccaagatgagacaccattcttgtatagcctcgtgtttggtgaaggtgttgtcaatgacacaacttctgttgtgttgttcaatgcaatccacaactttgatcctggaaatatcagtggtgccaaattactgaacttcattagcagtttcctttatctgttcggctccaacaccattcttggagtagcttctggacttcttagtgcttataccattaagaagttgtactttggcagaaagttcgagggtcacaaccaacccggtaaagtctatcgctttgagcagcaccattttagccttggtgctggtttcaagagttgcttttgttttcccactatcctttctatcaaatttgaccaaaaaactccaaatggaaagatatcttttaggcagcaggttattgtttggtgggcgggtctcatgagaggtgttgtgtctattgcgttggcttacaataaggcgtttgacttaatgtttccaaggttctgtggcagtgcgaggcattttgggaggtgtgcgaggcattttgggagggacatcatcatgcccaacttgaagtcgtccgtgaccacaatagcgagcgcggtggagtacatggatgaagtattgaaggcgttgccgccaggtgaggccaggaatgaggattcacgaacactgcaattcaattatggttcattcaaacataaggcattggataaatccttaactaaaaagggaaaaacactagcaatcttacatgagttccaagttttgcaggtcgttgctgttggtgaatgtggtttggattatgacagacttcagttctgtccgacagatatgcaaaaaaaattccctggtggggttacatattccttcactgacttagcagaagatcaggataggctactttcttttgagaagatgtttatcggtgttaatggttcctctctaaaaactaacggaaatcttgaggttctacgaggcattcctgtcgagaggttgatgatggaaacagattctccatattgtgacataataaatactcatgctggaagccagtatgtaaaatctgtctggccatccaagaagaaagaaaagtatgagccagattcaacagtaaaaggtcgcaatgagccttgtttagtcagggatttttgaagcactgactgcattcccctttctcccttcctgctgtgcgaagccgtgccccaaaccctctaccatcttatttcagtccccactctctaccatcctccagggaaaaaacactagcaatcttacatgaattccaagttttgcatgtcgttgctgttggtgaatgtggtttggattatgacagacttcagttctgtccggcagatatgcaaaagaagtatacaatcttgt

SEQ ID NO: 25198 - DNA, 965 bp, Zea Mays
gtcacggccaggacaaatatcccacctggaatgccctatccccacacgcgaatcctccaatctgtccttgccgccgccgcccgatccaggtctgcagactgctcacttctccccacccaacgcggcggcactccttctccctccccgagtgcctgctgtgcgcctgtacttcacaccggcgtcgccccctcctccagaactccccaccggagccaccctcacccgtcacgcactcctccgctgagtgcagcaagtgctgatcagttcggttagcacactctcttacaaatccagagacacttcttcacagtgggtggacgggagatggtgctgaggcgggcggcaaccgaatgccccaagaaggttgcggggctgaaggatctggtgaacctgccaacccagctgcgagagttcgccggaggccggtcccaaatgtcacatatctccttcttcctcagtgtctggtcgtacatcaaggacaacaaacttcaggacccaacgaataagaacattgtgaagtgtgatgagaagctgaagaccgtattattgggcaggtccaaagtgcaactgtctgaactcccaatgattgttaagctccatttcccaaaattgccaaagtagtgacaacatagtattgtatattgaagttctgtgggaccccctacagtaacttttacttcaaaaaaaaaagttctgtgggaacatgataggatagatagaacactatatgtattgttttgctgaaatttccatttactgtctgtatgtactggagcgatctatacatcgagcataccgattagattgcttgtcattttgatagcatgtttgatttatcagtaactttgctcatgtttaactgaagagacaagatgtgcaggataaatttcttttgttgtgaattagtacaactgacttcagctaagcagaacttcaatggcgcacctgattttaggacgatagag

SEQ ID NO: 25199 - DNA, 956 bp, Zea Mays
gtcacggccaggacaaatatcccacctggaatgccctatccccacacgcgaatcctccaatctgtccttgccgccgccgcccgatccaggtctgcagactgctcacttctccccacccaacgcggcggcactccttctccctccccgagtgcctgctgtgcgcctgtacttcacaccggcgtcgccccctcctccagaactccccaccggagccaccctcacccgtcacgcactcctccgctgagtgcagcaagtgctgatcagcacactctcttacaaatccagagacacttcttcacagtgggtggacgggagatggtgctgaggcgggcggcaaccgaatgccccaagaaggttgcggggctgaaggatctggtgaacctgccaacccagctgcgagagttcgccggaggccggtcccaaatgtcacatatctccttcttcctcagtgtctggtcgtacatcaaggacaacaaacttcaggacccaacgaataagaacattgtgaagtgtgatgagaagctgaagaccgtattattgggcaggtccaaagtgcaactgtctgaactcccaatgattgttaagctccatttcccaaaattgccaaagtagtgacaacatagtattgtatattgaagttctgtgggaccccctacagtaacttttacttcaaaaaaaaaagttctgtgggaacatgataggatagatagaacactatatgtattgttttgctgaaatttccatttactgtctgtatgtactggagcgatctatacatcgagcataccgattagattgcttgtcattttgatagcatgtttgatttatcagtaactttgctcatgtttaactgaagagacaagatgtgcaggataaatttcttttgttgtgaattagtacaactgacttcagctaagcagaacttcaatggcgcacctgattttaggacgatagag

SEQ ID NO: 25200 - DNA, 932 bp, Zea Mays
caactatccgtgagtcacggccaggacaaatatcccacctggaatgccctatccccacacgcgaatcctccaatctgtccttgccgccgccgcccgatccaggtctgcagactgctcacttctccccacccaacgcggcggcactccttctccctccccgagtgcctgctgtgcgcctgtacttcacaccggcgtcgccccctcctccagaactccccaccggagccaccctcacccgtcacgcactcctccgctgagtgcagcaagtgctgatcagtgggtggacgggagatggtgctgaggcgggcggcaaccgaatgccccaagaaggttgcggggctgaaggatctggtgaacctgccaacccagctgcgagagttcgccggaggccggtcccaaatgtcacatatctccttcttcctcagtgtctggtcgtacatcaaggacaacaaacttcaggacccaacgaataagaacattgtgaagtgtgatgagaagctgaagaccgtattattgggcaggtccaaagtgcaactgtctgaactcccaatgattgttaagctccatttcccaaaattgccaaagtagtgacaacatagtattgtatattgaagttctgtgggaccccctacagtaacttttacttcaaaaaaaaaagttctgtgggaacatgataggatagatagaacactatatgtattgttttgctgaaatttccatttactgtctgtatgtactggagcgatctatacatcgagcataccgattagattgcttgtcattttgatagcatgtttgatttatcagtaactttgctcatgtttaactgaagagacaagatgtgcaggataaatttcttttgttgtgaattagtacaactgacttcagctaagcagaacttcaatggcgcacctgattttaggacgatagag

SEQ ID NO: 25201 - DNA, 640 bp, Zea Mays
cagtaacccgcatcccacatcactcatccacagctcgcagccgtattcctgtctcgaatcctctctcgccgctccgatggcccgcacgaagcaaacagcaaggaagtcgaccggcggcaaggccccccggaagcagctggccactaaggctgcgcgcaagtcggccccggccaccggcggcgtgaagaagccccaccgcttccgccccggcaccgtcgcgctccgcgagatccgcaagaggccgccgaggcgtacctggtggggctcttcgaggacaccaacctttgcgccatccacgccaagcgcgtcactatcatgcccaaggacatccagctcgcgcggcgcatcaggggcgagagggcttgagcgcccgtcgtgctgctcgtcgttgtagtgttactagaagtagatggtggcattcgtttcgtggcttccttatcctgtaggagtaatgttctagatgtcttggcttcagtgcaatggactgtgattgctcatttctgaaatttatcaatggacttgttcttgcaaagatttgccgtctgttttttacttttggaagacgtcgaacactgattgccgtgcaagcagctgatacgatcccttgtgcaatgttttgatgtaaatgtactagtaaaac

SEQ ID NO: 25202 - DNA, 206 bp, Zea Mays
cagcccatttaagcacctcgacgtcctttcccgctctccctcctctctccaaaacaactatctcatcgccctcctgcagtgccaagccatggaggtcgcagaccacaattccttcccatggccgcacctccctagcatccctcatcatgtagcaacagcggcggcaagctcgctctggccggccaaggatcccctgcgagttcttc

SEQ ID NO: 25203 - DNA, 406 bp, Zea Mays
caagaatggagcatgcaatatgcatgcacactacatacatttagtggtctcgatcgatggaagaattgtgtcctagccagccggcaaaggtgacctgctgatgatgatgatgagaggcgagtcctacgccctagtcctactactaccctctttgtgtgctgccatccatccgtccccgctagacgatcgaggagagaataacgcagagctctgtgctcccggcctctgtcttctgccgtcccggccgtttaatttatagtctctactgtgtgttcgtcccatgtgtttagcagcagcagcaggtgtattgtgcgggtatgtaatggtattgcaactatattgggtgtaaaaccataataaatgtggaaaaaatgcaaggaaaaaaggcttctactgtttacactta

SEQ ID NO: 25204 - DNA, 1186 bp, Zea Mays
agaccaccactgcgccattggccagctagagccaaccagaagagcttgcagttactgagagtgtgtgagagagagaggatgatgggtggcagcggcagggctgctctgctgctggccctggtggccgtgagcctggccgtggagatccaggccgacgccgggtacgggtacaccccgacgccgacgccggccaccccgaccccgaagccggagaagccccccaccaaggggcccaagccggagaagccgccaaaggagcacaagccgcccaaggagcacgggcccaagccggagaagccgcccaaggagcacaagccgacgccgcccacgtacaccccgagccccaaacccacgccgccgacgtacactcccaccccgacgccccccaagccgacgccacccacatacactcccgcccctacgccccacaaacccactcccactcctccgacgtacaccccttcccccaaacctccgacacctaagccgaccccgccgacgtacactccaagccccaagccaccggctagcaagcctcccacgcccaagccgaccccgccgacgtacaccccttctcccaagcctccgacacccaagccgaccccaccgacgtacactccaagccccaagccaccggctaccaagcctcccacgcccaagccgaccccaccgacgtacactcccacaccgaagccgccggccaccaagccgcccacctacactccgacgccgccggtgtctcacacccccagcccgccgccaccttactactagaaaccgatgcctaccataccacactgctgtcagtctctggagcatttaggtggtctcgatcgatggaagaattgtgtcctagccagccggcaaaggtgacctgctgatgatgatgatgagaggcgagtcctacgccctagtcctactactaccctctttgtgtgctgccatccatccgtccccgctagacgatcgaggagagaataacgcagagctctgtgctcccggcctctgtcttctgccgtcccggccgtttaatttatagtctctactgtgtgttcgtcccatgtgtttagcagcagcagcaggtgtattgtgcgggtatgtaatggtattgcaactatattgggtgtaaaaccataataaatgtggaaaaaatgcaaggaaaaaaggcttctactgtttacactta

SEQ ID NO: 25205 - DNA, 1186 bp, Zea Mays
agaccaccactgcgccattggccagctagagccaaccagaagagcttgcagttactgagagtgtgtgagagagagaggatgatgggtggcagcggcagggctgctctgctgctggccctggtggccgtgagcctggccgtggagatccaggccgacgccgggtacgggtacaccccgacgccgacgccggccaccccgaccccgaagccggagaagccccccaccaaggggcccaagccggagaagccgccaaaggagcacaagccgcccaaggagcacgggcccaagccggagaagccgcccaaggagcacaagccgacgccgcccacgtacaccccgagccccaaacccacgccgccgacgtacactcccaccccgacgccccccaagccgacgccacccacatacactcccgcccctacgccccacaaacccactcccactcctccgacgtacaccccttcccccaaacctccgacacctaagccgaccccgccgacgtacactccaagccccaagccaccggctagcaagcctcccacgcccaagccgaccccgccgacgtacaccccttcccccaagcctccgacacccaagccgaccccaccgacgtacactccaagccccaagccaccggctaccaagcctcccacgcccaagccgaccccaccgacgtacactcccacaccgaagccgccggccaccaagccgcccacctacactccgacgccgccggtgtctcacacccccagcccgccgccaccttactactagaaaccgatgcctaccataccacactgctgtcagtctctggagcatttaggtggtctcgatcgatggaagaattgtgtcctagccagccggcaaaggtgacctgctgatgatgatgatgagaggcgagtcctacgccctagtcctactactaccctctttgtgtgctgccatccatccgtccccgctagacgatcgaggagagaataacgcagagctctgtgctcccggcctctgtcttctgccgtcccggccgtttaatttatagtctctactgtgtgttcgtcccatgtgtttagcagcagcagcaggtgtattgtgcgggtatgtaatggtattgcaactatattgggtgtaaaaccataataaatgtggaaaaaatgcaaggaaaaaaggcttctactgtttacactta

SEQ ID NO: 25206 - DNA, 1345 bp, Zea Mays
agaccaccactgcgccattggccagctagagccaaccagaagagcttgcagttactgagagtgtgtgagagagagaggatgatgggtggcagcggcagggctgctctgctgctggccctggtggccgtgagcctggccgtggagatccaggccgacgccgggtacgggtacaccccgacgccgacgccggccaccccgaccccgaagccggagaagccccccaccaaggggcccaagccggagaagccgccaaaggagcacaagccgcccaaggagcacgggcccaagccggagaagccgcccaaggagcacaagccgacgccgcccacgtacaccccgagccccaaacccacgccgccgacgtacactcccaccccgacgccccccaagccgacgccacccacatacactcccgcccctacgccccacaaacccactcccactcctccgacgtacaccccttcccccaaacctccgacacccaagccgaccccgccgacgtacaccccttctcccaagcctccgacacctaagccgaccccgcctacgtacactccaagccccaagccaccggctaccaagcctccgacgcccaagccgaccccaccgacgtacaccccttcccccaaacctccgacacctaagccgaccccgcctacgtacactccaagccccaagccaccggctaccaagcctcccacgcccaagccgaccccgccgacgtacaccccttcccccaagcctccgacacccaagccgaccccaccgacgtacactccaagccccaagccaccggctaccaagcctcccacgcccaagccgaccccaccgacgtacactcccacaccgaagccgccggccaccaagccgcccacctacactccgacgccgccggtgtctcacacccccagcccgccgccaccttactactagaaaccgatgcctaccataccacactgctgtcagtctctggagcatttaggtggtctcgatcgatggaagaattgtgtcctagccagccggcaaaggtgacctgctgatgatgatgatgagaggcgagtcctacgccctagtcctactactaccctctttgtgtgctgccatccatccgtccccgctagacgatcgaggagagaataacgcagagctctgtgctcccggcctctgtcttctgccgtcccggccgtttaatttatagtctctactgtgtgttcgtcccatgtgtttagcagcagcagcaggtgtattgtgcgggtatgtaatggtattgcaactatattgggtgtaaaaccataataaatgtggaaaaaatgcaaggaaaaaaggcttctactgtttacactta

SEQ ID NO: 25207 - DNA, 1282 bp, Zea Mays
agaccaccactgcgccattggccagctagagccaaccagaagagcttgcagttactgagagtgtgtgagagagagaggatgatgggtggcagcggcagggctgctctgctgctggccctggtggccgtgagcctggccgtggagatccaggccgacgccgggtacgggtacaccccgacgccgacgccggccaccccgaccccgaagccggagaagccccccaccaaggggcccaagccggagaagccgccaaaggagcacaagccgcccaaggagcacgggcccaagccggagaagccgcccaaggagcacaagccgacgccgcccacgtacaccccgagccccaaacccacgccgccgacgtacactcccaccccgacgccccccaagccgacgccacccacatacactcccgcccctacgccccacaaacccactcccactcctccgacgtacaccccttcccccaaacctccgacgcccaagccgaccccaccgacgtacaccccttcccccaaacctccgacacctaagccgaccccgcctacgtacactccaagccccaagccaccggctaccaagcctcccacgcccaagccgaccccgccgacgtacaccccttctcccaagcctccgacacccaagccgaccccgcagacgtacaccccttcccccaagcctccgacacccaagccgaccccaccgacgtacactccaagccccaagccaccggctaccaagcctcccacgcccaagccgaccccaccgacgtacactcccacaccgaagccgccggccaccaagccgcccacctacactccgacgccgccggtgtctcacacccccagcccgccgccaccttactactagaaaccgatgcctaccataccacactgctgtcagtctctggagcatttaggtggtctcgatcgatggaagaattgtgtcctagccagccggcaaaggtgacctgctgatgatgatgatgagaggcgagtcctacgccctagtcctactactaccctctttgtgtgctgccatccatccgtccccgctagacgatcgaggagagaataacgcagagctctgtgctcccggcctctgtcttctgccgtcccggccgtttaatttatagtctctactgtgtgttcgtcccatgtgtttagcagcagcagcaggtgtattgtgcgggtatgtaatggtattgcaactatattgggtgtaaaaccataataaatgtggaaaaaatgcaaggaaaaaaggcttctactgtttacactta

SEQ ID NO: 25208 - DNA, 1282 bp, Zea Mays
agaccaccactgcgccattggccagctagagccaaccagaagagcttgcagttactgagagtgtgtgagagagagaggatgatgggtggcagcggcagggctgctctgctgctggccctggtggccgtgagcctggccgtggagatccaggccgacgccgggtacgggtacaccccgacgccgacgccggccaccccgaccccgaagccggagaagccccccaccaaggggcccaagccggagaagccgccaaaggagcacaagccgcccaaggagcacgggcccaagccggagaagccgcccaaggagcacaagccgacgccgcccacgtacaccccgagccccaaacccacgccgccgacgtacactcccaccccgacgccccccaagccgacgccacccacatacactcccgcccctacgccccacaaacccactcccactcctccgacgtacaccccttcccccaaacctccgacacctaagccgaccccgccgacgtacactccaagccccaagccaccggctagcaagcctcccacgcccaagccgaccccgccgacgtacaccccttctcccaagcctccgacacctaagccgaccccgcctacgtacactccaagccccaagccaccggctaccaagcctccgacgcccaagccgaccccaccgacgtacaccccttcccccaaacctccgacacccaagccgaccccaccgacgtacaccccttccccaaagcctccgacacccaagccgaccccaccgacgtacactcccacaccgaagccgccggccaccaagccgcccacctacactccgacgccgccggtgtctcacacccccagcccgccgccaccttactactagaaaccgatgcctaccataccacactgctgtcagtctctggagcatttaggtggtctcgatcgatggaagaattgtgtcctagccagccggcaaaggtgacctgctgatgatgatgatgagaggcgagtcctacgccctagtcctactactaccctctttgtgtgctgccatccatccgtccccgctagacgatcgaggagagaataacgcagagctctgtgctcccggcctctgtcttctgccgtcccggccgtttaatttatagtctctactgtgtgttcgtcccatgtgtttagcagcagcagcaggtgtattgtgcgggtatgtaatggtattgcaactatattgggtgtaaaaccataataaatgtggaaaaaatgcaaggaaaaaaggcttctactgtttacactta

SEQ ID NO: 25209 - DNA, 580 bp, Zea Mays
gtccatatttgggtaggtcccgatgtcggtggggagtttgggccttatcgccagtcagaacggaattcacttcaagaagtatgccgagaagcttttggactctggtgcggtttaccgctacttttgctccaatgaggaatttgagcaaatgaagtagcaaagcagagacaacttcctcctgtgtatatggggaagtgggcaagtgcttctgatgcagaggtacatcaggagttagagaaagttggaacttagacactcttggtgatttcgtgattatgagaagcaatggacagcctgtgtataacttctgtgtgacagttgatgacgctaccatgcaaatatctcatgttatcagagctgaagagcatttaccaaacacattgcggcaagctctaatttataaagctcttggatttgcaatgccttcatttgctcatgtttcgcttattctggctcctgacacaagtaaactgtctaaacgacatggagctacttctgtggggcagtataaagagatggtcaattatttagcactactgggctgggtgatggtactgaaaatgagttcttcactatcgaa

SEQ ID NO: 25210 - DNA, 830 bp, Zea Mays
ggactgttttaccgagaactgagcccatcgagacaaaattatagactaacttgatttatcatcggcacaaaatgcagatcacagtatatgaatggaagaaaaaaaattgcgacgacaggtacagtgtgtgctcgcagagataaggaaaacaaacaaagaaactatttaaatatattttcaatataaacatcctgatgttagagggcaaaaaaaaggctggtcacatctaactgaatgcttgcgtttttttaccttgtcacaaccatccagcaaaaaaaacacacacacacagagcacaagtgtttggacttgaactgactactacagatcatctcttcatgacaaggttcatgatctaacaaatgcttacataaaaaagaatttctagtaactccgcccagaaaaacgagagagagaaaaaaaaacttcaagacgttagcaggttatctatcatcagtcgccaaccacggctgctgcgcctccactgaccagcagcccagaccggtgacggagctcacagcctgacgggcaagccgtagttgggaaaagaccggatgacgccatcgcggccggcggtcacgatgaccgtgctccacgcggcggatagcatggagaggcagtcgtccagccgcgggctgctttccacaggcttcgctgcagaaaggagcttctcctcgggccacgtcgccgaccccttgctgctgctgccgccgccgtccacgaacggccacggcccgggggccgactggcgcaggatgggcgcgctggcggatttctcggccacacaggcaggtttcgcgctcgcgtgcccgtcttgttgccgcactccc

SEQ ID NO: 25211 - DNA, 3114 bp, Zea Mays
ctccaccacatatcaagatctcccccggacccacgattcctattgtcaccaccctccctccctccctgacaccgggcctcgcccgccggaatcacacgagccacgagcagcgcgtcgccccgtccgggccccaccggacaccgccgtcgccttcctcgtctttcttccccgccgaagtccgaaccatctcgcgcctcaactttcccacgcgcgactcgcacctcctacgcgcttctagaaccaacgaagcatttgacacccagctcagccctcgcgctcgcgcaagcgcggcaagcccgccctccaccggataatagtaatgatgggcaaggaagagacgccgccggccgacggaggcggcgcattcgccttcatctccaaggggtggcgcgaggtgcgggactcggcgtccgctgacctgcgcctgatgcgcgcgcgcgcggactccgtgcgcgcgcgcgccgaccgcgagctcgagcacctcctcgcgtccgcggcgtcggcgctcacggggcccgcgcccccgctgccgcccgtcgcgacgggggcgcccatcgcggaggtcgagttcgtgcgcaggcggatccagcccaagatccaggagctccggaggcactgctcgtcgcgggcgcccgacgcccggtggccgcccggggccgcccccgccccaggcgccagcagcctccgcatcgacctctcggggatcaccgccattcgcaacgccattgtggcggaaggggaccgcggcggtaggtggagggtcgcgcggcggaagggggaccaggacgaggaggggaggaaggagtgggaggtggttcgggtgatacagagcggcctcaaggagttcgagcgccggagcctgtccagcggcatatttgctggattccgtggccgtggcgagtttgtggagaaatttaggttcggcatgaaatcactgaacaagggctatcaggaatccaaggatgttccaccactgcatctaactgaaattgtggcatatctggttcggcaatctgggccatttttagatcaacttggcatacagagagacctttgtgacaaactagtggagatgttatgcagtaaacgaaatggtcggctcatgtatcattctctttcaaaggacagacccttagctgagaacatatctgacgagcttgatctaagaatagctagggtattagaaagtactggttatcacacagatgaaggtttttggaatgaccctgcaaagtacaagatctcagacaacagacggcatgttgctattgtcaccacagcaagccttccatggatgacaggaacagcaatcaatccattgtttcgtgctgcatatctggcaagaagtgcaaagcaaaaggtgacattggtggtcccatggctctctaagtcagatcaagaattggtttacccaaataacatcaccttcagttcgccagaagagcaagaaacttatataaggaactggctgcaggaaagaataggctttgaagcaaactttaagatatccttttatcctggcaagttctcaaaagagcgccgcagcattattcctgctggggatacttcacagttcatctcctcaaaagaagctgatatagcgattttagaagaaccggagcatctcaactggtatcatcatgggaagcgttggactgataagttcaatcatgtcatcggtgtagttcatacaaattacttggaatatatcaagagagagaaaaatggtgctattcagtcttttcttgttaaacatatcaataactgggtgactagagcatactgccataaggttttacgtctttctgctgcaactcaagatctaccgaggtctgttgtttgtaacgtacatggtgtaaatccgaagtttcttaatgttggtgagaaaatagcagctgatagggagtgtggacagaaggtcttttctaagggagcatatttccttggtaagatggtgtgggctaaaggatatagagagctgattgatttattatccaaacacaaaaacgacctggaaggattcatgatagatgtatatggaaatggcgaggactctgaagctgtccagaacgctgctaggaaatttgatttgaacatcaattttttcaagggaaaggaccatgcagatgattcactccatgggtgaggtacaaggtttttgtcaatccaagtgttagtgatgtgctatgcacagcaacagctgaggcccttgcaatggggaaatttgtagtctgtgcagatcatccatcaaacgatttttttaagtcattccctaactgcttaacatatagaacttcagccgaatttgttgctcgtgtcaaagaagccatggctactgaacctcaacctctgacctcagagcaacggtacagtttgtcatgggaagcggcgactgagaggtttatggaatactcagagcttgacaaagttctgaacagaaatggtcaccctggacgaaatgggaaggttaacaaagcaagaaagataccgttacttcctaaattgtcagatgtggtggatgggggactggcatttgctcatcactgcctgactggtaacgaaatcctcagattagcgacgggagcaattcctggtacacgtgactatgataaacagcagtgcatggatctgaacctgctgcctcctcaagttcaacaccctgtatatggctggtgatcaaaccagttcacattgaactatgtatagtcgtaggatgtacatattaagtgatccagttcctgtgtactgacaggagcatgaacttttgtagagtcttggtaattcctagggtccatcgggaacctgccttgttgcactctttgattgtaattatactccttttcgctatccaaataggttagttatgtagttgaatgatctttaatctgaggtatgcgtatacacataattaccagtgcctgtactctgaagtcttatgggacagcaaggattgtgacttgtttcggtttcctctgccatgccccatagtttgttcggaaaactgtctgtaggtgtgaaaagggatagagtttaacttgctgtgactagctgaagcaaccatactcaaactgaagactcggtgacgagataaattaagacattattgattcgaga

SEQ ID NO: 25212 - DNA, 3021 bp, Zea Mays
ctccaccacatatcaagatctcccccggacccacgattcctattgtcaccaccctccctccctccctgacaccgggcctcgcccgccggaatcacacgagccacgagcagcgcgtcgccccgtccgggccccaccggacaccgccgtcgccttcctcgtctttcttccccgccgaagtccgaaccatctcgcgcctcaactttcccacgcgcgactcgcacctcctacgcgcttctagaaccaacgaagcatttgacacccagctcagccctcgcgctcgcgcaagcgcggcaagcccgccctccaccggataatagtaatgatgggcaaggaagagacgccgccggccgacggaggcggcgcattcgccttcatctccaaggggtggcgcgaggtgcgggactcggcgtccgctgacctgcgcctgatgcgcgcgcgcgcggactccgtgcgcgcgcgcgccgaccgcgagctcgagcacctcctcgcgtccgcggcgtcggcgctcacggggcccgcgcccccgctgccgcccgtcgcgacgggggcgcccatcgcggaggtcgagttcgtgcgcaggcggatccagcccaagatccaggagctccggaggcactgctcgtcgcgggcgcccgacgcccggtggccgcccggggccgcccccgccccaggcgccagcagcctccgcatcgacctctcggggatcaccgccattcgcaacgccattgtggcggaaggggaccgcggcggtaggtggagggtcgcgcggcggaagggggaccaggacgaggaggggaggaaggagtgggaggtggttcgggtgatacagagcggcctcaaggagttcgagcgccggagcctgtccagcggcatatttgctggattccgtggccgtggcgagtttgtggagaaatttaggttcggcatgaaatcactgaacaagggctatcaggaatccaagacctttgtgacaaactagtggagatgttatgcagtaaacgaaatggtcggctcatgtatcattctctttcaaaggacagacccttagctgagaacatatctgacgagcttgatctaagaatagctagggtattagaaagtactggttatcacacagatgaaggtttttggaatgaccctgcaaagtacaagatctcagacaacagacggcatgttgctattgtcaccacagcaagccttccatggatgacaggaacagcaatcaatccattgtttcgtgctgcatatctggcaagaagtgcaaagcaaaaggtgacattggtggtcccatggctctctaagtcagatcaagaattggtttacccaaataacatcaccttcagttcgccagaagagcaagaaacttatataaggaactggctgcaggaaagaataggctttgaagcaaactttaagatatccttttatcctggcaagttctcaaaagagcgccgcagcattattcctgctggggatacttcacagttcatctcctcaaaagaagctgatatagcgattttagaagaaccggagcatctcaactggtatcatcatgggaagcgttggactgataagttcaatcatgtcatcggtgtagttcatacaaattacttggaatatatcaagagagagaaaaatggtgctattcagtcttttcttgttaaacatatcaataactgggtgactagagcatactgccataaggttttacgtctttctgctgcaactcaagatctaccgaggtctgttgtttgtaacgtacatggtgtaaatccgaagtttcttaatgttggtgagaaaatagcagctgatagggagtgtggacagaaggtcttttctaagggagcatatttccttggtaagatggtgtgggctaaaggatatagagagctgattgatttattatccaaacacaaaaacgacctggaaggattcatgatagatgtatatggaaatggcgaggactctgaagctgtccagaacgctgctaggaaatttgatttgaacatcaattttttcaagggaaaggaccatgcagatgattcactccatgggtacaaggtttttgtcaatccaagtgttagtgatgtgctatgcacagcaacagctgaggcccttgcaatggggaaatttgtagtctgtgcagatcatccatcaaacgatttttttaagtcattccctaactgcttaacatatagaacttcagccgaatttgttgctcgtgtcaaagaagccatggctactgaacctcaacctctgacctcagagcaacggtacagtttgtcatgggaagcggcgactgagaggtttatggaatactcagagcttgacaaagttctgaacagaaatggtcaccctggacgaaatgggaaggttaacaaagcaagaaagataccgttacttcctaaattgtcagatgtggtggatgggggactggcatttgctcatcactgcctgactggtaacgaaatcctcagattagcgacgggagcaattcctggtacacgtgactatgataaacagcagtgcatggatctgaacctgctgcctcctcaagttcaacaccctgtatatggctggtgatcaaaccagttcacattgaactatgtatagtcgtaggatgtacatattaagtgatccagttcctgtgtactgacaggagcatgaacttttgtagagtcttggtaattcctagggtccatcgggaacctgccttgttgcactctttgattgtaattatactccttttcgctatccaaataggttagttatgtagttgaatgatctttaatctgaggtatgcgtatacacataattaccagtgcctgtactctgaagtcttatgggacagcaaggattgtgacttgtttcggtttcctctgccatgccccatagtttgttcggaaaactgtctgtaggtgtgaaaagggatagagtttaacttgctgtgactagctgaagcaaccatactcaaactgaagactcggtgacgagataaattaagacattattgattcgaga

SEQ ID NO: 25213 - DNA, 1088 bp, Zea Mays
gattcaaactgtgaggttttcatattaaatatatatggggtaataatatatagcaaatctagtacacatgtatatgtatgtatagcttattaacttatttctgcacagcttcggaagggaaaatatatgagaacgaacatttgctacaaaagaaaaactaattgctcgataaccgcgcgagcgagggggcgatgttgatcccccgcgccgcactagccagtacgaacgaaaacgaacgaacgaagcgcgcgccggtcgtcgtcgtgggctcgtggcgcagcgacgactcacacgtcgacggtgcagtcggccgggtgcgtgaacttgagggagacggtggtgttgacgccggcggggactaccccggacgcggcgctggcggcgaagacgcctccgccggcggcggcgccggcgctgccgctggtggcgagcagcgcggggcagttgacgaagaggtggtagctgcccgagacccagctgccgaccttccacttgacgcggccgtccaccctgacgtggagcagcacgtatcccgcctcgatgtcctgcttcatggcgtccgccacgtactgcgccacggggaccgcgtcgcccgacatgaccggcgaccacaccgacacgtccttgtggccctggtagatcgccggcatcgacacgggtaccgtcaccgcctcgtcgcggtacgtggtgaacgcgtccagcgtcttgtagtacacgcccacccgctcgttcgggttccgcgacgcgatcgtcacctgaggtcgagggagagcgccgggtcgctgaggtcgatggagcgcagctgcacgtcctgcaggtagaaggacggcttggaggggcgcagcgccaggtagatgacgagcacgatgaagcctacgacgacggccagcgtcaggatgcaggcggcgatggagccgcagcagcgccggaggatccagtcgcggtggtgcttctccttgctcatggtgaccagcgagcagctgcggtggtggcgccggcgctggactgggagctctgagctcagctggctgccttgctgctatagctagcttaggagtgtgcgcgcatgtgggctgcctatagcagtg

SEQ ID NO: 25214 - DNA, 3036 bp, Zea Mays
atggcaagttggcaaccacctgcagctctacatctacgcacacatctccgtgatctcttcagcctcgcgactgccaccaaatcggtcttggcaggttgctgcgccaaatcggccggtcttggcaggttgctgcgccaaatcggccggtcttggcaggttgcgctagctacccataggttggctggagagatgagggccggggggtgcacggtgcagcagtcgctgacagcggaggccgcggcggtggtgaagcaggcggtgagccttgcgcggcggcgcgggaacgcgcaggtcacgccgctgcacgtggcgagcgcgatgctggcggccgcacccgcggggcagctgctgcgcgcggcgtgcctccgctcacactcccacccgctgcagtgcaaggcgctggagctgtgcttcaacgtggcgctcaaccgcctccccgcgtcggcatcgtcgccgctgctcggcggcaaccaccactgctaccacccgccgtccctgtccaacgcgctcgtcgcggcgttcaagcgcgcgcaggcgcaccagcggcgcggcggctccgtcgagagccagcatcagcagccggtggtcgccgccgtcaagatcgagctggaccagctcgtcgtctccatcctcgacgaccccagcgtcagccgcgtgatgcgcgacgccggcttctccagcacccaggtcaaggccaacgtggagcaggccgtgtgcagcagcagcaccatggctacggccgcagccgcacccagcaaaaaccctaaccctagcagctcggccaccaccacaagcccaccgcctaaagaagctaaagccaagccgccgctcgcgctccaccaccaagcgcgcgacgaggacgtcgccgccgtcctggactgcctggcctcgcggagcaagaggagggtcgtcgtcatcgcggagagcgcggccgcggccgaggccatggcgcacgcggccgtggacaagatcaagagaggcgaggtgaagcacgagcacgacgcgctgcgaggcgcgcaggtcgtcagcctccgcgtgtcgtcgttccgtgagatgccgagggaggaggccgagcggcggctcggcgagctgcggtgccttgtcaagcagggcaggaggcagcgggtcgtgctcgtcgtggaggacctcaagtgggcggcggagttctgggccggccacgacggccagagcgggaggagaggcgggtactactactgcgccgtcgagcacgtcgtcaacgagctgcgcgccctggcgagcggcggcagcctgtgctggctcctcgggttcgggacgtaccaggcctacacgaagtgtcgggtggggcagccgtcgctggagagcctgtgggggctccagacgctcaccgtgcccgccggcagcctcgcgctcagcctcacctgcgccttcgacgacagtgccctaggcacagtcaatcagtccctgaaagcgggctctgacgcggatgggaacgggccggcgtcttgctggccgcttttgggcggcagccagctgagcctgagctccagatgctgcggcgacggcgattgctctgccgcgaggatcgacacgaaagcggcgttgcctcggccctctgtctcatcgtccaacctcccttcctggcttcagcattgccgtgatcatcagcgctgtacgtataggagcctactacgagccatcttacggatcttagcaagagcaagacatggagctccatctgcagcaggccgtcgcagcggatgacgctgcatttttccgcaccggtgtctccggcctcctccatctcctcctacgagcacggcggcgaccagtcgtcgcagacgccgcctcagcactcgtggctccttgctggtctcgacgccgcgcaccaccggtgggaacccaagcgcgagaccagcgggaataaggccgccagcaggtcccacgactccggcgcctcgaacggcggctccgtggaggtggagtgccgcgccaggttcaaggagctcagcgccgagaacctcaagctgctctgcggcgcgctggagaaggaagtgccgtggcagaaggagatcatcccggaggtcgccagcgccgtcctgcagtgccggtcagggatcgccaagaggcgcgacaagtcgaggtcggcggacgcaaaggaggagacgtggatgctcttcctcggaggcgacgccgacggcaaggagagggtggcgagggagctcgccagcctcgtcttcgggtcacgcgacagcttcttagccatcaggcctggtgcctcgtcgtcgtcgccgccgcggtcaggttcctccgagggtcaccggagtaacaagcggccacggatgtcgccgccgccgcctggggaggagtcggcgccggcctgcctggaacggttgcacgacgctgtatccgagaacccgcaccgggtcatattcatggagggcgtcgagcaggctggccgggactgccagctcggcatcaaggaggcgatcgagagcggggtcgtgcggaaccgagctggcgtggaggtcggcgtgggcgatgccatcgtcgtcctgagctgcgagggctttggcagcaccggcaggtccagagcttgctcgccaccgagcaagaaggtgaaggtagagatggaggaggctaaggaggagcgcacaggtgacattgaacacaacggagatggtggttcctcgtcgtctccgtcgtgcatcgatttgaacgtggacatggagagtgaccaggcggacgagggaagtctcgatgatgatgtctgtctgctcacagccgtcgacaggaccctgttcttcagaagacaggggtgactaactgtgtacattgagtcattgaaggaaccgtatgcgtgtcaaacgtgcttcgttttgataagaacctagattagttgtaagcgcgcaagtagcattttctttagtttatgttttttatatctaggttttagagaattggatcgccggtgtatttggggcttcactaaagacaaaatagagctgttgtacatttagctggagattcaatcgcagttatccgtaaccgaccaaa

SEQ ID NO: 25215 - DNA, 1435 bp, Zea Mays
ctgctgccatgttctctcctacgcccatgctcgctctcgcgctctacctaggcctgccattgtcactgctgtctcgccagctacaccctgttgcgtcctctccgacgctctcgcttgcagggctctgcctcggggctgcacgctcccatcaccgcctcaccgccgcagcattcgcctatgtgcacccgctcgctctcgtgctacgcctcggtctgccattgccaccgctttctcgccggctgctatgtacctgctgcgtcttctccggcgttcccgtttacagggctctacctcggggttgcactgcgataagctgatgataaactctacgcccacggccagaaaccattacattgctcgacaccactctctctctctctctaccatgtcccccatgcgtgaattcagacactgggcctttagtctacaaatccttttatttcgtttcacgtttattattttatactattcagttttaatccagagatgattgaattttgtatcttagatttcactgttcgtttctttagaaatgaacctagaatttttttaggttgatcaaaacttatataaattagaaaaacaatgtttgaatccagagatgggttgtatcactcgacaacttccgtacggtgcattatttattgttgctgattgccttgtcattatggagacatgttaaaagcacaacgcttgctcatgtctaggatctactgaactcccgtggtgtaaccaggctctgacgagatacttaactgacgctatgagagaatcaagggttcgagtttttgcatgctgtaaggattcatcactggacactaagcaaagaattatacagtgatgccttatcatatctgtttgtgggactataaagtgatggttttttataagatagtcaatgcatgttccaataagtgtaccttgatgtatacacagtggcggaggacggaaaaaaaattaggtacctcgtagtcgtcgggctcctcggacggcgaagccggaaggcacagcggctcgccctcgacggacggagcacggagggacagggacaggccacaggcccgcggcccgcaggcggacagcagctcgacgcctcagcctcggcggacggaggcacaggggcggagccacggagggatagagacaggccccagccggacaggcggacagcggctcggcatcgagccgtcggcggacggggacagcggtggacggctggacggggacagcggcgtcggctaacggaggaaggctggccgctagtggaaggcactggcagtctggcactgtggcacagcggcgggcggcggctgaccgagaatcgtgaggggctgagagctgagggttagcgacgctgaccaggctgggcgcgtgggccggcggacggacctgctaatctgtttttctttttttggtatggcttgggctataatag

SEQ ID NO: 25216 - DNA, 1422 bp, Zea Mays
gcactttctccccatgccgtcgccgccgcctcactgctgccatgttctctcctacgcccatgctcgctctcgcgctctacctaggcctgccattgtcactgctgtctcgccagctacaccctgttgcgtcctctccgacgctctcgcttgcagggctctgcctcggggctgcacgctcccatcaccgcctcaccgccgcagcattcgcctatgtgcacccgctcgctctcgtgctacgcctcggtctgccattgccaccgctttctcgccggctgctatgtacctgctgcgtcttctccggcgttcccgtttacagggctctacctcggggttgcactgcgataagctgatgataaactctacgcccacggccagaaaccattacattgctcgacaccactctctctctctctctaccatgtcccccatgcgtgaattcagacactgggcctttagtctacaaatccttttatttcgtttcacgtttattattttatactattcagttttaatccagagatgattgaattttgtatcttagatttcactgttcgtttctttagaaatgaacctagaatttttttaggttgatcaaaacttatataaattagaaaaacaatgtttgaatccagagatgggttgtatcactcgacaacttccgtacggtgcattatttattgttgctgattgccttgtcattatggagacatgttaaaagcacaacgcttgctcatgtctaggatctactgaactcccgtggtgtaaccaggctctgacgagatacttaactgacgctatgagagaatcaagggttcgagtttttgcatgctgtgtgctaccaatcggagatgtacaacaagtgtcatgaagccatgaatatagtcaatgcatgttccaataagtgtaccttgatgtatacacagtggcggaggacggaaaaaaaattaggtacctcgtagtcgtcgggctcctcggacggcgaagccggaaggcacagcggctcgccctcgacggacggagcacggagggacagggacaggccacaggcccgcggcccgcaggcggacagcagctcgacgcctcagcctcggcggacggaggcacaggggcggagccacggagggatagagacaggccccagccggacaggcggacagcggctcggcatcgagccgtcggcggacggggacagcggtggacggctggacggggacagcggcgtcggctaacggaggaaggctggccgctagtggaaggcactggcagtctggcactgtggcacagcggcgggcggcggctgaccgagaatcgtgaggggctgagagctgagggttagcgacgctgaccaggctgggcgcgtgggccggcggacggacctgctaatctgtttttctttttttggtatggcttgggctataatag

SEQ ID NO: 25217 - DNA, 1039 bp, Zea Mays
gaggcaacataaaaaaagtgactgacgtccactgaaactaacggccgcgcacgccgatcgggttgcgccggccgatgtctccggcgccaccacgggcatgccatggcgttcagccgttcacaccctgttcctttgggcccaaagctacctcaccacatcgaccaccgggcggggaaggctacccctacccaccagcgcgcaccgagccggctgagacgtgtggcggagcttgcgcgacgccactggcggaggcgccctcgcgctgccacgcgcccacgccgcgtgacggtgcgcggctagtgctcgccgcaccggtcgtcccgggccatcacgaggtcgccgcacctacacgctcgacgacactatataagaagcggccagcccacacagctgcgcaccgatcacaaaaccaatcgcggagattcaatcacgtacgtatacacacggccacacgggcacgtagctagctagcagtcgtagcgtgacgatgagggttctctctgttgcggtcgccatcaccatccccaaacgctgcaacctcgccgaccgccccgttggctacaagtgcggagattacactctgccatgagcggcggtgaggtctccaggccggatttgctgcatggcatgcccgagtatcaccgaagcgcgagctcttgtgtcgagcgagtccgtgtctgtcagtcagtctctatgtgttgcccataataaacaaagacatgcgagtaccagacatgtgcaactctagtagcatggtgcgtgtatcactaggtacgcgtactcgtatagttgtgttcagttcagggtctatagagatgtagccctgcattgtcgaaataaatactgtgtccactcgttcgtgaaatgaaaaaaaaggcttgatgctcgactaactaaacgagtgaccagagccaaaacataaagatttatatcctagatgataaaaaaataagaacatgtaatataccgtccttgcggtacaaaaaatcaaggcacctacgacgtactgtctctggttttgagcacagttacgttgttt

SEQ ID NO: 25218 - DNA, 1476 bp, Zea Mays
tgagcatgacgattgaccaagaactcctcccgtcttcttctctgcccttctataaaacaaaagaacagaagagagcggcaacggcaagaccagctcccgccggccactcgtctagactcgagagcggcacgatgcctccttctctgcaccctccccacctccacttccacaagctcaagcgccgccaccaccccgccgccatggccaagaagggcctggccgccatcctctacaagttccgcgacgtgcactgcccgccctccgcctcgctgccgccgtcgaccccgtccgcgcactacgcccagcgctgctacccgccgccgctgtccgcgtggccctggccgtcgtgccggcacccgcgcaccagctcgttccgcgggcccaaagacgacgccgccgcggtgttccggaccgtgaacaccgtctacgactacgacacgatctcgggctcggagcaggtcctccggcgctcctccatcgatgaggcggcgtgcatcgaccggcgcccactgtcgttgctcggagaggccattgcggagcaggcggtggacgaggaggaggagaaggagacggagctgcgagagacggccgtcgtgcgcggcatgcgttcggagcgactgttcttcgaaccggccggcgcagagttcttgcccaatcagagcgtggcggtggcgccggcgagaggcaaggacgaggcggccacggcggacgtcaagagcgaggaacaagcgacgacagacgcgccgcacgacaaggacgagccgccggcggaggccgtcacggcgaagggcggcgcggtggtggtcacggtggagtccaaagacccgtacggcgacttcagggcgtccatggcggagatggtggcggcgcacgggctgcgcgactgggaggccctggaggagctcctggcgtggtacctcaagctcaacgctaagggtgtccacgctgccatagtcggtgcattcgtcgaccttctcgtaagcatgcagccgcaggcgtcatccccgccgtcgctgccgtcccagtcgccctcgtcgtcgtgcatcaccttcgaggagtgctcctcggcaacctttgacgaggatgactgcaagagctgagctgagctgaactgaggcggagggtgctccgtgttcgccatttctaatcttttttttttgtctcattcagagatagcggtttttgtgaattattttgtgcgcctatggaagaatggaaggtgaggtgaggcctgaatggtgccatggatgtacagttgctaaactacctgatgctgaccatcagaatagattaattgcctagacaactaattgaccatttttatttgctctgcatgttttttatttgtcttttgatgcctgtctcttgcgcgtgaactaaacttgtctactaactctgaagcatgttcgtctctgtgtctgttgctgtcaacagctgcaattagctgttttctcaacgattttcatggcatttgag

SEQ ID NO: 25219 - DNA, 2544 bp, Zea Mays
atgccgaaaggcaaggcaaacgcaaatgccacaacccacctctcgactcgccgccgcagccgcatgacacccaccgtcggctggccatcccctcgggtcgccacccccttcggccgctgcctcacagctcgctgcatcgtcagtctcggcctccacaaccaccaagtcctcctatcccgctttgccgccgccttcaatgccctcgcgtccccgtcccgcaacgccgccgccgccagccggccatccgttgcgctcgccactctcctcgggcgctgctgcaccgtgcgctgcctcgcccagctccacgcccgcatcatcctactcggtctccacaaccaccacgccctcctcgcccgcttcaccaccgcctgcgatgccctcgaatgcccctccgtcgccgcctctttcatcgccgcgcttaccgactcccacgccgccccgctccgcctccgcaacgccgtgctcgcgtccctcgcccgccacgccccgctccacgccgcgctcacggagttcaacctcctccgacaggccgcgctcccggactctttttccttcccttgcctcctccgcgcgtgcgcccgcgtatcctgcctccccgctggacgagccctgcacgccgccgctatccgccttggcgtgcacgccgatctcttcatccgcactgcgctcatccagttctacggcaggtgcggcgtggccgacgcggcccgggcgctattttatcaaatcgacatccccagtgaggtttcctggaccgccattatcgttgcctacgtcaacaatggtggcatcatagacgctagagctctgtttgatacaatgcctcaaaggaacgtggtgcactggaatgtgatggtcgatggttacgtaaagtgtggggacttggagggcgcaaggaggctgtttgatgaaatgcctgagagaactgctacagcatgcacatctttgattggtgggtatgcaaaggcagggaacatggaagctgcgagattgttgtttgataagttagaggaccgtgatgtgttctcatggtcagcgatgatatcaggttatgcacagaatggttaccctggcgaggctttgaggacttttgatgagttccaagggcaaggcatacacccagacgaacttgttgtggttggcctgatgtctgcatgctcccaactaggtaacatcaggttggcaagttggattgaagattacatcacaaagtactctatagatatgaacaatgctcatgtgttggctggtcttgtgaacatgaatgcaaagtgtgggaacttggagagggctacttttttgtttgagtctatgccagttcgagatgtgttttcatattgttcactgatgcaaggttactgcctccatggttcagctgacaaggctgttaagcttttctctcggatgcttttggagggactcacccctgacaatgctgtgtttacaattgttttaacagcttgctgtcatgctggtctagtagaagaagggaagaagttctttgatataatgaagaatgtgtacttgatggtgccatctggtattgtgaaagatcagggtgcttctgtacaaatgttggaatatgggcctgattaagacacagagttttgacatttgctgttaagaactcttactgcttccatggcctgctgtttgctacttcaaatatatgttttcttacaacaacaacaacaacaaagccttttagtcgcaacgtcctctttccttctcaacgtcggccagctgtttggcgcgctcctgcgcacggcacacgtccctggctcggcgacgcctggtgtacgtgcgcccgaacatgacagcactctaacatgtttgtgccagtgtgataactgcatgactgagatattgatagggcctaagctttttcttaagcagcttttgctagctgcctagagtctagagaagcaacttgctgcagaagttgatgaaatgaaaacctatgtgtttggcaacctggcttttctatgtctttttcatgcgtgtcctcctttgggaccctcgtgtcacagcctgtaccagaggactgaaggcgccattctctccagagctgcagaggcagcatccaagcctggtttctcttttcttgcccttctaccactgatccctctgatccaatctcactgcgtgctgctgccaggtcaaatcaatgtctacctcgtgccctctaccgcacacctgatcgtgcttccctggccgctgtctccccttcttagcccccatggaggcagaaattgggctgacactgacagggcctgcaccagtctagaggctgctcagctcctgccgccaccatggaggggatctcatcaaaggagagctgagggacacagaaggggtagtgggcggaggttgagtgcgtatggagggaggtgcagcgaagaagctgaggctgagccatggacagaaaaagctgctcgctcagtcaccctgcgctttagaggaacatggtttgtcagtagaaattggagacatgctgggccattgtcaagttcatgggtgaagaattgaaaactgttagttcct

SEQ ID NO: 25220 - DNA, 2735 bp, Zea Mays
atgccgaaaggcaaggcaaacgcaaatgccacaacccacctctcgactcgccgccgcagccgcatgacacccaccgtcggctggccatcccctcgggtcgccacccccttcggccgctgcctcacagctcgctgcatcgtcagtctcggcctccacaaccaccaagtcctcctatcccgctttgccgccgccttcaatgccctcgcgtccccgtcccgcaacgccgccgccgccagccggccatccgttgcgctcgccactctcctcgggcgctgctgcaccgtgcgctgcctcgcccagctccacgcccgcatcatcctactcggtctccacaaccaccacgccctcctcgcccgcttcaccaccgcctgcgatgccctcgaatgcccctccgtcgccgcctctttcatcgccgcgcttaccgactcccacgccgccccgctccgcctccgcaacgccgtgctcgcgtccctcgcccgccacgccccgctccacgccgcgctcacggagttcaacctcctccgacaggccgcgctcccggactctttttccttcccttgcctcctccgcgcgtgcgcccgcgtatcctgcctccccgctggacgagccctgcacgccgccgctatccgccttggcgtgcacgccgatctcttcatccgcactgcgctcatccagttctacggcaggtgcggcgtggccgacgcggcccgggcgctattttatcaaatcgacatccccagtgaggtttcctggaccgccattatcgttgcctacgtcaacaatggtggcatcatagacgctagagctctgtttgatacaatgcctcaaaggaacgtggtgcactggaatgtgatggtcgatggttacgtaaagtgtggggacttggagggcgcaaggaggctgtttgatgaaatgcctgagagaactgctacagcatgcacatctttgattggtgggtatgcaaaggcagggaacatggaagctgcgagattgttgtttgataagttagaggaccgtgatgtgttctcatggtcagcgatgatatcaggttatgcacagaatggttaccctggcgaggctttgaggacttttgatgagttccaagggcaaggcatacacccagacgaacttgttgtggttggcctgatgtctgcatgctcccaactaggtaacatcaggttggcaagttggattgaagattacatcacaaagtactctatagatatgaacaatgctcatgtgttggctggtcttgtgaacatgaatgcaaagtgtgggaacttggagagggctacttttttgtttgagtctatgccagttcgagatgtgttttcatattgttcactgatgcaaggttactgcctccatggttcagctgacaaggctgttaagcttttctctcggatgcttttggagggactcacccctgacaatgctgtgtttacaattgttttaacagcttgctgtcatgctggtctagtagaagaagggaagaagttctttgatataatgaagaatgtgtacttgatggtgccatctggtgagcattatgcttgccttgtcaatcttcttggacgttgtggtatgctagaagatgcatattggcttatcatgtcgatgcccgggaaacctcatcctggagcatggggtgcactgttgggtggatgcaagcttcactgtaatatagagcttggaaaaattgcagcaaaaaaactttttgaaattgaaccggataatgctggaaattatgtctccctgtcaaatatgtatgctaacattgacaggtggggagatgtttctgaagttagggctgagatgactggaaagagaataaccaaaatagcagggcgtaccctagttttgcagtgaagcagtgttgaccagaatggtgtatttatcttgtaccatgttactggcccccattgaaaacttgaggctgtgaataaacgtaaaatgagatatcatgctcaatgcatatggtggaagtcatcatatggtgatatagatttggtggtcaacaggctgagttcatacactggaaacctttttctcaaatacacaggggagctgcgtaccattggattgagaagaacacctaagtacaaaaacaaaaagaccaccacaccaacacagccgtaccaaatacacacacatacactcaaacccaacctcataggtggcatacatctggaccgagttaagacacttccattagcttagagttcacattgccagactcagctgggtggatgctttgatttttggtattgtgaaagatcagggtgcttctgtacaaatgttggaatatgggcctgattaagacacagagttttgacatttgctgttaaggtcaaatcaatgtctacctcgtgccctctaccgcacacctgatcgtgcttccctggccgctgtctccccttcttagcccccatggaggcagaaattgggctgacactgacagggcctgcaccagtctagaggctgctcagctcctgccgccaccatggaggggatctcatcaaaggagagctgagggacacagaaggggtagtgggcggaggttgagtgcgtatggagggaggtgcagcgaagaagctgaggctgagccatggacagaaaaagctgctcgctcagtcaccctgcgctttagaggaacatggtttgtcagtagaaattggagacatgctgggccattgtcaagttcatgggtgaagaattgaaaactgttagttcct

SEQ ID NO: 25221 - DNA, 3179 bp, Zea Mays
atgccgaaaggcaaggcaaacgcaaatgccacaacccacctctcgactcgccgccgcagccgcatgacacccaccgtcggctggccatcccctcgggtcgccacccccttcggccgctgcctcacagctcgctgcatcgtcagtctcggcctccacaaccaccaagtcctcctatcccgctttgccgccgccttcaatgccctcgcgtccccgtcccgcaacgccgccgccgccagccggccatccgttgcgctcgccactctcctcgggcgctgctgcaccgtgcgctgcctcgcccagctccacgcccgcatcatcctactcggtctccacaaccaccacgccctcctcgcccgcttcaccaccgcctgcgatgccctcgaatgcccctccgtcgccgcctctttcatcgccgcgcttaccgactcccacgccgccccgctccgcctccgcaacgccgtgctcgcgtccctcgcccgccacgccccgctccacgccgcgctcacggagttcaacctcctccgacaggccgcgctcccggactctttttccttcccttgcctcctccgcgcgtgcgcccgcgtatcctgcctccccgctggacgagccctgcacgccgccgctatccgccttggcgtgcacgccgatctcttcatccgcactgcgctcatccagttctacggcaggtgcggcgtggccgacgcggcccgggcgctattttatcaaatcgacatccccagtgaggtttcctggaccgccattatcgttgcctacgtcaacaatggtggcatcatagacgctagagctctgtttgatacaatgcctcaaaggaacgtggtgcactggaatgtgatggtcgatggttacgtaaagtgtggggacttggagggcgcaaggaggctgtttgatgaaatgcctgagagaactgctacagcatgcacatctttgattggtgggtatgcaaaggcagggaacatggaagctgcgagattgttgtttgataagttagaggaccgtgatgtgttctcatggtcagcgatgatatcaggttatgcacagaatggttaccctggcgaggctttgaggacttttgatgagttccaagggcaaggcatacacccagacgaacttgttgtggttggcctgatgtctgcatgctcccaactaggtaacatcaggttggcaagttggattgaagattacatcacaaagtactctatagatatgaacaatgctcatgtgttggctggtcttgtgaacatgaatgcaaagtgtgggaacttggagagggctacttttttgtttgagtctatgccagttcgagatgtgttttcatattgttcactgatgcaaggttactgcctccatggttcagctgacaaggctgttaagcttttctctcggatgcttttggagggactcacccctgacaatgctgtgtttacaattgttttaacagcttgctgtcatgctggtctagtagaagaagggaagaagttctttgatataatgaagaatgtgtacttgatggtgccatctggtgagcattatgcttgccttgtcaatcttcttggacgttgtggtatgctagaagatgcatattggcttatcatgtcgatgcccgggaaacctcatcctggagcatggggtgcactgttgggtggatgcaagcttcactgtaatatagagcttggaaaaattgcagcaaaaaaactttttgaaattgaaccggataatgctggaaattatgtctccctgtcaaatatgtatgctaacattgacaggtggggagatgtttctgaagttagggctgagatgactggaaagagaataaccaaaatagcagggcgtaccctagttttgcagtgaagcagtgttgaccagaatggtgtatttatcttgtaccatgttactggcccccattgaaaacttgaggctgtgaataaacgtaaaatgagatatcatgctcaatgcatatggtggaagtcatcatatggtgatatagatttggtggtcaacaggctgagttcatacactggaaacctttttctcaaatacacaggggagctgcgtaccattggattgagaagaacacctaagtacaaaaacaaaaagaccaccacaccaacacagccgtaccaaatacacacacatacactcaaacccaacctcataggtggcatacatctggaccgagttaagacacttccattagcttagagttcacattgccagactcagctgggtggatgctttgatttttggtattgtgaaagatcagggtgcttctgtacaaatgttggaatatgggcctgattaagacacagagttttgacatttgctgttaagcgtcctctttccttctcaacgtcggccagctgtttggcgcgctcctgcgcacggcacacgtccctggctcggcgacgcctggtgtacgtgcgcccgaacatgacagcactctaacatgtttgtgccagtgtgataactgcatgactgagatattgatagggcctaagctttttcttaagcagcttttgctagctgcctagagtctagagaagcaacttgctgcagaagttgatgaaatgaaaacctatgtgtttggcaacctggcttttctatgtctttttcatgcgtgtcctcctttgggaccctcgtgtcacagcctgtaccagaggactgaaggcgccattctctccagagctgcagaggcagcatccaagcctggtttctcttttcttgcccttctaccactgatccctctgatccaatctcactgcgtgctgctgccaggtcaaatcaatgtctacctcgtgccctctaccgcacacctgatcgtgcttccctggccgctgtctccccttcttagcccccatggaggcagaaattgggctgacactgacagggcctgcaccagtctagaggctgctcagctcctgccgccaccatggaggggatctcatcaaaggagagctgagggacacagaaggggtagtgggcggaggttgagtgcgtatggagggaggtgcagcgaagaagctgaggctgagccatggacagaaaaagctgctcgctcagtcaccctgcgctttagaggaacatggtttgtcagtagaaattggagacatgctgggccattgtcaagttcatgggtgaagaattgaaaactgttagttcct

SEQ ID NO: 25222 - DNA, 2863 bp, Zea Mays
atgccgaaaggcaaggcaaacgcaaatgccacaacccacctctcgactcgccgccgcagccgcatgacacccaccgtcggctggccatcccctcgggtcgccacccccttcggccgctgcctcacagctcgctgcatcgtcagtctcggcctccacaaccaccaagtcctcctatcccgctttgccgccgccttcaatgccctcgcgtccccgtcccgcaacgccgccgccgccagccggccatccgttgcgctcgccactctcctcgggcgctgctgcaccgtgcgctgcctcgcccagctccacgcccgcatcatcctactcggtctccacaaccaccacgccctcctcgcccgcttcaccaccgcctgcgatgccctcgaatgcccctccgtcgccgcctctttcatcgccgcgcttaccgactcccacgccgccccgctccgcctccgcaacgccgtgctcgcgtccctcgcccgccacgccccgctccacgccgcgctcacggagttcaacctcctccgacaggccgcgctcccggactctttttccttcccttgcctcctccgcgcgtgcgcccgcgtatcctgcctccccgctggacgagccctgcacgccgccgctatccgccttggcgtgcacgccgatctcttcatccgcactgcgctcatccagttctacggcaggtgcggcgtggccgacgcggcccgggcgctattttatcaaatcgacatccccagtgaggtttcctggaccgccattatcgttgcctacgtcaacaatggtggcatcatagacgctagagctctgtttgatacaatgcctcaaaggaacgtggtgcactggaatgtgatggtcgatggttacgtaaagtgtggggacttggagggcgcaaggaggctgtttgatgaaatgcctgagagaactgctacagcatgcacatctttgattggtgggtatgcaaaggcagggaacatggaagctgcgagattgttgtttgataagttagaggaccgtgatgtgttctcatggtcagcgatgatatcaggttatgcacagaatggttaccctggcgaggctttgaggacttttgatgagttccaagggcaaggcatacacccagacgaacttgttgtggttggcctgatgtctgcatgctcccaactaggtaacatcaggttggcaagttggattgaagattacatcacaaagtactctatagatatgaacaatgctcatgtgttggctggtcttgtgaacatgaatgcaaagtgtgggaacttggagagggctacttttttgtttgagtctatgccagttcgagatgtgttttcatattgttcactgatgcaaggttactgcctccatggttcagctgacaaggctgttaagcttttctctcggatgcttttggagggactcacccctgacaatgctgtgtttacaattgttttaacagcttgctgtcatgctggtctagtagaagaagggaagaagttctttgatataatgaagaatgtgtacttgatggtgccatctggtgagcattatgcttgccttgtcaatcttcttggacgttgtggtatgctagaagatgcatattggcttatcatgtcgatgcccgggaaacctcatcctggagcatggggtgcactgttgggtggatgcaagcttcactgtaatatagagcttggaaaaattgcagcaaaaaaactttttgaaattgaaccggataatgctggaaattatgtctccctgtcaaatatgtatgctaacattgacaggtggggagatgtttctgaagttagggctgagatgactggaaagagaataaccaaaatagcagggcgtaccctagttttgcagtgaagcagtgttgaccagaatggtgtatttatcttgtaccatgttactggcccccattgaaaacttgaggctgtgaataaacgtaaaatgagatatcatgctcaatgcatatggtggaagtcatcatatggtgatatagatttggtggtcaacaggctgagttcatacactggaaacctttttctcaaatacacaggggagctgcgtaccattggattgagaagaacacctaagtacaaaaacaaaaagaccaccacaccaacacagccgtaccaaatacacacacatacactcaaacccaacctcataggtggcatacatctggaccgagttaagacacttccattagcttagagttcacattgccagactcagctgggtggatgctttgatttttggtattgtgaaagatcagggtgcttctgtacaaatgttggaatatgggcctgattaagacacagagttttgacatttgctgttaagcctgtaccagaggactgaaggcgccattctctccagagctgcagaggcagcatccaagcctggtttctcttttcttgcccttctaccactgatccctctgatccaatctcactgcgtgctgctgccaggtcaaatcaatgtctacctcgtgccctctaccgcacacctgatcgtgcttccctggccgctgtctccccttcttagcccccatggaggcagaaattgggctgacactgacagggcctgcaccagtctagaggctgctcagctcctgccgccaccatggaggggatctcatcaaaggagagctgagggacacagaaggggtagtgggcggaggttgagtgcgtatggagggaggtgcagcgaagaagctgaggctgagccatggacagaaaaagctgctcgctcagtcaccctgcgctttagaggaacatggtttgtcagtagaaattggagacatgctgggccattgtcaagttcatgggtgaagaattgaaaactgttagttcct

SEQ ID NO: 25223 - DNA, 894 bp, Zea Mays
ctctgaacaagcagtgcagaaatgcaccttcttgcttcttgttgcttcacgcggggcagccgggtgtcggcgaggaaccccctgatgagcaggaacctggagaggaatggcaggatcacctgcatgacgtttccccgggactggctgcggagggacctgagcgtcatcggcttcgggctcatcggctggatggggccgtccagcgtcccggccatcaacggcaacagcctcacggggctcttcttctccagcatcggccaggagctggcccacttccccacgcccccgcccgtcacctcccagttctggctgtggctagtgacgtggcacctgggcctgttcatcgtgctcaccttcggccagatcggattcaagggcaggaccgaggactacttcgagaagtgaagcggttaagatcctatccatcatccctggtgctgcgctgcgttgcgttgcgtgcgtgctcgccgctatcgaacctttgctgtatagggttccgatttcgtcgaatgtaatgtatgatgctacttttgagcttcaatgtaaaatctatgccgtccggccccaacgcgctcaggtttaatttgatgcatctagctactagtatccctctcagctacttattactctgataaaaaaagcattttttttctagactacatcaggtcaaacattaaaattactaccttcgtcgtaaaaaaaacatattgtgtttagggtttagggtatcaatctaggtagagcttgttggggcgaaggcaaaggcgccacccttcgctcgaagccttcgctgcagcagctgagctaacagaaacaaaacaggcagggacacccttcgcttgttccgcaccagacgaagaccggcgacgaagggcatcccacagtgcggccacg

SEQ ID NO: 25224 - DNA, 310 bp, Zea Mays
agtgcagaaatgcaccttcttgcttcttgttgcttcacgcggggcagccgggtgtcggcgaggaaccccctgatgagcaggaacctggagaggaatggcaggatcacctgcatgacgtttccccgggactggctgcggagggacctgagcgtcatcggcttcgggctcatcggctggatggggccgtccagcgtcccggccatcaacggcaacagcctcacggggctcttcttctccagcatcggccaggagctggcccacttccccacgcccccgcccgtcacctcccagttctgctcactgacgaaca

SEQ ID NO: 25225 - DNA, 2340 bp, Zea Mays
gctaacgtggcagacctcaaagcatcactcacacaccatcgtcctctccttttgccagcaccgcgaacccgccaccagccttctcccacccacgaagtacggaaggctgccggaaggagctctcacctcacatccatctctgtcgcgcccgtcatcctcctcctcctcccctcctcaactgctatcggatttgcgctgcagtggagatcgacccgggctgggaatttctttcgttggtaaggaaccctaatttggtcggatgggattttcatcttcgacgaagcccgcgagattgatcgaccttagctgacgcgagggattggaaagcgaacgctcgggcgtagttaattttctaggaagattggggtttcagctcaaacccccatgctcgatgctgaggacgaccctggcgggagatgacgaggatcttcgtgcagcgcgggaccgccggctcctcgtccagctccggccgctcgggctcgcaatcagcgcagcagccggcagcagctgcccgggaggagttgccgttgcaacctcagccacagctaccagaactattggctatagatgatgtaactgagcatttaaatgagggcaacgagaacaacagtagcagaattaagtttttgaggacggatgacaccatttcagagagctcgagctacgcagaggagagggctgccagggagaagcctcctaaggatgactctaatgtaatcaaccccacttccttggtagaggaaccgatagtgctccatacccctgatcagattgaacatggaaattctgtgccgtcaggaactaattcatcacagatggtgggtgcagcatcgcacccgccgccaccgccagctccgcctccaaaatcattgttggggaatagtgggttgtggagaatgggacctggaagttccaacagtgtgcggattggatctccaagaagaccagtagcttggccaccagtggcagctcggacatctgcttcaggttctcgtccttcttcgcctaggtcactcgttgatggtgaaggttacaatagtgctgatgaacagggtccctgttacgcctcgagttatgatgattcgagagcgtatgtttgagcatgacctaaggcgagtgaaagggttggaaatcagaaagacggccgaagatgggaactgtctattcagagctgttgctgatcaagtttatggagatgcagaagcttatgacatggctaggcagatgtgtgttgattatatggaaagggaacgggatcatttctctcagtttataactgaaagttttacattatactgcaagaggaaaaggagagacaaggtttatggcaacaatgttgagatccaagcatttgcagagatgtacaatcgtcccattcacatatattcctacagtacagagcccattaacatttttcaaggaagctacaacacagacactcctccaattaggttaagttaccatcatggtaatcattacaattcagtggttgatccccgccgacagactattggggcaggccttggatttagctcttttagagggactaatgttgacagggatcaggtgaaggctgcaataaaagctcagcaagaccagcaaattgataatgcactgatggcagaagggcgattctactctgatctggagttaacagagagggaaatagaacggatggtgatggaagcctcgcgttcagaatatctggccaaggagaaaaagcttaacataagggaatcatcgacatcaggggcagagccatcttcatccgctgcaattagtggttcctctcgatcagttgctggagcggacagaagcagcgaggactactttgtgcttccagacactgtgctgactcgcagcatgcagctgcttctcgcaatgggcttcggctacaaccaggtcatggaggcctacagcatattcggcgaggatgtggactcgatggtctgctacctggtggagaccggaggagcctcggcaggtggtagcaatcgccggaaaggaaaggctgctgagtgatgtgtgcaccttcattgctgtgaatgtaattgatggaaaacgttgggcacaactcataccagataatgacagccttatgagttgagatgtcgatatacctgctaccttatgggtgatgaataaatggaactcacaactcttctcgatgccttctggtgatcaagttaaataattaatgatagttggtggttgggattctgggaaaatttgtgggtcaccctggtgccctcattgtgatttttgtgggaactgcgaagctcgtggtgtatgtggggtgtgaacattctctatatcttttcatctttaacgtctcctaaa

SEQ ID NO: 25226 - DNA, 2341 bp, Zea Mays
gctaacgtggcagacctcaaagcatcactcacacaccatcgtcctctccttttgccagcaccgcgaacccgccaccagccttctcccacccacgaagtacggaaggctgccggaaggagctctcacctcacatccatctctgtcgcgcccgtcatcctcctcctcctcccctcctcaactgctatcggatttgcgctgcagtggagatcgacccgggctgggaatttctttcgttggtaaggaaccctaatttggtcggatgggattttcatcttcgacgaagcccgcgagattgatcgaccttagctgacgcgagggattggaaagcgaacgctcgggcgtagttaattttctaggaagattggggtttcagctcaaacccccatgctcgatgctgaggacgaccctggcgggagatgacgaggatcttcgtgcagcgcgggaccgccggctcctcgtccagctccggccgctcgggctcgcaatcagcgcagcagccggcagcagctgcccgggaggagttgccgttgcaacctcagccacagctaccagaactattggctatagatgatgtaactgagcatttaaatgagggcaacgagaacaacagtagcagaattaagtttttgaggacggatgacaccatttcagagagctcgagctacgcagaggagagggctgccagggagaagcctcctaaggatgactctaatgtaatcaaccccacttccttggtagaggaaccgatagtgctccatacccctgatcagattgaacatggaaattctgtgccgtcaggaactaattcatcacagatggtgggtgcagcatcgcacccgccgccaccgccagctccgcctccaaaatcattgttggggaatagtgggttgtggagaatgggacctggaagttccaacagtgtgcggattggatctccaagaagaccagtagcttggccaccagtggcagctcggacatctgcttcaggttctcgtccttcttcgcctaggtcactcgttgatggtgaaggttacaatagtgctgatgaacagggtccctgttacgcctcgagttatgatgattcggaaagagagcgtatgtttgagcatgacctaaggcgagtgaaagggttggaaatcagaaagacggccgaagatgggaactgtctattcagagctgttgctgatcaagtttatggagatgcagaagcttatgacatggctaggcagatgtgtgttgattatatggaaagggaacgggatcatttctctcagtttataactgaaagttttacattatactgcaagaggaaaaggagagacaaggtttatggcaacaatgttgagatccaagcatttgcagagatgtacaatcgtcccattcacatatattcctacagtacagagcccattaacatttttcaaggaagctacaacacagacactcctccaattaggttaagttaccatcatggtaatcattacaattcagtggttgatccccgccgacagactattggggcaggccttggatttagctcttttagagggactaatgttgacagggatcaggtgaaggctgcaataaaagctcagcaagaccagcaaattgataatgcactgatggcagaagggcgattctactctgatctggagttaacagagagggaaatagaacggatggtgatggaagcctcgcgttcagaatatctggccaaggagaaaaagcttaacataagggaatcatcgacatcaggggcagagccatcttcatccgctgcaatggttcctctcgatcagttgctggagcggacagaagcagcgaggactactttgtgcttccagacactgtgctgactcgcagcatgcagctgcttctcgcaatgggcttcggctacaaccaggtcatggaggcctacagcatattcggcgaggatgtggactcgatggtctgctacctggtggagaccggaggagcctcggcaggtggtagcaatcgccggaaaggaaaggctgctgagtgatgtgtgcaccttcattgctgtgaatgtaattgatggaaaacgttgggcacaactcataccagataatgacagccttatgagttgagatgtcgatatacctgctaccttatgggtgatgaataaatggaactcacaactcttctcgatgccttctggtgatcaagttaaataattaatgatagttggtggttgggattctgggaaaatttgtgggtcaccctggtgccctcattgtgatttttgtgggaactgcgaagctcgtggtgtatgtggggtgtgaacattctctatatcttttcatctttaacgtctcctaaa

SEQ ID NO: 25227 - DNA, 1196 bp, Zea Mays
cgccgccggccggcgtcaccatgaaacaaccccatcaaggtgggaggaccgtaccggaaaatatcgggagcaaaaaatcagaccagattttcccccgtgaggcatgaatccagtgttccaagctcccagcggaacaaacaaggaccaatccgtccagggatcggtggagcccgatccgttcgattcgtcgaccaagggagcggcgaagccgcagtcttcatcgtcgtcgctgatcttccttggtacggggtgctccggctcgttgcccgacacacggtgcctcctcaagccgtcgacgccgccctgcggcgtctgttcgatgggcgtctccctccctccggagcggaaccccaactacaggctgaacacctccctcttgatagattattgccatgacgaaacccacaagtacatcctaattgacattggcaagaccttcagagaacaagtcctccggtggtttgtccaccacaaagttccttccgttaattcaatcatcctgactcatgagcacgcggatgctgtcttaggccttgatgaagtctgggtggtacaaccaagaaatggcagaaatgacattgaacaaattcctatttttctcacacaattcaccatggacagtatcgcaagaagatttccctacttgatggagcagaagccagaggatggtgatgaagatgcccaagccgcgaaaattgactggaagataattgaggatgatgtcgacaaaccatttgtagcatcagggctagagtttgtgccgttgccggtaatgcacggagaggggtatatttgtttaggctttttatttgggaggagagccagagttgcatatttatctgatgtttcgagatttctacctaaaactgagaacgttatttcaaagtctggtgctggacaacttgaccttcttatattagaagcaaacgctttgcatggagtgggagattcttccagcacccatttaactctgagtgagagtcttgatgctatcaagaggatccgtcctaaacaagctcttttgattggaatgaggcatttttttgagcatgaaagagaaaaccagatgttggccgaatggtcaatcagagaaggaatatctacacaactggctcatgacggcctgcgtgtattcattgatttgtaataaggctactcaggaatatcaattgttttatgagattgttgatcagctg

SEQ ID NO: 25228 - DNA, 1810 bp, Zea Mays
cgccgccggccggcgtcaccatgaaacaaccccatcaaggtgggaggaccgtaccggaaaatatcgggagcaaaaaatcagaccagattttcccccgtgaggcatgaatccagtgttccaagctcccagcggaacaaacaaggaccaatccgtccagggatcggtggagcccgatccgttcgattcgtcgaccaagggagcggcgaagccgcagtcttcatcgtcgtcgctgatcttccttggtacggggtgctccggctcgttgcccgacacacggtgcctcctcaagccgtcgacgccgccctgcggcgtctgttcgatgggcgtctccctccctccggagcggaaccccaactacaggctgaacacctccctcttgatagattattgccatgacgaaacccacaagtacatcctaattgacattggcaagaccttcagagaacaagtcctccggtggtttgtccaccacaaagttccttccgttaattcaagggttctctgcactgcagatcatcctgactcatgagcacgcggatgctgtcttaggccttgatgaagtctgggtggtacaaccaagaaatggcagaaatgacattgaacaaattcctatttttctcacacaattcaccatggacagtatcgcaagaagatttccctacttgatggagcagaagccagaggatggtgatgaagatgcccaagccgcgaaaattgactggaagataattgaggatgatgtcgacaaaccatttgtagcatcagggctagagtttgtgccgttgccggtaatgcacggagaggggtatatttgtttaggctttttatttgggaggagagccagagttgcatatttatctgatgtttcgagatttctacctaaaactgagaacgtggtccatgtcactgagttgctgaattgctgatgctgtctgcctctagttatttcaaagtctggtgctggacaacttgaccttcttatattagaagcaaacgctttgcatggagtggtaagtgtcccacattttcgtgtcattgatgaataaaaaattgctgattatctgatacttaaggtccaaatgctgtcaaatatattgatggcctgactggaattcatgttctgaacagggagattcttccagcacccatttaactctgagtgaggtcatttaactctgagtgatactttccttgatgttttttaatcagattctcttaacaaactgtcaagtgtttcttgtgggggaaagtaataatttgttcttcagcatgaaaccaatgttctatttttagcagagtcttgatgctatcaagaggatccgtcctaaacaagctcttttgattggaatgaggcatttttttgagcatgaaagagaaaaccagatgttggccgaatggtcaatcagagaaggaatatctacacaactggctcatgacggcctgcgtgtattcattgatttgtaataagatttgcagcatgccagcatccatatgcccatatctctgttgctgattgtacgaagatctgccagaccagtagtctagcaattattttgtgattttttatgtatccaaaagattgtaagtttggtcatgttgatatttttatacactgcagtatattgtattgttctcgtagattttaattggataacagaatgatgtcctaagccaacagaaaataaaagattatggatgtggtaacaagttaaaggatatattgtgtatagtatgagctttcaagttgtgaacttgtaacttcctttacttgaaactctctgcctgtgtgtattagccaacatgtcattag

SEQ ID NO: 25229 - DNA, 1493 bp, Zea Mays
cgccgccggccggcgtcaccatgaaacaaccccatcaaggtgggaggaccgtaccggaaaatatcgggagcaaaaaatcagaccagattttcccccgtgaggcatgaatccagtgttccaagctcccagcggaacaaacaaggaccaatccgtccagggatcggtggagcccgatccgttcgattcgtcgaccaagggagcggcgaagccgcagtcttcatcgtcgtcgctgatcttccttggtacggggtgctccggctcgttgcccgacacacggtgcctcctcaagccgtcgacgccgccctgcggcgtctgttcgatgggcgtctccctccctccggagcggaaccccaactacaggctgaacacctccctcttgatagattattgccatgacgaaacccacaagtacatcctaattgacattggcaagaccttcagagaacaagtcctccggtggtttgtccaccacaaagttccttccgttaattcaatcatcctgactcatgagcacgcggatgctgtcttaggccttgatgaagtctgggtggtacaaccaagaaatggcagaaatgacattgaacaaattcctatttttctcacacaattcaccatggacagtatcgcaagaagatttccctacttgatggagcagaagccagaggatggtgatgaagatgcccaagccgcgaaaattgactggaagataattgaggatgatgtcgacaaaccatttgtagcatcagggctagagtttgtgccgttgccggtaatgcacggagaggggtatatttgtttaggctttttatttgggaggagagccagagttgcatatttatctgatgtttcgagatttctacctaaaactgagaacgttatttcaaagtctggtgctggacaacttgaccttcttatattagaagcaaacgctttgcatggagtgggagattcttccagcacccatttaactctgagtgagagtcttgatgctatcaagaggatccgtcctaaacaagctcttttgattggaatgaggcatttttttgagcatgaaagagaaaaccagatgttggccgaatggtcaatcagagaaggaatatctacacaactggctcatgacggcctgcgtgtattcattgatttgtaataagatttgcagcatgccagcatccatatgcccatatctctgttgctgattgtacgaagatctgccagaccagtagtctagcaattattttgtgattttttatgtatccaaaagattgtaagtttggtcatgttgatatttttatacactgcagtatattgtattgttctcgtagattttaattggataacagaatgatgtcctaagccaacagaaaataaaagattatggatgtggtaacaagttaaaggatatattgtgtatagtatgagctttcaagttgtgaacttgtaacttcctttacttgaaactctctgcctgtgtgtattagccaacatgtcattag

SEQ ID NO: 25230 - DNA, 1548 bp, Zea Mays
aaaactttcccgccgccggccggcgtcaccatgaaacaaccccatcaaggtgggaggaccgtaccggaaaatatcgggagcaaaaaatcagaccagattttcccccgtgaggcatgaatccagtgttccaagctcccagcggaacaaacaaggaccaatccgtccagggatcggtggagcccgatccgttcgattcgtcgaccaagggagcggcgaagccgcagtcttcatcgtcgtcgctgatcttccttggtacggggtgctccggctcgttgcccgacacacggtgcctcctcaagccgtcgacgccgccctgcggcgtctgttcgatgggcgtctccctccctccggagcggaaccccaactacagatcatcctgactcatgagcacgcggatgctgtcttaggccttgatgaagtctgggtggtacaaccaagaaatggcagaaatgacattgaacaaattcctatttttctcacacaattcaccatggacagtatcgcaagaagatttccctacttgatggagcagaagccagaggatggtgatgaagatgcccaagccgcgaaaattgactggaagataattgaggatgatgtcgacaaaccatttgtagcatcagggctagagtttgtgccgttgccggtaatgcacggagaggggtatatttgtttaggctttttatttgggaggagagccagagttgcatatttatctgatgtttcgagatttctacctaaaactgagaacgttatttcaaagtctggtgctggacaacttgaccttcttatattagaagcaaacgctttgcatggagtgggagattcttccagcacccatttaactctgagtgaggtcatttaactctgagtgatactttccttgatgttttttaatcagattctcttaacaaactgtcaagtgtttcttgtgggggaaagtaataatttgttcttcagcatgaaaccaatgttctatttttagcagagtcttgatgctatcaagaggatccgtcctaaacaagctcttttgattggaatgaggcatttttttgagcatgaaagagaaaaccagatgttggccgaatggtcaatcagagaaggaatatctacacaactggctcatgacggcctgcgtgtattcattgatttgtaataaggtatacaaggtcgctttgcagtattcgaggactactgtattcattgatttgcagcatgccagcatccatatgcccatatctctgttgctgattgtacgaagatctgccagaccagtagtctagcaattattttgtgattttttatgtatccaaaagattgtaagtttggtcatgttgatatttttatacactgcagtatattgtattgttctcgtagattttaattggataacagaatgatgtcctaagccaacagaaaataaaagattatggatgtggtaacaagttaaaggatatattgtgtatagtatgagctttcaagttgtgaacttgtaacttcctttacttgaaactctctgcctgtgtgtattagccaacatgtcattag

SEQ ID NO: 25231 - DNA, 1576 bp, Zea Mays
tcgaggtcaataacaaatgccaggaaacaaaactttcccgccgccggccggcgtcaccatgaaacaaccccatcaaggtgggaggaccgtaccggaaaatatcgggagcaaaaaatcagaccagattttcccccgtgaggcatgaatccagtgttccaagctcccagcggaacaaacaaggaccaatccgtccagggatcggtggagcccgatccgttcgattcgtcgaccaagggagcggcgaagccgcagtcttcatcgtcgtcgctgatcttccttggtacggggtgctccggctcgttgcccgacacacggtgcctcctcaagccgtcgacgccgccctgcggcgtctgttcgatgggcgtctccctccctccggagcggaaccccaactacaggctgaacacctccctcttgatagattattgccatgacgaaacccacaagtacatcctaattgacattggcaagaccttcagagaacaagtcctccggtggtttgtccaccacaaagttccttccgttaattcaatcatcctgactcatgagcacgcggatgctgtcttaggccttgatgaagtctgggtggtacaaccaagaaatggcagaaatgacattgaacaaattcctatttttctcacacaattcaccatggacagtatcgcaagaagatttccctacttgatggagcagaagccagaggatggtgatgaagatgcccaagccgcgaaaattgactggaagataattgaggatgatgtcgacaaaccatttgtagcatcagggctagagtttgtgccgttgccggtaatgcacggagaggggtatatttgtttaggctttttatttgggaggagagccagagttgcatatttatctgatgtttcgagatttctacctaaaactgagaacgttatttcaaagtctggtgctggacaacttgaccttcttatattagaagcaaacgctttgcatggagtgggagattcttccagcacccatttaactctgagtgaagtcttgatgctatcaagaggatccgtcctaaacaagctcttttgattggaatgaggcatttttttgagcatgaaagagaaaaccagatgttggccgaatggtcaatcagagaaggaatatctacacaactggctcatgacggcctgcgtgtattcattgatttgtaataaggtatacaaggtcgctttgcagtattcgaggactactgtattcattgatttgcagcatgccagcatccatatgcccatatctctgttgctgattgtacgaagatctgccagaccagtagtctagcaattattttgtgattttttatgtatccaaaagattgtaagtttggtcatgttgatatttttatacactgcagtatattgtattgttctcgtagattttaattggataacagaatgatgtcctaagccaacagaaaataaaagattatggatgtggtaacaagttaaaggatatattgtgtatagtatgagctttcaagttgtgaacttgtaacttcctttacttgaaactctctgcctgtgtgtattagccaacatgtcattag

SEQ ID NO: 25232 - DNA, 987 bp, Zea Mays
cgccgccggccggcgtcaccatgaaacaaccccatcaaggtgggaggaccgtaccggaaaatatcgggagcaaaaaatcagaccagattttcccccgtgaggcatgaatccagtgttccaagctcccagcggaacaaacaaggaccaatccgtccagggatcggtggagcccgatccgttcgattcgtcgaccaagggagcggcgaagccgcagtcttcatcgtcgtcgctgatcttccttggtacggggtgctccggctcgttgcccgacacacggtgcctcctcaagccgtcgacgccgccctgcggcgtctgttcgatgggcgtctccctccctccggagcggaaccccaactacaggctgaacacctccctcttgatagattattgccatgacgaaacccacaagtacatcctaattgacattggcaagaccttcagagaacaagtcctccggtggtttgtccaccacaaagttccttccgttaattcaatcatcctgactcatgagcacgcggatgctgtcttaggccttgatgaagtctgggtggtacaaccaagaaatggcagaaatgacattgaacaaattcctatttttctcacacaattcaccatggacagtatcgcaagaagatttccctacttgatggagcagaagccagaggatggtgatgaagatgcccaagccgcgaaaattgactggaagataattgaggatgatgtcgacaaaccatttgtagcatcagggctagagtttgtgccgttgccggtaatgcacggagaggggtatatttgtttaggctttttatttgggaggagagccagagttgcatatttatctgatgtttcgagatttctacctaaaactgagaacgttatttcaaagtctggtgctggacaacttgaccttcttatattagaagcaaacgctttgcatggagtggtccaaatgctgtcaaatatattgatggcctgactggaattcat

SEQ ID NO: 25233 - DNA, 1588 bp, Zea Mays
gtctcagaagatgaaacaaaggagcggttgcaggaagacgggcggtggcgtcgatcgagtgggcgcgcggtgaccgacatgcttcctatatatgcatgcgtgctcgttggtggagtccaagcgcaagttaacaccacaccaccatccccgcttggatcacctggagcttccgggccactcacccacccatcctgcacaggctgacccatctatctttccgaaagggtggtgtagcggcgagctcggagaggtctggtcagggatcgagtgcgagcgaggccgatctgtctgcagtgcacgcagcagcaaaccaaagagctcagagttttcgttgtttgtttcggatgacgacctgtcgcaccgcgaacgcagccgccgtcgtccgtctcctgctgctgtgctctttctgcgccgccgccgccattgcctgcgaccctcctaatggcgccaagttcgggtacaccggctccgtcggtcccgaccactggggcgcactgagccccagcttcaggcagtgcgcgacagggacgaagcagtccccgatcgacatctccacggcccaggcggtctccaacccggcgctgcagccgctccacagggactacaccgtggccaacgccaccctcgtcgacaacgtcgtcaacgtcgcgctgcgcttcgacggcgacggcggcgccgggagcgtgagcgtcggcgggaagctgtacacgctgaagcaggtgcactggcactcgccttccgagcacaccgtcgacggccgccggttccccgtcgagctccacatggtccacgccagcgacgacggcaacgtcaccgtggtggccatgctctaccggtttggcaggccggatcctttgctctggcagatccaggacaagctggccgcgctgcacgcggagggctgcagagcggacaagggcgctccggtcgccgccggagacgtcagcctgtggtcgctcaggctctactcccacacgtactaccgctacgtcgggtcgttcaccacgccgccctgcaccgagaacgtcatctggagcgtcctggcccaggtgagggagatgacggtggaccaggccgccgccctgatggcgcccctggagcaagcttacaggcgcaacaacaggccgacgcagccgaggaacggccgcgtcgtccaggtctaccgcaacgggttcatcaacaagaagacggcgccgtagccgtgccatgcgctgccccgtatgcgtggcctggtccttggtggcgacgccaagtcctctgggttacttgtcagttgtttctcgtcgaagtctttgtgttcttctgcacttgttctgccgccggttttggtgctctcgggactgaatgttcgtcagtgggtctgtgggtttagctaggttaggagatttaagctgtttagtttctgcaaaatctatcctccttatctgttagtaatgattagcatgttgttggtcgacgcatgatcttcattgcagcgaataacgtaacagatagacgcaatcatctaagagcatcctctaaattattatttacagagtcatttgcataaaatcattttatatattttttcaatctccaacatcttttc

SEQ ID NO: 25234 - DNA, 1679 bp, Zea Mays
gtctcagaagatgaaacaaaggagcggttgcaggaagacgggcggtggcgtcgatcgagtgggcgcgcggtgaccgacatgcttcctatatatgcatgcgtgctcgttggtggagtccaagcgcaagttaacaccacaccaccatccccgcttggatcacctggagcttccgggccactcacccacccatcctgcacaggctgacccatctatctttccgaaagggtggtgtagcggcgagctcggagaggtctggtcagggatcgagtgcgagcgaggccgatctgtctgcagtgcacgcagcagcaaaccaaagccgccgtcgtccgtctcctgctgctgtgctctttctgcgccgccgccgccattgcctgcgaccctcctaatggcgccaagttcgggtacaccggctccgtcggtcccgaccactggggcgcactgagccccagcttcaggcagtgcgcgacagggacgaagcagtccccgatcgacatctccacggcccaggcggtctccaacccggcgctgcagccgctccacagggactacaccgtggccaacgccaccctcgtcgacaacgtcgtcaacgtcgcggtctgtcgttgcctgtttttgtttgtttgttttttttttttcaaacacaatgctgcgccgcggatcgaattgtattattgtacgactgccgggcccgtcgatcgatgtgtctccaataatttctccgccggtgcatgatgcacgcagctgcgcttcgacggcgacggcggcgccgggagcgtgagcgtcggcgggaagctgtacacgctgaagcaggtgcactggcactcgccttccgagcacaccgtcgacggccgccggttccccgtcgagctccacatggtccacgccagcgacgacggcaacgtcaccgtggtggccatgctctaccggtttggcaggccggatcctttgctctggcagatccaggacaagctggccgcgctgcacgcggagggctgcagagcggacaagggcgctccggtcgccgccggagacgtcagcctgtggtcgctcaggctctactcccacacgtactaccgctacgtcgggtcgttcaccacgccgccctgcaccgagaacgtcatctggagcgtcctggcccaggtgagggagatgacggtggaccaggccgccgccctgatggcgcccctggagcaagcttacaggcgcaacaacaggccgacgcagccgaggaacggccgcgtcgtccaggtctaccgcaacgggttcatcaacaagaagacggcgccgtagccgtgccatgcgctgccccgtatgcgtggcctggtccttggtggcgacgccaagtcctctgggttacttgtcagttgtttctcgtcgaagtctttgtgttcttctgcacttgttctgccgccggttttggtgctctcgggactgaatgttcgtcagtgggtctgtgggtttagctaggttaggagatttaagctgtttagtttctgcaaaatctatcctccttatctgttagtaatgattagcatgttgttggtcgacgcatgatcttcattgcagcgaataacgtaacagatagacgcaatcatctaagagcatcctctaaattattatttacagagtcatttgcataaaatcattttatatattttttcaatctccaacatcttttc

SEQ ID NO: 25235 - DNA, 1700 bp, Zea Mays
cgcaaccctcattggatcctctgcatgcatatattatggcggagcggcgtggaagagagcagaaggcctgtcgatgggcatcaactacgggcagatcgcggacaacctgccgtcgccggcgagggtgtcgtacctggtccggtcgatgcaggtgagcaaggtgaagctgtacgacgcggacccgtacgtgctgagcgcgttcgtcgacacggatgtggagttcgtggtgggcatcggcaacgagaacgtgtcggcgatggtggagccggcggcggcgcgggcgtgggtggagcggcacgtgcagccgtacctcccgggcacgcgcatcacctgcatcaccgtcggcaacgaggtgctcaagggcaacgacagcgcgctcaaggcgagcctcctgccggccatgcagtccgtgtaccaggcgctgaccgcggtgggcctgcagggccgggtgaacgtcaccacggcgcactcgctggacatcatgggcagcacctacccgccctccgccggcgcgttcggccccgacgccgtgccctacctccagccgctcctggccttcctgtccgcggcgcggtccccgttcctcatcaactgctacccctacttcgcgtacaaggccgacccgggcaacgtgccgctggagtacgtcctgttccagcccgacgccgccggggtcaccgacgccagcacggggctcaggtacgacaacatgctgtacgcccaggtcgactcggtgtacgccgccatccagaagctgggccacaccgacgtcgacgtcaaggtctccgagaccgggtggccgtccaggggggaccccgacgaggccggcgccacgccggagtacgccaggacgtacatcggcaacctgctgcagaggatcgagatggggcagggcacgccgatgaggccgtcggcgcccgtcgacgtctacgtgttcgcgctcttcaacgagaacctcaagcccggcccggcctccgaacggaactacggcttgctctaccccgacggcacgcccgtgtacgatgtcggcctgcggggataccttccacccatggactattcacaaggcaccagagagggggtccgtttcttcgtcttcatcagcctcgttgccattgtatcgatcactctcagcttatcctgagagcatgagcattgccgtaaagttgatgaagaaagcgcggagactgaggacttcttgctgctaggatagcagatcgattacaagccctcggagaagcaactaaagtcggcatgttccatcaggcaagctttagaagcagaaatttgtctctgacttactacacggccagccaaaacggtcgaagtggtttttgatgacatccagcagccaaaactggctccgcgctgacagtaaagtagaactgactgaagattgcgggcgacacgcgcccaatgcacgcatagtccatttaatttgttctggagatgtcttctttatccaactcagcaactgtatatttgtatatcggccaaaaagaaaggaaataaattcaggtcaaggctggccatttatactagttttttttttaaatctgtgagctctgattgttttgtgtttctttttttaaagtaaagtgcatttccggtccttaatttatgtaggtgtgttaacctgtccataaatttttaaagtgttctaaacaaccttatgcatacaaactattcgagagtgggct

SEQ ID NO: 25236 - DNA, 2744 bp, Zea Mays
ctttacttacgattcctccaccacccccatcgccggtgtgtgttgtcccctacgaaatctaaggtcttaaccgagggatcgaagtatcttacaattggttcgagaagtttgaatatgcttctatagaatttgaagaggattaaaggggggggggcattgccccctttcttcctcgagtgtttgttatcttacttactccattagtccattgcattgtcaacctagtgctagtgtatattattatgtcaataatcttgaggtcttgtttggataatatcgtgttcaccaaaattcagagtacggtgagcgtggagccagttttgactgctacagatctaatccatagagacaaaatcactgtaaaaacaataaaaccaagcaaacatgctataatcagtttaagttacacttcaatccacctagtaaacaaacaaggcctgaaatgtttagtttaatgatgatattttctctgatttatttttttattctatttaaatgtatatgtaagtaagtattttggtatttcacaagtatcggtctgttcctatacttggcctcaaccgggccggggaatagttaatgacgcaggaagcaaatatacttctttttgttagtgttgcagtactacggcattgcgaaaatggtggttaattaataggcgtacttgctgagattatcttatctgagctcaactgacatctggtgagatcacatggtccccaagtgcttctaatcggagttcctttggattcctcaaaacaaaaacaaaaaaaaaagaaaagaaaatcggatctccttttttcacgttgtttattacctaaagaaatggaccagtttgctgtcttttcggcccagtttgacgtgcgtctgatctggctctacgctgtcatggcttttggcttaaagtttttgtctggaaggatggtttgcttcgtacgtgttcgtccgtcccctagtggccagcgaaatgtgacgggcttttcgatcacctgtggccattcgagacgagtacggatattaaaaataattaaggaggtgtttgacgagacgttgatggtattttatcgcgctgattctcgatggcggagcggcgtggaagagagcagaaggcctgtcgatgggcatcaactacgggcagatcgcggacaacctgccgtcgccggcgagggtgtcgtacctggtccggtcgatgcaggtgagcaaggtgaagctgtacgacgcggacccgtacgtgctgagcgcgttcgtcgacacggatgtggagttcgtggtgggcatcggcaacgagaacgtgtcggcgatggtggagccggcggcggcgcgggcgtgggtggagcggcacgtgcagccgtacctcccgggcacgcgcatcacctgcatcaccgtcggcaacgaggtgctcaagggcaacgacagcgcgctcaaggcgagcctcctgccggccatgcagtccgtgtaccaggcgctgaccgcggtgggcctgcagggccgggtgaacgtcaccacggcgcactcgctggacatcatgggcagcacctacccgccctccgccggcgcgttcggccccgacgccgtgccctacctccagccgctcctggccttcctgtccgcggcgcggtccccgttcctcatcaactgctacccctacttcgcgtacaaggccgacccgggcaacgtgccgctggagtacgtcctgttccagcccgacgccgccggggtcaccgacgccagcacggggctcaggtacgacaacatgctgtacgcccaggtcgactcggtgtacgccgccatccagaagctgggccacaccgacgtcgacgtcaaggtctccgagaccgggtggccgtccaggggggaccccgacgaggccggcgccacgccggagtacgccaggacgtacatcggcaacctgctgcagaggatcgagatggggcagggcacgccgatgaggccgtcggcgcccgtcgacgtctacgtgttcgcgctcttcaacgagaacctcaagcccggcccggcctccgaacggaactacggcttgctctaccccgacggcacgcccgtgtacgatgtcggcctgcggggataccttccacccatggactattcacaaggcaccagagagggggtccgtttcttcgtcttcatcagcctcgttgccattgtatcgatcactctcagcttatcctgagagcatgagcattgccgtaaagttgatgaagaaagcgcggagactgaggacttcttgctgctaggatagcagatcgattacaagccctcggagaagcaactaaagtcggcatgttccatcaggcaagctttagaagcagaaatttgtctctgacttactacacggccagccaaaacggtcgaagtggtttttgatgacatccagcagccaaaactggctccgcgctgacagtaaagtagaactgactgaagattgcgggcgacacgcgcccaatgcacgcatagtccatttaatttgttctggagatgtcttctttatccaactcagcaactgtatatttgtatatcggccaaaaagaaaggaaataaattcaggtcaaggctggccatttatactagttttttttttaaatctgtgagctctgattgttttgtgtttctttttttaaagtaaagtgcatttccggtccttaatttatgtaggtgtgttaacctgtccataaatttttaaagtgttctaaacaaccttatgcatacaaactattcgagagtgggct

SEQ ID NO: 25237 - DNA, 1768 bp, Zea Mays
cttgcatccctacccgtgatgtatcgatcacgagttgatattttctcacttctagaggactcgctgaagcgggagtctggcgcgaaggttcacaaagccaacatccaggcggccaaggctgttgctgacatcattcgcactacattgggtcccagatccatgctgaaaatgcttctggacgctggacgctgatggccttttatttaataaatttgtaaattatatccaaccagttcatcagatcgtggccttttatttagatctaagaacaccaacacgcttaggcatttagttggatataattcatatgttgtacccaagaaagcagcacttaccgatgaactatatcttatcagtcgtgtaaacggaatgaaatataacaaaattgtttttattatctgcacattcccattatattttgtagcatataaccacaaggtcacaaccaatttgtatgatttaattggcgtatgaatccgagatgagtgtttcatatgattttttttacagactatgtacacaagcatttcatgaagaaattatttacttgactcgataagttccaggttcctgcttttgacatttattttcttggtcatcaacatgcgaagctttacatgtcttcatgtcagtggtcatcaaattttctccagtactgccttgagtagctgcagtggtgaccacacaagtgaacgagatgcaaagaaggcaggtaagctactgcaaatttatacaataatttattgtcaagaaacggacgctagattactgtgccggatagatcttagcaggtaaacagtaggagaactgatgtaaatgagaagacaaagttcttcacgtgaggtaaaatgttgtccagttttttttcttaaaatgaaatatctatgtctttgctgatttatttgtccagttttttgttcttcaggtgagaagacaaagttcttcagataaacagtaggagtataaccagggagtgtggattttcttaatctaaatggaaaagaggggatatggtactttagaatttggttttcggtgaaactataaattccattggcatgcttgatttaatgttcacttaaattgcctagatccttatccacttgtcctcatggaagcctctcaaccctcaaatgtttgtctttgctgatttatttgtttaggcagccctcatttagctgcaccttttcctattaaggaaaaaaagaagctttgcgttcaatttctcctagaatctttctgtgataccagctgatttttttattctcttatttggaacgttatgacaacaagaagccactagaaagaataaaggaacagaatgcagtgacaccaccgctccatcattgttcttcaaactattcagcaactaaactgttcaaacatgttactgaagattggcagctgaaacaaatgatcaccggctgaacatggtaggcgtgaaaaataagatcaccgactgaacagtttatgatcaccagctgaaacacaagatctgggaggcgttgaacatggtagctgaactcttcaaacatgttaggcaacagcaggcaacaacagtgaaacacaatcaccgactgaaaagctgtccggcacctgaactgatcaaatttggttgcctggtggagggaggtctaacggctgacgctgctattcaattattttttactttagtttgtatcctccttacagatgttggatgaaagcaaaccttcattttttttgtttagcaggcctactaaaacaagcttagtgaacctgggtgaac

SEQ ID NO: 25238 - DNA, 1431 bp, Zea Mays
ctgctttagttttttctccccgctgcacgttaacattctctctcttataccctcgaaagctcgaaagatcccgcggcgcagcagccacccttctctcctctccgctcccaatctttgtcgtcgcctccctcgaagtcgccgctgccttcattccaccatggcgcttcacgccccggtcctcgtgatgaaggactcgctgaagcgggagtctggcgcgaaggttcacaaagccaacatccaggcggccaaggctgttgctgacatcattcgcactacattgggtcccagatccatgctgaaaatgcttctggacgctggacgctgatggccttttatttaataaatttgtaaattatatccaaccagttcatcagatcgtggccttttatttagatctaagaacaccaacacgcttaggcatttagttggatataattcatatgttgtacccaagaaagcagcacttaccgatgaactatatcttatcagtcgtgtaaacggaatgaaatataacaaaattgtttttattatctgcacattcccattatattttgtagcatataaccacaaggtcacaaccaatttgtatgatttaattggcgtatgaatccgagatgagtgtttcatatgattttttttacagactatgtacacaagcatttcatgaagaaattatttacttgactcgataagttccaggttcctgcttttgacatttattttcttggtcatcaacatgcgaagctttacatgtcttcatgtcagtggtcatcaaattttctccagtactgccttgagtagctgcagtggtgaccacacaagtgaacgagatgcaaagaaggcagatcttagcaggtaaacagtaggagaactgatgtaaatgagaagacaaagttcttcacgtgagttttttgttcttcaggtgagaagacaaagttcttcagataaacagtaggagtataaccagggagtgtggattttcttaatctaaatggaaaagaggggatatgtgttcttcaaactattcagcaactaaactgttcaaacatgttactgaagattggcagctgaaacaaatgatcaccggctgaacatggtaggcgtgaaaaataagatcaccgactgaacagtttatgatcaccagctgaaacacaagatctgggaggcgttgaacatggtagctgaactcttcaaacatgttaggcaacagcaggcaacaacagtgaaacacaatcaccgactgaaaagctgtccggcacctgaactgatcaaatttggttgcctggtggagggaggtctaacggctgacgctgctattcaattattttttactttagtttgtatcctccttacagatgttggatgaaagcaaaccttcattttttttgtttagcaggcctactaaaacaagcttagtgaacctgggtgaac

SEQ ID NO: 25239 - DNA, 1746 bp, Zea Mays
ctgctttagttttttctccccgctgcacgttaacattctctctcttataccctcgaaagctcgaaagatcccgcggcgcagcagccacccttctctcctctccgctcccaatctttgtcgtcgcctccctcgaagtcgccgctgccttcattccaccatggcgcttcacgccccggtcctcgtgatgaaggactcgctgaagcgggagtctggcgcgaaggttcacaaagccaacatccaggcggccaaggctgttgctgacatcattcgcactacattgggtcccagatccatgctgaaaatgcttctggacgctggacgctgatggccttttatttaataaatttgtaaattatatccaaccagttcatcagatcgtggccttttatttagatctaagaacaccaacacgcttaggcatttagttggatataattcatatgttgtacccaagaaagcagcacttaccgatgaactatatcttatcagtcgtgtaaacggaatgaaatataacaaaattgtttttattatctgcacattcccattatattttgtagcatataaccacaaggtcacaaccaatttgtatgatttaattggcgtatgaatccgagatgagtgtttcatatgattttttttacagactatgtacacaagcatttcatgaagaaattatttacttgactcgataagttccaggttcctgcttttgacatttattttcttggtcatcaacatgcgaagctttacatgtcttcatgtcagtggtcatcaaattttctccagtactgccttgagtagctgcagtggtgaccacacaagtgaacgagatgcaaagaagatcttagcaggtaaacagtaggagaactgatgtaaatgagaagacaaagttcttcacgtgaggtgagaagacaaagttcttcagataaacagtaggagtataaccagggagtgtggattttcttaatctaaatggaaaagaggggatatggtactttagaatttggttttcggtgaaactataaattccattggcatgcttgatttaatgttcacttaaattgcctagatccttatccacttgtcctcatggaagcctctcaaccctcaaatgtttgtctttgctgatttatttgtttaggcagccctcatttagctgcaccttttcctattaaggaaaaaaagaagctttgcgttcaatttctcctagaatctttctgtgataccagctgatttttttattctcttatttggaacgttatgacaacaagaagccactagaaagaataaaggaacagaatgcagtgacaccaccgctccatcattgttcttcaaactattcagcaactaaactgttcaaacatgttactgaagattggcagctgaaacaaatgatcaccggctgaacatggtaggcgtgaaaaataagatcaccgactgaacagtttatgatcaccagctgaaacacaagatctgggaggcgttgaacatggtagctgaactcttcaaacatgttaggcaacagcaggcaacaacagtgaaacacaatcaccgactgaaaagctgtccggcacctgaactgatcaaatttggttgcctggtggagggaggtctaacggctgacgctgctattcaattattttttactttagtttgtatcctccttacagatgttggatgaaagcaaaccttcattttttttgtttagcaggcctactaaaacaagcttagtgaacctgggtgaac

SEQ ID NO: 25240 - DNA, 3382 bp, Zea Mays
atgacatgccgggaagtggcagcctcgctgcaccgatcgcttgccaagtttatcgtgcctgacaacccagagaaaatcctgtcgcttgtcgctgccaaggcaagccatcatagagctcttggctctgcggacctcacatgtgccctgcaggcatgcagggggcgaggcaaccgatggccgcttgtgctggagatccacgcgacatcagtcgtgcgtgggcttggggctgaccgccttataggcaacttgctgatcgatctgtatgcaaagaatgggctcgtgtggcaggcacggcaggtattcaaggagctttcttccagggaccatgtctcatgggttgccatgctgtcagggtatgcacagagtggtcttggaaaggaagctttcaggctttacagccagatgcattggactgctgttattcctacgccatatgttctgtctagtgtgctgagtgcttgcactaaaggaaaactttttgctcaaggtcggatgatccatgcccaagtttacaagcaagcattctgttcggagacctttgtgggcaatgcacttattgcactttacttaggatttggatcctttaagctagcagaaagggtattttgtgacatgctgttctgtgatcgagtgacattcaatacattgatctcaggacatgctcaatgtggacatgtctgcttgcagcctgtgcttctgtgggagatcttcaaaaggggaagcaactccattcatatttactaaaagcaggacaaacgtggtactgtggaatttaatgcttgtggcatatgggcagattagtgatctagcaaaatcttttgaaatctttggtcagatgcaagctacaggtatacaccccaaccaattcacctacccgtgcattttgaggacttgcacttgcactgggcaaattgaacttggagagcagattcattcattaagcataaaaaatggattcgaatctgatatgtatgttagtggtgtcttgatagatatgtattctaaatacggatgtcttgataaagctcgaaaaattctggaaatgcttgaaaaaagagatgtggtttcttggacctcaatgattgctggatatgtgcagcatgacttttgtgaagaggctcttgcaacattcaaagaaatgcaggactgtggagtttggccagataacataggactggctagtgctgcaagtgcttgtgctgggatcaaagcaatgcgccagggcctgcagattcatgctcgggtttatgtctctggttatgcagctgatatttcaatttggaacacgttggtaaacctgtatgcaagatgtggaagaagtgaagaagctttctctttgtttcgggaaattgaacacaaggatgagatcacatggaatggattgatatcaggttttggacaaagtcgtctttataaacaagctctcatggtattcatgaagatgggtcaagcaggtgccaagtacaatgtgttcacatttatttccgctattagcgctttagctaaccttgcagatataaaacaaggaaaacaagtacatggtagagctgttaagacagggcacacctctgaaactgaagttgccaatgctttgatttcactatatggaaagtgtggcagtattgaagatgccaagatgatcttttctgaaatgtcactgaggaatgaggtttcatggaatactatcataacaagttgttcacagcatggacgtggactagaagctttggatttatttgatcagatgaagcaagaaggtctgaaaccaaatgatgtcaccttcataggtgttttagctgcttgcagtcatgtgggtttggttgaggaaggccttagttacttcaaatccatgtctaatgtgtatggacttaatccaatacctgaccattatgcctgtgttgtggatattcttggacgagcaggccaacttgaccgtgcaaggagatttgttgatgaaatgcctatcactgctaatgcaatgatttggcgaacacttctcagtgcgtgtaaagtacacaagaacatcgaaattggggagcttgcagccaaacatctcctggagttagagccccatgattcggcatcatatgtcctcctatcaaatgcatatgctgttactgggaagtgggccaacagggatcaggtcagaaagatgatgaaagacagaggaattagaaaagaaccaggtcgaagctggattgaagtaaagaatgcagtccatgcattctttgttggtgatcggttgcaccccttgtccgatcagatatacaagtttttgtctgagctaaatgataggttatccaaaataggatacaagcaagagaaccctaatttgtttcatgaaaaagagcaagagcagaaagaccctactgcttttgtccatagtgagaagttagctgttgcttttgggttaatgactttgcctccttgtattcctcttcgagtgattaagaaccttcgtgtatgtgatgactgccacagttggatgaaatgtacctctgaagtcacaagaagagaaattgtattacgagatgtgtacagatttcaccattttaacagtggcagctgttcatgtggagattactggtgaattgggctgttgcaaagtgtttacagcacttttttttatagaaaaatccccccagtgctattcctaatggttttcattttaagatgtctggggtctacacttatatctgctattgtgacatgtatgtatctggaaatggattcgccatgcgaaatctagcatgtctagataaacatgtacagggctttggaaattggaagagccattcatacctgtcgcatgaagttgaggcaccattcattcagagtcaactagtcaagtgtctaaggttcactgcgttaaatgagaccatctgtaatcatgacatggattaagatatttgtcagactgcagaaatgcagatcaatatgctgtttactgactcaatcaggatcccttaaagtggtaacatttacgacttctgatgtctgtgccttcatgttcagaagttcttgtgtttatttcagattgaagagagtgcagaaacagatctcggtggtgatcttcttgaactgaagagggaaatctgggtgtgctctgctttgatcaattggttgcagaatgtcatatatggatattatgccttgctgcagtttgctctcttcctgtaatttggtgttttgatgatgataagagtttttatggccattatcttgtgaaaaaataacatttggaagttaatacaaatgtactaggttctgtagctcttctcagttctcatgctggatatcgatccattatttatgtggcacctggaatgctaatcttttcagcttcactgagagatctgatatataacgtccataagacagc

SEQ ID NO: 25241 - DNA, 3434 bp, Zea Mays
atgatgagctcgaccttgccgtcgccgagttgttcaacggaatgacatgccgggaagtggcagcctcgctgcaccgatcgcttgccaagtttatcgtgcctgacaacccagagaaaatcctgtcgcttgtcgctgccaaggcaagccatcatagagctcttggctctgcggacctcacatgtgccctgcaggcatgcagggggcgaggcaaccgatggccgcttgtgctggagatccacgcgacatcagtcgtgcgtgggcttggggctgaccgccttataggcaacttgctgatcgatctgtatgcaaagaatgggctcgtgtggcaggcacggcaggtattcaaggagctttcttccagggaccatgtctcatgggttgccatgctgtcagggtatgcacagagtggtcttggaaaggaagctttcaggctttacagccagatgcattggactgctgttattcctacgccatatgttctgtctagtgtgctgagtgcttgcactaaaggaaaactttttgctcaaggtcggatgatccatgcccaagtttacaagcaagcattctgttcggagacctttgtgggcaatgcacttattgcactttacttaggatttggatcctttaagctagcagaaagggtattttgtgacatgctgttctgtgatcgagtgacattcaatacattgatctcaggacatgctcaatgtggacatgcctgtgcttctgtgggagatcttcaaaaggggaagcaactccattcatatttactaaaagcagcacatgatatcttcaatctgggtgataggacaaacgtggtactgtggaatttaatgcttgtggcatatgggcagattagtgatctagcaaaatcttttgaaatctttggtcagatgcaagctacaggtatacaccccaaccaattcacctacccgtgcattttgaggacttgcacttgcactgggcaaattgaacttggagagcagattcattcattaagcataaaaaatggattcgaatctgatatgtatgttagtggtgtcttgatagatatgtattctaaatacggatgtcttgataaagctcgaaaaattctggaaatgcttgaaaaaagagatgtggtttcttggacctcaatgattgctggatatgtgcagcatgacttttgtgaagaggctcttgcaacattcaaagaaatgcaggactgtggagtttggccagataacataggactggctagtgctgcaagtgcttgtgctgggatcaaagcaatgcgccagggcctgcagattcatgctcgggtttatgtctctggttatgcagctgatatttcaatttggaacacgttggtaaacctgtatgcaagatgtggaagaagtgaagaagctttctctttgtttcgggaaattgaacacaaggatgagatcacatggaatggattgatatcaggttttggacaaagtcgtctttataaacaagctctcatggtattcatgaagatgggtcaagcaggtgccaagtacaatgtgttcacatttatttccgctattagcgctttagctaaccttgcagatataaaacaaggaaaacaagtacatggtagagctgttaagacagggcacacctctgaaactgaagttgccaatgctttgatttcactatatggaaagtgtggcagtattgaagatgccaagatgatcttttctgaaatgtcactgaggaatgaggtttcatggaatactatcataacaagttgttcacagcatggacgtggactagaagctttggatttatttgatcagatgaagcaagaaggtctgaaaccaaatgatgtcaccttcataggtgttttagctgcttgcagtcatgtgggtttggttgaggaaggccttagttacttcaaatccatgtctaatgtgtatggacttaatccaatacctgaccattatgcctgtgttgtggatattcttggacgagcaggccaacttgaccgtgcaaggagatttgttgatgaaatgcctatcactgctaatgcaatgatttggcgaacacttctcagtgcgtgtaaagtacacaagaacatcgaaattggggagcttgcagccaaacatctcctggagttagagccccatgattcggcatcatatgtcctcctatcaaatgcatatgctgttactgggaagtgggccaacagggatcaggtcagaaagatgatgaaagacagaggaattagaaaagaaccaggtcgaagctggattgaagtaaagaatgcagtccatgcattctttgttggtgatcggttgcaccccttgtccgatcagatatacaagtttttgtctgagctaaatgataggttatccaaaataggatacaagcaagagaaccctaatttgtttcatgaaaaagagcaagagcagaaagaccctactgcttttgtccatagtgagaagttagctgttgcttttgggttaatgactttgcctccttgtattcctcttcgagtgattaagaaccttcgtgtatgtgatgactgccacagttggatgaaatgtacctctgaagtcacaagaagagaaattgtattacgagatgtgtacagatttcaccattttaacagtggcagctgttcatgtggagattactggtgaattgggctgttgcaaagtgtttacagcacttttttttatagaaaaatccccccagtgctattcctaatggttttcattttaagatgtctggggtctacacttatatctgctattgtgacatgtatgtatctggaaatggattcgccatgcgaaatctagcatgtctagataaacatgtacagggctttggaaattggaagagccattcatacctgtcgcatgaagcaccattcattcagagtcaactagtcaagtgtctaaggttcactgcgttaaatgagaccatctgtaatcatgacatggattaagatatttgtcagactgcagaaatgcagatcaatatgctgtttactgactcaatcaggatcccttaaagtggtaacatttacgacttctgatgtctgtgccttcatgttcagaagttcttgtgtttatttcagattgaagagagtgcagaaacagatctcggtggtgatcttcttgaactgaagagggaaatctgggtgtgctctgctttgatcaattggttgcagaatgtcatatatggatattatgccttgctgcagtttgctctcttcctgtaatttggtgttttgatgatgataagagtttttatggccattatcttgtgaaaaaataacatttggaagttaatacaaatgtactaggttctgtagctcttctcagttctcatgctggatatcgatccattatttatgtggcacctggaatgctaatcttttcagcttcactgagagatctgatatataacgtccataagacagc

SEQ ID NO: 25242 - DNA, 3290 bp, Zea Mays
tggttgactgctcactacttactgctggatgatgagctcgaccttgccgtcgccgagttgttcaacggaatgacatgccgggaagtggcagcctcgctgcaccgatcgcttgccaagtttatcgtgcctgacaacccagagaaaatcctgtcgcttgtcgctgccaaggcaagccatcatagagctcttggctctgcggacctcacatgtgccctgcaggcatgcagggggcgaggcaaccgatggccgcttgtgctggagatccacgcgacatcagtcgtgcgtgggcttggggctgaccgccttataggcaacttgctgatcgatctgtatgcaaagaatgggctcgtgtggcaggcacggcaggtattcaaggagctttcttccagggaccatgtctcatgggttgccatgctgtcagggtatgcacagagtggtcttggaaaggaagctttcaggctttacagccagatgcattggactgctgttattcctacgccatatgttctgtctagtgtgctgagtgcttgcactaaaggaaaactttttgctcaaggtcggatgatccatgcccaagtttacaagcaagcattctgttcggagacctttgtgggcaatgcacttattgcactttacttaggatttggatcctttaagctagcagaaagggtattttgtgacatgctgttctgtgatcgagtgacattcaatacattgatctcaggacatgctcaatgtggacatgcctgtgcttctgtgggagatcttcaaaaggggaagcaactccattcatatttactaaaagcaggacaaacgtggtactgtggaatttaatgcttgtggcatatgggcagattagtgatctagcaaaatcttttgaaatctttggtcagatgcaagctacagatatgtattctaaatacggatgtcttgataaagctcgaaaaattctggaaatgcttgaaaaaagagatgtggtttcttggacctcaatgattgctggatatgtgcagcatgacttttgtgaagaggctcttgcaacattcaaagaaatgcaggactgtggagtttggccagataacataggactggctagtgctgcaagtgcttgtgctgggatcaaagcaatgcgccagggcctgcagattcatgctcgggtttatgtctctggttatgcagctgatatttcaatttggaacacgttggtaaacctgtatgcaagatgtggaagaagtgaagaagctttctctttgtttcgggaaattgaacacaaggatgagatcacatggaatggattgatatcaggttttggacaaagtcgtctttataaacaagctctcatggtattcatgaagatgggtcaagcaggtgccaagtacaatgtgttcacatttatttccgctattagcgctttagctaaccttgcagatataaaacaaggaaaacaagtacatggtagagctgttaagacagggcacacctctgaaactgaagttgccaatgctttgatttcactatatggaaagtgtggcagtattgaagatgccaagatgatcttttctgaaatgtcactgaggaatgaggtttcatggaatactatcataacaagttgttcacagcatggacgtggactagaagctttggatttatttgatcagatgaagcaagaaggtctgaaaccaaatgatgtcaccttcataggtgttttagctgcttgcagtcatgtgggtttggttgaggaaggccttagttacttcaaatccatgtctaatgtgtatggacttaatccaatacctgaccattatgcctgtgttgtggatattcttggacgagcaggccaacttgaccgtgcaaggagatttgttgatgaaatgcctatcactgctaatgcaatgatttggcgaacacttctcagtgcgtgtaaagtacacaagaacatcgaaattggggagcttgcagccaaacatctcctggagttagagccccatgattcggcatcatatgtcctcctatcaaatgcatatgctgttactgggaagtgggccaacagggatcaggtcagaaagatgatgaaagacagaggaattagaaaagaaccaggtcgaagctggattgaagtaaagaatgcagtccatgcattctttgttggtgatcggttgcaccccttgtccgatcagatatacaagtttttgtctgagctaaatgataggttatccaaaataggatacaagcaagagaaccctaatttgtttcatgaaaaagagcaagagcagaaagaccctactgcttttgtccatagtgagaagttagctgttgcttttgggttaatgactttgcctccttgtattcctcttcgagtgattaagaaccttcgtgtatgtgatgactgccacagttggatgaaatgtacctctgaagtcacaagaagagaaattgtattacgagatgtgtacagatttcaccattttaacagtggcagctgttcatgtggagattactggtgaattgggctgttgcaaagtgtttacagcacttttttttatagaaaaatccccccagtgctattcctaatggttttcattttaagatgtctggggtctacacttatatctgctattgtgacatgtatgtatctggaaatggattcgccatgcgaaatctagcatgtctagataaacatgtacagggctttggaaattggaagagccattcatacctgtcgcatgaagcaccattcattcagagtcaactagtcaagtgtctaaggttcactgcgttaaatgagaccatctgtaatcatgacatggattaagatatttgtcagactgcagaaatgcagatcaatatgctgtttactgactcaatcaggatcccttaaagtggtaacatttacgacttctgatgtctgtgccttcatgttcagaagttcttgtgtttatttcagattgaagagagtgcagaaacagatctcggtggtgatcttcttgaactgaagagggaaatctgggtgtgctctgctttgatcaattggttgcagaatgtcatatatggatattatgccttgctgcagtttgctctcttcctgtaatttggtgttttgatgatgataagagtttttatggccattatcttgtgaaaaaataacatttggaagttaatacaaatgtactaggttctgtagctcttctcagttctcatgctggatatcgatccattatttatgtggcacctggaatgctaatcttttcagcttcactgagagatctgatatataacgtccataagacagc

SEQ ID NO: 25243 - DNA, 783 bp, Zea Mays
ctccatttctcgcaatttagggaacaagttctgtacagttgctacaggtctggaagtgtttgtctcggagcttctgctgaatggtattgtcttcttccacgaataagccatatgagtgtgatttggataggttgggttttggcaccatgcaacccaaacaaagcactccgggcttgatgaggacatggaagatgcaaatacagtacctcactagacactaggcaccattcattcagagtcaactagtcaagtgtctaaggttcactgcgttaaatgagaccatctgtaatcatgacatggattaagatatttgtcagactgcagaaatgcagatcaatatgctgtttactgactcaatcaggatcccttaaagtggtaacatttacgacttctgatgtctgtgccttcatgttcagaagttcttgtgtttatttcagattgaagagagtgcagaaacagatctcggtggtgatcttcttgaactgaagagggaaatctgggtgtgctctgctttgatcaattggttgcagaatgtcatatatggatattatgccttgctgcagtttgctctcttcctgtaatttggtgttttgatgatgataagagtttttatggccattatcttgtgaaaaaataacatttggaagttaatacaaatgtactaggttctgtagctcttctcagttctcatgctggatatcgatccattatttatgtggcacctggaatgctaatcttttcagcttcactgagagatctgatatataacgtccataagacagc

SEQ ID NO: 25244 - DNA, 3597 bp, Zea Mays
atcttcatcatctccacctctgaaaagatttctagcagtttgcttggccggggatttgcgagtcctgcacggcttgatgaggacatggaagatgcaaatacagtacctcactagacactaggatgatgagctcgaccttgccgtggccgagttgtgcaacggaatgacatgccgggaagtggcagcctcgctgcaccgatcgcttgccaagtttatcgtgcctgacaacccagagaaaatcctgtcgcttgtcgctgccaaggcaagccatcatagagctcttggctctgcggacctcacatgtgccctgcaggcatgcagggggcgaggcaaccgatggccgcttgtgctggagatccacgcgacatcagtcgtgcgtgggcttggggctgaccgccttataggcaacttgctgatcgatctgtatgcaaagaatgggctcgtgtggcaggcacggcaggtattcaaggagctttcttccagggaccatgtctcatgggttgccatgctgtcagggtatgcacagcgtggtcttggaaaggaagctttcaggctttacagccagatgcattggactgctgttattcctacgccatatgttctgtctagtgtgctgagtgcttgcactaaaggaaaactttttgctcaaggtcggatgatccatgcccaagtttacaagcaagcattctgttcggagacctttgtgggcaatgcacttattgcactttacttaggatttggatcctttaagctagcagaaagggtattttgtgacatgctgttctgtgatcgagtgacattcaatacattgatctcaggacatgctcaatgtggacatgcctgtgcttctgtgggagatcttcaaaaggggaagcaactccattcatatttactaaaagcaggacaaacgtggtactgtggaatttaatgcttgtggcatatgggcagattagtgatctagcaaaatcttttgaaatctttggtcagatgcaagctacaggtatacaccccaacaaattcacctacccgtgcattttgaggacttgcacttgcactgggcaaattgaacttggagagcagattcattcattaagcataaaaaatggattcgaatctgatatgtatgttagtggtgtcttgatagatatgtattctaaatacagatgtcttgataaagctcgaaaaattctggaaatgcttgaaaaaagagatgtggtttcttggacctcaatgattgctggatatgtgcagcatgacttttgtgaagaggctcttgcaacattcaaagaaatgcaggactgtggagtttggccagataacataggactggctagtgctgcaagtgcttgtgctgggatcaaagcaatgcgccagggcctgcagattcatgctcgggtttatgtctctggttatgcagctgatatttcaatttggaacacgttggtaaacctgtatgcaagatgtggaagaagtgaagaagctttctctttgtttcgggaaattgatcacaaggatgagatcacatggaatggattgatatcaggttttggacaaagtcgtctttatgaacaagctctcatggtattcatgaagatgagtcaagcaggtgccaagtacaatgtgttcacatttatttccgctattagcgctttagctaaccttgcagatataaaacaaggaaaacaagtacatggtagagctgttaagacagggcacacctctgaaactgaagttgccaatgctttgatttcactatatggaaagtgtggcagtattgaagatgccaagatgatcttttctgaaatgtcactgaggaatgaggtttcatggaatactatcataacaagttgttcacagcatggacgtggactagaagctttggatttatttgatcagatgaagcaagaaggtctgaaaccaaatgatgtcaccttcataggtgttttagctgcttgcagtcatgtgggtttggttgaggaaggccttagttacttcaaatccatgtctaatgtgtatggacttaatccaatacctgaccattatgcctgtgttgtggatattcttggacgagcaggccaacttgaccgtgcaaggagatttgttgatgaaatgcctatcactgctaatgcaatgatttggcgaacacttctcagtgcgtgtaaagtacacaagaacatcgaaattggggagcttgcagccaaacatctcctggagttagagccccatgattcagcatcatatgtcctcctatcaaatgcatatgctgttactgggaagtgggccaacagggatcaggtcagaaagatgatgaaagacagaggaattagaaaagaaccaggtcgaagctggattgaagtaaagaatgcagtccatgcattctttgttggtgatcggttgcaccccttgtccgatcagatatacaagtttttgtctgagctaaatgataggttatccaaaataggatacaagcaagagaaccctaatttgtttcatgaaaaagagcaagagcagaaagaccctactgcttttgtccatagtgagaagttagctgttgcttttgggttaatgactttgcctccttgtattcctcttcgagtgattaagaaccttcgtgtatgtgatgactgccacagttggatgaaatttacctctgaagtcacaagaagagaaattgtattacgagatgtgtacagatttcaccattttaacagtggcagctgttcatgtggagattactggtgaattgggctgttgcaaagtgtttacagcactttttttgatagaaaaatccccccaatgctattcctaatggttttcattttaagatgtctggggtctacacttatatctgctattgtgacatgtatgtatctggaaatggattcgccatggcaaatctagcatgtctagataaacatgtacagggctttggaaattggaagagtcattcatatctgtcgcatgaagttgaggatttttatctttgtggttgtcattattgtcgcaactcatttgtttaaccattataatttgttttgtcctgaatgtcactaactctttgttacctgcaacacttgcttgtttcaggcaccattcattcaaagtcaagtgtctaagattcaccgcgttaaatgagacatctgtaatcatgacatggattaagatatttgtcagactgcagaaatgcagatcaatatgctgtttactgactcgatcaggatcccttaaagtggtaacatttacgatttcttgtgcttatttcagattgaagagagtgcagaaacagatctcggtggtgatcttcttgaactgaagagcgaaatctgggtgtgctctgctttgatcaattggttgcagaatatgtcatatatggatattatggcatgctgcagtttgctctcttcctgtaatttggtgttttgatgatgataagagttttttatagccattatcttgtgaaaaaataacatttggaagttaatacaaatgtactaggttctgtagctcttctcagttctcatgctgaatgtcgatccattatttctatggcacctggaatgctaatcttttcagcttcactcagatctgatatataac

SEQ ID NO: 25245 - DNA, 3550 bp, Zea Mays
ctccaggctccatctgccccacgtcaaaccctagagtgagtagcgtcagtcccagctcaaggagccagccactagcgagctcgcccgcccgctcccgctccaggccagcggccagccggttccctcctctcgcgcccggctcccgcgcggccaccggccctggcgcccaggccagtcgctgcgcgccgcatagtaccagcacctgcgcgccgccaggccaggcccgcactccgcaggccgggctactccctcctaatttttttattgcttcctccatttctcgcaatttagggaacaagttctgtacaattgctacaggtctggaagtgtttgactcggagcttctgctgaatggcattgtcttcttccacgaataagccatatgagtgtgatttggataggtttggttttggcaccatgcaacccaaacaaagcactccgggcttgatgaggacatggaagatgcaaatacagtacctcactagacactaggatgatgagctcgaccttgccgtggccgagttgtgcaacggaatgacatgccgggaagtggcagcctcgctgcaccgatcgcttgccaagtttatcgtgcctgacaacccagagaaaatcctgtcgcttgtcgctgccaaggcaagccatcatagagctcttggctctgcggacctcacatgtgccctgcaggcatgcagggggcgaggcaaccgatggccgcttgtgctggagatccacgcgacatcagtcgtgcgtgggcttggggctgaccgccttataggcaacttgctgatcgatctgtatgcaaagaatgggctcgtgtggcaggcacggcaggtattcaaggagctttcttccagggaccatgtctcatgggttgccatgctgtcagggtcggatgatccatgcccaagtttacaagcaagcattctgttcggagacctttgtgggcaatgcacttattgcactttacttaggatttggatcctttaagctagcagaaagggtattttgtgacatgctgttctgtgatcgagtgacattcaatacattgatctcaggacatgctcaatgtggacatgcctgtgcttctgtgggagatcttcaaaaggggaagcaactccattcatatttactaaaagcaggacaaacgtggtactgtggaatttaatgcttgtggcatatgggcagattagtgatctagcaaaatcttttgaaatctttggtcagatgcaagctacagatgtcttgataaagctcgaaaaattctggaaatgcttgaaaaaagagatgtggtttcttggacctcaatgattgctggatatgtgcagcatgacttttgtgaagaggctcttgcaacattcaaagaaatgcaggactgtggagtttggccagataacataggactggctagtgctgcaagtgcttgtgctgggatcaaagcaatgcgccagggcctgcagattcatgctcgggtttatgtctctggttatgcagctgatatttcaatttggaacacgttggtaaacctgtatgcaagatgtggaagaagtgaagaagctttctctttgtttcgggaaattgatcacaaggatgagatcacatggaatggattgatatcaggttttggacaaagtcgtctttatgaacaagctctcatggtattcatgaagatgagtcaagcaggtgccaagtacaatgtgttcacatttatttccgctattagcgctttagctaaccttgcagatataaaacaaggaaaacaagtacatggtagagctgttaagacagggcacacctctgaaactgaagttgccaatgctttgatttcactatatggaaagtgtggcagtattgaagatgccaagatgatcttttctgaaatgtcactgaggaatgaggtttcatggaatactatcataacaagttgttcacagcatggacgtggactagaagctttggatttatttgatcagatgaagcaagaaggtctgaaaccaaatgatgtcaccttcataggtgttttagctgcttgcagtcatgtgggtttggttgaggaaggccttagttacttcaaatccatgtctaatgtgtatggacttaatccaatacctgaccattatgcctgtgttgtggatattcttggacgagcaggccaacttgaccgtgcaaggagatttgttgatgaaatgcctatcactgctaatgcaatgatttggcgaacacttctcagtgcgtgtaaagtacacaagaacatcgaaattggggagcttgcagccaaacatctcctggagttagagccccatgattcagcatcatatgtcctcctatcaaatgcatatgctgttactgggaagtgggccaacagggatcaggtcagaaagatgatgaaagacagaggaattagaaaagaaccaggtcgaagctggattgaagtaaagaatgcagtccatgcattctttgttggtgatcggttgcaccccttgtccgatcagatatacaagtttttgtctgagctaaatgataggttatccaaaataggatacaagcaagagaaccctaatttgtttcatgaaaaagagcaagagcagaaagaccctactgcttttgtccatagtgagaagttagctgttgcttttgggttaatgactttgcctccttgtattcctcttcgagtgattaagaaccttcgtgtatgtgatgactgccacagttggatgaaatttacctctgaagtcacaagaagagaaattgtattacgagatgtgtacagatttcaccattttaacagtggcagctgttcatgtggagattactggtgaattgggctgttgcaaagtgtttacagcactttttttgatagaaaaatccccccaatgctattcctaatggttttcattttaagatgtctggggtctacacttatatctgctattgtgacatgtatgtatctggaaatggattcgccatggcaaatctagcatgtctagataaacatgtacagggctttggaaattggaagagtcattcatatctgtcgcatgaagcaccattcattcaaagtcaagtgtctaagattcaccgcgttaaatgagacatctgtaatcatgacatggattaagatatttgtcagactgcagaaatgcagatcaatatgctgtttactgactcgatcaggatcccttaaagtggtaacatttacgatttcttgtgcttatttcagattgaagagagtgcagaaacagatctcggtggtgatcttcttgaactgaagagcgaaatctgggtgtgctctgctttgatcaattggttgcagaatatgtcatatatggatattatggcatgctgcagtttgctctcttcctgtaatttggtgttttgatgatgataagagttttttatagccattatcttgtgaaaaaataacatttggaagttaatacaaatgtactaggttctgtagctcttctcagttctcatgctgaatgtcgatccattatttctatggcacctggaatgctaatcttttcagcttcactcagatctgatatataac

SEQ ID NO: 25246 - DNA, 687 bp, Zea Mays
gtaggtttcgtgtttctgaatgcgtgtatcgaacaccccaagatggcaactttcgcctcaccactcctctgcaacttcatggccatagaacagaagaacgcgcctcagctgaccaacagcagaaagccgtccccgcgcctgagcttcccaacgacaaggagcatgccaacattgccgttgccgggcttcagagcgaggccagactggcgcgtcgccgccgtctacaaggtgaagctcattggccccgaaggacaggagagcgtgatccaagtgccagaggacagctacatcctggacgcggccgaggaggccggtatagacctgccctactcctgccgcgctggtgcgtgctccacgtgcgccggcaaggtactggagggctccgtcgaccaggcggaccagtcgttcctggacgacgcgcaggtcggtgccgggtatgcgctcacctgcgtcgcgtacccgacgtctgactgcgtcatccagacgcacagggaggccgacctgtactaggcagcccagtcccacgcgtaaccggatcaacgactgtgcacttccatagctcccattcggattcgatcttgagttcttgacactgattcgcacttgtgcttttgtccttgcaggtagctagaactagtagtacattctttaatcgttattgtttggttgctgtggtttgattcgtcc

SEQ ID NO: 25247 - DNA, 1375 bp, Zea Mays
gggttttcagatccagagcactaaaccaactactacccggccgccgccgccgccggtacatgtaaaaaaaggcttcgacctgcgagatgaacgcaacggagagcattcaacaaaccaaaaccgcataaccaaaatgttcagactagcgcgtggaacggcaaggaagctcatcctagcgctgcttacatgtctgtcgtcggcgctgctgtacaggcagattcagccgctaccgcccaagatccccggcacgccgggcggcccgccggtgacggcgaccaggacgaggctcagcgacggcaggtacctggcctatctggaaaccggcgtcccgagggagaaggccaagcacaggctcgtctttgtccatgggagcttgcgcaagagctgggcgtttacatgttgtccttcgatcgccccgggtacgccgagagcgacccgcacccggccaggaccgaggagagcatcgccctcgacatcgccgagctcgccgacaacctgcagctgggtcgcaagttctaccttgctggcttctccatgggcggcgagatcatgtggagctgcctcaagtacatcccacacaggctctccggcgtggccattctcggccccgtaggcaactactggtggcccggcttgccgtcgaacgtgtcgcgggacgcctggtaccagcagctccctcgggaccagtgggcggtctgggtcgcgcatcacctgccgtggctcacctactggtggaacacccagaagctcttcccggcctccagcgtcatcgcctacaaccctgccctcctgtcccaagaggacgagatgctcatggccaagtttggctatagagcctacatgatcaggcaacagggggagcacgagtgcctgcaccgggacatgatggtcgggttcggcaagtggagctggagcccgctgcagctggagaacccgttcgccgacgccgacgccgacgatggccagggggcggggaaggtgcacctgtggcacggcgccgaggacctcatcgtgccggtcagcctgtccaggtacatcagccagaagctgccgtgggtcgtctaccacgagctccccaagtcgggacatctcttcccgatcgccgaggggatggctgacatcattgtcaagtccctgctgctcggagacgatcatctgtcgtcgtcggcctcacagcctcctcattctccatgaatccaggtcgtcacgtgtagtccgttcgcatttcgttgcccgtctctcactgtttctgtaaagggaccgatgctgcaggattctctagcgttgtagctaggatgctctgtttttttaaataatggaactaagttttagcctatatatatatatcatctgagaatgttacataatgttggtc

SEQ ID NO: 25248 - DNA, 1378 bp, Zea Mays
gggttttcagatccagagcactaaaccaactactacccggccgccgccgccgccggtacatgtaaaaaaaggcttcgacctgcgagatgaacgcaacggagagcattcaacaaaccaaaaccgcataaccaaaatgttcagactagcgcgaacggcaaggaagctcatcctagcgctgcttacatgtctgtcgtcggcgctgctgtacaggcagattcagccgctaccgcccaagatccccggcacgccgggcggcccgccggtgacggcgaccaggacgaggctcagcgacggcaggtacctggcctatctggaaaccggcgtcccgagggagaaggccaagcacaggctcgtctttgtccatgggagcttgcgcaagagctgggcgtttacatgttgtccttcgatcgccccgggtacgccgagagcgacccgcacccggccaggaccgaggagagcatcgccctcgacatcgccgagctcgccgacaacctgcagctgggtcgcaagttctaccttgctggcttctccatgggcggcgagatcatgtggagctgcctcaagtacatcccacacaggctctccggcgtggccattctcggccccgtaggcaactactggtggcccggcttgccgtcgaacgtgtcgcgggacgcctggtaccagcagctccctcgggaccagtgggcggtctgggtcgcgcatcacctgccgtggctcacctactggtggaacacccagaagctcttcccggcctccagcgtcatcgcctacaaccctgccctcctgtcccaagaggacgagatgctcatggccaagtttggctatagagcctacatgccgcagatcaggcaacagggggagcacgagtgcctgcaccgggacatgatggtcgggttcggcaagtggagctggagcccgctgcagctggagaacccgttcgccgacgccgacgccgacgatggccagggggcggggaaggtgcacctgtggcacggcgccgaggacctcatcgtgccggtcagcctgtccaggtacatcagccagaagctgccgtgggtcgtctaccacgagctccccaagtcgggacatctcttcccgatcgccgaggggatggctgacatcattgtcaagtccctgctgctcggagacgatcatctgtcgtcgtcggcctcacagcctcctcattctccatgaatccaggtcgtcacgtgtagtccgttcgcatttcgttgcccgtctctcactgtttctgtaaagggaccgatgctgcaggattctctagcgttgtagctaggatgctctgtttttttaaataatggaactaagttttagcctatatatatatatcatctgagaatgttacataatgttggtc

SEQ ID NO: 25249 - DNA, 1443 bp, Zea Mays
ccggcagaaagcagaagttttaaagacaccggggcctgcgtctgcgtctgcttggccccccccggtaacagcagttatcatccccatctcccgccgtcccgcgtgctgatacttgcttgcattgcctgccgtttcccccgagccaacgacgacgttcgacggccgtagccaagaaggtatctcgcccaaacaaaggccgtcaagccaccatggccgtgtccggcgagaagccgccaccgccaccgccaccggcaaggaagctcatcctagcgctgcttacatgtctgtcgtcggcgctgctgtacaggcagattcagccgctaccgcccaagatccccggcacgccgggcggcccgccggtgacggcgaccaggacgaggctcagcgacggcaggtacctggcctatctggaaaccggcgtcccgagggagaaggccaagcacaggctcgtctttgtccatgggagcttgcgcaagagctgggcgtttacatgttgtccttcgatcgccccgggtacgccgagagcgacccgcacccggccaggaccgaggagagcatcgccctcgacatcgccgagctcgccgacaacctgcagctgggtcgcaagttctaccttgctggcttctccatgggcggcgagatcatgtggagctgcctcaagtacatcccacacaggcaactactggtggcccggcttgccgtcgaacgtgtcgcgggacgcctggtaccagcagctccctcgggaccagtgggcggtctgggtcgcgcatcacctgccgtggctcacctactggtggaacacccagaagctcttcccggcctccagcgtcatcgcctacaaccctgccctcctgtcccaagaggacgagatgctcatggccaagtttggctatagagcctacatgccgcagatcaggcaacagggggagcacgagtgcctgcaccgggacatgatggtcgggttcggcaagtggagctggagcccgctgcagctggagaacccgttcgccgacgccgacgccgacgatggccagggggcggggaaggtgcacctgtggcacggcgccgaggacctcatcgtgccggtcagcctgtccaggtacatcagccagaagctgccgtgggtcgtctaccacgagctccccaagtcgggacatctcttcccgatcgccgaggggatggctgacatcattgtcaagtccctgctgctcggagacgatcatctgtcgtcgtcggcctcacagcctcctcattctccatgaatccaggtcgtcacgtgtagtccgttcgcatttcgttgcccgtctctcactgtttctgtaaagggaccgatgctgcaggattctctagcgttgtagctaggatgctctgtttttttaaataatggaactaagttttagcctatatatatatatcatctgagaatgttacataatgttggtc

SEQ ID NO: 25250 - DNA, 1974 bp, Zea Mays
ccagaacatccagcggatgccagagggcgacatggagcacactggagatgttggcaatgtctactttgggccaaatcaccccatgaagccacatcgtctctgtatgacacatcaccttgttctttcatatggacttcatcaaaagatggagatatatagaccacacaaagcatatccaatagagcttgcccaattccattctgctgattatgtggaattcttgcaccggataactcctgattcccagcacctatatgcaagtgaactaactagatacaatcttggagaagactgtccggtctttgataatttgtttgagttctgccaaatctatgcgggaggaactttagatgctgctcgcagattaaatcataaaatatgtgacattgccattaattgggctggtgggctacatcatgccaaaaagtgtgaggcttcaggcttctgttacattaatgatctagtattaggaattctggagcttctcaagtaccatgccagggttctttatattgacattgatgtccatcatggagatggagttgaagaagccttttatttcactgacagggtaatgactgtgagtttccacaagtatggtgacctgttctttcctggaacaggtgatattaaagatataggagaaagggaaggaaaatattatgccatcaacattccacttaaagatgggatagatgacactagctttactcggctttttaaaacagtaagctcactgcactttatcccttgttattttgtcatttttttagtcctgccatgttatctgagtttgtcatgcagattattgccaaagttgttgagacatatctgcctggtgctattgttcttcaatgtggggctgattcattggcgagggatcgtttaggctgcttcaatctctctattgaaggttctccagtttttaacagatatatacacacatagaatctacaagactcatgtgtgtatataatatttatccatcggctgctagagtgtcttttgtgggaatgggaagccccatgtccttgattatccattttttctgtttttgctgagtttcctcgcattattggaggtttagagttccttcggacaagtcacctagtttcctgaagctaagcctactatatttgtccattagtgcttaactgcttacttgccctatctgttttcataaacaggtcatgctgaatgtgtaaagtttgtcaagaaattcaatattccccttctggtaactggaggtggtggatacaccaaggagaatgtagcacggtgttgggctgttgaaactggggtccttttagacacagaactcccaaatgagattccaaaaaatgaatatattgagtactttgctccagattatacattgaaagttccaaatttgaacatggacaatttgaacagtaagacctatctcagttcaatcaaagtgcaagtgatggagagtttgcggtacatacagcatgctcctggtgttcaaatgcaagaggttcctcccgatttttatatcccggactttgatgaagatgaattggatcctgatgaacgtgttgaccagcacactcaagacaagcagattcaccgtgatgatgagtactatgaaggtgacaatgacaacgatcacgacgacggcacacgctaatctgcttcttctgaggccctggtgtaaatggaaacctgagattcttcactgttgtgtgtagttcagcagccttgagatgtaatagtttgtcagttgacagcagggatctaatttagcaggtcaaagtggtttagacttttataagggattctgacccctcctgaattacacattgtagtacaagtctgcatatttttaagcatgcaaaaattcaaatttctcagtggtattagtatctcaagaaaatacaaattcctcgctcagtaacattgctgatatgtggtgaatttgattatatctagaaccccaaggcctagtttgag

SEQ ID NO: 25251 - DNA, 1403 bp, Zea Mays
ccagaacatccagcggatgccagagggcgacatggagcacactggagatgttggcaatgtctactttgggccaaatcaccccatgaagccacatcgtctctgtatgacacatcaccttgttctttcatatggacttcatcaaaagatggagatatatagaccacacaaagcatatccaatagagcttgcccaattccattctgctgattatgtggaattcttgcaccggataactcctgattcccagcacctatatgcaagtgaactaactagatacaatcttggagaagactgtccggtctttgataatttgtttgagttctgccaaatctatgcgggaggaactttagggtaatgactgtgagtttccacaagtatggtgacctgttctttcctggaacaggtgatattaaagatataggagaaagggaaggaaaatattatgccatcaacattccacttaaagatgggatagatgacactagctttactcggctttttaaaacaattattgccaaagttgttgagacatatctgcctggtgctattgttcttcaatgtggggctgattcattggcgagggatcgtttaggctgcttcaatctctctattgaaggtcatgctgaatgtgtaaagtttgtcaagaaattcaatattccccttctggtaactggaggtggtggatacaccaaggagaatgtagcacggtgttgggctgttgaaactggggtccttttagacacagaactcccaaatgagattccaaaaaatgaatatattgagtactttgctccagattatacattgaaagttccaaatttgaacatggacaatttgaacagtaagacctatctcagttcaatcaaagtgcaagtgatggagagtttgcggtacatacagcatgctcctggtgttcaaatgcaagaggttcctcccgatttttatatcccggactttgatgaagatgaattggatcctgatgaacgtgttgaccagcacactcaagacaagcagattcaccgtgatgatgagtactatgaaggtgacaatgacaacgatcacgacgacggcacacgctaatctgcttcttctgaggccctggtgtaaatggaaacctgagattcttcactgttgtgtgtagttcagcagccttgagatgtaatagtttgtcagttgacagcagggatctaatttagcaggtcaaagtggtttagacttttataagggattctgacccctcctgaattacacattgtagtacaagtctgcatatttttaagcatgcaaaaattcaaatttctcagtggtattagtatctcaagaaaatacaaattcctcgctcagtaacattgctgatatgtggtgaatttgattatatctagaaccccaaggcctagtttgag

SEQ ID NO: 25252 - DNA, 1623 bp, Zea Mays
cgtttggacctccatccgcggccgccgccgccgcgctgagtttgggccgggctctgttaatctgggcgactttgattttctctgctcccgctgccacggccgtcaggagtgaagcgatgctggagaaagaccggatatcctacttctacgacggagatgttggcaatgtctactttgggccaaatcaccccatgaagccacatcgtctctgtatgacacatcaccttgttctttcatatggacttcatcaaaagatggagatatatagaccacacaaagcatatccaatagagcttgcccaattccattctgctgattatgtggaattcttgcaccggataactcctgattcccagcacctatatgcaagtgaactaactagatacaatcttggagaagactgtccggtctttgataatttgtttgagttctgccaaatctatgcgggaggaactttagatgctgctcgcagattaaatcataaaatatgtgacattgccattaattgggctggtgggctacatcatgccaaaaagtgtgaggcttcaggcttctgttacattaatgatctagtattaggaattctggagcttctcaagtaccatgccagggttctttatattgacattgatgtccatcatggagatggagttgaagaagccttttatttcactgacagggtaatgactgtgagtttccacaagtatggtgacctgttctttcctggaacaggtgatattaaagatataggagaaagggaaggaaaatattatgccatcaacattccacttaaagatgggatagatgacactagctttactcggctttttaaaacagtcatgctgaatgtgtaaagtttgtcaagaaattcaatattccccttctggtaactggaggtggtggatacaccaaggagaatgtagcacggtgttgggctgttgaaactggggtccttttagacacagaactcccaaatgagattccaaaaaatgaatatattgagtactttgctccagattatacattgaaagttccaaatttgaacatggacaatttgaacagtaagacctatctcagttcaatcaaagtgcaagtgatggagagtttgcggtacatacagcatgctcctggtgttcaaatgcaagaggttcctcccgatttttatatcccggactttgatgaagatgaattggatcctgatgaacgtgttgaccagcacactcaagacaagcagattcaccgtgatgatgagtactatgaaggtgacaatgacaacgatcacgacgacggcacacgctaatctgcttcttctgaggccctggtgtaaatggaaacctgagattcttcactgttgtgtgtagttcagcagccttgagatgtaatagtttgtcagttgacagcagggatctaatttagcaggtcaaagtggtttagacttttataagggattctgacccctcctgaattacacattgtagtacaagtctgcatatttttaagcatgcaaaaattcaaatttctcagtggtattagtatctcaagaaaatacaaattcctcgctcagtaacattgctgatatgtggtgaatttgattatatctagaaccccaaggcctagtttgag

SEQ ID NO: 25253 - DNA, 1501 bp, Zea Mays
cgtttggacctccatccgcggccgccgccgccgcgctgagtttgggccgggctctgttaatctgggcgactttgattttctctgctcccgctgccacggccgtcaggagtgaagcgatgctggagaaagaccggatatcctacttctacgacgacaatcttggagaagactgtccggtctttgataatttgtttgagttctgccaaatctatgcgggaggaactttagatgctgctcgcagattaaatcataaaatatgtgacattgccattaattgggctggtgggctacatcatgccaaaaagtgtgaggcttcaggcttctgttacattaatgatctagtattaggaattctggagcttctcaagtaccatgccagggttctttatattgacattgatgtccatcatggagatggagttgaagaagccttttatttcactgacagggtaatgactgtgagtttccacaagtatggtgacctgttctttcctggaacaggtgatattaaagatataggagaaagggaaggaaaatattatgccatcaacattccacttaaagatgggatagatgacactagctttactcggctttttaaaacaattattgccaaagttgttgagacatatctgcctggtgctattgttcttcaatgtggggctgattcattggcgagggatcgtttaggctgcttcaatctctctattgaaggtcatgctgaatgtgtaaagtttgtcaagaaattcaatattccccttctggtaactggaggtggtggatacaccaaggagaatgtagcacggtgttgggctgttgaaactggggtccttttagacacagaactcccaaatgagattccaaaaaatgaatatattgagtactttgctccagattatacattgaaagttccaaatttgaacatggacaatttgaacagtaagacctatctcagttcaatcaaagtgcaagtgatggagagtttgcggtacatacagcatgctcctggtgttcaaatgcaagaggttcctcccgatttttatatcccggactttgatgaagatgaattggatcctgatgaacgtgttgaccagcacactcaagacaagcagattcaccgtgatgatgagtactatgaaggtgacaatgacaacgatcacgacgacggcacacgctaatctgcttcttctgaggccctggtgtaaatggaaacctgagattcttcactgttgtgtgtagttcagcagccttgagatgtaatagtttgtcagttgacagcagggatctaatttagcaggtcaaagtggtttagacttttataagggattctgacccctcctgaattacacattgtagtacaagtctgcatatttttaagcatgcaaaaattcaaatttctcagtggtattagtatctcaagaaaatacaaattcctcgctcagtaacattgctgatatgtggtgaatttgattatatctagaaccccaaggcctagtttgag

SEQ ID NO: 25254 - DNA, 1663 bp, Zea Mays
cgtttggacctccatccgcggccgccgccgccgcgctgagtttgggccgggctctgttaatctgggcgactttgattttctctgctcccgctgccacggccgtcaggagtgaagcgatgctggagaaagaccggatatcctacttctacgacggagatgttggcaatgtctactttgggccaaatcaccccatgaagccacatcgtctctagaccacacaaagcatatccaatagagcttgcccaattccattctgctgattatgtggaattcttgcaccggataactcctgattcccagcacctatatgcaagtgaactaactagatacaatcttggagaagactgtccggtctttgataatttgtttgagttctgccaaatctatgcgggaggaactttagattaaatcataaaatatgtgacattgccattaattgggctggtgggctacatcatgccaaaaagtgtgaggcttcaggcttctgttacattaatgatctagtattaggaattctggagcttctcaagtaccatgccagggttctttatattgacattgatgtccatcatggagatggagttgaagaagccttttatttcactgacagggtaatgactgtgagtttccacaagtatggtgacctgttctttcctggaacaggtgatattaaagatataggagaaagggaaggaaaatattatgccatcaacattccacttaaagatgggatagatgacactagctttactcggctttttaaaacaattattgccaaagttgttgagacatatctgcctggtgctattgttcttcaatgtggggctgattcattggcgagggatcgtttaggctgcttcaatctctctattgaaggtcatgctgaatgtgtaaagtttgtcaagaaattcaatattccccttctggtaactggaggtggtggatacaccaaggagaatgtagcacggtgttgggctgttgaaactggggtccttttagacacagaactcccaaatgagattccaaaaaatgaatatattgagtactttgctccagattatacattgaaagttccaaatttgaacatggacaatttgaacagtaagacctatctcagttcaatcaaagtgcaagtgatggagagtttgcggtacatacagcatgctcctggtgttcaaatgcaagaggttcctcccgatttttatatcccggactttgatgaagatgaattggatcctgatgaacgtgttgaccagcacactcaagacaagcagattcaccgtgatgatgagtactatgaaggtgacaatgacaacgatcacgacgacggcacacgctaatctgcttcttctgaggccctggtgtaaatggaaacctgagattcttcactgttgtgtgtagttcagcagccttgagatgtaatagtttgtcagttgacagcagggatctaatttagcaggtcaaagtggtttagacttttataagggattctgacccctcctgaattacacattgtagtacaagtctgcatatttttaagcatgcaaaaattcaaatttctcagtggtattagtatctcaagaaaatacaaattcctcgctcagtaacattgctgatatgtggtgaatttgattatatctagaaccccaaggcctagtttgag

SEQ ID NO: 25255 - DNA, 1612 bp, Zea Mays
ctcgtttggacctccatccgcggccgccgccgccgcgctgagtttgggccgggctctgttaatctgggcgactttgattttctctgctcccgctgccacggccgtcaggagtgaagcgatgctggagaaagaccggatatcctacttctacgacggagatgttggcaatgtctactttgggccaaatcaccccatgaagccacatcgtctctgtatgacacatcaccttgttctttcatatggacttcatcaaaagatggagatatatagaccacacaaagcatatccaatagagcttgcccaattccattctgctgattatgtggaattcttgcaccggataactcctgattcccagcacctatatgcaagtgaactaactagatacaatcttggagaagactgtccggtctttgataatttgtttgagttctgccaaatctatgcgggaggaactttagattaaatcataaaatatgtgacattgccattaattgggctggtgggctacatcatgccaaaaagtgtgaggcttcaggcttctgttacattaatgatctagtattaggaattctggagcttctcaagtaccatgccagggttctttatattgacattgatgtccatcatggagatggagttgaagaagccttttatttcactgacagggtaatgactgtgagtttccacaagtatggtgacctgttctttcctggaacaggtgatattaaagatataggagaaagggaaggaaaatattatgccatcaacattccacttaaagatgggatagatgacactagctttactcggctttttaaaacagtcatgctgaatgtgtaaagtttgtcaagaaattcaatattccccttctggtaactggaggtggtggatacaccaaggagaatgtagcacggtgttgggctgttgaaactggggtccttttagacacagaactcccaaatgagattccaaaaaatgaatatattgagtactttgctccagattatacattgaaagttccaaatttgaacatggacaatttgaacagtaagacctatctcagttcaatcaaagtgcaagtgatggagagtttgcggtacatacagcatgctcctggtgttcaaatgcaagaggttcctcccgatttttatatcccggactttgatgaagatgaattggatcctgatgaacgtgttgaccagcacactcaagacaagcagattcaccgtgatgatgagtactatgaaggtgacaatgacaacgatcacgacgacggcacacgctaatctgcttcttctgaggccctggtgtaaatggaaacctgagattcttcactgttgtgtgtagttcagcagccttgagatgtaatagtttgtcagttgacagcagggatctaatttagcaggtcaaagtggtttagacttttataagggattctgacccctcctgaattacacattgtagtacaagtctgcatatttttaagcatgcaaaaattcaaatttctcagtggtattagtatctcaagaaaatacaaattcctcgctcagtaacattgctgatatgtggtgaatttgattatatctagaaccccaaggcctagtttgag

SEQ ID NO: 25256 - DNA, 1807 bp, Zea Mays
ctcgtttggacctccatccgcggccgccgccgccgcgctgagtttgggccgggctctgttaatctgggcgactttgattttctctgctcccgctgccacggccgtcaggagtgaagcgatgctggagaaagaccggatatcctacttctacgacggagatgttggcaatgtctactttgggccaaatcaccccatgaagccacatcgtctctgtatgacacatcaccttgttctttcatatggacttcatcaaaagatggagatatatagaccacacaaagcatatccaatagagcttgcccaattccattctgctgattatgtggaattcttgcaccggataactcctgattcccagcacctatatgcaagtgaactaactagatgtatggatgctggagttttctctttccaaactattcttcaggactgctaatttcacaatgaaatacatgccatacaatcttggagaagactgtccggtctttgataatttgtttgagttctgccaaatctatgcgggaggaactttagatgctgctcgcagattaaatcataaaatatgtgacattgccattaattgggctggtgggctacatcatgccaaaaagtgtgaggcttcaggcttctgttacattaatgatctagtattaggaattctggagcttctcaagtaccatgccagggttctttatattgacattgatgtccatcatggagatggagttgaagaagccttttatttcactgacagggtaatgactgtgagtttccacaagtatggtgacctgttctttcctggaacaggtgatattaaagatataggagaaagggaaggaaaatattatgccatcaacattccacttaaagatgggatagatgacactagctttactcggctttttaaaacaattattgccaaagttgttgagacatatctgcctggtgctattgttcttcaatgtggggctgattcattggcgagggatcgtttaggctgcttcaatctctctattgaaggtcatgctgaatgtgtaaagtttgtcaagaaattcaatattccccttctggtaactggaggtggtggatacaccaaggagaatgtagcacggtgttgggctgttgaaactggggtccttttagacacagaactcccaaatgagattccaaaaaatgaatatattgagtactttgctccagattatacattgaaagttccaaatttgaacatggacaatttgaacagtaagacctatctcagttcaatcaaagtgcaagtgatggagagtttgcggtacatacagcatgctcctggtgttcaaatgcaagaggttcctcccgatttttatatcccggactttgatgaagatgaattggatcctgatgaacgtgttgaccagcacactcaagacaagcagattcaccgtgatgatgagtactatgaaggtgacaatgacaacgatcacgacgacggcacacgctaatctgcttcttctgaggccctggtgtaaatggaaacctgagattcttcactgttgtgtgtagttcagcagccttgagatgtaatagtttgtcagttgacagcagggatctaatttagcaggtcaaagtggtttagacttttataagggattctgacccctcctgaattacacattgtagtacaagtctgcatatttttaagcatgcaaaaattcaaatttctcagtggtattagtatctcaagaaaatacaaattcctcgctcagtaacattgctgatatgtggtgaatttgattatatctagaaccccaaggcctagtttgag

SEQ ID NO: 25257 - DNA, 2015 bp, Zea Mays
cttccgtctcgtttggacctccatccgcggccgccgccgccgcgctgagtttgggccgggctctgttaatctgggcgactttgattttctctgctcccgctgccacggccgtcaggagtgaagcgatgctggagaaagaccggatatcctacttctacgacggagatgttggcaatgtctactttgggccaaatcaccccatgaagccacatcgtctctgtatgacacatcaccttgttctttcatatggacttcatcaaaagatggagatatatagaccacacaaagcatatccaatagagcttgcccaattccattctgctgattatgtggaattcttgcaccggataactcctgattcccagcacctatatgcaagtgaactaactagatacaatcttggagaagactgtccggtctttgataatttgtttgagttctgccaaatctatgcgggaggaactttagatgctgctcgcagattaaatcataaaatatgtgacattgccattaattgggctggtgggctacatcatgccaaaaagtgtgaggcttcaggcttctgttacattaatgatctagtattaggaattctggagcttctcaagtaccatgccagggttctttatattgacattgatgtccatcatggagatggagttgaagaagccttttatttcactgacagggtaatgactgtgagtttccacaagtatggtgacctgttctttcctggaacaggtgatattaaagatataggagaaagggaaggaaaatattatgccatcaacattccacttaaagatgggatagatgacactagctttactcggctttttaaaacaattattgccaaagttgttgagacatatctgcctggtgctattgttcttcaatgtggggctgattcattggcgagggatcgtttaggctgcttcaatctctctattgaaggttctccagtttttaacagatatatacacacatagaatctacaagactcatgtgtgtatataatatttatccatcggctgctagagtgtcttttgtgggaatgggaagccccatgtccttgattatccattttttctgtttttgctgagtttcctcgcattattggaggtttagagttccttcggacaagtcacctagtttcctgaagctaagcctactatatttgtccattagtgcttaactgcttacttgccctatctgttttcataaacaggtcatgctgaatgtgtaaagtttgtcaagaaattcaatattccccttctggtaactggaggtggtggatacaccaaggagaatgtagcacggtgttgggctgttgaaactggggtccttttagacacagaactcccaaatgagattccaaaaaatgaatatattgagtactttgctccagattatacattgaaagttccaaatttgaacatggacaatttgaacagtaagacctatctcagttcaatcaaagtgcaagtgatggagagtttgcggtacatacagcatgctcctggtgttcaaatgcaagaggttcctcccgatttttatatcccggactttgatgaagatgaattggatcctgatgaacgtgttgaccagcacactcaagacaagcagattcaccgtgatgatgagtactatgaaggtgacaatgacaacgatcacgacgacggcacacgctaatctgcttcttctgaggccctggtgtaaatggaaacctgagattcttcactgttgtgtgtagttcagcagccttgagatgtaatagtttgtcagttgacagcagggatctaatttagcaggtcaaagtggtttagacttttataagggattctgacccctcctgaattacacattgtagtacaagtctgcatatttttaagcatgcaaaaattcaaatttctcagtggtattagtatctcaagaaaatacaaattcctcgctcagtaacattgctgatatgtggtgaatttgattatatctagaaccccaaggcctagtttgag

SEQ ID NO: 25258 - DNA, 1861 bp, Zea Mays
cttccgtctcgtttggacctccatccgcggccgccgccgccgcgctgagtttgggccgggctctgttaatctgggcgactttgattttctctgctcccgctgccacggccgtcaggagtgaagcgatgctggagaaagaccggatatcctacttctacgacgacaatcttggagaagactgtccggtctttgataatttgtttgagttctgccaaatctatgcgggaggaactttagatgctgctcgcagattaaatcataaaatatgtgacattgccattaattgggctggtgggctacatcatgccaaaaagtgtgaggcttcaggcttctgttacattaatgatctagtattaggaattctggagcttctcaagtaccatgccagggttctttatattgacattgatgtccatcatggagatggagttgaagaagccttttatttcactgacagggtaatgactgtgagtttccacaagtatggtgacctgttctttcctggaacaggtgatattaaagatataggagaaagggaaggaaaatattatgccatcaacattccacttaaagatgggatagatgacactagctttactcggctttttaaaacagtaagctcactgcactttatcccttgttattttgtcatttttttagtcctgccatgttatctgagtttgtcatgcagattattgccaaagttgttgagacatatctgcctggtgctattgttcttcaatgtggggctgattcattggcgagggatcgtttaggctgcttcaatctctctattgaaggttctccagtttttaacagatatatacacacatagaatctacaagactcatgtgtgtatataatatttatccatcggctgctagagtgtcttttgtgggaatgggaagccccatgtccttgattatccattttttctgtttttgctgagtttcctcgcattattggaggtttagagttccttcggacaagtcacctagtttcctgaagctaagcctactatatttgtccattagtgcttaactgcttacttgccctatctgttttcataaacaggtcatgctgaatgtgtaaagtttgtcaagaaattcaatattccccttctggtaactggaggtggtggatacaccaaggagaatgtagcacggtgttgggctgttgaaactggggtccttttagacacagaactcccaaatgagattccaaaaaatgaatatattgagtactttgctccagattatacattgaaagttccaaatttgaacatggacaatttgaacagtaagacctatctcagttcaatcaaagtgcaagtgatggagagtttgcggtacatacagcatgctcctggtgttcaaatgcaagaggttcctcccgatttttatatcccggactttgatgaagatgaattggatcctgatgaacgtgttgaccagcacactcaagacaagcagattcaccgtgatgatgagtactatgaaggtgacaatgacaacgatcacgacgacggcacacgctaatctgcttcttctgaggccctggtgtaaatggaaacctgagattcttcactgttgtgtgtagttcagcagccttgagatgtaatagtttgtcagttgacagcagggatctaatttagcaggtcaaagtggtttagacttttataagggattctgacccctcctgaattacacattgtagtacaagtctgcatatttttaagcatgcaaaaattcaaatttctcagtggtattagtatctcaagaaaatacaaattcctcgctcagtaacattgctgatatgtggtgaatttgattatatctagaaccccaaggcctagtttgag

SEQ ID NO: 25259 - DNA, 2012 bp, Zea Mays
cgccctttcgcttccgtctcgtttggacctccatccgcggccgccgccgccgcgctgagtttgggccgggctctgttaatctgggcgactttgattttctctgctcccgctgccacggccgtcaggagtgaagcgatgctggagaaagaccggatatcctacttctacgacggagatgttggcaatgtctactttgggccaaatcaccccatgaagccacatcgtctctgtatgacacatcaccttgttctttcatatggacttcatcaaaagatggagatatatagaccacacaaagcatatccaatagagcttgcccaattccattctgctgattatgtggaattcttgcaccggataactcctgattcccagcacctatatgcaagtgaactaactagatacaatcttggagaagactgtccggtctttgataatttgtttgagttctgccaaatctatgcgggaggaactttagattaaatcataaaatatgtgacattgccattaattgggctggtgggctacatcatgccaaaaagtgtgaggcttcaggcttctgttacattaatgatctagtattaggaattctggagcttctcaagtaccatgccagggttctttatattgacattgatgtccatcatggagatggagttgaagaagccttttatttcactgacagggtaatgactgtgagtttccacaagtatggtgacctgttctttcctggaacaggtgatattaaagatataggagaaagggaaggaaaatattatgccatcaacattccacttaaagatgggatagatgacactagctttactcggctttttaaaacaattattgccaaagttgttgagacatatctgcctggtgctattgttcttcaatgtggggctgattcattggcgagggatcgtttaggctgcttcaatctctctattgaaggttctccagtttttaacagatatatacacacatagaatctacaagactcatgtgtgtatataatatttatccatcggctgctagagtgtcttttgtgggaatgggaagccccatgtccttgattatccattttttctgtttttgctgagtttcctcgcattattggaggtttagagttccttcggacaagtcacctagtttcctgaagctaagcctactatatttgtccattagtgcttaactgcttacttgccctatctgttttcataaacaggtcatgctgaatgtgtaaagtttgtcaagaaattcaatattccccttctggtaactggaggtggtggatacaccaaggagaatgtagcacggtgttgggctgttgaaactggggtccttttagacacagaactcccaaatgagattccaaaaaatgaatatattgagtactttgctccagattatacattgaaagttccaaatttgaacatggacaatttgaacagtaagacctatctcagttcaatcaaagtgcaagtgatggagagtttgcggtacatacagcatgctcctggtgttcaaatgcaagaggttcctcccgatttttatatcccggactttgatgaagatgaattggatcctgatgaacgtgttgaccagcacactcaagacaagcagattcaccgtgatgatgagtactatgaaggtgacaatgacaacgatcacgacgacggcacacgctaatctgcttcttctgaggccctggtgtaaatggaaacctgagattcttcactgttgtgtgtagttcagcagccttgagatgtaatagtttgtcagttgacagcagggatctaatttagcaggtcaaagtggtttagacttttataagggattctgacccctcctgaattacacattgtagtacaagtctgcatatttttaagcatgcaaaaattcaaatttctcagtggtattagtatctcaagaaaatacaaattcctcgctcagtaacattgctgatatgtggtgaatttgattatatctagaaccccaaggcctagtttgag

SEQ ID NO: 25260 - DNA, 1822 bp, Zea Mays
cccacccttgtcgccctttcgcttccgtctcgtttggacctccatccgcggccgccgccgccgcgctgagtttgggccgggctctgttaatctgggcgactttgattttctctgctcccgctgccacggccgtcaggagtgaagcgatgctggagaaagaccggatatcctacttctacgacggagatgttggcaatgtctactttgggccaaatcaccccatgaagccacatcgtctctgtatgacacatcaccttgttctttcatatggacttcatcaaaagatggagatatatagaccacacaaagcatatccaatagagcttgcccaattccattctgctgattatgtggaattcttgcaccggataactcctgattcccagcacctatatgcaagtgaactaactagatgtatggatgctggagttttctctttccaaactattcttcaggactgctaatttcacaatgaaatacatgccatacaatcttggagaagactgtccggtctttgataatttgtttgagttctgccaaatctatgcgggaggaactttagattaaatcataaaatatgtgacattgccattaattgggctggtgggctacatcatgccaaaaagtgtgaggcttcaggcttctgttacattaatgatctagtattaggaattctggagcttctcaagtaccatgccagggttctttatattgacattgatgtccatcatggagatggagttgaagaagccttttatttcactgacagggtaatgactgtgagtttccacaagtatggtgacctgttctttcctggaacaggtgatattaaagatataggagaaagggaaggaaaatattatgccatcaacattccacttaaagatgggatagatgacactagctttactcggctttttaaaacaattattgccaaagttgttgagacatatctgcctggtgctattgttcttcaatgtggggctgattcattggcgagggatcgtttaggctgcttcaatctctctattgaaggtcatgctgaatgtgtaaagtttgtcaagaaattcaatattccccttctggtaactggaggtggtggatacaccaaggagaatgtagcacggtgttgggctgttgaaactggggtccttttagacacagaactcccaaatgagattccaaaaaatgaatatattgagtactttgctccagattatacattgaaagttccaaatttgaacatggacaatttgaacagtaagacctatctcagttcaatcaaagtgcaagtgatggagagtttgcggtacatacagcatgctcctggtgttcaaatgcaagaggttcctcccgatttttatatcccggactttgatgaagatgaattggatcctgatgaacgtgttgaccagcacactcaagacaagcagattcaccgtgatgatgagtactatgaaggtgacaatgacaacgatcacgacgacggcacacgctaatctgcttcttctgaggccctggtgtaaatggaaacctgagattcttcactgttgtgtgtagttcagcagccttgagatgtaatagtttgtcagttgacagcagggatctaatttagcaggtcaaagtggtttagacttttataagggattctgacccctcctgaattacacattgtagtacaagtctgcatatttttaagcatgcaaaaattcaaatttctcagtggtattagtatctcaagaaaatacaaattcctcgctcagtaacattgctgatatgtggtgaatttgattatatctagaaccccaaggcctagtttgag

SEQ ID NO: 25261 - DNA, 1631 bp, Zea Mays
gtcctcaccccacgtccccacccttgtcgccctttcgcttccgtctcgtttggacctccatccgcggccgccgccgccgcgctgagtttgggccgggctctgttaatctgggcgactttgattttctctgctcccgctgccacggccgtcaggagtgaagcgatgctggagaaagaccggatatcctacttctacgacggagatgttggcaatgtctactttgggccaaatcaccccatgaagccacatcgtctctgtatgacacatcaccttgttctttcatatggacttcatcaaaagatggagatatatagaccacacaaagcatatccaatagagcttgcccaattccattctgctgattatgtggaattcttgcaccggataactcctgattcccagcacctatatgcaagtgaactaactagatgtatggatgctggagttttctctttccaaactattcttcaggactgctaatttcacaatgaaatacatgccatacaatcttggagaagactgtccggtctttgataatttgtttgagttctgccaaatctatgcgggaggaactttagggtaatgactgtgagtttccacaagtatggtgacctgttctttcctggaacaggtgatattaaagatataggagaaagggaaggaaaatattatgccatcaacattccacttaaagatgggatagatgacactagctttactcggctttttaaaacaattattgccaaagttgttgagacatatctgcctggtgctattgttcttcaatgtggggctgattcattggcgagggatcgtttaggctgcttcaatctctctattgaaggtcatgctgaatgtgtaaagtttgtcaagaaattcaatattccccttctggtaactggaggtggtggatacaccaaggagaatgtagcacggtgttgggctgttgaaactggggtccttttagacacagaactcccaaatgagattccaaaaaatgaatatattgagtactttgctccagattatacattgaaagttccaaatttgaacatggacaatttgaacagtaagacctatctcagttcaatcaaagtgcaagtgatggagagtttgcggtacatacagcatgctcctggtgttcaaatgcaagaggttcctcccgatttttatatcccggactttgatgaagatgaattggatcctgatgaacgtgttgaccagcacactcaagacaagcagattcaccgtgatgatgagtactatgaaggtgacaatgacaacgatcacgacgacggcacacgctaatctgcttcttctgaggccctggtgtaaatggaaacctgagattcttcactgttgtgtgtagttcagcagccttgagatgtaatagtttgtcagttgacagcagggatctaatttagcaggtcaaagtggtttagacttttataagggattctgacccctcctgaattacacattgtagtacaagtctgcatatttttaagcatgcaaaaattcaaatttctcagtggtattagtatctcaagaaaatacaaattcctcgctcagtaacattgctgatatgtggtgaatttgattatatctagaaccccaaggcctagtttgag

SEQ ID NO: 25262 - DNA, 1558 bp, Zea Mays
gtcctcaccccacgtccccacccttgtcgccctttcgcttccgtctcgtttggacctccatccgcggccgccgccgccgcgctgagtttgggccgggctctgttaatctgggcgactttgattttctctgctcccgctgccacggccgtcaggagtgaagcgatgctggagaaagaccggatatcctacttctacgacggagatgttggcaatgtctactttgggccaaatcaccccatgaagccacatcgtctctgtatgacacatcaccttgttctttcatatggacttcatcaaaagatggagatatatagaccacacaaagcatatccaatagagcttgcccaattccattctgctgattatgtggaattcttgcaccggataactcctgattcccagcacctatatgcaagtgaactaactagatacaatcttggagaagactgtccggtctttgataatttgtttgagttctgccaaatctatgcgggaggaactttagggtaatgactgtgagtttccacaagtatggtgacctgttctttcctggaacaggtgatattaaagatataggagaaagggaaggaaaatattatgccatcaacattccacttaaagatgggatagatgacactagctttactcggctttttaaaacaattattgccaaagttgttgagacatatctgcctggtgctattgttcttcaatgtggggctgattcattggcgagggatcgtttaggctgcttcaatctctctattgaaggtcatgctgaatgtgtaaagtttgtcaagaaattcaatattccccttctggtaactggaggtggtggatacaccaaggagaatgtagcacggtgttgggctgttgaaactggggtccttttagacacagaactcccaaatgagattccaaaaaatgaatatattgagtactttgctccagattatacattgaaagttccaaatttgaacatggacaatttgaacagtaagacctatctcagttcaatcaaagtgcaagtgatggagagtttgcggtacatacagcatgctcctggtgttcaaatgcaagaggttcctcccgatttttatatcccggactttgatgaagatgaattggatcctgatgaacgtgttgaccagcacactcaagacaagcagattcaccgtgatgatgagtactatgaaggtgacaatgacaacgatcacgacgacggcacacgctaatctgcttcttctgaggccctggtgtaaatggaaacctgagattcttcactgttgtgtgtagttcagcagccttgagatgtaatagtttgtcagttgacagcagggatctaatttagcaggtcaaagtggtttagacttttataagggattctgacccctcctgaattacacattgtagtacaagtctgcatatttttaagcatgcaaaaattcaaatttctcagtggtattagtatctcaagaaaatacaaattcctcgctcagtaacattgctgatatgtggtgaatttgattatatctagaaccccaaggcctagtttgag

SEQ ID NO: 25263 - DNA, 1770 bp, Zea Mays
ccccagtcctcaccccacgtccccacccttgtcgccctttcgcttccgtctcgtttggacctccatccgcggccgccgccgccgcgctgagtttgggccgggctctgttaatctgggcgactttgattttctctgctcccgctgccacggccgtcaggagtgaagcgatgctggagaaagaccggatatcctacttctacgacggagatgttggcaatgtctactttgggccaaatcaccccatgaagccacatcgtctctgtatgacacatcaccttgttctttcatatggacttcatcaaaagatggagatatatagaccacacaaagcatatccaatagagcttgcccaattccattctgctgattatgtggaattcttgcaccggataactcctgattcccagcacctatatgcaagtgaactaactagatacaatcttggagaagactgtccggtctttgataatttgtttgagttctgccaaatctatgcgggaggaactttagattaaatcataaaatatgtgacattgccattaattgggctggtgggctacatcatgccaaaaagtgtgaggcttcaggcttctgttacattaatgatctagtattaggaattctggagcttctcaagtaccatgccagggttctttatattgacattgatgtccatcatggagatggagttgaagaagccttttatttcactgacagggtaatgactgtgagtttccacaagtatggtgacctgttctttcctggaacaggtgatattaaagatataggagaaagggaaggaaaatattatgccatcaacattccacttaaagatgggatagatgacactagctttactcggctttttaaaacaattattgccaaagttgttgagacatatctgcctggtgctattgttcttcaatgtggggctgattcattggcgagggatcgtttaggctgcttcaatctctctattgaaggtcatgctgaatgtgtaaagtttgtcaagaaattcaatattccccttctggtaactggaggtggtggatacaccaaggagaatgtagcacggtgttgggctgttgaaactggggtccttttagacacagaactcccaaatgagattccaaaaaatgaatatattgagtactttgctccagattatacattgaaagttccaaatttgaacatggacaatttgaacagtaagacctatctcagttcaatcaaagtgcaagtgatggagagtttgcggtacatacagcatgctcctggtgttcaaatgcaagaggttcctcccgatttttatatcccggactttgatgaagatgaattggatcctgatgaacgtgttgaccagcacactcaagacaagcagattcaccgtgatgatgagtactatgaaggtgacaatgacaacgatcacgacgacggcacacgctaatctgcttcttctgaggccctggtgtaaatggaaacctgagattcttcactgttgtgtgtagttcagcagccttgagatgtaatagtttgtcagttgacagcagggatctaatttagcaggtcaaagtggtttagacttttataagggattctgacccctcctgaattacacattgtagtacaagtctgcatatttttaagcatgcaaaaattcaaatttctcagtggtattagtatctcaagaaaatacaaattcctcgctcagtaacattgctgatatgtggtgaatttgattatatctagaaccccaaggcctagtttgag

SEQ ID NO: 25264 - DNA, 1834 bp, Zea Mays
gtcgatcttacggtcgtttgatccgtgccgtccaacccgatccagagcattccccagtcctcaccccacgtccccacccttgtcgccctttcgcttccgtctcgtttggacctccatccgcggccgccgccgccgcgctgagtttgggccgggctctgttaatctgggcgactttgattttctctgctcccgctgccacggccgtcaggagtgaagcgatgctggagaaagaccggatatcctacttctacgacggagatgttggcaatgtctactttgggccaaatcaccccatgaagccacatcgtctctgtatgacacatcaccttgttctttcatatggacttcatcaaaagatggagatatatagaccacacaaagcatatccaatagagcttgcccaattccattctgctgattatgtggaattcttgcaccggataactcctgattcccagcacctatatgcaagtgaactaactagatacaatcttggagaagactgtccggtctttgataatttgtttgagttctgccaaatctatgcgggaggaactttagatgctgctcgcagattaaatcataaaatatgtgacattgccattaattgggctggtgggctacatcatgccaaaaagtgtgaggcttcaggcttctgttacattaatgatctagtattaggaattctggagcttctcaagtaccatgccagggttctttatattgacattgatgtccatcatggagatggagttgaagaagccttttatttcactgacagggtaatgactgtgagtttccacaagtatggtgacctgttctttcctggaacaggtgatattaaagatataggagaaagggaaggaaaatattatgccatcaacattccacttaaagatgggatagatgacactagctttactcggctttttaaaacaattattgccaaagttgttgagacatatctgcctggtgctattgttcttcaatgtggggctgattcattggcgagggatcgtttaggctgcttcaatctctctattgaaggtcatgctgaatgtgtaaagtttgtcaagaaattcaatattccccttctggtaactggaggtggtggatacaccaaggagaatgtagcacggtgttgggctgttgaaactggggtccttttagacacagaactcccaaatgagattccaaaaaatgaatatattgagtactttgctccagattatacattgaaagttccaaatttgaacatggacaatttgaacagtaagacctatctcagttcaatcaaagtgcaagtgatggagagtttgcggtacatacagcatgctcctggtgttcaaatgcaagaggttcctcccgatttttatatcccggactttgatgaagatgaattggatcctgatgaacgtgttgaccagcacactcaagacaagcagattcaccgtgatgatgagtactatgaaggtgacaatgacaacgatcacgacgacggcacacgctaatctgcttcttctgaggccctggtgtaaatggaaacctgagattcttcactgttgtgtgtagttcagcagccttgagatgtaatagtttgtcagttgacagcagggatctaatttagcaggtcaaagtggtttagacttttataagggattctgacccctcctgaattacacattgtagtacaagtctgcatatttttaagcatgcaaaaattcaaatttctcagtggtattagtatctcaagaaaatacaaattcctcgctcagtaacattgctgatatgtggtgaatttgattatatctagaaccccaaggcctagtttgag

SEQ ID NO: 25265 - DNA, 117 bp, Zea Mays
gtcttttttcataatttatattcatatccatttgtgtaggttggagagtatcaaggtgcatagaagatttctaagggctcgcttgacaagtatggtcccgatagggttcttgacaca

SEQ ID NO: 25266 - DNA, 1967 bp, Zea Mays
ccgactagtttaaaataaaggagtagtattacatctgggggaatgcagcagtgcactgcatgttccgtttcattccacggtaagctggggttagttgttggttggtgtagcggagatattattttgacgcttgaccgaaccaacccggacggacctcgcgagtctatgaacgtcttcccccaccgcgccaccaacccccttgcactccaacaagcctcagcctcacaccacaccaaacgccggcgccccctatataacggtccccaccggcccgtgtccttctcagcttctcgctctgaagcttcaaacttaccccagttacaattacccggcgcggttccttcctagagagcacaaaaccaagaaacagctgaggcggagaggtagctacttgaaccaatcggtgtcgcaatggctgcagcgggtatcaccagggcgccgatcgggcagaatccgaggcgtggtgaggtgctcgttgcagggcgcggtcgtcggcgggcgggcggagtggcagagcagctgcgccgtgctgtccagcaaggtggccgcgctcggtacgcactccgtcaacggccacgtcgcgccggccccggccccggcgccgactcagaacggggcggtgctggatttggtccccgtgagtagtagtatcaatggcgccatcaccaagaacctgccgcagccgcttcgcatcgcggacctgtccccggcgccgatgcacgggtcgcagctgcgcgtggcctaccagggcgtgcccggcgcgtacagcgagaaggcggccgggaaggcgtacccgggctgcgacgccatcccctgcgaccagttcgaggtggcgttccaggccgtggagctgtggatcgcggaccgcgccgtgctccccgtggagaactcgctgggcggcagcatccaccgcaactacgacctgctgctccggcaccggctccacatcgtcggggaggtgcagctccccgtgcaccactgcctgctggcgctgcccggggtgcgcaaggagtgcctgacccgcgtgatgagccacccgcaggcgctggcgcagtgcgagcacacgctcacggccatgggcctcaacgtcgtccgcgaggccttcgacgacacggccggcgccgccgagtacgtggccgccaacggcctccgcgacacggccgccatcgcgtcctcccgcgccgccgagctgtacgggatggaggtgctggcggacggcatccaggacgactccggcaacgtcacccgcttcgtgatgctggcccgggagcccgtcgtgccgcgcaccgaccgccccttcaagaccagcatcgtgttcgcgcacgacagggagggcacctccgtgctcttcaaggtgctctccgccttcgccttccgcgacatctcgctcaccaagatcgagagcaggccgcaccgccaccgccccatccgcctcgtcgacgacgccaacgtcggcaccgccaagcacttcgagtacatgttctacgtcgacttccaggcgtccctcgcagagccccgcgcgcagaacgcgctggccgaggtccaggagtacacgtccttcctccgggtgctcgggagctaccccatggacatgacccccatgaccgccggctcctcctccaccgttgtttcctcgtccgatgatccctcgtcgtcttgattgccgttggaggctggagctagctccgaggagaagtcgtcgagtagggacgttggttttctgctcatgtcgtcctactcgatcgcccctcgctgcagccggagtaattaattttgagtttcctttaatctttcatggtaatagtattatgtacgtgtaattgttcaaaatcatccgcggtgaatatatctgtgaaacagtactagatgacattcataatttcatattaatcagttttcggaaactctgaacactttccactactactactactagttgctatgaaaaaaaggaggttaaattaaag

SEQ ID NO: 25267 - DNA, 1455 bp, Zea Mays
gatcactcgctgtcgctgctatcgcgtcgccaaaaaaattatctgcatcctgcggcgctcgatcgctcaccggtacgtagctaataggcctagggctactcctgagtatagcccctgacagagcaaggtgaggcgtctcgtcctcaacctctctgcctaccatggactcggtcggccatccctttctggctctgtttgcttcgccgcccaatgcataccatccagttcctcgtccgcggccacctatgttttctccagaagctagaggtagcgcactagcgccgaatgcctgcgcacctaattcaatcaggatgcccatccccagtgaggcttctcgtttggaaagcccaaaccacgggacgaaacccgaacgcttcccccgggacgctccccggcgtggaaagaagccctgggctgaggcgccttggcatttggaagcccaacagcatgggaaatcctacccgaccccaggcgttttccacgcggcagagctccctcgcctctcgagtcaaggcggctgttcccagggatctgacggcgacttccgcggcagctccttcgtcccgtcggtgatcaccctcccagttccaccgcccaaagccaacctcaccagactgaggcacagttggaatggcgtcactgaagctccgtggggcagaagctagagcttagctgctcgacgtggctctacaacataagaccagaactcggcggcgcttcagcttcagcttgttgtccagaacatcggcttactccgcgcgttcaagaagtaaggcaacgagggctctgtccatcttggatttttggtgcctgtaatagacatctctctgtttatagtaactcaattattgagctcaaataagacgagtagttctagcatagtagcacccccacccacacatacagatcataatggctccacacacacacagacacattccatgcatagcttgattaattattctacatttctacttgtagtttgcaccttcttgttctctgcgtgaatgcatacagtctgatctctgtcaacctggttctttctcccttccagtttgcatcttctgtgattgagtgctacctgaatagctcaagatgacagttttagtgtcatcagttaggtgttagttgtgtcatcagttttggtgacaaaatcttgattacttcggcaccacagaatatgtgcacactagctggaaataaattgataaggttgagcaaaacaaacagggtatgcccacttttttgttacaagaatgtcactggtgtgtgagataagggaaacaaaagacatagacaaaaatgtaacctgcattctcaaatattgtgctagatcttgttgagcttctataaactgtaatctgtattctcaaggtttttgttacatttagatatccatggattcaggctatttggattgtgtgttacaacccttggtcactggtgaatggtgat

SEQ ID NO: 25268 - DNA, 998 bp, Zea Mays
gccgaaagacctccctgcccctgccttatccattcagaatgatggcatcagtgatgaattcagtacttcttcaagcatcgctagaaaagataggtgtggagacacgagtccaaaccgcattgatgatgcaagaagttgcagaaccttacattaggcgtcgagccatacgccatcttgaaaaagggagagtggtcatctttggtgggattggtgtgggcattgggaatccattgttcacaacagatacagctgctgccttaagagcttcagagatcaacgcagatgttgtccttaaaggtattgttggtgatgatgagtatggctgtcctcctaggagcaacagtaatgcttcatttgagcacatctcctttagggagttagcagcaagaggaatcaccaaaatggacatgacagcagtaacatgttgtgaggagaacaacattcctgtcgtcatctttaacatgttggagcctggtaacatctcaagagcaatttgtggagatcaaataggcaccttagttgaccagtcaggaaggatcacataaaactaggaggatgaatggtagcagagctccaggacatgccgatactctgggtgggacatcactctggggggacatcctgaattctttgctcgtggatcttttccgtatagaaggaaaacatgttcatcagatggaagcgttcaccttgatttgcctgggatgcctattgtgtattatgcgttgtggtcgcaattgcccacattgagaaaagtattaccttgtaatgtctatttgtaatttgtctgtagattagtggaagggctcatgtaaagtgtttcacggtgcccagatcagaatgtagtgttgtaagttgtaatgctattatttgagtcgtagtgtttgaggtgtcacgttttgcacgattaatttgcctgtggctttccagcaatcaatctttttttttgttcaatgatcatacacgaatatatgctactgactaatgtagggatgttg

SEQ ID NO: 25269 - DNA, 1895 bp, Zea Mays
cgtgtctgggagcggagcccgcggtgtaaccctaacgccgccacgcgcggccatccatggcctcctgcgacgacgacttcgttctcctcggtgacgacgcacaccagccggcaactcccccacccccggcccccaccgcccagcaacccgcgccgccgccgccgccgccgccacaggcctcccatcccttcagcttcactgacgcggttgcgggggctgccgccggcgccggctccttcgcgcaggcccaggaggagagcaaccaccacgccgagcgcggcaagccggcgcaccacgccaagcggggcagggagcgcgccgaggagttcagcagcgatgggggcgagtactgttcctacatcaacagcagcggcagcggcggtggtgggaagaagggccgtggcggtggagggagctcgagcgtgtcagactaccgtaaggatcgggaggagtggacggacggcgcgatcagcagcctcctcgacgcctacacggaccgatttgagcagctcaaccggggaaacctgcggggtcgggactgggaggacgtggccggcgccgtgaccgacgggcagggcaagactaccggggccaagagcgtggagcaatgtaagaataagatcgacaatcttaagaaacgttacaaggtggagtgccagcggctctccagttcgggcgggggtgccatcagccactggccctggttcaaaaagatggagcagatcgtgggaaactccgcatctcctgcctcctccaagcttctaactgctgccgaggatgagaaaccgaggcagcagcagcagcacagcagcaaaaggtatcctctttcctgtactggccctcctactggggttggtagctccagaacgaaccctctttcaaatccaagatggaagagggtgcttctgaagattgggggcactgccctatgtggagcagctcatcaaaatgttgatcccaaggtgattatgctgatcgctagagaagttcaagtggcatgccatcatggtgtggaggtggcaatcgtggtaggagggcggaatatattctgcggtgacaattgggtagctgcaacaggcactgatcgagcctcaacgtacccaattggaatgatggcatcagtgatgaattcagtacttcttcaagcatcgctagaaaagataggtgtggagacacgagtccaaaccgcattgatgatgcaagaagttgcagaaccttacattaggcgtcgagccatacgccatcttgaaaaagggagagtggtcatctttggtgggattggtgtgggcattgggaatccattgttcacaacagatacagctgctgccttaagagcttcagagatcgtcatctttaacatgttggagcctggtaacatctcaagagcaatttgtggagatcaaataggcaccttagttgaccagtcaggaaggatcacataaaactaggaggatgaatggtagcagagctccaggacatgccgatactctgggtgggacatcactctggggggacatcctgaattctttgctcgtggatcttttccgtatagaaggaaaacatgttcatcagatggaagcgttcaccttgatttgcctgggatgcctattgtgtattatgcgttgtggtcgcaattgcccacattgagaaaagtattaccttgtaatgtctatttgtaatttgtctgtagattagtggaagggctcatgtaaagtgtttcacggtgcccagatcagaatgtagtgttgtaagttgtaatgctattatttgagtcgtagtgtttgaggtgtcacgttttgcacgattaatttgcctgtggctttccagcaatcaatctttttttttgttcaatgatcatacacgaatatatgctactgactaatgtagggatgttg

SEQ ID NO: 25270 - DNA, 2147 bp, Zea Mays
cgtgtctgggagcggagcccgcggtgtaaccctaacgccgccacgcgcggccatccatggcctcctgcgacgacgacttcgttctcctcggtgacgacgcacaccagccggcaactcccccacccccggcccccaccgcccagcaacccgcgccgccgccgccgccgccgccacaggcctcccatcccttcagcttcactgacgcggttgcgggggctgccgccggcgccggctccttcgcgcaggcccaggaggagagcaaccaccacgccgagcgcggcaagccggcgcaccacgccaagcggggcagggagcgcgccgaggagttcagcagcgatgggggcgagtactgttcctacatcaacagcagcggcagcggcggtggtgggaagaagggccgtggcggtggagggagctcgagcgtgtcagactaccgtaaggatcgggaggagtggacggacggcgcgatcagcagcctcctcgacgcctacacggaccgatttgagcagctcaaccggggaaacctgcggggtcgggactgggaggacgtggccggcgccgtgaccgacgggcagggcaagactaccggggccaagagcgtggagcaatgtaagaataagatcgacaatcttaagaaacgttacaaggtggagtgccagcggctctccagttcgggcgggggtgccatcagccactggccctggttcaaaaagatggagcagatcgtgggaaactccgcatctcctgcctcctccaagcttctaactgctgccgaggatgagaaaccgaggcagcagcagcagcacagcagcaaaaggtatcctctttcctgtactggccctcctactggggttggtagctccagaacgaaccctctttcaaatccaagatggaagagggtgcttctgaagattgggggcactgccctatgtggagcagctcatcaaaatgttgatcccaaggtgattatgctgatcgctagagaagttcaagtggcatgccatcatggtgtggaggtggcaatcgtggtaggagggcggaatatattctgcggtgacaattgggtagctgcaacaggcactgatcgagcctcaacgtacccaattgggaattgggaataatgatgagcatgcaacaaaaatatttgatgggtcctggactcctagagaaagactactagcaaattaatgatggcatcagtgatgaattcagtacttcttcaagcatcgctagaaaagataggtgtggagacacgagtccaaaccgcattgatgatgcaagaagttgcagaaccttacattaggcgtcgagccatacgccatcttgaaaaagggagagtggtcatctttggtgggattggtgtgggcattgggaatccattgttcacaacagatacagctgctgccttaagagcttcagagatcaacgcagatgttgtccttaaaggtattgttggtgatgatgagtatggctgtcctcctaggagcaacagtaatgcttcatttgagcacatctcctttagggagttagcagcaagaggaatcaccaaaatggacatgacagcagtaacatgttgtgaggagaacaacattcctgtcgtcatctttaacatgttggagcctggtaacatctcaagagcaatttgtggagatcaaataggcaccttagttgaccagtcaggaaggatcacataaaactaggaggatgaatggtagcagagctccaggacatgccgatactctgggtgggacatcactctggggggacatcctgaattctttgctcgtggatcttttccgtatagaaggaaaacatgttcatcagatggaagcgttcaccttgatttgcctgggatgcctattgtgtattatgcgttgtggtcgcaattgcccacattgagaaaagtattaccttgtaatgtctatttgtaatttgtctgtagattagtggaagggctcatgtaaagtgtttcacggtgcccagatcagaatgtagtgttgtaagttgtaatgctattatttgagtcgtagtgtttgaggtgtcacgttttgcacgattaatttgcctgtggctttccagcaatcaatctttttttttgttcaatgatcatacacgaatatatgctactgactaatgtagggatgttg

SEQ ID NO: 25271 - DNA, 2306 bp, Zea Mays
cgtgtctgggagcggagcccgcggtgtaaccctaacgccgccacgcgcggccatccatggcctcctgcgacgacgacttcgttctcctcggtgacgacgcacaccagccggcaactcccccacccccggcccccaccgcccagcaacccgcgccgccgccgccgccgccgccacaggcctcccatcccttcagcttcactgacgcggttgcgggggctgccgccggcgccggctccttcgcgcaggcccaggaggagagcaaccaccacgccgagcgcggcaagccggcgcaccacgccaagcggggcagggagcgcgccgaggagttcagcagcgatgggggcgagtactgttcctacatcaacagcagcggcagcggcggtggtgggaagaagggccgtggcggtggagggagctcgagcgtgtcagactaccgtaaggatcgggaggagtggacggacggcgcgatcagcagcctcctcgacgcctacacggaccgatttgagcagctcaaccggggaaacctgcggggtcgggactgggaggacgtggccggcgccgtgaccgacgggcagggcaagactaccggggccaagagcgtggagcaatgtaagaataagatcgacaatcttaagaaacgttacaaggtggagtgccagcggctctccagttcgggcgggggtgccatcagccactggccctggttcaaaaagatggagcagatcgtgggaaactccgcatctcctgcctcctccaagcttctaactgctgccgaggatgagaaaccgaggcagcagcagcagcacagcagcaaaaggtatcctctttcctgtactggccctcctactggggttggtagctccagaacgaaccctctttcaaatccaagatggaagagggtgcttctgaagattgggggcactgccctatgtggagcagctcatcaaaatgttgatcccaaggtgattatgctgatcgctagagaagttcaagtggcatgccatcatggtgtggaggtggcaatcgtggtaggagggcggaatatattctgcggtgacaattgggtagctgcaacaggcactgatcgagcctcaacgtacccaattggaatgatggcatcagtgatgaattcagtacttcttcaagcatcgctagaaaagataggtgtggagacacgagtccaaaccgcattgatgatgcaagaagttgcagaaccttacattaggcgtcgagccatacgccatcttgaaaaagggagagtggtcatctttggtgggattggtgtgggcattgggaatccattgttcacaacagatacagctgctgccttaagagcttcagagagtatgccattgcatcccgtccctaacgcctttttcattcttatggtttttccaatggacctgcacatggccaatgatttaaattagtttctatgaaagcctcagatgatgcagagaggaaactgactagctgtacttgctaaccagtcaacgcagatgttgtccttaaaggtattgttggtgatgatgagtatggctgtcctcctaggagcaacagtaatgcttcatttgagcacatctcctttagggagttagcagcaagaggaatcaccaaaatggacatgacagcagtaacatgttgtgaggagaacaacattcctgggcagaggtattagggcagtcccaaccatgaaactaccatgcagtttctacccctgtcatgtcagcaagacactacccatcatttcctcattcgtcatctttaacatgttggagcctggtaacatctcaagagcaatttgtggagatcaaataggcaccttagttgaccagtcaggaaggatcacataaaactaggaggatgaatggtagcagagctccaggacatgccgatactctgggtgggacatcactctggggggacatcctgaattctttgctcgtggatcttttccgtatagaaggaaaacatgttcatcagatggaagcgttcaccttgatttgcctgggatgcctattgtgtattatgcgttgtggtcgcaattgcccacattgagaaaagtattaccttgtaatgtctatttgtaatttgtctgtagattagtggaagggctcatgtaaagtgtttcacggtgcccagatcagaatgtagtgttgtaagttgtaatgctattatttgagtcgtagtgtttgaggtgtcacgttttgcacgattaatttgcctgtggctttccagcaatcaatctttttttttgttcaatgatcatacacgaatatatgctactgactaatgtagggatgttg

SEQ ID NO: 25272 - DNA, 2384 bp, Zea Mays
cgtgtctgggagcggagcccgcggtgtaaccctaacgccgccacgcgcggccatccatggcctcctgcgacgacgacttcgttctcctcggtgacgacgcacaccagccggcaactcccccacccccggcccccaccgcccagcaacccgcgccgccgccgccgccgccgccacaggcctcccatcccttcagcttcactgacgcggttgcgggggctgccgccggcgccggctccttcgcgcaggcccaggaggagagcaaccaccacgccgagcgcggcaagccggcgcaccacgccaagcggggcagggagcgcgccgaggagttcagcagcgatgggggcgagtactgttcctacatcaacagcagcggcagcggcggtggtgggaagaagggccgtggcggtggagggagctcgagcgtgtcagactaccgtaaggatcgggaggagtggacggacggcgcgatcagcagcctcctcgacgcctacacggaccgatttgagcagctcaaccggggaaacctgcggggtcgggactgggaggacgtggccggcgccgtgaccgacgggcagggcaagactaccggggccaagagcgtggagcaatgtaagaataagatcgacaatcttaagaaacgttacaaggtggagtgccagcggctctccagttcgggcgggggtgccatcagccactggccctggttcaaaaagatggagcagatcgtgggaaactccgcatctcctgcctcctccaagcttctaactgctgccgaggatgagaaaccgaggcagcagcagcagcacagcagcaaaaggtatcctctttcctgtactggccctcctactggggttggtagctccagaacgaaccctctttcaaatccaagatggaagagggtgcttctgaagattgggggcactgccctatgtggagcagctcatcaaaatgttgatcccaaggtgattatgctgatcgctagagaagttcaagtggcatgccatcatggtgtggaggtggcaatcgtggtaggagggcggaatatattctgcggtgacaattgggtagctgcaacaggcactgatcgagcctcaacgtacccaattgggaattgggaataatgatgagcatgcaacaaaaatatttgatgggtcctggactcctagagaaagactactagcaaattaatgatggcatcagtgatgaattcagtacttcttcaagcatcgctagaaaagataggtgtggagacacgagtccaaaccgcattgatgatgcaagaagttgcagaaccttacattaggcgtcgagccatacgccatcttgaaaaagggagagtggtcatctttggtgggattggtgtgggcattgggaatccattgttcacaacagatacagctgctgccttaagagcttcagagagtatgccattgcatcccgtccctaacgcctttttcattcttatggtttttccaatggacctgcacatggccaatgatttaaattagtttctatgaaagcctcagatgatgcagagaggaaactgactagctgtacttgctaaccagtcaacgcagatgttgtccttaaaggtattgttggtgatgatgagtatggctgtcctcctaggagcaacagtaatgcttcatttgagcacatctcctttagggagttagcagcaagaggaatcaccaaaatggacatgacagcagtaacatgttgtgaggagaacaacattcctgggcagaggtattagggcagtcccaaccatgaaactaccatgcagtttctacccctgtcatgtcagcaagacactacccatcatttcctcattcgtcatctttaacatgttggagcctggtaacatctcaagagcaatttgtggagatcaaataggcaccttagttgaccagtcaggaaggatcacataaaactaggaggatgaatggtagcagagctccaggacatgccgatactctgggtgggacatcactctggggggacatcctgaattctttgctcgtggatcttttccgtatagaaggaaaacatgttcatcagatggaagcgttcaccttgatttgcctgggatgcctattgtgtattatgcgttgtggtcgcaattgcccacattgagaaaagtattaccttgtaatgtctatttgtaatttgtctgtagattagtggaagggctcatgtaaagtgtttcacggtgcccagatcagaatgtagtgttgtaagttgtaatgctattatttgagtcgtagtgtttgaggtgtcacgttttgcacgattaatttgcctgtggctttccagcaatcaatctttttttttgttcaatgatcatacacgaatatatgctactgactaatgtagggatgttg

SEQ ID NO: 25273 - DNA, 1665 bp, Zea Mays
cgccgccgtgtctgggagcggagcccgcggtgtaaccctaacgccgccacgcgcggccatccatggcctcctgcgacgacgacttcgttctcctcggtgacgacgcacaccagccggcaactcccccacccccggcccccaccgcccagcaacccgcgccgccgccgccgccgccgccacaggcctcccatcccttcagcttcactgacgcggttgcgggggctgccgccggcgccggctccttcgcgcaggcccaggaggagagcaaccaccacgccgagcgcggcaagccggcgcaccacgccaagcggggcagggagcgcgccgaggagttcagcagcgatgggggcgagtactgttcctacatcaacagcagcggcagcggcggtggtgggaagaagggccgtggcggtggagggagctcgagcgtgtcagactaccgtaaggatcgggaggagtggacggacggcgcgatcagcagcctcctcgacgcctacacggaccgatttgagcagctcaaccggggaaacctgcggggtcgggactgggaggacgtggccggcgccgtgaccgacgggcagggcaagactaccggggccaagagcgtggagcaatgtaagaataagatcgacaatcttaagaaacgttacaaggtggagtgccagcggctctccagttcgggcgggggtgccatcagccactggccctggttcaaaaagatggagcagatcgtgggaaactccgcatctcctgcctcctccaagcttctaactgctgccgaggatgagaaaccgaggcagcagcagcagcacagcagcaaaaggtatcctctttcctgtactggccctcctactggggttggtagctccagaacgaaccctctttcaaatccaagatggaagagggtgcttctgaagattgggggcactgccctatgtggagcagctcatcaaaatgttgatcccaaggtgattatgctgatcgctagagaagttcaagtggcatgccatcatggtgtggaggtggcaatcgtggtaggagggcggaatatattctgcggtgacaattgggtagctgcaacaggcactgatcgagcctcaacgtacccaattggtcgtcatctttaacatgttggagcctggtaacatctcaagagcaatttgtggagatcaaataggcaccttagttgaccagtcaggaaggatcacataaaactaggaggatgaatggtagcagagctccaggacatgccgatactctgggtgggacatcactctggggggacatcctgaattctttgctcgtggatcttttccgtatagaaggaaaacatgttcatcagatggaagcgttcaccttgatttgcctgggatgcctattgtgtattatgcgttgtggtcgcaattgcccacattgagaaaagtattaccttgtaatgtctatttgtaatttgtctgtagattagtggaagggctcatgtaaagtgtttcacggtgcccagatcagaatgtagtgttgtaagttgtaatgctattatttgagtcgtagtgtttgaggtgtcacgttttgcacgattaatttgcctgtggctttccagcaatcaatctttttttttgttcaatgatcatacacgaatatatgctactgactaatgtagggatgttg

SEQ ID NO: 25274 - DNA, 1281 bp, Zea Mays
ccaagacgtcccaccccacatgcccgagtcgtcgaggcatactcctgcctggctccgacatccacgcacatctccatcttgcctcggcgttgtcctctcgccatgccgcagcacacgtccgcagcgacgtccatctcggcgccggcctcgcgcaccgtctatagctcccttctaggagttgtctcaccggcgatggctcccgactccgctcctcctctcagttctccctccacgtttcaccttctctcccttcctcttcgagcatcgtcctcctcgcctagatccggcagtcacgccacacactgtctctctgtctgtacatttggatctgttagatctgtgaatagaatattgccgtttctttttctgtggtttcctcgcagatgaaggatgtgattcttcctctttgttgggtccccacatttcctaccccacctactatcgctccttaaaatttgcaccatctgttgctgatcctaattgccaccgggctggttggttggttgcaagcagggaggggctgggagagcgcgacgtgcagtcgtctaccataacttcctggtaagcaatgccaccaccacgacctctccgtctatgcacgcttcctcttctgtttaatgttcttcgcgtcatctcattcttatgactgagtttgatagaatcgtgagatgtgtggtagcacatttggatatgtgaatagaatatttttcgtttatgtttctatggtttcttggcagatggaggcggatacattcacgatatgtgaatagaatatatgtctggcgagtaacaaaaccccacccacttacaagcattgatattctattttttacatttactggatgcgaagaaacaaatgtgctacatgcttagtagatccttgaaactcacgtggacatggtgaatgcgtctgcattctatagtcggtgtcaaagaaaacagggtcatttttagatgtaccaatatgtgtatgtggtatgtatagttcgtaacttatttgttttaaaatgttccacctttctggaaaaaatattctctctgtctataaaaaaatatatgattctgattttgagaatcttaatcaagttgacatggatggactaataatggaccagcaagttagcttgcttgtggtcgggcaagatgttttcaaatcaaaagctaaggtgggttcagtttgaacaaccctgacccatacctcttgcaaggatgcatatagcctgcttcagaacttgcacataaggtgacttctgctcatggatatcctgttagatacaagca

SEQ ID NO: 25275 - DNA, 3144 bp, Zea Mays
caccatttaacttgttgtctagaatctagatgtgtgtccctgtgggttgttatattgccctaattttatataaacaatatattatatgttggaaccagtaccactgcacagggaatatgcgtgggaggtgggaggctggggcttatgttcccggcggtggtgaggcttagacggcgtgctgttgcccttcttccctgggcgtgtgagcagcgtagagagagggagggactcctgctaaccttatcattaatcaagaggccaggctttatagccaaattctaacaacctgtgactaagccatataaactgagtaacaaagatcgtaaagactaggatgggtgctgccatggatgcggtagctacatgcatctcgcgctcacgtgcgcgccacccatcagccatggttgtgcttcttgtattggtaaacttggcccaccataacattatatgattttgtcagctgcattgtccaaacagactaatcatgcactacttgtacgttagagatttcccttgaatgatgtattttctgtactgaaggacgggcctgacgcagtggtgagaagctttcccactgagccaaaggtcctgtttccgatttagcttctttgcaaaaatgcagaggtaaggcttgccttggttattccttccctagaccccactcatgtgggagctgccagcactggatctgtccatgtattttctgtactaatgatctattgattgcatagcttattggcatgaaggtttactttttttgagagagaatatcagtgaggaattaaggacactttgtggtagaatcgtggttcttgtatttagggtagactggtagacattcggttagaactaactgatcaattcagttcttcgtttttttctgaaatatcatgacccagaaaattgctcttggtacccaaccaggcaaccattgtcaactcaggttcctgcagacaaaaaaataaagcaataaaaaatcacatgcgtgctggctaacacaactcgctggggctgctccacctgccacccaactgctgcactgtctggagatccaccgcctcacagctgcactgcctgcaggatcttctccaccgctgctgctggaatgagagaaaaaggggtcaggatccactgcctgttcttgatagtccgtggccacacagccaaacagatccaagcggagagggaggacgtgagggctggagagtcggactgccagaggaggcatggacgcacgggtgcattgcgtcgacaactctagatgaacaccgtttgcattttgagaaggataaggctttggctcgcagattccagccagtattggtgaatgagcctagccaggaggacgctgtcaagatattacttggtctgcgtgagaaatatgagacttaccataaatgcaaatacactttagaagggatcaatgcagcagtttacttgtcagcaagatacatccctgacaggcatcttcctgataaggcgattgatctgattgatgaagctggcagtagagctcggatggaatcatttaaaaggaagaaggaagaacaatgctccattctctccaagtcaccagacgaatattggcaagagattagagctgttcagagtacacatgaagtggcactggctaacaggttgaagtattctcttgatgagaatgacaaagatgatggtgttaatattgaagtcataggggacaacaagattgcttcgccatcgatgcctccaacttcagtcgatgaacctattctggttggttcagaggaaattgcaagagttacatcattgtggtcagggataccagtccagaagttgactgcagatgaaacaaaacttctagttggactagatgatgaacttagaaagcgtgtcataggtcaagacgatgctgttgtggccatatctagagctgtgaagcgatctcgtgttggcctgaatgatcctgacagacctattgcaacactactattctgtggtccaactggagttggaaaaactgaactcacaaaagcactagcagcgagttattttggatctgaatcagctatgattaggttagatatgagcgaatatatggagaggcatgctgtgagcaagcttataggctctcctccggggtacatgggatttggtgaaggtggaactttgactgaagcagtccggagaacaccattcactgtagtcttgcttgatgaaatagagaaagctcatccagatattttcaacattcttctccaagtatttgaagatggacacctgacagactcacaaggacgcagagtttccttcaaaaatacgttgattgtcatgacatcaaatgttggttcaacatcaatctcaagcggaaggaggagtataggtttctcaacacaaagggatacagaggagaccacctatgctgcgatgaaatcacttgtgatggaagagctgaaggcattttttcggcctgaattgctcaatagattggatgaagtggttgtattccaccctcttgaaaagacccagatgatggctattctcaacctaattctacaagaagtcaagagtagacttctagcccttgggattggcctagaggtatcagaatcaatgaagatcctgatttctcagcaagggtatgacagaagctatggggcacggccacttcgaagagccgttactcagctggttgaggatgttatcagtgaagcaattctctttggacagttcaagcctggtgacacgatattgatgggcactgatgccacagggaagccttgcttgagccgactcaatgatcagaccgtccaattgtccgacactgctccaacaatatgaacatcccagcaccctgtgtatatagttgcagattacacatttattctgtacatagaatccccatctcagcgtggacataatcttccagatgttggtttgtctccacaacattataatgtaaatcttatccttaaatccaattgtacatatttttattattaatgttagaccgtgttgcgtgtataggcctgaggtctagttcatgtgtagtgtatatattgtactctttttaatatttagctattctcatttatcatggtatgagactagctccaataaagatctctaaagagtcttgtaccctaaatttagaggatgaggtcg

SEQ ID NO: 25276 - DNA, 3598 bp, Zea Mays
acccgagcccgaccggcgaagaacgcccagcgcggtggcgtgcggtcggagcggtggaatcgaagccctcctctgaaaaatccctttcttcgcctatcgcaccgcatcgcgtttccgatcatctgtccccgcaccggttcccccatcctccccaccttccttgcgtgccgctgccgcttccacttcctcagttccctctcccactccactcgattctcgatcccaagcagcggcgcacggcgcaactaaccgatatatttttctatattcgattgcgtgccgctttacatccacgccttgaagaaggtaggagaagcatataattgaaagaagcatacaatcatacaccgaactgatcgaagaggggaaaaggggacaatcgggcgatggaggcgtgctgctgctcgtcctcatcggcgccgtcggcgtccatcctcgccgccgcgccggacgtagccctccgccgtcgtatccccgcggcggcgggagggaggacgccggcgcgcccgctgcgcgtctccgcggtgatgctggccaccgcggtcccgcggcggcgcggaccgggcgtcatcagggcggtgttcgagcggttcacggagcgggcggtgaaggcggtggtgttctcgcagcgggaggcgcgcgggatgggggacgacactgttgcgccgcaccacctgctgctgggcctcattgccgaggaccggaccctcgtggggttcctcggttccggcctccgcgtcgagcgcgcgcgagaggcgtgccgcgacgccctgggtaaggccgggcctgcgcaagcggccaccgggctggccacggacgtgccattctcggctgcaagcaagcgggtcttcgaggccgccgtcgagttctccaggaacattggctgcaacttcatctcgccggagcacattgctctcggcctcttcgacctggacgatcccaccaccaacagaatcctcaagaggagcagatccaagtcagctagcaaaacaggcacttaaacgtgtccaaggagagcttgccaaagatggcagagagccagtggggttatcttctttcaaagtacgtgagaggtctgccgcgggagctggcaagtctgcaattgtcaagtattcaaataaaaagaaagagaagagtgcactagctcagttttgtgtggatttgactatgcgagcaagtggaggattaattgatcctgttattggtcgcaaggaggagatcgaaagagtagttcagattatatgccggcgaacaaagaacaatcctattctgttgggtgaagcaggtgttggtaaaacagctattgctgagggcttagctctcaaaattgctaatggtgatgttcctatcttccttgtgggaaaacgtatattatcattggatgttgctctacttatggctggtgcaaaagaaaggggtgaactggaagccaggattactagtttacttcgtgaagtacgcaaagcaggtgatgttatgctattcatcgatgaggtccatactcttattggatctggaattgctgggagagggagtaaaggagctggccttgatattgccaatttgctgaagcctgcactctctagaggtgaattgcagtgcattgcgtcgacaactctagatgaacaccgtttgcattttgagaaggataaggctttggctcgcagattccagccagtattggtgaatgagcctagccaggaggacgctgtcaagatattacttggtctgcgtgagaaatatgagacttaccataaatgcaaatacactttagaagggatcaatgcagcagtttacttgtcagcaagatacatccctgacaggcatcttcctgataaggcgattgatctgattgatgaagctggcagtagagctcggatggaatcatttaaaaggaagaaggaagaacaatgctccattctctccaagtcaccagacgaatattggcaagagattagagctgttcagagtacacatgaagtggcactggctaacaggttgaagtattctcttgatgagaatgacaaagatgatggtgttaatattgaagtcataggggacaacaagattgcttcgccatcgatgcctccaacttcagtcgatgaacctattctggttggttcagaggaaattgcaagagttacatcattgtggtcagggataccagtccagaagttgactgcagatgaaacaaaacttctagttggactagatgatgaacttagaaagcgtgtcataggtcaagacgatgctgttgtggccatatctagagctgtgaagcgatctcgtgttggcctgaatgatcctgacagacctattgcaacactactattctgtggtccaactggagttggaaaaactgaactcacaaaagcactagcagcgagttattttggatctgtgggttatgccttccttcttgcatcattctcgcgttctgaaaagacatgttgcatggatcatgtcttgaaaaagttatttattcgatttgcaggaatcagctatgattaggttagatatgagcgaatatatggagaggcatgctgtgagcaagcttataggctctcctccggggtacatgggatttggtgaaggtggaactttgactgaagcagtccggagaacaccattcactgtagtcttgcttgatgaaatagagaaagctcatccagatattttcaacattcttctccaagtatttgaagatggacacctgacagactcacaaggacgcagagtttccttcaaaaatacgttgattgtcatgacatcaaatgttggttcaacatcaatctcaagcggaaggaggagtataggtttctcaacacaaagggatacagaggagaccacctatgctgcgatgaaatcacttgtgatggaagagctgaaggcattttttcggcctgaattgctcaatagattggatgaagtggttgtattccaccctcttgaaaagacccagatgatggctattctcaacctaattctacaagaagtcaagagtagacttctagcccttgggattggcctagaggtatcagaatcaatgaagatcctgatttctcagcaagggtatgacagaagctatggggcacggccacttcgaagagccgttactcagctggttgaggatgttatcagtgaagcaattctctttggacagttcaagcctggtgacacgatattgatgggcactgatgccacagggaagccttgcttgagccgactcaatgatcagaccgtccaattgtccgacactgctccaacaatatgaacatcccagcaccctgtgtatatagttgcagattacacatttattctgtacatagaatccccatctcagcgtggacataatcttccagatgttggtttgtctccacaacattataatgtaaatcttatccttaaatccaattgtacatatttttattattaatgttagaccgtgttgcgtgtataggcctgaggtctagttcatgtgtagtgtatatattgtactctttttaatatttagctattctcatttatcatggtatgagactagctccaataaagatctctaaagagtcttgtaccctaaatttagaggatgaggtcg

SEQ ID NO: 25277 - DNA, 3677 bp, Zea Mays
gacgcagccacggaacgcgtctcagtccacacacgcagacacccgttcggataggccccgcgctggcaggcgcgccgcgcgctccggacccgagcccgaccggcgaagaacgcccagcgcggtggcgtgcggtcggagcggtggaatcgaagccctcctctgaaaaatccctttcttcgcctatcgcaccgcatcgcgtttccgatcatctgtccccgcaccggttcccccatcctccccaccttccttgcgtgccgctgccgcttccacttcctcagttccctctcccactccactcgattctcgatcccaagcagcggcgcacggcgcaactaaccgatatatttttctatattcgattgcgtgccgctttacatccacgccttgaagaaggtaggagaagcatataattgaaagaagcatacaatcatacaccgaactgatcgaagaggggaaaaggggacaatcgggcgatggaggcgtgctgctgctcgtcctcatcggcgccgtcggcgtccatcctcgccgccgcgccggacgtagccctccgccgtcgtatccccgcggcggcgggagggaggacgccggcgcgcccgctgcgcgtctccgcggtgatgctggccaccgcggtcccgcggcggcgcggaccgggcgtcatcagggcggtgttcgagcggttcacggagcgggcggtgaaggcggtggtgttctcgcagcgggaggcgcgcgggatgggggacgacactgttgcgccgcaccacctgctgctgggcctcattgccgaggaccggaccctcgtggggttcctcggttccggcctccgcgtcgagcgcgcgcgagaggcgtgccgcgacgccctgggtaaggccgggcctgcgcaagcggccaccgggctggccacggacgtgccattctcggctgcaagcaagcgggtcttcgaggccgccgtcgagttctccaggaacattggctgcaacttcatctcgccggagcacattgctctcggcctcttcgacctggacgatcccaccaccaacagaatcctcaagagcttaggagcagatccaagtcagctagcaaaacaggcacttaaacgtgtccaaggagagcttgccaaagatggcagagagccagtggggttatcttctttcaaagtacgtgagaggtctgccgcgggagctggcaagtctgcaattgtcaagtattcaaataaaaagaaagagaagagtgcactagctcagttttgtgtggatttgactatgcgagcaagtggaggattaattgatcctgttattggtcgcaaggaggagatcgaaagagtagttcagattatatgccggcgaacaaagaacaatcctattctgttgggtgaagcaggtgttggtaaaacagctattgctgagggcttagctctcaaaattgctaatggtgatgttcctatcttccttgtgggaaaacgtatattatcattggatgttgctctacttatggctggtgcaaaagaaaggggtgaactggaagccaggattactagtttacttcgtgaagtgatgttatgctattcatcgatgaggtccatactcttattggatctggaattgctgggagagggagtaaaggagctggccttgatattgccaatttgctgaagcctgcactctctagaggtgaattgcagtgcattgcgtcgacaactctagatgaacaccgtttgcattttgagaaggataaggctttggctcgcagattccagccagtattggtgaatgagcctagccaggaggacgctgtcaagatattacttggtctgcgtgagaaatatgagacttaccataaatgcaaatacactttagaagggatcaatgcagcagtttacttgtcagcaagatacatccctgacaggcatcttcctgataaggcgattgatctgattgatgaagctggcagtagagctcggatggaatcatttaaaaggaagaaggaagaacaatgctccattctctccaagtcaccagacgaatattggcaagagattagagctgttcagagtacacatgaagtggcactggctaacaggttgaagtattctcttgatgagaatgacaaagatgatggtgttaatattgaagtcataggggacaacaagattgcttcgccatcgatgcctccaacttcagtcgatgaacctattctggttggttcagaggaaattgcaagagttacatcattgtggtcagggataccagtccagaagttgactgcagatgaaacaaaacttctagttggactagatgatgaacttagaaagcgtgtcataggtcaagacgatgctgttgtggccatatctagagctgtgaagcgatctcgtgttggcctgaatgatcctgacagacctattgcaacactactattctgtggtccaactggagttggaaaaactgaactcacaaaagcactagcagcgagttattttggatctgtgggttatgccttccttcttgcatcattctcgcgttctgaaaagacatgttgcatggatcatgtcttgaaaaagttatttattcgatttgcaggaatcagctatgattaggttagatatgagcgaatatatggagaggcatgctgtgagcaagcttataggctctcctccggggtacatgggatttggtgaaggtggaactttgactgaagcagtccggagaacaccattcactgtagtcttgcttgatgaaatagagaaagctcatccagatattttcaacattcttctccaagtatttgaagatggacacctgacagactcacaaggacgcagagtttccttcaaaaatacgttgattgtcatgacatcaaatgttggttcaacatcaatctcaagcggaaggaggagtataggtttctcaacacaaagggatacagaggagaccacctatgctgcgatgaaatcacttgtgatggaagagctgaaggcattttttcggcctgaattgctcaatagattggatgaagtggttgtattccaccctcttgaaaagacccagatgatggctattctcaacctaattctacaagaagtcaagagtagacttctagcccttgggattggcctagaggtatcagaatcaatgaagatcctgatttctcagcaagggtatgacagaagctatggggcacggccacttcgaagagccgttactcagctggttgaggatgttatcagtgaagcaattctctttggacagttcaagcctggtgacacgatattgatgggcactgatgccacagggaagccttgcttgagccgactcaatgatcagaccgtccaattgtccgacactgctccaacaatatgaacatcccagcaccctgtgtatatagttgcagattacacatttattctgtacatagaatccccatctcagcgtggacataatcttccagatgttggtttgtctccacaacattataatgtaaatcttatccttaaatccaattgtacatatttttattattaatgttagaccgtgttgcgtgtataggcctgaggtctagttcatgtgtagtgtatatattgtactctttttaatatttagctattctcatttatcatggtatgagactagctccaataaagatctctaaagagtcttgtaccctaaatttagaggatgaggtcg

SEQ ID NO: 25278 - DNA, 3659 bp, Zea Mays
gacgcagccacggaacgcgtctcagtccacacacgcagacacccgttcggataggccccgcgctggcaggcgcgccgcgcgctccggacccgagcccgaccggcgaagaacgcccagcgcggtggcgtgcggtcggagcggtggaatcgaagccctcctctgaaaaatccctttcttcgcctatcgcaccgcatcgcgtttccgatcatctgtccccgcaccggttcccccatcctccccaccttccttgcgtgccgctgccgcttccacttcctcagttccctctcccactccactcgattctcgatcccaagcagcggcgcacggcgcaactaaccgatatatttttctatattcgattgcgtgccgctttacatccacgccttgaagaaggtaggagaagcatataattgaaagaagcatacaatcatacaccgaactgatcgaagaggggaaaaggggacaatcgggcgatggaggcgtgctgctgctcgtcctcatcggcgccgtcggcgtccatcctcgccgccgcgccggacgtagccctccgccgtcgtatccccgcggcggcgggagggaggacgccggcgcgcccgctgcgcgtctccgcggtgatgctggccaccgcggtcccgcggcggcgcggaccgggcgtcatcagggcggtgttcgagcggttcacggagcgggcggtgaaggcggtggtgttctcgcagcgggaggcgcgcgggatgggggacgacactgttgcgccgcaccacctgctgctgggcctcattgccgaggaccggaccctcgtggggttcctcggttccggcctccgcgtcgagcgcgcgcgagaggcgtgccgcgacgccctgggtaaggccgggcctgcgcaagcggccaccgggctggccacggacgtgccattctcggctgcaagcaagcgggtcttcgaggccgccgtcgagttctccaggaacattggctgcaacttcatctcgccggagcacattgctctcggcctcttcgacctggacgatcccaccaccaacagaatcctcaagagcttaggagcagatccaagtcagctagcaaaacaggcacttaaacgtgtccaaggagagcttgccaaagatggcagagagccagtggggttatcttctttcaaagtacgtgagaggtctgccgcgggagctggcaagtctgcaattgtcaagtattcaaataaaaagaaagagaagagtgcactagctcagttttgtgtggatttgactatgcgagcaagtggaggattaattgatcctgttattggtcgcaaggaggagatcgaaagagtagttcagattatatgccggcgaacaaagaacaatcctattctgttgggtgaagcaggtgttggtaaaacagctattgctgagggcttagctctcaaaattgctaatggtgatgttcctatcttccttgtgggaaaacgtatattatcattggatgttgctctacttatggctggtgcaaaagaaaggggtgaactggaagccaggattactagtttacttcgtgaagtacgcaaagcaggtgatgttatgctattcatcgatgaggtccatactcttattggatctggaattgctgggagagggagtaaaggagctggccttgatattgccaatttgctgaagcctgcactctctagaggtgaattgcagtgcattgcgtcgacaactctagatgaacaccgtttgcattttgagaaggataaggctttggctcgcagattccagccagtattggtgaatgagcctagccaggaggacgctgtcaagatattacttggtctgcgtgagaaatatgagacttaccataaatgcaaatacactttagaagggatcaatgcagcagtttacttgtcagcaagatacatccctgacaggcatcttcctgataaggcgattgatctgattgatgaagctggcagtagagctcggatggaatcatttaaaaggaagaaggaagaacaatgctccattctctccaagtcaccagacgaatattggcaagagattagagctgttcagagtacacatgaagtggcactggctaacaggttgaagtattctcttgatgagaatgacaaagatgatggtgttaatattgaagtcataggggacaacaagattgcttcgccatcgatgcctccaacttcagtcgatgaacctattctggttggttcagaggaaattgcaagagttacatcattgtggtcagggataccagtccagaagttgactgcagatgaaacaaaacttctagttggactagatgatgaacttagaaagcgtgtcataggtcaagacgatgctgttgtggccatatctagagctgtgaagcgatctcgtgttggcctgaatgatcctgacagacctattgcaacactactattctgtggtccaactggagttggaaaaactgaactcacaaaagcactagcagcgagttattttggatctgtgggttatgccttccttcttgcatcattctcgcgttctgaaaagacatgttgcatggatcatgaatcagctatgattaggttagatatgagcgaatatatggagaggcatgctgtgagcaagcttataggctctcctccggggtacatgggatttggtgaaggtggaactttgactgaagcagtccggagaacaccattcactgtagtcttgcttgatgaaatagagaaagctcatccagatattttcaacattcttctccaagtatttgaagatggacacctgacagactcacaaggacgcagagtttccttcaaaaatacgttgattgtcatgacatcaaatgttggttcaacatcaatctcaagcggaaggaggagtataggtttctcaacacaaagggatacagaggagaccacctatgctgcgatgaaatcacttgtgatggaagagctgaaggcattttttcggcctgaattgctcaatagattggatgaagtggttgtattccaccctcttgaaaagacccagatgatggctattctcaacctaattctacaagaagtcaagagtagacttctagcccttgggattggcctagaggtatcagaatcaatgaagatcctgatttctcagcaagggtatgacagaagctatggggcacggccacttcgaagagccgttactcagctggttgaggatgttatcagtgaagcaattctctttggacagttcaagcctggtgacacgatattgatgggcactgatgccacagggaagccttgcttgagccgactcaatgatcagaccgtccaattgtccgacactgctccaacaatatgaacatcccagcaccctgtgtatatagttgcagattacacatttattctgtacatagaatccccatctcagcgtggacataatcttccagatgttggtttgtctccacaacattataatgtaaatcttatccttaaatccaattgtacatatttttattattaatgttagaccgtgttgcgtgtataggcctgaggtctagttcatgtgtagtgtatatattgtactctttttaatatttagctattctcatttatcatggtatgagactagctccaataaagatctctaaagagtcttgtaccctaaatttagaggatgaggtcg

SEQ ID NO: 25279 - DNA, 381 bp, Zea Mays
tgcggatataaagaccaggtctttccccctcccacctctacggtgctggccgagaaacataatcacgttcttgttcccaggaaaaaaaacagggaggggagcaccgtcgcctggggagagagaccgtgggagcaggaattgtcgttcctgtttcttggaattcttctcccgtttaggcgttcatccctctttctctcctggcgacgaagacgaccgacgccctacgccaggtgccatgttccgtcgggtccatggtgggaagctgcggcaagcaagtcttccgtcgcgaacccgctcggccaacgcttaaccatccgtgaggacacgtgtcatctgaagagcaagttggtacctggaatctcaagtccgaggcaagttgtg

SEQ ID NO: 25280 - DNA, 384 bp, Zea Mays
tgcggatataaagaccaggtctttccccctcccacctctacggtgctggccgagaaacataatcacgttcttgttcccaggaaaaaaaacagggaggggagcaccgtcgcctggggagagagaccgtgggagcaggaattgtcgttcctgtttcttggaattcttctcccgtttaggcgttcatccctctttctctcctggcgacgaagacgaccgacgccctacgccaggtgccatgttccgtcgggtccatggtgggaagctgcggcaagcaagtcttccgtcgcgaacccgctcggccaacgcttaaccatccgcagtgaggacacgtgtcatctgaagagcaagttggtacctggaatctcaagtccgaggcaagttgtg

SEQ ID NO: 25281 - DNA, 3160 bp, Zea Mays
ccccgtccgccgatcgagtcctcgaaccctcatcgcgcacgtataaaccggggcaaccggccagccacagacacagcacaacccccgtccgccgatcgagtcctcgaaccctcgtcgcgcacgtataaaccggggcaaccggggacgcggacctcttcatctccgttcccgtcgccggcgacgctggtctctaggtgtcaggccgcgcgagccctagcatagcagctgtagtagtgctagactgctagtagtttagcagggcgctccgcgcgtcagttccaccagaaacagaaaggcaaattcggcttcgcttttacgcccgcttgatttgcctcttccaccctcttccaccagaaggcgggcggccgagcgaccaaaagtcaaaaggaggattggcccacggccacggccgagagcggcaggcgggcagggtgaggtgaggagaggccatcagggccgagagaccatggcacagcatatatacgccaccggctgcggccgctgcgggtgcgcccgccccatcatccggacactactgcccgcgctgacccaccatctcgcctcctcgtctctgttgcggcgccggaaggctcccatgggcgccagcgatcacctgggcctggcggcggtggccgccgccaagccgcggaatggcaggacgtgcatggccgtgctgggcgagccactgccggctcttgacgaccccggcatcctcgtccaccccagcgccgacttcgccgcccaggcgctcgtctcgtccacgaaacagtaccgagatatgtaccaaaagtcgatcgacgacccagctggtttctggtcagaaatcgcagatgagttctactggaagcagaagtggagccctgataatgtttgcgctgagaaccttgacgtgaccaaggggccgatcatgattgaatggtttaaggggggaaagaccaacatatgctacaatgcagtggaccgcaatgtggaggcagggaatggggacaagatcgccatgtactgggaggggaatgagcccagtcaggatgggaagctcacctactctgaactgctggaaaaggtttgccagctgtcaaattacttgaaaagcgtcggcgtacgaaaaggtgatgccgtggtgatctacctaccaatgttgatggagctgccgattgcaatgcttgcttgtgcccgcattggtgctgttcactcggttgtgtttgctggcttctcagcagatgcactggcccaacgagtcattgattgcaagcctaaggttgttattacctgcaatgctgtgaaaagggggatgaaaatcatccatctcaaagatatagtagatgcatctctggatcaaagtgcaaagaatggagttgatgtaggcatttgcttgacatatgaaaatcagtccgctctgaataaagtagacactcgatggaaaacaggaagagatgtctggtggcaggatgttgtgcctgatttcccaactaaatgcgatgtggaatgggttgatgcagaggatccactgtttcttttgtacacaagtggcagcacaggaaagccaaagggtgtgttgcatacaactgggggatatatggtctactctgctacaacatttaagcatgcatttgactacaaaccaacagacatatactggtgcactgcagattgtggctggattactggacatagttatgtgacatatggtccactattgaatggagccacagttcttgttttcgaaggggccccaaattaccctgatcctggccgctgttgggacattgttgataaatatggagtgacaatattttatacagcaccaacacttatacgctcacttatgcgtgatggtactgagtatgttgctcggtactctcgcaagtctctccgagtacttggaagtgtgggtgagccaatcaaccccaccgcatggaggtggttgtatgatgttattggtgactcacgatgccccatatcagatacttggtggcagactgaaaccgggggattcatgatcactcctttacctggtgcttggcctcaaaagccaggatcagcaacgtttcctttcttcggtgtgcagccagtcattgttgacgagaaaggtcgggaaatggaaggagaatgcagtggatatctttgcataaagaaatcatggcctggggctttccggactctgtatggagataaagagagatatgagacgacatacttcaaaccatttgctggatattatttctcgggcgatggctgcagcagggataaagatggctaccactggctgactggaagagttgatgatgttatcaatgttagtggacaccggattgggacagcggaagttgagtctgctctggtttcacatccaaaatgtgctgaggctgctgttgttggtattgatcatgaggttaaaggccagggaatatatgcttttgtgactttggtggatggtgttccctacagcgatgatctacggaaaagcctcgttacgacggtccgcagtcagattggtgcgtttgctgctcctgacaagatccattgggcacctgggctccctaagacacgaagtgggaagatcatgcgaagaatcttaagaaaaatcgcatccaggcaactagatgagctcggcgacacgagcacgcttgctgaccctggtgttgtggaccagctgattgcactcagtgacagctaatctatcggctatgtgggagggggtgagacatgatcactgcctgcactatacttatgcaaaattcagctttatgatgcgaggtctgttgggcccagcgttctcttaattgcttcggtgtcatggggatgccaacaaaagagagatgctgcgaacttggggagatgcggacatatgcggggattcagccatggacattgaaggacaacgtgtttactacacctctttgttcgctgttcaaagcatgagcaccatcttagaaacattggaatttagggatctacatgagaattgagctgcttcggtcgaatttctgcggaggcagctgggatgtgtcccaaactagacacggtcggtaccaatactccttgaaccaatggggcacgggaatttggcagagttccgctcccaacttcggagcggattctacgtatctctaccaaacacgatacaattgtattttggaattcctcgtatatggacgag

SEQ ID NO: 25282 - DNA, 3137 bp, Zea Mays
ctcgaaccctcgtcgcgcacgtataaaccggggcaaccggggacgcggacctcttcatctccgttcccgtcgccggcgacgctggtctctaggtgtcaggccgcgcgagccctagcatagcagctgtagtagtgctagactgctagtagtttagcagggcgctccgcgcgtcagttccaccagaaacagaaaggcaaattcggcttcgcttttacgcccgcttgatttgcctcttccaccctcttccaccagaaggcgggcggccgagcgaccaaaagtcaaaaggaggattggcccacggccacggccgagagcggcaggcgggcagggtgaggtgaggagaggccatcagggccgagagaccatggcacagcatatatacgccaccggctgcggccgctgcgggtgcgcccgccccatcatccggacactactgcccgcgctgacccaccatctcgcctcctcgtctctgttgcggcgccggaaggctcccatgggcgccagcgatcacctgggcctggcggcggtggccgccgccaagccgcggaatggcaggacgtgcatggccgtgctgggcgagccactgccggctcttgacgaccccggcatcctcgtccaccccagcgccgacttcgccgcccaggcgctcgtctcgtccacgaaacagtaccgagatatgtaccaaaagtcgatcgacgacccagctggtttctggtcagaaatcgcagatgagttctactggaagcagaagtggagccctgataatgtttgcgctgagaaccttgacgtgaccaaggggccgatcatgattgaatggtttaaggggggaaagaccaacatatgctacaatgcagtggaccgcaatgtggaggcagggaatggggacaagatcgccatgtactgggaggggaatgagcccagtcaggatgggaagctcacctactctgaactgctggaaaaggtttgccagctgtcaaattacttgaaaagcgtcggcgtacgaaaaggtgatgccgtggtgatctacctaccaatgttgatggagctgccgattgcaatgcttgcttgtgcccgcattggtgctgttcactcggttgtgtttgctggcttctcagcagatgcactggcccaacgagtcattgattgcaagcctaaggttgttattacctgcaatgctgtgaaaagggggatgaaaatcatccatctcaaagatatagtagatgcatctctggatcaaagtgcaaagaatggagttgatgtaggcatttgcttgacatatgaaaatcagtccgctctgaataaagtagacactcgatggaaaacaggaagagatgtctggtggcaggatgttgtgcctgatttcccaactaaatgcgatgtggaatgggttgatgcagaggatccactgtttcttttgtacacaagtggcagcacaggaaagccaaagggtgtgttgcatacaactgggggatatatggtctactctgctacaacatttaagcatgcatttgactacaaaccaacagacatatactgattgtggctggattactggacatagttatgtgacatatggtccactattgaatggagccacagttcttgttttcgaaggggccccaaattaccctgatcctggccgctgttgggacattgttgataaatatggagtgacaatattttatacagcaccaacacttatacgctcacttatgcgtgatggtactgagtatgttgctcggtactctcgcaagtctctccgagtacttggaagtgtgggtgagccaatcaaccccaccgcatggaggtggttgtatgatgttattggtgactcacgatgccccatatcagatacttggtggcagactgaaaccgggggattcatgatcactcctttacctggtgcttggcctcaaaagccaggatcagcaacgtttcctttcttcggtgtgcagccagtcattgttgacgagaaaggtcgggaaatggaaggagaatgcagtggatatctttgcataaagaaatcatggcctggggctttccggactctgtatggagataaagagagatatgagacgacatacttcaaaccatttgctggatattatttctcgggcgatggctgcagcagggataaagatggctaccactggctgactggaagagttgatgatgttatcaatgttagtggacaccggattgggacagcggaagttgagtctgctctggtttcacatccaaaatgtgctgaggctgctgttgttggtattgatcatgaggttaaaggccagggaatatatgcttttgtgactttggtggatggtgttccctacagcgatgatctacggaaaagcctcgttacgacggtccgcagtcagattggtgcgtttgctgctcctgacaagatccattgggcacctgggctccctaagacacgaagtgggaagatcatgcgaagaatcttaagaaaaatcgcatccaggcaactagatgagctcggcgacacgagcacgcttgctgaccctggtgttgtggaccagctgattgcactcagtgacagctaatctatcggctatgtgggagggggtgagacatgatcactgcctgcactatacttatgcaaaattcagctttatgatgcgaggtctgttgggcccagcgttctcttaattgcttcggtgtcatggggatgccaacaaaagagagatgctgcgaacttggggagatgcggacatatgcggggtgcgtctgtaaattgttggatcgcagtcactgatagttattgtacattggtaaataaggagatgaagtgtatatgcgagttttggctaaaatgtttaatgatagatctcgcattttatggttacgtacaggattcagccatggacattgaaggacaacgtgtttactacacctctttgttcgctgttcaaagcatgagcaccatcttagaaacattggaatttagggatctacatgagaattgagctgcttcggtcgaatttctgcggaggcagctgggatgtgtcccaaactagacacggtcggtaccaatactccttgaaccaatggggcacgggaatttggcagagttccgctcccaacttcggagcggattctacgtatctctaccaaac

SEQ ID NO: 25283 - DNA, 3021 bp, Zea Mays
cgccgatcgagtcctcgaaccctcgtcgcgcacgtataaaccggggcaaccggggacgcggacctcttcatctccgttcccgtcgccggcgacgctggtctctaggtgtcaggccgcgcgagccctagcatagcagctgtagtagtgctagactgctagtagtttagcagggcgctccgcgcgtcagttccaccagaaacagaaaggcaaattcggcttcgcttttacgcccgcttgatttgcctcttccaccctcttccaccagaaggcgggcggccgagcgaccaaaagtcaaaaggaggattggcccacggccacggccgagagcggcaggcgggcagggtgaggtgaggagaggccatcagggccgagagaccatggcacagcatatatacgccaccggctgcggccgctgcgggtgcgcccgccccatcatccggacactactgcccgcgctgacccaccatctcgcctcctcgtctctgttgcggcgccggaaggctcccatgggcgccagcgatcacctgggcctggcggcggtggccgccgccaagccgcggaatggcaggacgtgcatggccgtgctgggcgagccactgccggctcttgacgaccccggcatcctcgtccaccccagcgccgacttcgccgcccaggcgctcgtctcgtccacgaaacagtaccgagatatgtaccaaaagtcgatcgacgacccagctggtttctggtcagaaatcgcagatgagttctactggaagcagaagtggagccctgataatgtttgcgctgagaaccttgacgtgaccaaggggccgatcatgattgaatggtttaaggggggaaagaccaacatatgctacaatgcagtggaccgcaatgtggaggcagggaatggggacaagatcgccatgtactgggaggggaatgagcccagtcaggatgggaagctcacctactctgaactgctggaaaagctgtcaaattacttgaaaagcgtcggcgtacgaaaaggtgatgccgtggtgatctacctaccaatgttgatggagctgccgattgcaatgcttgcttgtgcccgcattggtgctgttcactcggttgtgtttgctggcttctcagcagatgcactggcccaacgagtcattgattgcaagcctaaggttgttattacctgcaatgctgtgaaaagggggatgaaaatcatccatctcaaagatatagtagatgcatctctggatcaaagtgcaaagaatggagttgatgtaggcatttgcttgacatatgaaaatcagtccgctctgaataaagtagacactcgatggaaaacaggaagagatgtctggtggcaggatgttgtgcctgatttcccaactaaatgcgatgtggaatgggttgatgcagaggatccactgtttcttttgtacacaagtggcagcacaggaaagccaaagggtgtgttgcatacaactgggggatatatggtctactctgctacaacatttaagcatgcatttgactacaaaccaacagacatatactggtgcactgcagattgtggctggattactggacatagttatgtgacatatggtccactattgaatggagccacagttcttgttttcgaaggggccccaaattaccctgatcctggccgctgttgggacattgttgataaatatggagtgacaatattttatacagcaccaacacttatacgctcacttatgcgtgatggtactgagtatgttgctcggtactctcgcaagtctctccgagtacttggaagtgtgggtgagccaatcaaccccaccgcatggaggtggttgtatgatgttattggtgactcacgatgccccatatcagatacttggtggcagactgaaaccgggggattcatgatcactcctttacctggtgcttggcctcaaaagccaggatcagcaacgtttcctttcttcggtgtgcagccagtcattgttgacgagaaaggtcgggaaatggaaggagaatgcagtggatatctttgcataaagaaatcatggcctggggctttccggactctgtatggagataaagagagatatgagacgacatacttcaaaccatttgctggatattatttctcgggcgatggctgcagcagggataaagatggctaccactggctgactggaagagttgatgatgttatcaatgttagtggacaccggattgggacagcggaagttgagtctgctctggtttcacatccaaaatgtgctgaggctgctgttgttggtattgatcatgaggttaaaggccagggaatatatgcttttgtgactttggtggatggtgttccctacagcgatgatctacggaaaagcctcgttacgacggtccgcagtcagattggtgcgtttgctgctcctgacaagatccattgggcacctgggctccctaagacacgaagtgggaagatcatgcgaagaatcttaagaaaaatcgcatccaggcaactagatgagctcggcgacacgagcacgcttgctgaccctggtgttgtggaccagctgattgcactcagtgacagctaatctatcggctatgtgggagggggtgagacatgatcactgcctgcactatacttatgcaaaattcagctttatgatgcgaggtctgttgggcccagcgttctcttaattgcttcggtgtcatggggatgccaacaaaagagagatgctgcgaacttggggagatgcggacatatgcggggattcagccatggacattgaaggacaacgtgtttactacacctctttgttcgctgttcaaagcatgagcaccatcttagaaacattggaatttagggatctacatgagaattgagctgcttcggtcgaatttctgcggaggcagctgggatgtgtcccaaactagacacggtcggtaccaatactccttgaaccaatggggcacgggaatttggcagagttccgctcccaacttcggagcggattctacgtatctctaccaaac

SEQ ID NO: 25284 - DNA, 2885 bp, Zea Mays
caacccccgtccgccgatcgagtcctcgaaccctcgtcgcgcacgtataaaccggggcaaccggggacgcggacctcttcatctccgttcccgtcgccggcgacgctggtctctaggtgtcaggccgcgcgagccctagcatagcagctgtagtagtgctagactgctagtagtttagcagggcgctccgcgcgtcagttccaccagaaacagaaaggcaaattcggcttcgcttttacgcccgcttgatttgcctcttccaccctcttccaccagaaggcgggcggccgagcgaccaaaagtcaaaaggaggattggcccacggccacggccgagagcggcaggcgggcagggtgaggtgaggagaggccatcagggccgagagaccatggcacagcatatatacgccaccggctgcggccgctgcgggtgcgcccgccccatcatccggacactactgcccgcgctgacccaccatctcgcctcctcgtctctgttgcggcgccggaaggctcccatgggcgccagcgatcacctgggcctggcggcggtggccgccgccaagccgcggaatggcaggacgtgcatggccgtgctgggcgagccactgccggctcttgacgaccccggcatcctcgtccaccccagcgccgacttcgccgcccaggcgctcgtctcgtccacgaaacagtaccgagatatgtaccaaaagtcgatcgacgacccagctggtttctggtcagaaatcgcagatgagttctactggaagcagaagtggagccctgataatgtttgcgctgagaaccttgacgtgaccaaggggccgatcatgattgaatggtttaaggggggaaagaccaacatatgctacaatgcagtggaccgcaatgtggaggcagggaatggggacaagatcgccatgtactgggaggggaatgagcccagtcaggatgggaagctcacctactctgaactgctggaaaaggtttgccagctgtcaaattacttgaaaagcgtcggcgtacgaaaaggtgatgccgtggtgatctacctaccaatgttgatggagctgccgattgcaatgcttgcttgtgcccgcattggtgctgttcactcggttgtgtttgctggcttctcagcagatgcactggcccaacgagtcattgattgcaagcctaaggttgttattacctgcaatgctgtgaaaagggggatgaaaatcatccatctcaaagatatagtagatgcatctctggatcaaagtgcaaagaatggagttgatgtaggcatttgcttgacatatgaaaatcagtccgctctgaataaagtagacactcgatggaaaacaggaagagatgtctggtggcaggatgttgtgcctgatttcccaactaaatgcgatgtggaatgggttgatgcagaggatccactgtttcttttgtacacaagtggcagcacaggaaagccaaagggtgtgttgcatacaactgggggatatatggtctactctgctacaacatttaagcatgcatttgactacaaaccaacagacatatactggtgcactgcagattgtggctggattactggacatagttatgtgacatatggtccactattgaatggagccacagttcttgttttcgaaggggccccaaattaccctgatcctggccgctgttgggacattgttgataaatatggagtgacaatattttatacagcaccaacacttatacgctcacttatgcgtgatggtactgagtatgttgctcggtactctcgcaagtctctccgagtacttggaagtgtgggtgagccaatcaaccccaccgcatggaggtggttgtatgatgttattggtgactcacgatgccccatatcagatacttggtggcagactgaaaccgggggattcatgatcactcctttacctggtgcttggcctcaaaagccaggatcagcaacgtttcctttcttcggtgtgcagccagtcattgttgacgagaaaggtcgggaaatggaaggagaatgcagtggatatctttgcataaagaaatcatggcctggggctttccggactctgtatggagataaagagagatatgagacgacatacttcaaaccatttgctggatattatttctcgggcgatggctgcagcagggataaagatggctaccactggctgactggaagagttgatgatgttatcaatgttagtggacaccggattgggacagcggaagttgagtctgctctggtttcacatccaaaatgtgctgaggctgctgttgttggtattgatcatgaggttaaaggccagggaatatatgcttttgtgactttggtggatggtgttccctacagcgatgatctacggaaaagcctcgttacgacggtccgcagtcagattggtgcgtttgctgctcctgacaagatccattgggcacctgggctccctaagacacgaagtgggaagatcatgcgaagaatcttaagaaaaatcgcatccaggcaactagatgagctcggcgacacgagcacgcttgctgaccctggtgttgtggaccagctgattgcactcagtgacagctaatctatcggctatgtgggagggggattcagccatggacattgaaggacaacgtgtttactacacctctttgttcgctgttcaaagcatgagcaccatcttagaaacattggaatttagggatctacatgagaattgagctgcttcggtcgaatttctgcggaggcagctgggatgtgtcccaaactagacacggtcggtaccaatactccttgaaccaatggggcacgggaatttggcagagttccgctcccaacttcggagcggattctacgtatctctaccaaac

SEQ ID NO: 25285 - DNA, 3102 bp, Zea Mays
cacagacacagcacaacccccgtccgccgatcgagtcctcgaaccctcgtcgcgcacgtataaaccggggcaaccggggacgcggacctcttcatctccgttcccgtcgccggcgacgctggtctctaggtgtcaggccgcgcgagccctagcatagcagctgtagtagtgctagactgctagtagtttagcagggcgctccgcgcgtcagttccaccagaaacagaaaggcaaattcggcttcgcttttacgcccgcttgatttgcctcttccaccctcttccaccagaaggcgggcggccgagcgaccaaaagtcaaaaggaggattggcccacggccacggccgagagcggcaggcgggcagggtgaggtgaggagaggccatcagggccgagagaccatggcacagcatatatacgccaccggctgcggccgctgcgggtgcgcccgccccatcatccggacactactgcccgcgctgacccaccatctcgcctcctcgtctctgttgcggcgccggaaggctcccatgggcgccagcgatcacctgggcctggcggcggtggccgccgccaagccgcggaatggcaggacgtgcatggccgtgctgggcgagccactgccggctcttgacgaccccggcatcctcgtccaccccagcgccgacttcgccgcccaggcgctcgtctcgtccacgaaacagtaccgagatatgtaccaaaagtcgatcgacgacccagctggtttctggtcagaaatcgcagatgagttctactggaagcagaagtggagccctgataatgtttgcgctgagaaccttgacgtgaccaaggggccgatcatgattgaatggtttaaggggggaaagaccaacatatgctacaatgcagtggaccgcaatgtggaggcagggaatggggacaagatcgccatgtactgggaggggaatgagcccagtcaggatgggaagctcacctactctgaactgctggaaaaggtttgccagctgtcaaattacttgaaaagcgtcggcgtacgaaaaggtgatgccgtggtgatctacctaccaatgttgatggagctgccgattgcaatgcttgcttgtgcccgcattggtgctgttcactcggttgtgtttgctggcttctcagcagatgcactggcccaacgagtcattgattgcaagcctaaggttgttattacctgcaatgctgtgaaaagggggatgaaaatcatccatctcaaagatatagtagatgcatctctggatcaaagtgcaaagaatggagttgatgtaggatgttgtgcctgatttcccaactaaatgcgatgtggaatgggttgatgcagaggatccactgtttcttttgtacacaagtggcagcacaggaaagccaaagggtgtgttgcatacaactgggggatatatggtctactctgctacaacatttaagcatgcatttgactacaaaccaacagacatatactggtgcactgcagattgtggctggattactggacatagttatgtgacatatggtccactattgaatggagccacagttcttgttttcgaaggggccccaaattaccctgatcctggccgctgttgggacattgttgataaatatggagtgacaatattttatacagcaccaacacttatacgctcacttatgcgtgatggtactgagtatgttgctcggtactctcgcaagtctctccgagtacttggaagtgtgggtgagccaatcaaccccaccgcatggaggtggttgtatgatgttattggtgactcacgatgccccatatcagatacttggtggcagactgaaaccgggggattcatgatcactcctttacctggtgcttggcctcaaaagccaggatcagcaacgtttcctttcttcggtgtgcagccagtcattgttgacgagaaaggtcgggaaatggaaggagaatgcagtggatatctttgcataaagaaatcatggcctggggctttccggactctgtatggagataaagagagatatgagacgacatacttcaaaccatttgctggatattatttctcgggcgatggctgcagcagggataaagatggctaccactggctgactggaagagttgatgatgttatcaatgttagtggacaccggattgggacagcggaagttgagtctgctctggtttcacatccaaaatgtgctgaggctgctgttgttggtattgatcatgaggttaaaggccagggaatatatgcttttgtgactttggtggatggtgttccctacagcgatgatctacggaaaagcctcgttacgacggtccgcagtcagattggtgcgtttgctgctcctgacaagatccattgggcacctgggctccctaagacacgaagtgggaagatcatgcgaagaatcttaagaaaaatcgcatccaggcaactagatgagctcggcgacacgagcacgcttgctgaccctggtgttgtggaccagctgattgcactcagtgacagctaatctatcggctatgtgggagggggtgagacatgatcactgcctgcactatacttatgcaaaattcagctttatgatgcgaggtctgttgggcccagcgttctcttaattgcttcggtgtcatggggatgccaacaaaagagagatgctgcgaacttggggagatgcggacatatgcggggtgcgtctgtaaattgttggatcgcagtcactgatagttattgtacattggtaaataaggagatgaagtgtatatgcgagttttggctaaaatgtttaatgatagatctcgcattttatggttacgtacaggattcagccatggacattgaaggacaacgtgtttactacacctctttgttcgctgttcaaagcatgagcaccatcttagaaacattggaatttagggatctacatgagaattgagctgcttcggtcgaatttctgcggaggcagctgggatgtgtcccaaactagacacggtcggtaccaatactccttgaaccaatggggcacgggaatttggcagagttccgctcccaacttcggagcggattctacgtatctctaccaaac

SEQ ID NO: 25286 - DNA, 3230 bp, Zea Mays
atcgagtcctcgaaccctcatcgcgcacgtataaaccggggcaaccggccagccacagacacagcacaacccccgtccgccgatcgagtcctcgaaccctcgtcgcgcacgtataaaccggggcaaccggggacgcggacctcttcatctccgttcccgtcgccggcgacgctggtctctaggtgtcaggccgcgcgagccctagcatagcagctgtagtagtgctagactgctagtagtttagcagggcgctccgcgcgtcagttccaccagaaacagaaaggcaaattcggcttcgcttttacgcccgcttgatttgcctcttccaccctcttccaccagaaggcgggcggccgagcgaccaaaagtcaaaaggaggattggcccacggccacggccgagagcggcaggcgggcagggtgaggtgaggagaggccatcagggccgagagaccatggcacagcatatatacgccaccggctgcggccgctgcgggtgcgcccgccccatcatccggacactactgcccgcgctgacccaccatctcgcctcctcgtctctgttgcggcgccggaaggctcccatgggcgccagcgatcacctgggcctggcggcggtggccgccgccaagccgcggaatggcaggacgtgcatggccgtgctgggcgagccactgccggctcttgacgaccccggcatcctcgtccaccccagcgccgacttcgccgcccaggcgctcgtctcgtccacgaaacagtaccgagatatgtaccaaaagtcgatcgacgacccagctggtttctggtcagaaatcgcagatgagttctactggaagcagaagtggagccctgataatgtttgcgctgagaaccttgacgtgaccaaggggccgatcatgattgaatggtttaaggggggaaagaccaacatatgctacaatgcagtggaccgcaatgtggaggcagggaatggggacaagatcgccatgtactgggaggggaatgagcccagtcaggatgggaagctcacctactctgaactgctggaaaaggtttgccagctgtcaaattacttgaaaagcgtcggcgtacgaaaaggtgatgccgtggtgatctacctaccaatgttgatggagctgccgattgcaatgcttgcttgtgcccgcattggtgctgttcactcggttgtgtttgctggcttctcagcagatgcactggcccaacgagtcattgattgcaagcctaaggttgttattacctgcaatgctgtgaaaagggggatgaaaatcatccatctcaaagatatagtagatgcatctctggatcaaagtgcaaagaatggagttgatgcatttgcttgacatatgaaaatcagtccgctctgaataaagtagacactcgatggaaaacaggaagagatgtctggtggcaggatgttgtgcctgatttcccaactaaatgcgatgtggaatgggttgatgcagaggatccactgtttcttttgtacacaagtggcagcacaggaaagccaaagggtgtgttgcatacaactgggggatatatggtctactctgctacaacatttaagcatgcatttgactacaaaccaacagacatatactggtgcactgcagattgtggctggattactggacatagttatgtgacatatggtccactattgaatggagccacagttcttgttttcgaaggggccccaaattaccctgatcctggccgctgttgggacattgttgataaatatggagtgacaatattttatacagcaccaacacttatacgctcacttatgcgtgatggtactgagtatgttgctcggtactctcgcaagtctctccgagtacttggaagtgtgggtgagccaatcaaccccaccgcatggaggtggttgtatgatgttattggtgactcacgatgccccatatcagatacttggtggcagactgaaaccgggggattcatgatcactcctttacctggtgcttggcctcaaaagccaggatcagcaacgtttcctttcttcggtgtgcagtcattgttgacgagaaaggtcgggaaatggaaggagaatgcagtggatatctttgcataaagaaatcatggcctggggctttccggactctgtatggagataaagagagatatgagacgacatacttcaaaccatttgctggatattatttctcgggcgatggctgcagcagggataaagatggctaccactggctgactggaagagttgatgatgttatcaatgttagtggacaccggattgggacagcggaagttgagtctgctctggtttcacatccaaaatgtgctgaggctgctgttgttggtattgatcatgaggttaaaggccagggaatatatgcttttgtgactttggtggatggtgttccctacagcgatgatctacggaaaagcctcgttacgacggtccgcagtcagattggtgcgtttgctgctcctgacaagatccattgggcacctgggctccctaagacacgaagtgggaagatcatgcgaagaatcttaagaaaaatcgcatccaggcaactagatgagctcggcgacacgagcacgcttgctgaccctggtgttgtggaccagctgattgcactcagtgacagctaatctatcggctatgtgggagggggtgagacatgatcactgcctgcactatacttatgcaaaattcagctttatgatgcgaggtctgttgggcccagcgttctcttaattgcttcggtgtcatggggatgccaacaaaagagagatgctgcgaacttggggagatgcggacatatgcggggtgcgtctgtaaattgttggatcgcagtcactgatagttattgtacattggtaaataaggagatgaagtgtatatgcgagttttggctaaaatgtttaatgatagatctcgcattttatggttacgtacaggattcagccatggacattgaaggacaacgtgtttactacacctctttgttcgctgttcaaagcatgagcaccatcttagaaacattggaatttagggatctacatgagaattgagctgcttcggtcgaatttctgcggaggcagctgggatgtgtcccaaactagacacggtcggtaccaatactccttgaaccaatggggcacgggaatttggcagagttccgctcccaacttcggagcggattctacgtatctctaccaaac

SEQ ID NO: 25287 - DNA, 3115 bp, Zea Mays
ccccgtccgccgatcgagtcctcgaaccctcatcgcgcacgtataaaccggggcaaccggccagccacagacacagcacaacccccgtccgccgatcgagtcctcgaaccctcgtcgcgcacgtataaaccggggcaaccggggacgcggacctcttcatctccgttcccgtcgccggcgacgctggtctctaggtgtcaggccgcgcgagccctagcatagcagctgtagtagtgctagactgctagtagtttagcagggcgctccgcgcgtcagttccaccagaaacagaaaggcaaattcggcttcgcttttacgcccgcttgatttgcctcttccaccctcttccaccagaaggcgggcggccgagcgaccaaaagtcaaaaggaggattggcccacggccacggccgagagcggcaggcgggcagggtgaggtgaggagaggccatcagggccgagagaccatggcacagcatatatacgccaccggctgcggccgctgcgggtgcgcccgccccatcatccggacactactgcccgcgctgacccaccatctcgcctcctcgtctctgttgcggcgccggaaggctcccatgggcgccagcgatcacctgggcctggcggcggtggccgccgccaagccgcggaatggcaggacgtgcatggccgtgctgggcgagccactgccggctcttgacgaccccggcatcctcgtccaccccagcgccgacttcgccgcccaggcgctcgtctcgtccacgaaacagtaccgagatatgtaccaaaagtcgatcgacgacccagctggtttctggtcagaaatcgcagatgagttctactggaagcagaagtggagccctgataatgtttgcgctgagaaccttgacgtgaccaaggggccgatcatgattgaatggtttaaggggggaaagaccaacatatgctacaatgcagtggaccgcaatgtggaggcagggaatggggacaagatcgccatgtactgggaggggaatgagcccagtcaggatgggaagctcacctactctgaactgctggaaaaggtttgccagctgtcaaattacttgaaaagcgtcggcgtacgaaaaggtgatgccgtggtgatctacctaccaatgttgatggagctgccgattgcaatgcttgcttgtgcccgcattggtgctgttcactcggttgtgtttgctggcttctcagcagatgcactggcccaacgagtcattgattgcaagcctaaggttgttattacctgcaatgctgtgaaaagggggatgaaaatcatccatctcaaagatatagtagatgcatctctggatcaaagtgcaaagaatggagttgatgtaggcatttgcttgacatatgaaaatcagtccgctctgaataaagtagacactcgatggaaaacaggaagagatgtctggtggcaggatgttgtgcctgatttcccaactaaatgcgatgtggaatgggttgatgcagaggatccactgtttcttttgtacacaagtggcagcacaggaaagccaaagggtgtgttgcatacaactgggggatatatggtctactctgctacaacatttaagcatgcatttgactacaaaccaacagacatatactggtgcactgcagattgtggctggattactggacatagttatgtgacatatggtccactattgaatggagccacagttcttgttttcgaaggggccccaaattaccctgatcctggccgctgttgggacattgttgataaatatggagtgacaatattttatacagcaccaacacttatacgctcacttatgcgtgatggtactgagtatgttgctcggtactctcgcaagtctctccgagtacttggaagtgtgggtgagccaatcaaccccaccgcatggaggtggttgtatgatgttattggtgactcacgatgccccatatcagatacttggtggcagactgaaaccgggggattcatgatcactcctttacctggtgcttggcctcaaaagccaggatcagcaacgtttcctttcttcggtgtgcagtcattgttgacgagaaaggtcgggaaatggaaggagaatgcagtggatatctttgcataaagaaatcatggcctggggctttccggactctgtatggagataaagagagatatgagacgacatacttcaaaccatttgctggatattatttctcgggcgatggctgcagcagggataaagatggctaccactggctgactggaagagttgatgatgttatcaatgttagtggacaccggattgggacagcggaagttgagtctgctctggtttcacatccaaaatgtgctgaggctgctgttgttggtattgatcatgaggttaaaggccagggaatatatgcttttgtgactttggtggatggtgttccctacagcgatgatctacggaaaagcctcgttacgacggtccgcagtcagattggtgcgtttgctgctcctgacaagatccattgggcacctgggctccctaagacacgaagtgggaagatcatgcgaagaatcttaagaaaaatcgcatccaggcaactagatgagctcggcgacacgagcacgcttgctgaccctggtgttgtggaccagctgattgcactcagtgacagctaatctatcggctatgtgggagggggtgagacatgatcactgcctgcactatacttatgcaaaattcagctttatgatgcgaggtctgttgggcccagcgttctcttaattgcttcggtgtcatggggatgccaacaaaagagagatgctgcgaacttggggagatgcggacatatgcggggattcagccatggacattgaaggacaacgtgtttactacacctctttgttcgctgttcaaagcatgagcaccatcttagaaacattggaatttagggatctacatgagaattgagctgcttcggtcgaatttctgcggaggcagctgggatgtgtcccaaactagacacggtcggtaccaatactccttgaaccaatggggcacgggaatttggcagagttccgctcccaacttcggagcggattctacgtatctctaccaaac

SEQ ID NO: 25288 - DNA, 3267 bp, Zea Mays
cagccacagacacagcacaacccccgtccgccgatcgagtcctcgaaccctcatcgcgcacgtataaaccggggcaaccggccagccacagacacagcacaacccccgtccgccgatcgagtcctcgaaccctcgtcgcgcacgtataaaccggggcaaccggggacgcggacctcttcatctccgttcccgtcgccggcgacgctggtctctaggtgtcaggccgcgcgagccctagcatagcagctgtagtagtgctagactgctagtagtttagcagggcgctccgcgcgtcagttccaccagaaacagaaaggcaaattcggcttcgcttttacgcccgcttgatttgcctcttccaccctcttccaccagaaggcgggcggccgagcgaccaaaagtcaaaaggaggattggcccacggccacggccgagagcggcaggcgggcagggtgaggtgaggagaggccatcagggccgagagaccatggcacagcatatatacgccaccggctgcggccgctgcgggtgcgcccgccccatcatccggacactactgcccgcgctgacccaccatctcgcctcctcgtctctgttgcggcgccggaaggctcccatgggcgccagcgatcacctgggcctggcggcggtggccgccgccaagccgcggaatggcaggacgtgcatggccgtgctgggcgagccactgccggctcttgacgaccccggcatcctcgtccaccccagcgccgacttcgccgcccaggcgctcgtctcgtccacgaaacagtaccgagatatgtaccaaaagtcgatcgacgacccagctggtttctggtcagaaatcgcagatgagttctactggaagcagaagtggagccctgataatgtttgcgctgagaaccttgacgtgaccaaggggccgatcatgattgaatggtttaaggggggaaagaccaacatatgctacaatgcagtggaccgcaatgtggaggcagggaatggggacaagatcgccatgtactgggaggggaatgagcccagtcaggatgggaagctcacctactctgaactgctggaaaaggtttgccagctgtcaaattacttgaaaagcgtcggcgtacgaaaaggtgatgccgtggtgatctacctaccaatgttgatggagctgccgattgcaatgcttgcttgtgcccgcattggtgctgttcactcggttgtgtttgctggcttctcagcagatgcactggcccaacgagtcattgattgcaagcctaaggttgttattacctgcaatgctgtgaaaagggggatgaaaatcatccatctcaaagatatagtagatgcatctctggatcaaagtgcaaagaatggagttgatgcatttgcttgacatatgaaaatcagtccgctctgaataaagtagacactcgatggaaaacaggaagagatgtctggtggcaggatgttgtgcctgatttcccaactaaatgcgatgtggaatgggttgatgcagaggatccactgtttcttttgtacacaagtggcagcacaggaaagccaaagggtgtgttgcatacaactgggggatatatggtctactctgctacaacatttaagcatgcatttgactacaaaccaacagacatatactggtgcactgcagattgtggctggattactggacatagttatgtgacatatggtccactattgaatggagccacagttcttgttttcgaaggggccccaaattaccctgatcctggccgctgttgggacattgttgataaatatggagtgacaatattttatacagcaccaacacttatacgctcacttatgcgtgatggtactgagtatgttgctcggtactctcgcaagtctctccgagtacttggaagtgtgggtgagccaatcaaccccaccgcatggaggtggttgtatgatgttattggtgactcacgatgccccatatcagatacttggtggcagactgaaaccgggggattcatgatcactcctttacctggtgcttggcctcaaaagccaggatcagcaacgtttcctttcttcggtgtgcagccagtcattgttgacgagaaaggtcgggaaatggaaggagaatgcagtggatatctttgcataaagaaatcatggcctggggctttccggactctgtatggagataaagagagatatgagacgacatacttcaaaccatttgctggatattatttctcgggcgatggctgcagcagggataaagatggctaccactggctgactggaagagttgatgatgttatcaatgttagtggacaccggattgggacagcggaagttgagtctgctctggtttcacatccaaaatgtgctgaggctgctgttgttggtattgatcatgaggttaaaggccagggaatatatgcttttgtgactttggtggatggtgttccctacagcgatgatctacggaaaagcctcgttacgacggtccgcagtcagattggtgcgtttgctgctcctgacaagatccattgggcacctgggctccctaagacacgaagtgggaagatcatgcgaagaatcttaagaaaaatcgcatccaggcaactagatgagctcggcgacacgagcacgcttgctgaccctggtgttgtggaccagctgattgcactcagtgacagctaatctatcggctatgtgggagggggtgagacatgatcactgcctgcactatacttatgcaaaattcagctttatgatgcgaggtctgttgggcccagcgttctcttaattgcttcggtgtcatggggatgccaacaaaagagagatgctgcgaacttggggagatgcggacatatgcggggtgcgtctgtaaattgttggatcgcagtcactgatagttattgtacattggtaaataaggagatgaagtgtatatgcgagttttggctaaaatgtttaatgatagatctcgcattttatggttacgtacaggattcagccatggacattgaaggacaacgtgtttactacacctctttgttcgctgttcaaagcatgagcaccatcttagaaacattggaatttagggatctacatgagaattgagctgcttcggtcgaatttctgcggaggcagctgggatgtgtcccaaactagacacggtcggtaccaatactccttgaaccaatggggcacgggaatttggcagagttccgctcccaacttcggagcggattctacgtatctctaccaaac

SEQ ID NO: 25289 - DNA, 2510 bp, Zea Mays
gcggagcccgcccgccaccgccacgccagtaccgagatatgtaccaaaagtcgatcgacgacccagctggtttctggtcagaaatcgcagatgagttctactggaagcagaagtggagccctgataatgtttgcgctgagaaccttgacgtgaccaaggggccgatcatgattgaatggtttaaggggggaaagaccaacatatgctacaatgcagtggaccgcaatgtggaggcagggaatggggacaagatcgccatgtactgggaggggaatgagcccagtcaggatgggaagctcacctactctgaactgctggaaaaggtttgccagctgtcaaattacttgaaaagcgtcggcgtacgaaaaggtgatgccgtggtgatctacctaccaatgttgatggagctgccgattgcaatgcttgcttgtgcccgcattggtgctgttcactcggttgtgtttgctggcttctcagcagatgcactggcccaacgagtcattgattgcaagcctaaggttgttattacctgcaatgctgtgaaaagggggatgaaaatcatccatctcaaagatatagtagatgcatctctggatcaaagtgcaaagaatggagttgatgtaggcatttgcttgacatatgaaaatcagtccgctctgaataaagtagacactcgatggaaaacaggaagagatgtctggtggcaggatgttgtgcctgatttcccaactaaatgcgatgtggaatgggttgatgcagaggatccactgtttcttttgtacacaagtggcagcacaggaaagccaaagggtgtgttgcatacaactgggggatatatggtctactctgctacaacatttaagcatgcatttgactacaaaccaacagacatatactggtgcactgcagattgtggctggattactggacatagttatgtgacatatggtccactattgaatggagccacagttcttgttttcgaaggggccccaaattaccctgatcctggccgctgttgggacattgttgataaatatggagtgacaatattttatacagcaccaacacttatacgctcacttatgcgtgatggtactgagtatgttgctcggtactctcgcaagtctctccgagtacttggaagtgtgggtgagccaatcaaccccaccgcatggaggtggttgtatgatgttattggtgactcacgatgccccatatcagatacttggtggcagactgaaaccgggggattcatgatcactcctttacctggtgcttggcctcaaaagccaggatcagcaacgtttcctttcttcggtgtgcagccagtcattgttgacgagaaaggtcgggaaatggaaggagaatgcagtggatatctttgcataaagaaatcatggcctggggctttccggactctgtatggagataaagagagatatgagacgacatacttcaaaccatttgctggatattatttctcgggcgatggctgcagcagggataaagatggctaccactggctgactggaagagttgatgatgttatcaatgttagtggacaccggattgggacagcggaagttgagtctgctctggtttcacatccaaaatgtgctgaggctgctgttgttggtattgatcatgaggttaaaggccagggaatatatgcttttgtgactttggtggatggtgttccctacagcgatgatctacggaaaagcctcgttacgacggtccgcagtcagattggtgcgtttgctgctcctgacaagatccattgggcacctgggctccctaagacacgaagtgggaagatcatgcgaagaatcttaagaaaaatcgcatccaggcaactagatgagctcggcgacacgagcacgcttgctgaccctggtgttgtggaccagctgattgcactcagtgacagctaatctatcggctatgtgggagggggtgagacatgatcactgcctgcactatacttatgcaaaattcagctttatgatgcgaggtctgttgggcccagcgttctcttaattgcttcggtgtcatggggatgccaacaaaagagagatgctgcgaacttggggagatgcggacatatgcggggtgcgtctgtaaattgttggatcgcagtcactgatagttattgtacattggtaaataaggagatgaagtgtatatgcgagttttggctaaaatgtttaatgatagatctcgcattttatggttacgtacaggattcagccatggacattgaaggacaacgtgtttactacacctctttgttcgctgttcaaagcatgagcaccatcttagaaacattggaatttagggatctacatgagaattgagctgcttcggtcgaatttctgcggaggcagctgggatgtgtcccaaactagacacggtcggtaccaatactccttgaaccaatggggcacgggaatttggcagagttccgctcccaacttcggagcggattctacgtatctctaccaaac

SEQ ID NO: 25290 - DNA, 982 bp, Zea Mays
gggaagaaggcttgtctcggtttatctcttcctctgaccccactcatgtgggagcctccggagatgttttctatgcaagatgggatgaagtattggttggggctactgctgttgtgtctacccttggagggtttggcaatgaagaacaaatgaaaaggataaatggtgaggcaaatgtcatagcagtaaatgctgcaaaagaaaatggagtcccaaaattcattttaatctccgtccatgactacaaccttccatcctttcttcttacatcgggttacttcactggcaagagaaaggcagaatctgaagtcctttccaaatacccagcctcgggtgtcgtgttgaggccaggcttcatttacggtaaaaggaaagtaaatggcttcgaggtaccactcgacgctgtcggacaaccattggagaagttgctctcctctgtcgaaaacttcaccaagccgttgagctcgctgcctgcctctgacctaatccttgcaccccctgtgagcgtggatgatgttgcctatgctgtaatcaacggagtcatagacgacagcttctttggggtgttcacgattgaacagatcaaggaagccgcgtccaaggtacgagtgtgaacccggggtcttgttccacaatctctgaacgtgtgttgtaggtggaaagttcataaacttagcagtaactcattgatccttgtgttctttatttctcgctgaattttgaccatagtcaaccgttcaaaagtcagtgcagcattcttttttctgctggaatctcttgagaaaatatagtttccaaactagcccttaatgacttaaagagctagcaaaatatgtagtactgtgtgggtcaccgaactgttatgttggttcacaatctcgctggaggtgagcggcatgagctcacaaccgaaatgtttttgaagtataaatcatgtgtatcgttgattagaattgagatcaaactcaattttaaaaaaacg

SEQ ID NO: 25291 - DNA, 1009 bp, Zea Mays
ctagagtgtcagcgcggagtgtgaagccgtggtcaggaagaccatcttactctgatccctgggttgatcaagtcaattggctgccaggagatgttttctatgcaagatgggatgaagtattggttggggctactgctgttgtgtctacccttggagggtttggcaatgaagaacaaatgaaaaggataaatggtgaggcaaatgtcatagcagtaaatgctgcaaaagaaaatggagtcccaaaattcattttaatctccgtccatgactacaaccttccatcctttcttcttacatcgggttacttcactggcaagagaaaggcagaatctgaagtcctttccaaatacccagcctcgggtgtcgtgttgaggccaggcttcatttacggtaaaaggaaagtaaatggcttcgaggtaccactcgacgctgtcggacaaccattggagaagttgctctcctctgtcgaaaacttcaccaagccgttgagctcgctgcctgcctctgacctaatccttgcaccccctgtgagcgtggatgatgttgcctatgctgtaatcaacggagtcatagacgacagcttctttggggtgttcacgattgaacagatcaaggaagccgcgtccaaggtacgagtgtgaacccggggtcttgttccacaatctctgaacgtgtgttgtaggtggaaagttcataaacttagcagtaactcattgatccttgtgttctttatttctcgctgaattttgaccatagtcaaccgttcaaaagtcagtgcagcattcttttttctgctggaatctcttgagaaaatatagtttccaaactagcccttaatgacttaaagagctagcaaaatatgtagtactgtgtgggtcaccgaactgttatgttggttcacaatctcgctggaggtgagcggcatgagctcacaaccgaaatgtttttgaagtataaatcatgtgtatcgttgattagaattgagatcaaactcaattttaaaaaaacg

SEQ ID NO: 25292 - DNA, 1293 bp, Zea Mays
ctacggtgccactgtgtagtggtgcttcatcaattgggacttcaattaatccacagttcattgcaagctttgcttctgctgctggtaaacgacctcatcaagatttcgactctcaagaatctgatccagagtggggttgctggacagcaaaccatgagctgaagaagccatcaatcagtctgttgtttccaacaattgacagggtgaaaaaaggggcttgtggaattcaattgtgcaggaatttgctttctctacctgagaaaacatggcaaagactgagatctaccggtatatttcatgatgcaatcccgcaaccaaatgccaggatagggtatcctatgcatgttaaggttgctcaaagacgcttcaagtcttgttttggtgagcattcattcggctggacttattgtgggtctcataacttcagtccggctgcatggggacagccgctgtctcctccctccaaagcaaatcctagcaaagccagatcagcaccttctagtccaatgctacacatttgcaactatgagcttggcatcatactcattgctctgccaccaggcatgtcaaagcatgcaagtgaaagtaggcacaggatcgaggacatcgccctgccctttgttgtccctccaccgcgatataaggggagtgataagccagccactcggctagccatgcgagaggctgtggctgaggcttgtgttctgcagggtaacgatgttgtagatttgccagatgatactgacgaagatgtgccagatgaagacgatgagcaggtggttgagctatctgattgttctcaacaagagaaggaagaagagaagatttacgcagagacgttatgggggcaggtagattcttcacagagcctggaaaaggattaagtgaagctggcgtccagttcttggtgtagtcctatggatctatttcgccctgatagttcaatggagagggattataaaagagagtacagtacccaaggttgatatgacagtcatttttgaaaaggtgttggaagcttcggattcgcatattacaagcgaactgaactttgtgaaggactgttgtattgtctgtcgaccaggaagagaggcggccagagccacgattcttcgttgccccatttttaatgtttacatttatgttgtgtagatatcatgtaatgtttacatgcattctattttttaagaatctattcttgcattgaaaaatatggtttgctcattcaactaatgagagaatgtatacatgatctgctgagtgaataacatactgaaactgtagatgtctgat

SEQ ID NO: 25293 - DNA, 3313 bp, Zea Mays
ccttccctccctttcgcctccactcctatggcggtgccgctgcctcagcagccgggcccctacacctccggcagccttggctacttccacctccgtctcgtgggcccagcccccgcattactcctcgtgcgcaccgaccgcctctactcgctctcccactcccgccgctgtggctaccgcttccgcctccgcctcctcgccaatcctcaccgccggcgcgcccccgacctcctgctcagcacctacggctgcgaccttcgcctcacacaccgatctggcatcggctctccgagtgtcaatggccgtcccctccgcgcggggacccccaccgagctggccgttggcgacgaggtatcggtgctgcgctgcggcgccaggtacgggttcatcgtcgagaggttcgtctcatgcggaggatttgaggttgatgcggcttcaacggcggggtcctgcgctgagggtcttgtttttagggccgagtctctgcggaaacggctgagggcgatatctgagagcgaagatcctctttcgttattaagggattgttctggaattggcaacctggatgtggatattggacctaaaaaatggaggcaggatggtgctgctgaattgtgcctggacaatccaatcactcccgcttctaaggagaatgtgctgcaaggtgattgcaattttgagcgagacaaatttgaccacgactttgatgttgtaaatgatggcgacccagagctctttaatgggagtaaaggatgcagagatgacagttcagagaagccaggatgtggaagcggtaacgaagagcagtatcacagtgagggctgctactcagatgggagcacattcttcttgaatcgccttgcggatactgggtctaacacgcaaacggaaccacaaagtggtgtgacacttccacagcttctccatcctgttaacagtttggtttctcaactattgcaagattccccagcatctaccagtgacaatagcatgccacaacaaggagagatgctggagtgcaagcagtgaaaatagaacagcagcgcctttcgaaagccatcctaagctgctactagttttcccccgattccctgaagatatagcatttggaaaggacaggaagaagcaaggagttgcttgccaccatccaaagctcatagtgttacagagggaagacagcatgcgtgttattgttacttcagctaacttagtaccgaggcagtggcatctcataacaaacactgtgtggtggcaagacttcccttgtagaacttctccggactatgcagcactttttagtgcagccaagaaacaaaaatctgattttgctgctcagttagtgtcattcatagcatccatggtcaatgaagtccgtagccaggcatattggataactgaggttgctaagtatgactttgaaggagctggtggctacctcattgcttcagtacctggaatacatgcacaaagtccttatttggagtccaattatttcctctcagctaaacataatgtacacacaaaatctgcacataggatgtcttttggctctgttcaaacgtctgtagttggcatatctcatcggtttcacatcccatcagatgctggcaaacaactgagagccttatctgcatttcttggaaaatgccgtgaaaatatgtatgggactactgaagtgatcctgaagaggaacaccaatatacctgcagatgctaatgctgtgagtgttcttgttgctgatctggataaattttctgaagaagattctgtccaacttggtttcttgcctagagaggttgctaagtgggtagctcccctcagtgactcaggattcttcgatttctctggatttatctaccctagggaagccctggaggctgcatttggagtaactaatactaaagtacagttgcttctatatgtatcaaagggtccagagttttctcaaatttcaaggctgataagcaatgaacattttccaccactctgctcactgatagcatccttgcagcggtgccttggactttggcggttagaagaggtgcttcatcaattgggacttcaattaatccacagttcattgcaagctttgcttctgctgctggtaaacgacctcatcaagatttcgactctcaagaatctgatccagagtggggttgctggacagcaaaccatgagctgaagaagccatcaatcagtctgttgtttccaacaattgacagggtgaaaaaaggggcttgtggaattcaattgtgcaggaatttgctttctctacctgagaaaacatggcaaagactgagatctaccggtatatttcatgatgcaatcccgcaaccaaatgccaggatagggtatcctatgcatgttaaggttgctcaaagacgcttcaagtcttgttttggtgagcattcattcggctggacttattgtgggtctcataacttcagtccggctgcatggggacagccgctgtctcctccctccaaagcaaatcctagcaaagccagatcagcaccttctagtccaatgctacacatttgcaactatgagcttggcatcatactcattgctctgccaccaggcatgtcaaagcatgcaagtgaaagtaggcacaggatcgaggacatcgccctgccctttgttgtccctccaccgcgatataaggggagtgataagccagccactcggctagccatgcgagaggctgtggctgaggcttgtgttctgcagggtaacgatgttgtagatttgccagatgatactgacgaagatgtgccagatgaagacgatgagcaggtggttgagctatctgattgttctcaacaagagaaggaagaagagaagatttacgcagagacgttatgggggcaggtagattcttcacagagcctggaaaaggattaagtgaagctggcgtccagttcttggtgtagtcctatggatctatttcgccctgatagttcaatggagagggattataaaagagagtacagtacccaaggttgatatgacagtcatttttgaaaaggtgttggaagcttcggattcgcatattacaagcgaactgaactttgtgaaggactgttgtattgtctgtcgaccaggaagagaggcggccagagccacgattcttcgttgccccatttttaatgtttacatttatgttgtgtagatatcatgtaatgtttacatgcattctattttttaagaatctattcttgcattgaaaaatatggtttgctcattcaactaatgagagaatgtatacatgatctgctgagtgaataacatactgaaactgtagatgtctgat

SEQ ID NO: 25294 - DNA, 4121 bp, Zea Mays
ccttccctccctttcgcctccactcctatggcggtgccgctgcctcagcagccgggcccctacacctccggcagccttggctacttccacctccgtctcgtgggcccagcccccgcattactcctcgtgcgcaccgaccgcctctactcgctctcccactcccgccgctgtggctaccgcttccgcctccgcctcctcgccaatcctcaccgccggcgcgcccccgacctcctgctcagcacctacggctgcgaccttcgcctcacacaccgatctggcatcggctctccgagtgtcaatggccgtcccctccgcgcggggacccccaccgagctggccgttggcgacgaggtatcggtgctgcgctgcggcgccaggtacgggttcatcgtcgagaggttcgtctcatgcggaggatttgaggttgatgcggcttcaacggcggggtcctgcgctgagggtcttgtttttagggccgagtctctgcggaaacggctgagggcgatatctgagagcgaagatcctctttcgttattaagggattgttctggaattggcaacctggatgtggatattggacctaaaaaatggaggcaggatggtgctgctgaattgtgcctggacaatccaatcactcccgcttctaaggagaatgtgctgcaaggtgattgcaattttgagcgagacaaatttgaccacgactttgatgttgtaaatgatggcgacccagagctctttaatgggagtaaaggatgcagagatgacagttcagagaagccaggatgtggaagcggtaacgaagagcagtatcacagtgagggctgctactcagatgggagcacattcttcttgaatcgccttgcggatactgggtctaacacgcaaacggaaccacaaagtggtgtgacacttccacagcttctccatcctgttaacagtttggtttctcaactattgcaagattccccagcatctaccagtgacaatagcatgccacaacaaggagagatgctggagtgcaagcagtgaaaatagaacagcagcgcctttcgaaagccatcctaagctgctactagttttcccccgattccctgaagatatagcatttggaaaggacaggaagaagcaaggagttgcttgccaccatccaaagctcatagtgttacagagggaagacagcatgcgtgttattgttacttcagctaacttagtaccgaggcagtggcatctcataacaaacactgtgtggtggcaagacttcccttgtagaacttctccggactatgcagcactttttagtgcagccaagaaacaaaaatctgattttgctgctcagttagtgtcattcatagcatccatggtcaatgaagtccgtagccaggcatattggataactgaggttgctaagtatgactttgaaggagctggtggctacctcattgcttcagtacctggaatacatgcacaaagtccttatttggagtccaattatttcctctcagctaaacataatgtacacacaaaatctgcacataggatgtcttttggctctgttcaaacgtctgtagttggcatatctcatcggtttcacatcccatcagatgctggcaaacaactgagagccttatctgcatttcttggaaaatgccgtgaaaatatgtatgggactactgaagtgatcctgaagaggaacaccaatatacctgcagatgctaatgctgtgagtgttcttgttgctgatctggataaattttctgaagaagattctgtccaacttggtttcttgcctagagaggttgctaagtgggtagctcccctcagtgactcaggattcttcgatttctctggatttatctaccctagggaagccctggaggctgcatttggagtaactaatactaaagtacagttgcttctatatgtatcaaagggtccagagttttctcaaatttcaaggctgataagcaatgaacattttccaccactctgctcactgatagcatccttgcagcggtgccttggactttggcggttagaagaggtgtataattttatatgatgaaattatgtgcatctttgataaaagcatgtgatatataaactaaactaacatttgttaaggtgatcatattatttggtgaaatcagtgtatacttagctgagtttgttaggtggtatctgtagcattcctcaggtcctgagttcgactcctcgtgggaacgaatttggctggggctaaaaaatcccctcgtttatcacacgacaaagcacagatctaaggtctgacctggtcgcggtcactctcatatgggctacggtgccactgtgtagtggtatgaagctgatcgccataacctaatacatttttaatcgtcaaaatctagagaaatacttccatttttcttagttggaagacctttgtattgccttttgcatttgtgacatcaaaacataaggagtcaagcaacgaatattacgtcttcagttgtttttgcctcaccgctctgcatttgtgacatctaaacataaggagtcaagcgacgaatattaggtcttcagttgtttttgcctcactgctctgtaaggacatataaaattggtatttgtactttctaaggttctccttggaatggtagagttttacagggaaccttcaatttacaaaggaatcaagaaaattttctgcctttcaatcagagcctaaaacagagaaagaactgtacattcatcagaatcaattcagctttcacacttatttcttgttgcttgttcagtttggtttcttgaattgcactttgtattggcaaatattaagtggcctgaaacactcgaggctgattttatctacagtgcttcatcaattgggacttcaattaatccacagttcattgcaagctttgcttctgctgctggtaaacgacctcatcaagatttcgactctcaagaatctgatccagagtggggttgctggacagcaaaccatgagctgaagaagccatcaatcagtctgttgtttccaacaattgacagggtgaaaaaaggggcttgtggaattcaattgtgcaggaatttgctttctctacctgagaaaacatggcaaagactgagatctaccggtatatttcatgatgcaatcccgcaaccaaatgccaggatagggtatcctatgcatgttaaggttgctcaaagacgcttcaagtcttgttttggtgagcattcattcggctggacttattgtgggtctcataacttcagtccggctgcatggggacagccgctgtctcctccctccaaagcaaatcctagcaaagccagatcagcaccttctagtccaatgctacacatttgcaactatgagcttggcatcatactcattgctctgccaccaggcatgtcaaagcatgcaagtgaaagtaggcacaggatcgaggacatcgccctgccctttgttgtccctccaccgcgatataaggggagtgataagccagccactcggctagccatgcgagaggctgtggctgaggcttgtgttctgcagggtaacgatgttgtagatttgccagatgatactgacgaagatgtgccagatgaagacgatgagcaggtggttgagctatctgattgttctcaacaagagaaggaagaagagaagatttacgcagagacgttatgggggcaggtagattcttcacagagcctggaaaaggattaagtgaagctggcgtccagttcttggtgtagtcctatggatctatttcgccctgatagttcaatggagagggattataaaagagagtacagtacccaaggttgatatgacagtcatttttgaaaaggtgttggaagcttcggattcgcatattacaagcgaactgaactttgtgaaggactgttgtattgtctgtcgaccaggaagagaggcggccagagccacgattcttcgttgccccatttttaatgtttacatttatgttgtgtagatatcatgtaatgtttacatgcattctattttttaagaatctattcttgcattgaaaaatatggtttgctcattcaactaatgagagaatgtatacatgatctgctgagtgaataacatactgaaactgtagatgtctgat

SEQ ID NO: 25295 - DNA, 3316 bp, Zea Mays
ccttccctccctttcgcctccactcctatggcggtgccgctgcctcagcagccgggcccctacacctccggcagccttggctacttccacctccgtctcgtgggcccagcccccgcattactcctcgtgcgcaccgaccgcctctactcgctctcccactcccgccgctgtggctaccgcttccgcctccgcctcctcgccaatcctcaccgccggcgcgcccccgacctcctgctcagcacctacggctgcgaccttcgcctcacacaccgatctggcatcggctctccgagtgtcaatggccgtcccctccgcgcggggacccccaccgagctggccgttggcgacgaggtatcggtgctgcgctgcggcgccaggtacgggttcatcgtcgagaggttcgtctcatgcggaggatttgaggttgatgcggcttcaacggcggggtcctgcgctgagggtcttgtttttagggccgagtctctgcggaaacggctgagggcgatatctgagagcgaagatcctctttcgttattaagggattgttctggaattggcaacctggatgtggatattggacctaaaaaatggaggcaggatggtgctgctgaattgtgcctggacaatccaatcactcccgcttctaaggagaatgtgctgcaaggtgattgcaattttgagcgagacaaatttgaccacgactttgatgttgtaaatgatggcgacccagagctctttaatgggagtaaaggatgcagagatgacagttcagagaagccaggatgtggaagcggtaacgaagagcagtatcacagtgagggctgctactcagatgggagcacattcttcttgaatcgccttgcggatactgggtctaacacgcaaacggaaccacaaagtggtgtgacacttccacagcttctccatcctgttaacagtttggtacgagtgttcattgcaacattcaccttagatatttcctggtttctcaactattgcaagattccccagcatctaccagtgacaatagcatgccacaacaaggagagatgctggagtgcaagcagtgaaaatagaacagcagcgcctttcgaaagccatcctaagctgctactagttttcccccgattccctgaagatatagcatttggaaaggacaggaagaagcaaggagttgcttgccaccatccaaagctcatagtgttacagagggaagacagcatgcgtgttattgttacttcagctaacttagtaccgaggcagtggcatctcataacaaacactgtgtggtggcaagacttcccttgtagaacttctccggactatgcagcactttttagtgcagccaagaaacaaaaatctgattttgctgctcagttagtgtcattcatagcatccatggtcaatgaagtccgtagccaggcatattggataactgaggttgctaagtatgactttgaaggagctggtggctacctcattgcttcagtacctggaatacatgcacaaagtccttatttggagtccaattatttcctctcagctaaacataatgtacacacaaaatctgcacataggatgtcttttggctctgttcaaacgtctgtagttggcatatctcatcggtttcacatcccatcagatgctggcaaacaactgagagccttatctgcatttcttggaaaatgccgtgaaaatatgtatgggactactgaagtgatcctgaagaggaacaccaatatacctgcagatgctaatgctgtgagtgttcttgttgctgatctggataaattttctgaagaagattctgtccaacttggtttcttgcctagagaggttgctaagtgggtagctcccctcagtgactcaggattcttcgatttctctggatttatctaccctagggaagccctggaggctgcatttggagtaactaatactaaagtacagttgcttctatatgtatcaaagggtccagagttttctcaaatttcaaggctgataagcaatgaacattttccaccactctgctcactgatagcatccttgcagcggtgccttggactttggcggttagaagaggtattggcaaatattaagtggcctgaaacactcgaggctgattttatctacagtgcttcatcaattgggacttcaattaatccacagttcattgcaagctttgcttctgctgctggtaaacgacctcatcaagatttcgactctcaagaatctgatccagagtggggttgctggacagcaaaccatgagctgaagaagccatcaatcagtctgttgtttccaacaattgacagggtgaaaaaaggggcttgtggaattcaattgtgcaggaatttgctttctctacctgaggttgctcaaagacgcttcaagtcttgttttggtgagcattcattcggctggacttattgtgggtctcataacttcagtccggctgcatggggacagccgctgtctcctccctccaaagcaaatcctagcaaagccagatcagcaccttctagtccaatgctacacatttgcaactatgagcttggcatcatactcattgctctgccaccaggcatgtcaaagcatgcaagtgaaagtaggcacaggatcgaggacatcgccctgccctttgttgtccctccaccgcgatataaggggagtgataagccagccactcggctagccatgcgagaggctgtggctgaggcttgtgttctgcagggtaacgatgttgtagatttgccagatgatactgacgaagatgtgccagatgaagacgatgagcaggtggttgagctatctgattgttctcaacaagagaaggaagaagagaagatttacgcagagacgttatgggggcaggtagattcttcacagagcctggaaaaggattaagtgaagctggcgtccagttcttggtgtagtcctatggatctatttcgccctgatagttcaatggagagggattataaaagagagtacagtacccaaggttgatatgacagtcatttttgaaaaggtgttggaagcttcggattcgcatattacaagcgaactgaactttgtgaaggactgttgtattgtctgtcgaccaggaagagaggcggccagagccacgattcttcgttgccccatttttaatgtttacatttatgttgtgtagatatcatgtaatgtttacatgcattctattttttaagaatctattcttgcattgaaaaatatggtttgctcattcaactaatgagagaatgtatacatgatctgctgagtgaataacatactgaaactgtagatgtctgat

SEQ ID NO: 25296 - DNA, 3354 bp, Zea Mays
ccttccctccctttcgcctccactcctatggcggtgccgctgcctcagcagccgggcccctacacctccggcagccttggctacttccacctccgtctcgtgggcccagcccccgcattactcctcgtgcgcaccgaccgcctctactcgctctcccactcccgccgctgtggctaccgcttccgcctccgcctcctcgccaatcctcaccgccggcgcgcccccgacctcctgctcagcacctacggctgcgaccttcgcctcacacaccgatctggcatcggctctccgagtgtcaatggccgtcccctccgcgcggggacccccaccgagctggccgttggcgacgaggtatcggtgctgcgctgcggcgccaggtacgggttcatcgtcgagaggttcgtctcatgcggaggatttgaggttgatgcggcttcaacggcggggtcctgcgctgagggtcttgtttttagggccgagtctctgcggaaacggctgagggcgatatctgagagcgaagatcctctttcgttattaagggattgttctggaattggcaacctggatgtggatattggacctaaaaaatggaggcaggatggtgctgctgaattgtgcctggacaatccaatcactcccgcttctaaggagaatgtgctgcaaggtgattgcaattttgagcgagacaaatttgaccacgactttgatgttgtaaatgatggcgacccagagctctttaatgggagtaaaggatgcagagatgacagttcagagaagccaggatgtggaagcggtaacgaagagcagtatcacagtgagggctgctactcagatgggagcacattcttcttgaatcgccttgcggatactgggtctaacacgcaaacggaaccacaaagtggtgtgacacttccacagcttctccatcctgttaacagtttggtacgagtgttcattgcaacattcaccttagatatttcctggtttctcaactattgcaagattccccagcatctaccagtgacaatagcatgccacaacaaggagagatgctggagtgcaagcagtgaaaatagaacagcagcgcctttcgaaagccatcctaagctgctactagttttcccccgattccctgaagatatagcatttggaaaggacaggaagaagcaaggagttgcttgccaccatccaaagctcatagtgttacagagggaagacagcatgcgtgttattgttacttcagctaacttagtaccgaggcagtggcatctcataacaaacactgtgtggtggcaagacttcccttgtagaacttctccggactatgcagcactttttagtgcagccaagaaacaaaaatctgattttgctgctcagttagtgtcattcatagcatccatggtcaatgaagtccgtagccaggcatattggataactgaggttgctaagtatgactttgaaggagctggtggctacctcattgcttcagtacctggaatacatgcacaaagtccttatttggagtccaattatttcctctcagctaaacataatgtacacacaaaatctgcacataggatgtcttttggctctgttcaaacgtctgtagttggcatatctcatcggtttcacatcccatcagatgctggcaaacaactgagagccttatctgcatttcttggaaaatgccgtgaaaatatgtatgggactactgaagtgatcctgaagaggaacaccaatatacctgcagatgctaatgctgtgagtgttcttgttgctgatctggataaattttctgaagaagattctgtccaacttggtttcttgcctagagaggttgctaagtgggtagctcccctcagtgactcaggattcttcgatttctctggatttatctaccctagggaagccctggaggctgcatttggagtaactaatactaaagtacagttgcttctatatgtatcaaagggtccagagttttctcaaatttcaaggctgataagcaatgaacattttccaccactctgctcactgatagcatccttgcagcggtgccttggactttggcggttagaagaggtgcttcatcaattgggacttcaattaatccacagttcattgcaagctttgcttctgctgctggtaaacgacctcatcaagatttcgactctcaagaatctgatccagagtggggttgctggacagcaaaccatgagctgaagaagccatcaatcagtctgttgtttccaacaattgacagggtgaaaaaaggggcttgtggaattcaattgtgcaggaatttgctttctctacctgagaaaacatggcaaagactgagatctaccggtatatttcatgatgcaatcccgcaaccaaatgccaggatagggtatcctatgcatgttaaggttgctcaaagacgcttcaagtcttgttttggtgagcattcattcggctggacttattgtgggtctcataacttcagtccggctgcatggggacagccgctgtctcctccctccaaagcaaatcctagcaaagccagatcagcaccttctagtccaatgctacacatttgcaactatgagcttggcatcatactcattgctctgccaccaggcatgtcaaagcatgcaagtgaaagtaggcacaggatcgaggacatcgccctgccctttgttgtccctccaccgcgatataaggggagtgataagccagccactcggctagccatgcgagaggctgtggctgaggcttgtgttctgcagggtaacgatgttgtagatttgccagatgatactgacgaagatgtgccagatgaagacgatgagcaggtggttgagctatctgattgttctcaacaagagaaggaagaagagaagatttacgcagagacgttatgggggcaggtagattcttcacagagcctggaaaaggattaagtgaagctggcgtccagttcttggtgtagtcctatggatctatttcgccctgatagttcaatggagagggattataaaagagagtacagtacccaaggttgatatgacagtcatttttgaaaaggtgttggaagcttcggattcgcatattacaagcgaactgaactttgtgaaggactgttgtattgtctgtcgaccaggaagagaggcggccagagccacgattcttcgttgccccatttttaatgtttacatttatgttgtgtagatatcatgtaatgtttacatgcattctattttttaagaatctattcttgcattgaaaaatatggtttgctcattcaactaatgagagaatgtatacatgatctgctgagtgaataacatactgaaactgtagatgtctgat

SEQ ID NO: 25297 - DNA, 3394 bp, Zea Mays
gcgggatcagattcaattagtaccgggctccttccctccctttcgcctccactcctatggcggtgccgctgcctcagcagccgggcccctacacctccggcagccttggctacttccacctccgtctcgtgggcccagcccccgcattactcctcgtgcgcaccgaccgcctctactcgctctcccactcccgccgctgtggctaccgcttccgcctccgcctcctcgccaatcctcaccgccggcgcgcccccgacctcctgctcagcacctacggctgcgaccttcgcctcacacaccgatctggcatcggctctccgagtgtcaatggccgtcccctccgcgcggggacccccaccgagctggccgttggcgacgaggtatcggtgctgcgctgcggcgccaggtacgggttcatcgtcgagaggttcgtctcatgcggaggatttgaggttgatgcggcttcaacggcggggtcctgcgctgagggtcttgtttttagggccgagtctctgcggaaacggctgagggcgatatctgagagcgaagatcctctttcgttattaagggattgttctggaattggcaacctggatgtggatattggacctaaaaaatggaggcaggatggtgctgctgaattgtgcctggacaatccaatcactcccgcttctaaggagaatgtgctgcaaggtgattgcaattttgagcgagacaaatttgaccacgactttgatgttgtaaatgatggcgacccagagctctttaatgggagtaaaggatgcagagatgacagttcagagaagccaggatgtggaagcggtaacgaagagcagtatcacagtgagggctgctactcagatgggagcacattcttcttgaatcgccttgcggatactgggtctaacacgcaaacggaaccacaaagtggtgtgacacttccacagcttctccatcctgttaacagtttggtttctcaactattgcaagattccccagcatctaccagtgacaatagcatgccacaacaaggagagatgctggagtgcaagcagtgaaaatagaacagcagcgcctttcgaaagccatcctaagctgctactagttttcccccgattccctgaagatatagcatttggaaaggacaggaagaagcaaggagttgcttgccaccatccaaagctcatagtgttacagagggaagacagcatgcgtgttattgttacttcagctaacttagtaccgaggcagtggcatctcataacaaacactgtgtggtggcaagacttcccttgtagaacttctccggactatgcagcactttttagtgcagccaagaaacaaaaatctgattttgctgctcagttagtgtcattcatagcatccatggtcaatgaagtccgtagccaggcatattggataactgaggttgctaagtatgactttgaaggagctggtggctacctcattgcttcagtacctggaatacatgcacaaagtccttatttggagtccaattatttcctctcagctaaacataatgtacacacaaaatctgcacataggatgtcttttggctctgttcaaacgtctgtagttggcatatctcatcggtttcacatcccatcagatgctggcaaacaactgagagccttatctgcatttcttggaaaatgccgtgaaaatatgtatgggactactgaagtgatcctgaagaggaacaccaatatacctgcagatgctaatgctgtgagtgttcttgttgctgatctggataaattttctgaagaagattctgtccaacttggtttcttgcctagagaggttgctaagtgggtagctcccctcagtgactcaggattcttcgatttctctggatttatctaccctagggaagccctggaggctgcatttggagtaactaatactaaagtacagttgcttctatatgtatcaaagggtccagagttttctcaaatttcaaggctgataagcaatgaacattttccaccactctgctcactgatagcatccttgcagcggtgccttggactttggcggttagaagaggtattggcaaatattaagtggcctgaaacactcgaggctgattttatctacagtgcttcatcaattgggacttcaattaatccacagttcattgcaagctttgcttctgctgctggtaaacgacctcatcaagatttcgactctcaagaatctgatccagagtggggttgctggacagcaaaccatgagctgaagaagccatcaatcagtctgttgtttccaacaattgacagggtgaaaaaaggggcttgtggaattcaattgtgcaggaatttgctttctctacctgagaaaacatggcaaagactgagatctaccggtatatttcatgatgcaatcccgcaaccaaatgccaggatagggtatcctatgcatgttaaggttgctcaaagacgcttcaagtcttgttttggtgagcattcattcggctggacttattgtgggtctcataacttcagtccggctgcatggggacagccgctgtctcctccctccaaagcaaatcctagcaaagccagatcagcaccttctagtccaatgctacacatttgcaactatgagcttggcatcatactcattgctctgccaccaggcatgtcaaagcatgcaagtgaaagtaggcacaggatcgaggacatcgccctgccctttgttgtccctccaccgcgatataaggggagtgataagccagccactcggctagccatgcgagaggctgtggctgaggcttgtgttctgcagggtaacgatgttgtagatttgccagatgatactgacgaagatgtgccagatgaagacgatgagcaggtggttgagctatctgattgttctcaacaagagaaggaagaagagaagatttacgcagagacgttatgggggcaggtagattcttcacagagcctggaaaaggattaagtgaagctggcgtccagttcttggtgtagtcctatggatctatttcgccctgatagttcaatggagagggattataaaagagagtacagtacccaaggttgatatgacagtcatttttgaaaaggtgttggaagcttcggattcgcatattacaagcgaactgaactttgtgaaggactgttgtattgtctgtcgaccaggaagagaggcggccagagccacgattcttcgttgccccatttttaatgtttacatttatgttgtgtagatatcatgtaatgtttacatgcattctattttttaagaatctattcttgcattgaaaaatatggtttgctcattcaactaatgagagaatgtatacatgatctgctgagtgaataacatactgaaactgtagatgtctgat

SEQ ID NO: 25298 - DNA, 2101 bp, Zea Mays
cgccgagaaaactcaaatcgaatccccaaatccttcgccggcgattccactccaagtctcgatcggaaaagcgcagaagagcaacggaatcccaattcccaaagggacaaggcaaagctaacttctccttcttcccatccttcctcatcccgtcggatcaatgccagcgggagcaaattcgaagccgctgccgaaattgtggccggttgaccggtgtttccagcccatccccccgttgcacgcggcgaggtagaggagtttccgccgtcaactccatccgatcggcgtagggtcgcggggtgccgacaactttggtccccgctccccacttgggcgccacggtcgctgcgcatgccgcgggctcccgcgcccactggaccccggtaacaccgcacggcgcctcgctccgcgtgcccgcccgctgccagctccatgccaaccgccgcggctacataggtagctgcgcgctggctgaaggctcctgcagtgcgcgttgaaggctttcgctgcgtgttgtgcgttctgcttgaatttcggtctgagtttggatgggccagatgatttcgggtgataaatccgacgaacagacagcacgcgacgatggaatcatcaagaatggaagggaaatcctatttcaggcttttaactgggaatccaataagcacaactggtggagtattttggaggaaaaagtaaccgatcttgcggaatctgggtttacgtcagtgtggcttcctcctccaacacagtcattatctcgagaaggctatctaccacagaatctgtactgccttgactcatgttatggttccctccatgagctaaaattgttgcttcataaaatgagcgaacataatgtaagggctatggcagatgttgttatcaaccatcgaattggaactactcaaggatccaatggcatgtataatcgttatgatggcatcccagtatcatgggatgaacatgctgttacatcttgttctggcgggaagggaaacaagagcactggggataactttgatggggttcccaatatagatcatacacaaccatttgtacgcaaagatattatcgaatggttgatctggcttcgaaaatcagttggttttcaagattttcgctttgatttcacgaaaggttatgcagccaagtttgtaaaagaatacattgaggaatcaaaacctctttttgcagttggggaatactgggatagctgtgaatatagcccccctgactaccgactgaactataatcaaggcagaggattattaattggatagataacactggaggactttgtgccgcatttgatttcacgacaaagggcattcttcaggaagctgtcaaaggagagttgtggcgtttgcgagattcagaaggaaaaccacctggtgtgatgggatggtggccttcaagatcagttacatttattgaaaatcatgacactgggtccactcagggtcattggccttttccgtcagatcatattatggagggatatgcttatatactcacccaccctggcatccccacggtgttctatgatcacttctatgaccagggtgtgcctctccatgacgaaattgctaaactgatgcaaatcagaaaatgccaagatatacatagccgttcatcaatcaaaattctggaggttgggtcagatctgtactcagcaatcatcgacgataagttgtgcatgaagatcggggacggctcgtggtgcccaagtgatccagagtggaggctggcagtctctggtgacagatatgctgtgtggcacaagtgaagcatataagtgccctcgatacagtttatttctgctctcaggaacaggagtaattagcatgttagctgaataacagcacggtaaaacatgccaaaaatgaccctcttcgaggttttacctgtacaagaggagtgcctaaatgcaatgcttaattagaaatacgtgagatcgtgcggctggtcccgaggtgagacatacattttgctaatcgcaacaactatggattacctgcaaaagaaatatatatagggcatgtgatgtctctgtggaatattttatcctggaaccagaaatttgaattatttttataaaaaa

SEQ ID NO: 25299 - DNA, 7720 bp, Zea Mays
catggacaaaaaggtaaagatatattacaaagtatacacaaattacagaattagtatctgattcttaaattacaaatattttttacaatgatattacaagatttttctctaaaatttttccagcaaggtcttcagcttttgacatcagtcagcttcggatcacctgtcaagcttcgactcatttttcttcagcatcatcatcctgtacatattaaaacggtatgagagaagtgcagacttcaaggagaaggtaaagtaacaggcatacattttttaccagcttaaggtggcttcgagcttcgtcgccagccatttttcgcccgccttttacccaaatttgagttatgaatctgtttcctatactccgagctaggctagggatatcaattaaatctgtcggagataagctaaaatttggtctgttgacaatttttccatgttcacaaccatattttatgaagacaacagctgtgcctcgagaagctagcagagcacagaaatcggcgtgtccacctataacttcgtcgagagcatcaacttcgcccacaatatgttcgaaggtttccggcaggttctcaaccgaaggactgaatttctcagcaccggcttcgaccgagttgaaaacctgttttagccgctgcaggcaccggttgctgaagtccacacatttttcttgaagttctttcaatgatttccgcaaatttgattttttctcagcttcagcttcgagtttggcttcgaaatttttcttttccatggagagttcactattcaatctagcaatttcggcctgggcttctgccagtgaaccttccatggtttgaagtacgaagtctttcttttccagagtagcctcatggtctttaatcttcttctccaggacctcaattataacttcgttctttttgtcctcgaggtcttgttgcatcctcaggacttttcttagcagtaagctctgataacataagcttcatcagaaaacaatcttcatatcaaaacaatgaaaagttaagaattttaccttaaagttagcataaaataggctaccggcgatatgttgtcgccggtacctgctgaggtctgcctcaaccttcgggaggccaacactctttgatatagtgccaacaaccttcaccctagtgtggtcccaaaggcatcctaagctttcttcgttaactctcccgaagagaagcgcacctggtctgtatccgcaagatatagcatactctttcagttcttctttttcagccttcgacaattcttgcccgagtatatcttggaagttgaagtcctcttcttccgaaatatcctcggttttctcctttccttttccagccactgtgcccgggatctcttcagcggctgcagcagcttcttccgcggccgcatctagaagcattgtatcaattttagagagtgtggcatctagattcacatcttcagcggtttcagcttcggcactttcggcttcggcagcagcagagctctcaatagctggagtctttgacgccgatgctagcggcggcgtctgctcgataacttcaactacacgaataattctttgttttttcggctcatctggcttcttcgctgccgaaggctccttttccttctgaaaaagcttcatcagatgtggccctagtgaacttatcttgacaggcaaagattcagtcattacctttaaaatttcttctacatcgatagcaggaggtgttgaaggagcttcatcctcaatttcagttgtttttcgtttcagagccgaagctttctttttcttcaaagcagttatcttcggctcagagcttaattttcttttcttcaaaatttcttcatcctttttcaccaatttagcagcctctttatccaggacgctagcaactctctttctcttctgtccttcggcacctctgtccagtcgctcatagtcaggatactcaaagttcagagcatccatcacccggtttaaccttcgcttcggacgagtgccgaaggctacagtcattagttgatcttcttttttagaataattcccaaggatctcattgcacataacttcaatcgtgtctaaccattcttggcaaggtactttgaagtgtttcttgaatttataataatagggcaaccgaacaagttccttctttttcttttcccctttgagcttcggcatgtcccattctttcaaagttgggaacactctaaaagccaagaattcttgcaccagatccctagtaccaatgtgctctgcaataactcgaaattcgcccaatgcaatttggcttggactctccggtttcatatcgcaccggggcctagtctctccgaagattaattctaatgggatttgaaccaacttctcattcttctcataaactttgacataaaaccattcagtcttccagccagctagccacttggtacgatagctgataactggagacttcgcatctttgcgataagcaaaattgtagcagccgaagttttcgtgcagcccatcttctctagcttttgtttgataatgaagctcatgtactcggcagaagccttcggcaaacggttctaccccctggcttcggagggcccatatgtagacgctaagcctaacgatggcgttaggagttagctgatgaagataaatcccaaacttcttcaaaacatcagcaatcatctcattcaaagaaaatcttaatcctgctttgaagaagcttttaaagactaccacctcatccttttccggctttggaataatttcctctccgccaaagcgaattagctcctttttggcctcactgaaatagcctaacttcatcaacttaggcatatcatctttggtaacggtggacctcccaaactccaggtggctgggtttagatggcacgacactataatcatcttcagattcatcttcctcagcaccaacctgcttagcctcagtggcaggagcaccttcgtaagaaacatcttccaacactactagccccaaccgtttcatcacttcggaaatcggagcggtctcagcagtttcagcttcttctccgtcatgtgtaaccctagtagtggatcgtacccttgccatttgatgatgaattcctcacaatttttgatgaaattgttgacttttttaattttcccgaagctcttcctcttgtgacaaagcaaagtcaacagtggtgcttcggttaagtgcgatgaacaagcttcggctatggtcaaatttttggcagcaaaacagggcaatagcaatgaatgttgtggtaacttcacacctacccatctgtttatatagtgccataggtggggaggtgaatcgtcaagtcttccacaccggacgaacagtcgcccgcactcactgagtggtcggccacagaacccgagaaggtgaatcgccaggacacgtttacccgctgcatggtgggaccatctcgcgctcgaaattttgtgatcgtttctcggcaacgagctcagggaaggtgtttttcggatcttcggctctgcgaagcctaggagactttttcacggatcaagctcgttatgaaaaacgatctagcaccgcaaaggggctacagttgggggtatgcttcatcgccgaagatcctgtaagaagaaacaccttcggcagatcctctcaaaagcagtgccgaagctatcacccataaagctttggcatagtgacatgtctcaagacgaaggagtgaaccgacttaaagatgaaatgaccaatcaacccgtgatagcttgtattacgattgtaagcatttgtaaagggcatgaatgtaatttctcacaggttgcgtcatgtgcctataaatacatgaatagtacctccgtactgttcacacaatcttgtaatcgcttgcacgcgacactcggattattgccttctgtcaagacgaaggtataaatgtgattaaatgttatgttttaatatttaagtttgtatgatgaaatatatgaataagtttatgtgttttgatatattattctctcatgtttcatattttatatattttatctttcattatttcataactgtaatcacgaaggtatgaccttcgtgacctttgttcatgaccttcgtctgaagatcattatacccttggggagataatgcttcaatgaacgaagggcattaacatttaacattttatgatgccttgttcttaattcgaagcatttgagaacaagttcccaacatttattatgcaagataagatcactttgtttaattggaacatggagaatcattcgagaaaacaatgcaaccacaaggactattatggctctggtcttagttaaataattagggaagctagtgtgtgagaaccttatatgaaaggggaaagtaaggagttgctcaagtataggccggtacttgggttgatctgccctatggtggtttttagacgtgggaagcctatacagcctccctgtaaaaagtagcgggttttttcatgctagtggaactttgtaaaggccttgtaatgaatcctacctcacctccttagaagtggtatatgagagtcgctatcctttggcaaatgggtaacacaacttgtggataaagatgtgcaacctttgttgagtgtaaaatgatatattagtcatgctcacggttaagagtggctcagaccctcacatgataaaattatggaattaaaataaactagacatgcattttattgttggtatttcatttatgatcttttatttaattaggatggtataaacttatacttagaaactgctaataaaattttgaccaactaaattaaaatgttgaatgctcagcgtcagccatatccttggtaagctttacacgatactttttcctacacacttattgagtaccaaccataagcatactcacccttgtttaatttgtttcttaaaattaggtcaccaagatgtggattactacgaagattttgatgagattttggttgttgttgctccggtcaacctgcctttggctctttagagggatcgtcaccatcgtttttatactcatgtagtttattttatttagttatttttgtaaagacattataactatataatgaagtttgtgataatggtttctatacaccgagtcattatatgtgtgaaatttgatcctaacgcacatataatatgcgtatagatttgttctaaaatctgggtgtgacaatgaacttggggcttcaatatgttttccgtctcttgtaaaactacctcatcattaagatgtctcattgagtgaccagtctaggataaacaatgcaacagaaaaggatggtccgggtcatgcttggttgactaattatagaaactagagtgtagtataattcaccatcatgtcatatgaggggcttagggtattgaccccatccttgctaaggatgtaatgttttatttgctattttgttagtcaacacttttgaggagtagtttatgcagctggaataaccaataatggacatgttgtttagtggatctttgtaaatgcctcaaagttaaaccctaccgactcaaaacttgtagtgtttaaatatggaccttaaccatgcactctacggggatcataacttgtggagcttcgcaagagttatacgatatgtctgaaaagcatagaaggaaccatggtaatgatcctaagcaaacttatggcaccgatagtcatatctgcaaggctaactgcatggtaagttgtattacatcatatatttctaatgactacaacatataacttgtctatataggaagttgccaccagagtagcattgagcttcatcgaggtttatattgatggacatcatggaacatacttttcaaatctagaatagttgtgcactagatgtctggtgagttgtctatactttgtatttattgtatcaaattttatagttaccttgcttggttttttaatatggacaagaaatggtcaatgatttggaagaggattgtaattggcgagtgctactagttggtccttctatcgtgcatgccagagcgggtcgaaagagccacgaaaggtatagtactataatttcacaaattctataatgcaagtacgaaattgatattctaaattgcttgtgttgtaggtactacatgtcaaatagagtgaataactccaagcatgtcagagcttagaagggagtgccctcatcatagagttgtggagctagttctcgatgaagcaacgcacaagaggagttgcttcatattcaagaagcaatgaggctatgtgatggacaggagatgcgcaatatcacgaatatgattggtagcattaggactatgaccaacaacatgacgactatttttccaactacatagcaaagaagcagaccatgtttcaagtaagttcaattgatcttctattagaatttttagcttttagcataactaatgacgtttaatctattttgttcgttggatgcattgcaacatatcacgataaacatcactttccatgtgttccaaaatatcgccactggtgtcacttttgtaatggggtcctccaccgatgcttcgaccttaggtaatcatacctttagaaaatttagcttaattataataaaatagacaattaagcttaactataggagaaacccacttggctcaattctatctaaatttgttaatttagcaaaattagctaacttagctcaaatctaggaaaataatcattatagttcaattgtagcgaaacttagtgattttagcgaaatttagtcaatctagctcaaattcaaccaaatttagtcagtttaggtgaaccacatctatccctagttgatgtaactcaattctaactaattataaacaatagagtttttagacttcaccataattacccgcacctggagacgctaatgccaagggtctaacttatttgtcaactagttgttcaactacactctaggtagcggtgagaactctaaccaactgatgattccaagttcagactaatttgatgtatggatatttgtacttattctattgtttaaaatggttattccttgaataactattgatactttacgactcatatgatgtggatgatttatgtaatggatagatacgatgtagatgatttgtgtgatgttgtattggtactaatgtatttgatgtgggtggatatatgtgtttgtgaatgtatttgatgtagatgaatatatatttattatgaatggatgcatactataacttcgacgatccacaacccggtcgccgatagaaaacctacgtacaacattataatatacaccctaaatagaatcataattactgaaataaaattgcaacacaagttagcatacctcccatgtggcacaccttcaccagcttcataagcagtcgcagtattgtcatccagtccacgtccaacttttctgccgcattctcgccgcacagaatctcctggtgatatggatttgaacctttatgcctcttgatacaaactttaacaaccgaaggctgacaccatctcgagaagcctgcaaaggaccacagcggcactgggtggagcacggtggcgctcccgacatgcttggtgccgatggtatgaattagaaatgagtgaagggaggagtacgacacagggaggagaacaacaggcgtgctggcagcgctatgcacggtggcgctcccgacatgcttggcaccggtggtatggattagaaacgagtgaagggaggagtacgacacaaggaggagaacgacaggcgtgctggcagcg

SEQ ID NO: 25300 - DNA, 1173 bp, Zea Mays
tcgggtgctggtggttgggcagtaggcaaaggcaaggccgtacgcggaagaaaccgccgcagcctgcccagcgcaagaaaaaggcagaacccagccgcggcgccctcttcgcagtcccaactcccaaccgagaggttggagatgacacatgtgtttccaagggaaggtgcctcatctagctcaacctcaatgagcagccagaggagtgaaactgatgatgataggatgattgcaatggttctctctgaagaatatgccaagttagatggtgctatggccaagcgtcttactaatttaacatcaattccccttgttccccggattaatacatacttcccgacatatagtgatgctactatggaccattatcgcctccttgacaggttaaatgcatacggcttgtttgaggtgagagtgtctggtgatggaaattgtcagtttcgtgcactctcagaccaactatatagatcacccgattatcacaagaatgttcgaaaggagattgtaaaacagctcaaggaatgtaactccttatatgaaggttacgttccaatgaaatataaacattattgcaagaaaatgaagaagtatggtgaatggggtgaccatgtcacgctacaagcagctgctgacaagtttgctgcaaagatatgtcttctaacatcattcagagatacctgttttgttgaaattgttccacaatatcaagctccacagagagagatttggctgagtttctggtccgaagttcactataactcactgtacgatgctcgagatctccctagcaaatacaagcctagaaagaagcattggttgttgttttgatatccacgcgggggtttgcttcttaatggtggaatcatattgcttgaccgcttcgaccaccggccgctggtggcagcctggtcatagctcattgtggctctatccactatatagctatgcatcaatgatccattgtattgctcggtacaactccatcacgatccaggcatacaacactagatacagttacaatgccgaacctgagccttgtgaatagatactcctttactgacatacaggttgattgtataccatgtcctatttgttcattgttatattctttatttatacagttacatattattaatcttcatcagttcattattcagttcatatttggaagaa

SEQ ID NO: 25301 - DNA, 2450 bp, Zea Mays
tatgctatttatctgtgaatattggtgtcatttgttataatttgaatatgcatctatgcaacctttgtgcaccaaacacaccataattaatttgactaattgttagtcaaagtttgcaaagttacactttccgaaacaacatgttgcttgcatatgtggatgaagggagtagtatcctggttctgtaatgccattttaaacagtattgcaatccttattttaactgcttgttgcctgccactgtttgaacattgtagtcataatttctgttcttttttgtgtgtttcatagcttaatgcctacatactctgttttgtaggtgtgtggaggcatgccaagagtgatggtcatgaggactatggcctccttgttagtgagaaggcaaggaaatacgccataatcaaggagcttgatgagccagttaccttgaaggatgggacagtggtcctgcagtttgaagtgagacttcagaatggccttgaatgcggaggtgcctacattaagtacatccgccctcaggatgctggatgggatgccaaggagtttgataatgagactccatacactattatgtttggtccagataagtgtggatcaaccaacaaggttcatttcatccttaagcacaagaatcctaagactggaaagtatgttgagcatcatctcaaattcccaccatctgtcccatatgacaagctctctcatgtctacacggctatcttgaagccagacaatgaggtcaaaattttggtagatggggaagaaaagaagaaggcgaacttcctttctgctgatgattttgagccagcacttatcccatccaagaccattcctgaccctgatgacaagaagccggaggactgggatgagagagctaaaattcctgatccagatgcagtaaagcctgatgactgggatgaggatgccccgatggaaattgtggatgatgaagccaccaagcctgagggatggttggatgatgaacctgaggagattgatgatcctgaggcagccaagcctgaggactgggacgatgaggaggatggtgaatgggaggcgccaaagattgacaaccccaagtgtgaagaggcacctggatgtggcgagtggaagaggccaatgaagcagaatcctgcttacaagggcaagtggcatgcacctatgattgacaaccccaactacaagggaatctggaagcctcaggagatccccaaccctgagtactttgagcttgacaagcctgactttgatccaattgctgctattgggattgagatctggacaatgcaggatggcatcctgtttgacaatatcttgattgctgacgatgagaaggttgccacctccattctggagaagacctggaagcccaagtatgatgttgagaaggaaaaggagaaggctgaggaggaggctgctgctggtgcagatggtctttctgagttccagaagaagatttttgacgtcctgtacaagattgctgatgttccgttcttggcaccctacaaaaccaagatcattgatgttatcgagaagggagagaagcagcccaacatcactattggcattctggtctccgttgtcgtcgtgttcgttaccgttctcttcaagatcctgtttggaggcaagaagccggtggcacctgtgaaacctgcagctgaggcgaagaagcccaaggccacagtgaccgacggtgctggaagcagtggcgacaaggatgagaaagaggacgaaaaggaggagacagcaggcccacgtcggaggacccgaagggagacatagagacctatttttgatgtgtttggatgttctggcgcctgcttattttgaggactcttaatatttctgagtgtataataggaacttgtgtcacctctgcggcttccctgctgcttatttgtttttacatggttagaccaggaaccttcacgagctgtagaatttagttcttgttggtcatttgtgtgtgtgcctgacgggtataatcccttgttcaatcagatagaggtgatggttttttttctcgtagatcacaggaaggaatatttcataaagttctcgttaaattctggacgccttttgttttacacaattccttgtatcatagaatagtcagcgagcgtatattcttacaacagtttttgtccttcaatagaaaaattacagtttatttattatgaatacagtacatacaattatagtttgggacaattgtgattgtatccttttctgtactcccaacttttattttgcccctcgattcccgacttcgtgattttgcccattcgatttgaaatggaaactgccctttgcccctctctactaacagcgttaaggaaaatctgaattaatgattttaaaaaataaaaaatatggaaatacatgaatgtatatggaaatacatgaactgtctgaactaccttaccggtacacgtccaacaccaaaccct

SEQ ID NO: 25302 - DNA, 2325 bp, Zea Mays
gctacccaccgttccttttcctctctcctgatctcagccgtgtagcctctccaccgcgcccacttcttatactgccagcgtctgctccctctcgcggaggcctcgctctggttggaaggtttggagaaactccccggctcgaggagatcgtgacattgagaggacgatgggagggcgcgcgctcctcctcctcctcctggtctcggcgttggtctttcagatccacgcctccgacccgctgctgtacgagccgttcgatgaggactttgaggggagatgggtcgtctccaagaaggatgaataccaaggtgtgtggaggcatgccaagagtgatggtcatgaggactatggcctccttgttagtgagaaggcaaggaaatacgccataatcaaggagcttgatgagccagttaccttgaaggatgggacagtggtcctgcagtttgaagtgagacttcagaatggccttgaatgcggaggtgcctacattaagtacatccgccctcaggatgctggatgggatgccaaggagtttgataatgagactccatacactattatgtttggtccagataagtgtggatcaaccaacaaggttcatttcatccttaagcacaagaatcctaagactggaaagtatgttgagcatcatctcaaattcccaccatctgtcccatatgacaagctctctcatgtctacacggctatcttgaagccagacaatgaggtcaaaattttggtagatggggaagaaaagaagaaggcgaacttcctttctgctgatgattttgagccagcacttatcccatccaagaccattcctgaccctgatgacaagaagccggaggactgggatgagagagctaaaattcctgatccagatgcagccaagcctgaggactgggacgatgaggaggatggtgaatgggaggcgccaaagattgacaaccccaagtgtgaagaggcacctggatgtggcgagtggaagaggccaatgaagcagaatcctgcttacaagggcaagtggcatgcacctatgattgacaaccccaactacaagggaatctggaagcctcaggagatccccaaccctgagtactttgagcttgacaagcctgactttgatccaattgctgctattgggattgagatctggacaatgcaggatggcatcctgtttgacaatatcttgattgctgacgatgagaaggttgccacctccattctggagaagacctggaagcccaagtatgatgttgagaaggaaaaggagaaggctgaggaggaggctgctgctggtgcagatggtctttctgagttccagaagaagatttttgacgtcctgtacaagattgctgatgttccgttcttggcaccctacaaaaccaagatcattgatgttatcgagaagggagagaagcagcccaacatcactattggcattctggtctccgttgtcgtcgtgttcgttaccgttctcttcaagatcctgtttggaggcaagaagccggtggcacctgtgaaacctgcagctgaggcgaagaagcccaaggccacagtgaccgacggtgctggaagcagtggcgacaaggatgagaaagaggacgaaaaggaggagacagcaggcccacgtcggaggacccgaagggagacatagagacctatttttgatgtgtttggatgttctggcgcctgcttattttgaggactcttaatatttctgagtgtataataggaacttgtgtcacctctgcggcttccctgctgcttatttgtttttacatggttagaccaggaaccttcacgagctgtagaatttagttcttgttggtcatttgtgtgtgtgcctgacgggtataatcccttgttcaatcagatagaggtgatggttttttttctcgtagatcacaggaaggaatatttcataaagttctcgttaaattctggacgccttttgttttacacaattccttgtatcatagaatagtcagcgagcgtatattcttacaacagtttttgtccttcaatagaaaaattacagtttatttattatgaatacagtacatacaattatagtttgggacaattgtgattgtatccttttctgtactcccaacttttattttgcccctcgattcccgacttcgtgattttgcccattcgatttgaaatggaaactgccctttgcccctctctactaacagcgttaaggaaaatctgaattaatgattttaaaaaataaaaaatatggaaatacatgaatgtatatggaaatacatgaactgtctgaactaccttaccggtacacgtccaacaccaaaccct

SEQ ID NO: 25303 - DNA, 2078 bp, Zea Mays
ctttttttggcaggcttcggtatatccaggcataaagaatacccaaggctcagatttgctccttcatcttcttcctcccacacctcacctacaaactgctctatctcttgtgttgtgcatcgacatcattattcagggttagaagatggcaatactggtcatcaccatggtgaacgtgcagtgctgccactgcagagccagcatcaccaagatcctggaaagccacaaagaggagttttgcatcgagaagattgaattcgaggagaagctcaacaaggtgattgtacgcgggaagttcgacggcgagaagctcaagaaggcgatactagacaaggccggcgagaccgtgaagatcaaggagatagccctcgtcgacaagtggccacccccacccccaccttcgcctcccccgcccaaaccggaatgcaaggtggtgccgtacccttacccgtacccgtatccgccgtacccgtggtcgtgcccaccacctcgcccgccgtgccactgctgcaagccgccgacaccgtcgccgccgaaaccgccgccgccacagccgacgccgtgccagtgccactgctgcaagccgccgacaccgtcgccgccgaagccgccaccacagccgacgccgtgccagtgccactgctgtaagcctccggcaccatcgccgccgaagccgacgccgtgccagtgccactgctgtaagcctccggcaccgccgccgccgaagccgccgccacagccgacgccgtgctgcaagcagtgcgaggactcgcacgacaaggataaatgcaagcgttgcccaccatgcccgccgtgcccaccgtgcccgccgtgtccaccgtgcccgcccaactactggccgccacacccgtggccctgccagtgcccaccacaggacagccagtgcaccatcgtgtgatccaccgtccacgtacgcttcctttcttgcaatctgccgcctgctgcgatcgtcgtgtgatctgtcccaataatctcgccctagtcgtgtacttggttctcgcgttcgtttgtgtcgtttgggttgtgtggtgtgtgtcctgtcttgtcttgtcttgtaaaccattctctctttcagctgatgatgtgtttattcatttcatgttactttcttaatagcatcttcgagagcattgctaaaaatcattctctaatttaatattctctcccttattttttatttatcgtattttagttcaaaattgaactagtcggcgataaatattcaatatggggatagtatttaaagagacatttgtatgaaaattgttttcttttatctctttctactattcaaaagtatttttatatcttatatgggcatttaaaaaactgttctcgctgtctatctttagctttttgaaaatttcaaaatagataatggctatatttagaaaatcaaagtgctacaggatatttttttactaacatttttattcccaacaattacggaagagagtctcttactctctagtctctactaataatacctagtagtagtttcgaaactcaaattttcttcatgattggagcagattatgatggaaatgaatcttaaggcttcttccgttagggatgtattgaatggatttaaggggattaaatctcttgctatttaaaatttaataggaggaggagatttaatctccattcatccctgtgtaaccgaataagaccaagttttgttatgtgcgcgcggcatggacgcgctgtgaagagatgccagtttcgtggggttttattactccggagtccggtgtcaacatctgtgagaaacatgtggaattgaggaggctttggacttcatgctatgtgcgccggatcggatggatggataacgcatagacggcttattaggagcagtggtcagcaacataccaaagagctgcagaagatacctaatattcagtgtgtgtcatgtcagtgtggtatatagaagttacacctgtgatgtttagtaacaactacatacgaggaaaattaggaggtgcatgttcacgaaatcagccgagacgcagcttccaatatagagaattcctatcaatttatttactatgaac

SEQ ID NO: 25304 - DNA, 734 bp, Zea Mays
ctttttttggcaggcttcggtatatccaggcataaagaatacccaaggctcagatttgctccttcatcttcttcctcccacacctcacctacaaactgctctatctcttgtgttgtgcatcgacatcattattcagggttagaagatggcaatactggtcatcaccatggtgaacgtgcagtgctgccactgcagagccagcatcaccaagatcctggaaagccacaaaggaggaggagatttaatctccattcatccctgtgtaaccgaataagaccaagttttgttatgtgcgcgcggcatggacgcgctgtgaagagatgccaggtgggtactagtcgatcatggtaacaatttctagcagatgaaaattctctgaaaacttcttgctgtgatgcagtttcgtggggttttattactccggagtccggtgtcaacatctgtgagaaacatgtggaattgaggaggctttggacttcatgctatgtgcgccggatcggatggatggataacgcatagacggcttattaggagcagtggtcagcaacataccaaagagctgcagaagatacctaatattcagtgtgtgtcatgtcagtgtggtatatagaagttacacctgtgatgtttagtaacaactacatacgaggaaaattaggaggtgcatgttcacgaaatcagccgagacgcagcttccaatatagagaattcctatcaatttatttactatgaac

SEQ ID NO: 25305 - DNA, 1478 bp, Zea Mays
accagcaccatcgagatgggataacgcaatgccagcatcgttgctttttttggcaggcttcggtatatccaggcataaagaatacccaaggctcagatttgctccttcatcttcttcctcccacacctcacctacaaactgctctatctcttgtgttgtgcatcgacatcattattcagggttagaagatggcaatactggtcatcaccatggtgaacgtgcagtgctgccactgcagagccagcatcaccaagatcctggaaagccacaaagaggagttttgcatcgagaagattgaattcgaggagaagctcaacaaggtgattgtacgcgggaagttcgacggcgagaagctcaagaaggcgatactagacaaggccggcgagaccgtgaagatcaaggagatagccctcgtcgacaagtggccacccccacccccaccttcgcctcccccgcccaaaccggaatgcaaggtggtgccgtacccttacccgtacccgtatccgccgtacccgtggtcgtgcccaccacctcgcccgccgtgccactgctgcaagccgccgacaccgtcgccgccgaaaccgccgccgccacagccgacgccgtgccagtgccactgctgcaagccgccgacaccgtcgccgccgaagccgccaccacagccgacgccgtgccagtgccactgctgtaagcctccggcaccatcgccgccgaagccgacgccgtgccagtgccactgctgtaagcctccggcaccgccgccgccgaagccgccgccacagccgacgccgtgctgcaagcagtgcgaggactcgcacgacaaggataaatgcaagcgttgcccaccatgcccgccgtgcccaccgtgcccgccgtgtccaccgtgcccgcccaactactggccgccacacccgtggccctgccagtgcccaccacaggacagccagtgcaccatcgtgtgatccaccgtccacgaggaggagatttaatctccattcatccctgtgtaaccgaataagaccaagttttgttatgtgcgcgcggcatggacgcgctgtgaagagatgccaggtgggtactagtcgatcatggtaacaatttctagcagatgaaaattctctgaaaacttcttgctgtgatgcagtttcgtggggttttattactccggagtccggtgtcaacatctgtgagaaacatgtggaattgaggaggctttggacttcatgctatgtgcgccggatcggatggatggataacgcatagacggcttattaggagcagtggtcagcaacataccaaagagctgcagaagatacctaatattcagtgtgtgtcatgtcagtgtggtatatagaagttacacctgtgatgtttagtaacaactacatacgaggaaaattaggaggtgcatgttcacgaaatcagccgagacgcagcttccaatatagagaattcctatcaatttatttactatgaac

SEQ ID NO: 25306 - DNA, 1512 bp, Zea Mays
ttgtgcgcagatggatgggtttaccttgccaccatttgagtcaacctgcatctttagggacaacgatattataaggggacaaaggctgaaggtgacaaattctggaaagcatatagattacagcaagaaggaacaaaatggatctaaaaagttgaagctgtcagttattgatattgaagctaagaaagcaactccacaacatgaaactaccactaccttagtggagcagcaaaaatcagaggggaactatcaaactgagttgaaatgtgaggcaaaggtgacaaactatgatgctcaaagtgacacaaaaaagttggagagtcgaagtgctcgccgcaagaaaattaaaaggctaatgaaacaaagaggaaaattacaaatagaaaagaatgtgcatggagattcaccaatagctgctgattgtccatcatcaagcaatcaagatggcttgcctgtcccatcaagcaatcaaaatggatcacatgttcatttttcaagcctcaaagcagatgaggacgaatctgaaacgtcggatgagattgtcccagttgtggttcggcctggtcacattcgctttgagccagcaggttggaaaagttgtgttatatgatcccatatcattgcgtatcattctcttacccgttcaagagtatccaatcaccaccgaggaaaacgaagacaaggacgagccagatatgcttgtggacttgtcaccgtacaaggaagatggctccttggagatcgagtactcttcacttcttgatgtaaggctactgaagggtattgaaccagtccccggggctttcagtactcccttggcagaaacatgcaatgaagttggatcggcactggccaaaggaaggccagttaccttacacaaaaatgaaggcaatattgagagccagaaatcacccttggttgcaaacaacactaatggtaaagaacacaaactaggaaagtcagaaaagacggtttgggaaaaaaatgacgaacccggtgatgaggtcgatgttcagcaaaatggctggggaacatggaaacaaaatagtacgtcagcttggtcttatagagcccttaggagcagcgcccttggcccgacgatggcacttctacgagggaagaacaaccagaggggtaaaccaccctatcgaaagaagggcaagtaattgcctatgtgtttagtgtttaagttcaacgatacctatgtaatcctgtgttggtccaatcttttagcagttgatcttatttatgtaaaatttggcgaggaagagtgactgccgttgctgccctggtcattttgaagtctggccaagcgaattgttatcgtttgcaaaggatcgttatgatttgctccgacacttgtcaaatgctggttttagagttttgcatgtgcactaaaaatgttcataattccatatctgccacaaaaggttgtagcaccaaacgctccacctaaggccttgttcagttatttccattacatatgaattgggtgggattggaaaaaattaa

SEQ ID NO: 25307 - DNA, 2163 bp, Zea Mays
ttgtgcgcagatggatgggtttaccttgccaccatttgagtcaacctgcatctttagggacaacgatattataagggttaaacaaaaatcctgtacgaagcacatagagcacaatgatgtgcactgtattcaagatcatgagataatagagaagagatcacttccagttgatggcaaaatccttgcaatccaggataaggaggatgtctgtaaacaccaagaagaagaggcacatgacgatcaccagcttgaagaaaatgccactgctagccatagcacagaaaataatggtacaagtttgaagaggaagcggaatgatggggttgcagatatacctgagagctcaaagggacaaaggctgaaggtgacaaattctggaaagcatatagattacagcaagaaggaacaaaatggatctaaaaagttgaagctgtcagttattgatattgaagctaagaaagcaactccacaacatgaaactaccactaccttagtggagcagcaaaaatcagaggggaactatcaaactgagttgaaatgtgaggcaaaggtgacaaactatgatgctcaaagtgacacaaaaaagttggagagtcgaagtgctcgccgcaagaaaattaaaaggctaatgaaacaaagaggaaaattacaaatagaaaagaatgtgcatggagattcaccaatagctgctgattgtccatcatcaagcaatcaagatggcttgcctgtcccatcaagcaatcaaaatggatcacatgttcatttttcaagcctcaaagcagatgaggacgaatctgaaacgtcggatgagattgtcccagttgtggttcggcctggtcacattcgctttgagccagcagggcacattccaatggagtggaacattgagcaaaaagaagggccagaagtggggaataaatagctcaaacaagaaaaatgccgatgtcggctatcatgcaggaatagctggaagcaacacagaagttaataatcttgtcatggacattaaggttactgaaaatggcttctgtgctgtcagtaatagaaggatcgatgaaggcagtaatgttgagatgtccagtgtgaaggctgttgctaatgaagaaaagtctagaggtgtaccttttgatttcgagagcttgtaccccctaacgcaacttccaaaggagggagatctgattgcataccgattggttgagctgtcttccatgttgtgtccggagctgtcttcgttccgtgttggaaaagttgtgttatatgatcccatatcattgcgtatcattctcttacccgttcaagagtatccaatcaccaccgaggaaaacgaagacaaggacgagccagatatgcttgtggacttgtcaccgtacaaggaagatggctccttggagatcgagtactcttcacttcttgatgtaaggctactgaagggtattgaaccagtccccggggctttcagtactcccttggcagaaacatgcaatgaagttggatcggcactggccaaaggaaggccagttaccttacacaaaaatgaaggcaatattgagagccagaaatcacccttggttgcaaacaacactaatggtaaagaacacaaactaggaaagtcagaaaagacggtttgggaaaaaaatgacgaacccggtgatgaggtcgatgttcagcaaaatggctggggaacatggaaacaaaatagtacgtcagcttggtcttatagagcccttaggagcagcgcccttggcccgacgatggcacttctacgagggaagaacaaccagaggggtaaaccaccctatcgaaagaagggcaagtaattgcctatgtgtttagtgtttaagttcaacgatacctatgtaatcctgtgttggtccaatcttttagcagttgatcttatttatgtaaaatttggcgaggaagagtgactgccgttgctgccctggtcattttgaagtctggccaagcgaattgttatcgtttgcaaaggatcgttatgatttgctccgacacttgtcaaatgctggttttagagttttgcatgtgcactaaaaatgttcataattccatatctgccacaaaaggttgtagcaccaaacgctccacctaaggccttgttcagttatttccattacatatgaattgggtgggattggaaaaaattaa

SEQ ID NO: 25308 - DNA, 1910 bp, Zea Mays
ttgtgcgcagatggatgggtttaccttgccaccatttgagtcaacctgcatctttagggacaacgatattataaggggacaaaggctgaaggtgacaaattctggaaagcatatagattacagcaagaaggaacaaaatggatctaaaaagttgaagctgtcagttattgatattgaagctaagaaagcaactccacaacatgaaactaccactaccttagtggagcagcaaaaatcagaggggaactatcaaactgagttgaaatgtgaggcaaaggtgacaaactatgatgctcaaagtgacacaaaaaagttggagagtcgaagtgctcgccgcaagaaaattaaaaggctaatgaaacaaagaggaaaattacaaatagaaaagaatgtgcatggagattcaccaatagctgctgattgtccatcatcaagcaatcaagatggcttgcctgtcccatcaagcaatcaaaatggatcacatgttcatttttcaagcctcaaagcagatgaggacgaatctgaaacgtcggatgagattgtcccagttgtggttcggcctggtcacattcgctttgagccagcaggcagagaacccgacaaatcgccagcaaaagaattacagggcacattccaatggagtggaacattgagcaaaaagaagggccagaagtggggaataaatagctcaaacaagaaaaatgccgatgtcggctatcatgcaggaatagctggaagcaacacagaagttaataatcttgtcatggacattaaggttactgaaaatggcttctgtgctgtcagtaatagaaggatcgatgaaggcagtaatgttgagatgtccagtgtgaaggctgttgctaatgaagaaaagtctagaggtgtaccttttgatttcgagagcttgtaccccctaacgcaacttccaaaggagggagatctgattgcataccgattggttgagctgtcttccatgttgtgtccggagctgtcttcgttccgtgttggaaaagttgtgttatatgatcccatatcattgcgtatcattctcttacccgttcaagagtatccaatcaccaccgaggaaaacgaagacaaggacgagccagatatgcttgtggacttgtcaccgtacaaggaagatggctccttggagatcgagtactcttcacttcttgatgtaaggctactgaagggtattgaaccagtccccggggctttcagtactcccttggcagaaacatgcaatgaagttggatcggcactggccaaaggaaggccagttaccttacacaaaaatgaaggcaatattgagagccagaaatcacccttggttgcaaacaacactaatggaaagtcagaaaagacggtttgggaaaaaaatgacgaacccggtgatgaggtcgatgttcagcaaaatggctggggaacatggaaacaaaatagtacgtcagcttggtcttatagagcccttaggagcagcgcccttggcccgacgatggcacttctacgagggaagaacaaccagaggggtaaaccaccctatcgaaagaagggcaagtaattgcctatgtgtttagtgtttaagttcaacgatacctatgtaatcctgtgttggtccaatcttttagcagttgatcttatttatgtaaaatttggcgaggaagagtgactgccgttgctgccctggtcattttgaagtctggccaagcgaattgttatcgtttgcaaaggatcgttatgatttgctccgacacttgtcaaatgctggttttagagttttgcatgtgcactaaaaatgttcataattccatatctgccacaaaaggttgtagcaccaaacgctccacctaaggccttgttcagttatttccattacatatgaattgggtgggattggaaaaaattaa

SEQ ID NO: 25309 - DNA, 2091 bp, Zea Mays
ttgtgcgcagatggatgggtttaccttgccaccatttgagtcaacctgcatctttagggacaacgatattataagggttaaacaaaaatcctgtacgaagcacatagagcacaatgatgtgcactgtattcaagatcatgagataatagagaagagatcacttccagttgatggcaaaatccttgcaatccaggataaggaggatgtctgtaaacaccaagaagaagaggcacatgacgatcaccagcttgaagaaaatgccactgctagccatagcacagaaaataatggtacaagtttgaagaggaagcggaatgatggggttgcagatatacctgagagctcaaagggacaaaggctgaaggtgacaaattctggaaagcatatagattacagcaagaaggaacaaaatggatctaaaaagttgaagctgtcagttattgatattgaagctaagaaagcaactccacaacatgaaactaccactaccttagtggagcagcaaaaatcagaggggaactatcaaactgagttgaaatgtgaggcaaaggtgacaaactatgatgctcaaagtgacacaaaaaagttggagagtcgaagtgctcgccgcaagaaaattaaaaggctaatgaaacaaagaggaaaattacaaatagaaaagaatgtgcatggagattcaccaatagctgctgattgtccatcatcaagcaatcaagatggcttgcctgtcccatcaagcaatcaaaatggatcacatgttcatttttcaagcctcaaagcagatgaggacgaatctgaaacgtcggatgagattgtcccagttgtggttcggcctggtcacattcgctttgagccagcagggcacattccaatggagtggaacattgagcaaaaagaagggccagaagtggggaataaatagctcaaacaagaaaaatgccgatgtcggctatcatgcaggaatagctggaagcaacacagaagttaataatcttgtcatggacattaaggttactgaaaatggcttctgtgctgtcagtaatagaaggatcgatgaaggcagtaatgttgagatgtccagtgtgaaggctgttgctaatgaagaaaagtctagaggtgtaccttttgatttcgagagcttgtaccccctaacgcaacttccaaaggttggaaaagttgtgttatatgatcccatatcattgcgtatcattctcttacccgttcaagagtatccaatcaccaccgaggaaaacgaagacaaggacgagccagatatgcttgtggacttgtcaccgtacaaggaagatggctccttggagatcgagtactcttcacttcttgatgtaaggctactgaagggtattgaaccagtccccggggctttcagtactcccttggcagaaacatgcaatgaagttggatcggcactggccaaaggaaggccagttaccttacacaaaaatgaaggcaatattgagagccagaaatcacccttggttgcaaacaacactaatggtaaagaacacaaactaggaaagtcagaaaagacggtttgggaaaaaaatgacgaacccggtgatgaggtcgatgttcagcaaaatggctggggaacatggaaacaaaatagtacgtcagcttggtcttatagagcccttaggagcagcgcccttggcccgacgatggcacttctacgagggaagaacaaccagaggggtaaaccaccctatcgaaagaagggcaagtaattgcctatgtgtttagtgtttaagttcaacgatacctatgtaatcctgtgttggtccaatcttttagcagttgatcttatttatgtaaaatttggcgaggaagagtgactgccgttgctgccctggtcattttgaagtctggccaagcgaattgttatcgtttgcaaaggatcgttatgatttgctccgacacttgtcaaatgctggttttagagttttgcatgtgcactaaaaatgttcataattccatatctgccacaaaaggttgtagcaccaaacgctccacctaaggccttgttcagttatttccattacatatgaattgggtgggattggaaaaaattaa

SEQ ID NO: 25310 - DNA, 2111 bp, Zea Mays
ttgtgcgcagatggatgggtttaccttgccaccatttgagtcaacctgcatctttagggacaacgatattataagggttaaacaaaaatcctgtacgaagcacatagagcacaatgatgtgcactgtattcaagatcatgagataatagagaagagatcacttccagttgatggcaaaatccttgcaatccaggataaggaggatgtctgtaaacaccaagaagaagaggcacatgacgatcaccagcttgaagaaaatgccactgctagccatagcacagaaaataatggtacaagtttgaagaggaagcggaatgatggggttgcagatatacctgagagctcaaagggacaaaggctgaaggtgacaaattctggaaagcatatagattacagcaagaaggaacaaaatggatctaaaaagttgaagctgtcagttattgatattgaagctaagaaagcaactccacaacatgaaactaccactaccttagtggagcagcaaaaatcagaggggaactatcaaactgagttgaaatgtgaggcaaaggtgacaaactatgatgctcaaagtgacacaaaaaagttggagagtcgaagtgctcgccgcaagaaaattaaaaggctaatgaaacaaagaggaaaattacaaatagaaaagaatgtgcatggagattcaccaatagctgctgattgtccatcatcaagcaatcaagatggcttgcctgtcccatcaagcaatcaaaatggatcacatgttcatttttcaagcctcaaagcagatgaggacgaatctgaaacgtcggatgagattgtcccagttgtggttcggcctggtcacattcgctttgagccagcaggcagagaacccgacaaatcgccagcaaaagaattacagggcacattccaatggagtggaacattgagcaaaaagaagggccagaagtggggaataaatagctcaaacaagaaaaatgccgatgtcggctatcatgcaggaatagctggaagcaacacagaagttaataatcttgtcatggacattaaggttactgaaaatggcttctgtgctgtcagtaatagaaggatcgatgaaggcagtaatgttgagatgtccagtgtgaaggctgttgctaatgaagaaaagtctagaggtgtaccttttgatttcgagagcttgtaccccctaacgcaacttccaaaggttggaaaagttgtgttatatgatcccatatcattgcgtatcattctcttacccgttcaagagtatccaatcaccaccgaggaaaacgaagacaaggacgagccagatatgcttgtggacttgtcaccgtacaaggaagatggctccttggagatcgagtactcttcacttcttgatgtaaggctactgaagggtattgaaccagtccccggggctttcagtactcccttggcagaaacatgcaatgaagttggatcggcactggccaaaggaaggccagttaccttacacaaaaatgaaggcaatattgagagccagaaatcacccttggttgcaaacaacactaatggaaagtcagaaaagacggtttgggaaaaaaatgacgaacccggtgatgaggtcgatgttcagcaaaatggctggggaacatggaaacaaaatagtacgtcagcttggtcttatagagcccttaggagcagcgcccttggcccgacgatggcacttctacgagggaagaacaaccagaggggtaaaccaccctatcgaaagaagggcaagtaattgcctatgtgtttagtgtttaagttcaacgatacctatgtaatcctgtgttggtccaatcttttagcagttgatcttatttatgtaaaatttggcgaggaagagtgactgccgttgctgccctggtcattttgaagtctggccaagcgaattgttatcgtttgcaaaggatcgttatgatttgctccgacacttgtcaaatgctggttttagagttttgcatgtgcactaaaaatgttcataattccatatctgccacaaaaggttgtagcaccaaacgctccacctaaggccttgttcagttatttccattacatatgaattgggtgggattggaaaaaattaa

SEQ ID NO: 25311 - DNA, 2206 bp, Zea Mays
atgcttcatttcttgctgaatttcccttccatttctttgctatatctttattatttacaaagacgagctttgtgtataaattgtgaatgaatggtcttttgtgcgcagatggatgggtttaccttgccaccatttgagtcaacctgcatctttagggacaacgatattataagggttaaacaaaaatcctgtacgaagcacatagagcacaatgatgtgcactgtattcaagatcatgagataatagagaagagatcacttccagttgatggcaaaatccttgcaatccaggataaggaggatgtctgtaaacaccaagaagaagaggcacatgacgatcaccagcttgaagaaaatgccactgctagccatagcacagaaaataatggtacaagtttgaagaggaagcggaatgatggggttgcagatatacctgagagctcaaagggacaaaggctgaaggtgacaaattctggaaagcatatagattacagcaagaaggaacaaaatggatctaaaaagttgaagctgtcagttattgatattgaagctaagaaagcaactccacaacatgaaactaccactaccttagtggagcagcaaaaatcagaggggaactatcaaactgagttgaaatgtgaggcaaaggtgacaaactatgatgctcaaagtgacacaaaaaagaatgtgcatggagattcaccaatagctgctgattgtccatcatcaagcaatcaagatggcttgcctgtcccatcaagcaatcaaaatggatcacatgttcatttttcaagcctcaaagcagatgaggacgaatctgaaacgtcggatgagattgtcccagttgtggttcggcctggtcacattcgctttgagccagcaggcagagaacccgacaaatcgccagcaaaagaattacagggcacattccaatggagtggaacattgagcaaaaagaagggccagaagtggggaataaatagctcaaacaagaaaaatgccgatgtcggctatcatgcaggaatagctggaagcaacacagaagttaataatcttgtcatggacattaaggttactgaaaatggcttctgtgctgtcagtaatagaaggatcgatgaaggcagtaatgttgagatgtccagtgtgaaggctgttgctaatgaagaaaagtctagaggtgtaccttttgatttcgagagcttgtaccccctaacgcaacttccaaaggagggagatctgattgcataccgattggttgagctgtcttccatgttgtgtccggagctgtcttcgttccgtgttggaaaagttgtgttatatgatcccatatcattgcgtatcattctcttacccgttcaagagtatccaatcaccaccgaggaaaacgaagacaaggacgagccagatatgcttgtggacttgtcaccgtacaaggaagatggctccttggagatcgagtactcttcacttcttgatgtaaggctactgaagggtattgaaccagtccccggggctttcagtactcccttggcagaaacatgcaatgaagttggatcggcactggccaaaggaaggccagttaccttacacaaaaatgaaggcaatattgagagccagaaatcacccttggttgcaaacaacactaatggaaagtcagaaaagacggtttgggaaaaaaatgacgaacccggtgatgaggtcgatgttcagcaaaatggctggggaacatggaaacaaaatagtacgtcagcttggtcttatagagcccttaggagcagcgcccttggcccgacgatggcacttctacgagggaagaacaaccagaggggtaaaccaccctatcgaaagaagggcaagtaattgcctatgtgtttagtgtttaagttcaacgatacctatgtaatcctgtgttggtccaatcttttagcagttgatcttatttatgtaaaatttggcgaggaagagtgactgccgttgctgccctggtcattttgaagtctggccaagcgaattgttatcgtttgcaaaggatcgttatgatttgctccgacacttgtcaaatgctggttttagagttttgcatgtgcactaaaaatgttcataattccatatctgccacaaaaggttgtagcaccaaacgctccacctaaggccttgttcagttatttccattacatatgaattgggtgggattggaaaaaattaa

SEQ ID NO: 25312 - DNA, 2236 bp, Zea Mays
tgtggaccattgatgcttcatttcttgctgaatttcccttccatttctttgctatatctttattatttacaaagacgagctttgtgtataaattgtgaatgaatggtcttttgtgcgcagatggatgggtttaccttgccaccatttgagtcaacctgcatctttagggacaacgatattataagggttaaacaaaaatcctgtacgaagcacatagagcacaatgatgtgcactgtattcaagatcatgagataatagagaagagatcacttccagttgatggcaaaatccttgcaatccaggataaggaggatgtctgtaaacaccaagaagaagaggcacatgacgatcaccagcttgaagaaaatgccactgctagccatagcacagaaaataatggtacaagtttgaagaggaagcggaatgatggggttgcagatatacctgagagctcaaagggacaaaggctgaaggtgacaaattctggaaagcatatagattacagcaagaaggaacaaaatggatctaaaaagttgaagctgtcagttattgatattgaagctaagaaagcaactccacaacatgaaactaccactaccttagtggagcagcaaaaatcagaggggaactatcaaactgagttgaaatgtgaggcaaaggtgacaaactatgatgctcaaagtgacacaaaaaagaatgtgcatggagattcaccaatagctgctgattgtccatcatcaagcaatcaagatggcttgcctgtcccatcaagcaatcaaaatggatcacatgttcatttttcaagcctcaaagcagatgaggacgaatctgaaacgtcggatgagattgtcccagttgtggttcggcctggtcacattcgctttgagccagcaggcagagaacccgacaaatcgccagcaaaagaattacagggcacattccaatggagtggaacattgagcaaaaagaagggccagaagtggggaataaatagctcaaacaagaaaaatgccgatgtcggctatcatgcaggaatagctggaagcaacacagaagttaataatcttgtcatggacattaaggttactgaaaatggcttctgtgctgtcagtaatagaaggatcgatgaaggcagtaatgttgagatgtccagtgtgaaggctgttgctaatgaagaaaagtctagaggtgtaccttttgatttcgagagcttgtaccccctaacgcaacttccaaaggagggagatctgattgcataccgattggttgagctgtcttccatgttgtgtccggagctgtcttcgttccgtgttggaaaagttgtgttatatgatcccatatcattgcgtatcattctcttacccgttcaagagtatccaatcaccaccgaggaaaacgaagacaaggacgagccagatatgcttgtggacttgtcaccgtacaaggaagatggctccttggagatcgagtactcttcacttcttgatgtaaggctactgaagggtattgaaccagtccccggggctttcagtactcccttggcagaaacatgcaatgaagttggatcggcactggccaaaggaaggccagttaccttacacaaaaatgaaggcaatattgagagccagaaatcacccttggttgcaaacaacactaatggtaaagaacacaaactaggaaagtcagaaaagacggtttgggaaaaaaatgacgaacccggtgatgaggtcgatgttcagcaaaatggctggggaacatggaaacaaaatagtacgtcagcttggtcttatagagcccttaggagcagcgcccttggcccgacgatggcacttctacgagggaagaacaaccagaggggtaaaccaccctatcgaaagaagggcaagtaattgcctatgtgtttagtgtttaagttcaacgatacctatgtaatcctgtgttggtccaatcttttagcagttgatcttatttatgtaaaatttggcgaggaagagtgactgccgttgctgccctggtcattttgaagtctggccaagcgaattgttatcgtttgcaaaggatcgttatgatttgctccgacacttgtcaaatgctggttttagagttttgcatgtgcactaaaaatgttcataattccatatctgccacaaaaggttgtagcaccaaacgctccacctaaggccttgttcagttatttccattacatatgaattgggtgggattggaaaaaattaa

SEQ ID NO: 25313 - DNA, 2244 bp, Zea Mays
tcctgtgtggaccattgatgcttcatttcttgctgaatttcccttccatttctttgctatatctttattatttacaaagacgagctttgtgtataaattgtgaatgaatggtcttttgtgcgcagatggatgggtttaccttgccaccatttgagtcaacctgcatctttagggacaacgatattataagggttaaacaaaaatcctgtacgaagcacatagagcacaatgatgtgcactgtattcaagatcatgagataatagagaagagatcacttccagttgatggcaaaatccttgcaatccaggataaggaggatgtctgtaaacaccaagaagaagaggcacatgacgatcaccagcttgaagaaaatgccactgctagccatagcacagaaaataatggtacaagtttgaagaggaagcggaatgatggggttgcagatatacctgagagctcaaagggacaaaggctgaaggtgacaaattctggaaagcatatagattacagcaagaaggaacaaaatggatctaaaaagttgaagctgtcagttattgatattgaagctaagaaagcaactccacaacatgaaactaccactaccttagtggagcagcaaaaatcagaggggaactatcaaactgagttgaaatgtgaggcaaaggtgacaaactatgatgctcaaagtgacacaaaaaagttggagagtcgaagtgctcgccgcaagaaaattaaaaggctaatgaaacaaagaggaaaattacaaatagaaaagaatgtgcatggagattcaccaatagctgctgattgtccatcatcaagcaatcaagatggcttgcctgtcccatcaagcaatcaaaatggatcacatgttcatttttcaagcctcaaagcagatgaggacgaatctgaaacgtcggatgagattgtcccagttgtggttcggcctggtcacattcgctttgagccagcaggcagagaacccgacaaatcgccagcaaaagaattacagggcacattccaatggagtggaacattgagcaaaaagaagggccagaagtggggaataaatagctcaaacaagaaaaatgccgatgtcggctatcatgcaggaatagctggaagcaacacagaagttaataatcttgtcatggacattaaggttactgaaaatggcttctgtgctgtcagtaatagaaggatcgatgaaggcagtaatgttgagatgtccagtgtgaaggctgttgctaatgaagaaaagtctagaggtgtaccttttgatttcgagagcttgtaccccctaacgcaacttccaaaggttggaaaagttgtgttatatgatcccatatcattgcgtatcattctcttacccgttcaagagtatccaatcaccaccgaggaaaacgaagacaaggacgagccagatatgcttgtggacttgtcaccgtacaaggaagatggctccttggagatcgagtactcttcacttcttgatgtaaggctactgaagggtattgaaccagtccccggggctttcagtactcccttggcagaaacatgcaatgaagttggatcggcactggccaaaggaaggccagttaccttacacaaaaatgaaggcaatattgagagccagaaatcacccttggttgcaaacaacactaatggtaaagaacacaaactaggaaagtcagaaaagacggtttgggaaaaaaatgacgaacccggtgatgaggtcgatgttcagcaaaatggctggggaacatggaaacaaaatagtacgtcagcttggtcttatagagcccttaggagcagcgcccttggcccgacgatggcacttctacgagggaagaacaaccagaggggtaaaccaccctatcgaaagaagggcaagtaattgcctatgtgtttagtgtttaagttcaacgatacctatgtaatcctgtgttggtccaatcttttagcagttgatcttatttatgtaaaatttggcgaggaagagtgactgccgttgctgccctggtcattttgaagtctggccaagcgaattgttatcgtttgcaaaggatcgttatgatttgctccgacacttgtcaaatgctggttttagagttttgcatgtgcactaaaaatgttcataattccatatctgccacaaaaggttgtagcaccaaacgctccacctaaggccttgttcagttatttccattacatatgaattgggtgggattggaaaaaattaa

SEQ ID NO: 25314 - DNA, 2187 bp, Zea Mays
tttcctgtgtggaccattgatgcttcatttcttgctgaatttcccttccatttctttgctatatctttattatttacaaagacgagctttgtgtataaattgtgaatgaatggtcttttgtgcgcagatggatgggtttaccttgccaccatttgagtcaacctgcatctttagggacaacgatattataagggttaaacaaaaatcctgtacgaagcacatagagcacaatgatgtgcactgtattcaagatcatgagataatagagaagagatcacttccagttgatggcaaaatccttgcaatccaggataaggaggatgtctgtaaacaccaagaagaagaggcacatgacgatcaccagcttgaagaaaatgccactgctagccatagcacagaaaataatggtacaagtttgaagaggaagcggaatgatggggttgcagatatacctgagagctcaaagggacaaaggctgaaggtgacaaattctggaaagcatatagattacagcaagaaggaacaaaatggatctaaaaagttgaagctgtcagttattgatattgaagctaagaaagcaactccacaacatgaaactaccactaccttagtggagcagcaaaaatcagaggggaactatcaaactgagttgaaatgtgaggcaaaggtgacaaactatgatgctcaaagtgacacaaaaaagaatgtgcatggagattcaccaatagctgctgattgtccatcatcaagcaatcaagatggcttgcctgtcccatcaagcaatcaaaatggatcacatgttcatttttcaagcctcaaagcagatgaggacgaatctgaaacgtcggatgagattgtcccagttgtggttcggcctggtcacattcgctttgagccagcagggcacattccaatggagtggaacattgagcaaaaagaagggccagaagtggggaataaatagctcaaacaagaaaaatgccgatgtcggctatcatgcaggaatagctggaagcaacacagaagttaataatcttgtcatggacattaaggttactgaaaatggcttctgtgctgtcagtaatagaaggatcgatgaaggcagtaatgttgagatgtccagtgtgaaggctgttgctaatgaagaaaagtctagaggtgtaccttttgatttcgagagcttgtaccccctaacgcaacttccaaaggagggagatctgattgcataccgattggttgagctgtcttccatgttgtgtccggagctgtcttcgttccgtgttggaaaagttgtgttatatgatcccatatcattgcgtatcattctcttacccgttcaagagtatccaatcaccaccgaggaaaacgaagacaaggacgagccagatatgcttgtggacttgtcaccgtacaaggaagatggctccttggagatcgagtactcttcacttcttgatgtaaggctactgaagggtattgaaccagtccccggggctttcagtactcccttggcagaaacatgcaatgaagttggatcggcactggccaaaggaaggccagttaccttacacaaaaatgaaggcaatattgagagccagaaatcacccttggttgcaaacaacactaatggaaagtcagaaaagacggtttgggaaaaaaatgacgaacccggtgatgaggtcgatgttcagcaaaatggctggggaacatggaaacaaaatagtacgtcagcttggtcttatagagcccttaggagcagcgcccttggcccgacgatggcacttctacgagggaagaacaaccagaggggtaaaccaccctatcgaaagaagggcaagtaattgcctatgtgtttagtgtttaagttcaacgatacctatgtaatcctgtgttggtccaatcttttagcagttgatcttatttatgtaaaatttggcgaggaagagtgactgccgttgctgccctggtcattttgaagtctggccaagcgaattgttatcgtttgcaaaggatcgttatgatttgctccgacacttgtcaaatgctggttttagagttttgcatgtgcactaaaaatgttcataattccatatctgccacaaaaggttgtagcaccaaacgctccacctaaggccttgttcagttatttccattacatatgaattgggtgggattggaaaaaattaa

SEQ ID NO: 25315 - DNA, 1352 bp, Zea Mays
cctaacaaaatctctccttagtttccccaacctgcttctgtttaccgaattcctaaatccaatccccttgccaagctctctctttgctgcgggaggtcgaggccggagaggtcttctgggatgggatcaagaaaggggtggttccccgtggccctcctgctgttggccgactctgccctctggccgccggtcgccgccgccgccgccggaggcggcgaggccgaacacgccgttcagcagcatagcgagcgcatctcagggagtgctggtgatgtgttagaagataatcctgtgggtaggttgaaggtcttcatttatgacttaccaaggaagtacaacaagaagatggtcaccaaggattcacggtgcctcagtcacatgtttgctgctgaaattttcatgcatcgtttcttgctctcgagtgctgtccggacactaaatcccaaggaagctgattggttctatacaccagtttacactacttgcgatttaactaacgctggactgcccttgccgtttaagtcaccacgggtgatgaggagcgcgatccaatatatttcaaacaaatggcccttctggaataggactgatggagcagatcatttcttcgttgttccgcatgattttgcagcatgcttccactatcaggaagaaaaagctatcgagcgtggaattcttccattgctgcgacgtgctacattggtccaaacctttggacaggagaatcatgtttgcctgaaggagggttccatcattattccaccctatgctcctccgcagaaaatgcaagctcacttgatttccccagacactccacgctcaatcttcgtttacttccggggacttttttatgacacggggaatgaccccgagggcggatactatgcaagaggtgcgcgagcttcgctatgggagaacttcaagagcaaccctctgtttgacatttccacagaccaccctgccacttactatgaagacatgcagcgcgctgtcttctgcctgtgcccattgggctgggcaccgtggagccctaggttggttgaggctgtggtctttggctgcattccagtcatcatagctgatgacatcgtgcttccatttgcggacgcgatcccatgggaggaaatcggcgtctttgtcgaggagaaggatgtcccaaagcttgacacgatcctcacgtcgatgcctatagatgacatcttaaggaagcaaaggttactcgcaaatccatcgatgaagcaggcaatgttgttcccacagccagcgcaaccaagggacgcgttccaccaaatcttgaacggccttgctcggaagctcccgcacccagagggtggaacgattccggatgcaat

SEQ ID NO: 25316 - DNA, 3364 bp, Zea Mays
gcacgagcatcgcggcggcggaggcgagggcacgcgcgggtatcgcgggagcggggcatggggaggcggagggagcgcgacggcagaaccgtgcactatagtcgaatatgaacgcctacgatacaaacataaggagtagtaaagataaagatgtagagagttttttccgatgacccatgccgcactcaccaaaaatatctgcgggccagcgcgcgtgcacattggacaagtggacaaccgaggtcaccgactagtgggccccacacgtcagcccctcgatccgcttcccatctgatgctcgtgctccgccgcgtctccttcctcctctcgtcgccctcccctcgcgcaccgctcgcaaaacctctcctgctcctacgcccgccccaaaccctagccccgacagcgcggcagctcgtggctatggccgcgtcagtcccgtcggcgggtggggcggggacgatgagccgcgacgcgttccgcgcggccgtgaccaacacgctggagcgccggctcttcttcgtgccctctttcaagatctacggcggcgtcgcggggctctacgactacggacccccaggttgcgctgtcaaagctaacgtcctcgcattctggcgccagcattttgtattggaggaagggatgcttgaggttgactgtccatgtgtgacgccagaagttgtcttgaaagcctctggacatgttgataaatttacagacttaatggttaaagatgaaaagacaggcaactgctaccgtgcggatcatttgctgaaggacttctgtaaggataagcttgagaaagatcacacattgtcaccagagatggcagaagaatacaatagagttcttgctatcctggatgatctcactgcagaacaattgggtgctaagattagggagtataagattgttgctccagacaccaagaactcattatcagatccatacccttttaatctcatgtttcaaacttccattggaccatcaggtttgagcccagggtatatgaggccagagacagctcagggtatatttgtgaacttcaaagacttgtattactacaatggcaataagctgccattcgctgcagcccaaattggtcaggccttcaggaatgagatatctccccgtcaaggccttttgagagtccgtgagtttactttagcggaaattgagcactttgtggacccagaggacaaatcccatccaaagtttggtgatgtttctgatctagagttctggatgtttccgagagaggatcaaatggcaggaaggtcagccacaagacttaaactcggaaattctatatctgagggaactgtgaacaatgagacccttggctacttcattggaagggtctaccttttcttgacacaacttgggattgacaaggatcgtctccgtttccgtcaacacctgccaaatgaaatggctcattatgctgctgattgttgggatgcagagattgaatgctcctatggttggattgagtgtgttggaattgctgataggtctgcctatgacttacgtgcccactcggataaaagcggcgagaaacttgaagcacatgagaagtttgctgaacccagagaagtggagaaattagttataacgccatcaaagaaggaacttggtcttgcattcaaagggaaccagaagttggttgttgagtcattggaagccatgaccgagaccgaggcactggacatgaaagccgcgttggaatccagaggggaagtcgagttcaaggtgtgtacccttgggaagaatgtcaccataaagaaaaacatggtttcaatcaacatcgagaagaaaaaggagcaccagaggaaatttactccttccgtcatagagccatcctttgggatcgggcgcatcatatactgcctttttgagcactgcttctaccaaaggcctggcaagaccgaggatgagcagctaaacgtgttcaggtttccccctctcgttgctccaataaagtgcaccgtctttccattggtcaagctcgagaaatttgaggctgttgccaagaagatctccaaggccctgacagcagctgggatttcacatatcatcgacatgacaggtaatacaataggaaaacggtacgcaaggacggatgagattggtgtccccctggcgatcacggttgatcacaccacgagcgtgacggtgcgcgatcgtgacagcaaggaccagatccgcgtggatgtggacgaggtggcctcggtggtgaaggaagtgacggacgggcagagcacctgggctgacatcatgtggaggtacccggctcacacggcctcggccgccgacgaggatggggcacagccctgaagaggcacagccacaacaccacccaacgatcgttggtctctgatagttccttcctgcgttccttaacagaaacagactgcattgttgtgtttctcttcgactgaaacacttgtcccaggaaaccaagatgctggcctagctgacctcccagcaactgtggctgctgtgaagaatcctaaccctaaggtggtttatgatgagtacaatcatgaaagatatcctcctggagatcccagcaagcgtgcatttgcttactttgtcctgagtggtgggaggttcatatatgcatcactgttgcgtctcctcgtattgaagtttgtcctgagcatgtcagcaagtaaggacgtgcttgcccttgcttcactcgaggtggacctctccagcattgagccagggaccacggtgactgtgaagtggcgtggaaagccagtcttcatcagacgccggacggacgacgacatcaagcttgccaacagtgtggatgtggcatccctgcgccacccagagcaggatgcagagcgtgtgaagaatcccgagtggctggtggtcattggcgtgtgcactcacctcggctgcatcccactaccgaacgccggagactttggcggctggttctgcccatgccatggttcccactacgacatatccgggaggatccgcaagggccctgcgccgttcaacctcgaggtcccgacctacagtttcttggaggagaacaaactgctcataggttaagagctcaaaagctacctgtctatttatctacttcactcaggtgaatccctgctgtgctgttatattgtttcttctttttaccgtttggctattttttttgctccaagaagatcattgtcatgccaaagtgcgttttttaaagtacaaaataatgtggtactttgctgatgctaaaatgtaagtgtggagctcatttggaacatcggttttctggggtaccgcaggaagaacattgattatacatctttctggcacattctcatgtcaagaataagcacccgctattatttttcgc

SEQ ID NO: 25317 - DNA, 3224 bp, Zea Mays
gcacgagcatcgcggcggcggaggcgagggcacgcgcgggtatcgcgggagcggggcatggggaggcggagggagcgcgacggcagaaccgtgcactatagtcgaatatgaacgcctacgatacaaacataaggagtagtaaagataaagatgtagagagttttttccgatgacccatgccgcactcaccaaaaatatctgcgggccagcgcgcgtgcacattggacaagtggacaaccgaggtcaccgactagtgggccccacacgtcagcccctcgatccgcttcccatctgatgctcgtgctccgccgcgtctccttcctcctctcgtcgccctcccctcgcgcaccgctcgcaaaacctctcctgctcctacgcccgccccaaaccctagccccgacagcgcggcagctcgtggctatggccgcgtcagtcccgtcggcgggtggggcggggacgatgagccgcgacgcgttccgcgcggccgtgaccaacacgctggagcgccggctcttcttcgtgccctctttcaagatctacggcggcgtcgcggggctctacgactacggacccccaggttgcgctgtcaaagctaacgtcctcgcattctggcgccagcattttgtattggaggaagggatgcttgaggttgactgtccatgtgtgacgccagaagttgtcttgaaagcctctggacatgttgataaatttacagacttaatggttaaagatgaaaagacaggcaactgctaccgtgcggatcatttgctgaaggacttctgtaaggataagcttgagaaagatcacacattgtcaccagagatggcagaagaatacaatagagttcttgctatcctggatgatctcactgcagaacaattgggtgctaagattagggagtataagattgttgctccagacaccaagaactcattatcagatccatacccttttaatctcatgtttcaaacttccattggaccatcaggtttgagcccagggtatatgaggccagagacagctcagggtatatttgtgaacttcaaagacttgtattactacaatggcaataagctgccattcgctgcagcccaaattggtcaggccttcaggaatgagatatctccccgtcaaggccttttgagagtccgtgagtttactttagcggaaattgagcactttgtggacccagaggacaaatcccatccaaagtttggtgatgtttctgatctagagttctggatgtttccgagagaggatcaaatggcaggaaggtcagccacaagacttaaactcggaaattctatatctgagggaactgtgaacaatgagacccttggctacttcattggaagggtctaccttttcttgacacaacttgggattgacaaggatcgtctccgtttccgtcaacacctgccaaatgaaatggctcattatgctgctgattgttgggatgcagagattgaatgctcctatggttggattgagtgtgttggaattgctgataggtctgcctatgacttacgtgcccactcggataaaagcggcgagaaacttgaagcacatgagaagtttgctgaacccagagaagtggagaaattagttataacgccatcaaagaaggaacttggtcttgcattcaaagggaaccagaagttggttgttgagtcattggaagccatgaccgagaccgaggcactggacatgaaagccgcgttggaatccagaggggaagtcgagttcaaggtgtgtacccttgggaagaatgtcaccataaagaaaaacatggtttcaatcaacatcgagaagaaaaaggagcaccagaggaaatttactccttccgtcatagagccatcctttgggatcgggcgcatcatatactgcctttttgagcactgcttctaccaaaggcctggcaagaccgaggatgagcagctaaacgtgttcaggtttccccctctcgttgctccaataaagtgcaccgtctttccattggtcaagctcgagaaatttgaggctgttgccaagaagatctccaaggccctgacagcagctgggatttcacatatcatcgacatgacaggtaatacaataggaaaacggtacgcaaggacggatgagattggtgtccccctggcgatcacggttgatcacaccacgagcgtgacggtgcgcgatcgtgacagcaaggaccagatccgcgtggatgtggacgaggtggcctcggtggtgaaggaagtgacggacgggcagagcacctgggctgacatcatgtggaggtttctcttcgactgaaacacttgtcccaggaaaccaagatgctggcctagctgacctcccagcaactgtggctgctgtgaagaatcctaaccctaaggtggtttatgatgagtacaatcatgaaagatatcctcctggagatcccagcaagcgtgcatttgcttactttgtcctgagtggtgggaggttcatatatgcatcactgttgcgtctcctcgtattgaagtttgtcctgagcatgtcagcaagtaaggacgtgcttgcccttgcttcactcgaggtggacctctccagcattgagccagggaccacggtgactgtgaagtggcgtggaaagccagtcttcatcagacgccggacggacgacgacatcaagcttgccaacagtgtggatgtggcatccctgcgccacccagagcaggatgcagagcgtgtgaagaatcccgagtggctggtggtcattggcgtgtgcactcacctcggctgcatcccactaccgaacgccggagactttggcggctggttctgcccatgccatggttcccactacgacatatccgggaggatccgcaagggccctgcgccgttcaacctcgaggtcccgacctacagtttcttggaggagaacaaactgctcataggttaagagctcaaaagctacctgtctatttatctacttcactcaggtgaatccctgctgtgctgttatattgtttcttctttttaccgtttggctattttttttgctccaagaagatcattgtcatgccaaagtgcgttttttaaagtacaaaataatgtggtactttgctgatgctaaaatgtaagtgtggagctcatttggaacatcggttttctggggtaccgcaggaagaacattgattatacatctttctggcacattctcatgtcaagaataagcacccgctattatttttcgc

SEQ ID NO: 25318 - DNA, 1174 bp, Zea Mays
accatcgcaaatttctcctgttcgccacaacggcaaacaccgctccagccgccttcgctgctgctcgtgtgtctcgtggaagctccgcggctggaccatggacccggacctggacctcgacctagacatggatatggagacgctcgccggcgacagcggcggcgaggccgagcgcaacgaagccgccgaggccgaggctgaggtggagcggtacgaggccgccgaagccgaggccgacatcctccgcgaccgattccgcctcgccgtcatcagcatcgccaccgccgaagaaggccggaatgacggtcgccgaccccgttgtttcctgcatcgccgacttggcgttcaagagcgcagagcagctagcaaaggatgcagagttgtttgcacagcatgccggtcgcaaatccgtcaggatggatgatgtcatactcacagctcacaggaacgagcatcttatgggcctgctgcggaccttctctcaggagctgaagggaaaggagcctgccagtgagaggaagagaaagaaatcgtccaagaaggatgagacggtgatcgaggtctgatttcagatctgtcctctttttttttagagaggaaggcatgcatttttatctcgcgaggtcctcccggcttgtacagcttccttgtgtcgatactatcttccatgtcatttcgcagaacttttcttctacgaaccctttcatcctagtcagtttttctagtcagttattgatggtacttgagttgagcttgctttctcaactgcacatagcattagtactgagtccaggagctgtccctgttcatgtggagttgtggacaggaaagatgagctcgcgggcagcgtgtctcttctctcagtccgtcgataaaagttacattcaacaattggtccttttctaatactcttttcattctaatttataattgggtttactttttttatcccaagtttaatcagctcgtcttatttgaaaagtttcataatttttactgtagtatcgcttaacataacatagtatcgcttaacataacatattttaattgtgtcttagaatttttcatttttttacataaaatataagccggttaaacttgataaaaataggtaaacgaattataaattgagacgaaaaaaagtatatcttgtattactatcgatgggaacatt

SEQ ID NO: 25319 - DNA, 358 bp, Zea Mays
attgcctgggtgcggatgttgtttggatcagcgccaaggctttcaagcacacgagcagcaacaccttcaccctcacgaagtagcccaaggagcaagtgttcagatcctacatagttatgccctgagaaaccaaaaaaaacataatgagacacatattttttacagcaaacaattaatccctctcacgggttgaactcaaaaatagtaaatggctaacctactagtaatgcttgtttaatcatttagcgtgtgtttggttgaggaaccaactgggatggagcggctccattccagtttctaagaattgagccatttcattctgtgttaggcaagcagaacggaatcgttccattttttg

SEQ ID NO: 25320 - DNA, 881 bp, Zea Mays
gccgccgccagtcctcactcctcaccatttcccaaaccctacccatacccccgccgccgccgccgccatgccgcccaagctcgacccgtcgcaggtggtggaggtcttcgtccgggtgacgggcggcgaggtcggcgcggcgtcgtccctggcgcccaagatcggcccgctcggtctctccccgaagaagatcggcgaggacattgccaaggagacggccaaggactggaagggcctgcgcgtcaccgtcaagctcactgtccagaaccgccaggccaaggtctccgtcgtcccctccgccgccgcgctcgtcatcaaggcgctcaaggagcccgagagggacaggaagaaggtcaagaacatcaagcacagcggcaacatcggcctcgacgacgtcgtcgagatcgccaggaccatgaggaacaggtccatggccaaggagttggccggcaccgtcaaggagatcctcggcacctgcgtcagcgtcgggtgcaccgtcgacggcaaggaccccaaggacctgcagcaggagattgatgacggcgaggtcgagatcccgtccgcttgaagacatcgaaggggacttccattggtgctgctgaagtgttgttgttctgcatgctgtcgatgtacctttttcaagcaacgcgagccatctatttcttttgtctagctatgttagtgatatcttgtgagagacctcaatgttaccaccgtatctttgtctttgttggatggagagatttaagcaccttaccacacctttgttctttgttggatggagagttttaagcatcacctgtttgaagttgaaaaccctaactcaaaaatcaaaaaccacccctaactctggcaaatcagtgcaactgttgtgcaaccgg

SEQ ID NO: 25321 - DNA, 908 bp, Zea Mays
gcacaagcaagcgttcgcggttacgtgcgagatatataacgacgggcaacgcggcctgccgaaaccctagaacgccgccgccagtcctcactcctcaccatttcccaaaccctacccatacccccgccgccgccgccgccatgccgcccaagctcgacccgtcgcaggtggtggaggtcttcgtccgggtgacgggcggcgaggtcggcgcggcgtcgtccctggcgcccaagatcggcccgctcggtctctccccgaagaagatcggcgaggacattgccaaggagacggccaaggactggaagggcctgcgcgtcaccgtcaagctcactgtccagaaccgccaggccaaggtctccgtcgtcccctccgccgccgcgctcgtcatcaaggcgctcaaggagcccgagagggacaggaagaaggtcaagaacatcaagcacagcggcaacatcggcctcgacgacgtcgtcgagatcgccaggaccatgaggaacaggtccatggccaaggagttggccggcaccgtcaaggagatcctcggcacctgcgtcagcgtcgggtgcaccgtcgagatcccgtccgcttgaagactagacatcgaaggggacttccattggtgctgctgaagtgttgttgttctgcatgctgtcgatgtacctttttcaagcaacgcgagccatctatttcttttgtctagctatgttagtgatatcttgtgagagacctcaatgttaccaccgtatctttgtctttgttggatggagagatttaagcaccttaccacacctttgttctttgttggatggagagttttaagcatcacctgtttgaagttgaaaaccctaactcaaaaatcaaaaaccacccctaactctggcaaatcagtgcaactgttgtgcaaccgg

SEQ ID NO: 25322 - DNA, 2196 bp, Zea Mays
cctcctctccttgctgccccgtgccatgctgctactgctccctccactcttccacctctagcaacttcttccgctcctcccctctctccagctcgctctctctctctcccctcgcatctcatctcctgttgtagtccacatccacacgagcggtcgtcgcgtccgcgcgcggtcagccgcctccggtcgcccccagcaaggaaggaccgccaaaaaggagcgagtgcacaggagctagcgaggcgcgcggcggccgagccgggtcggccgggcggatggaatgagccggcggcagcccggatggtcccggctcggaacctgcagccgctcgcccgcgacgcacatgccacgccctgcgccgccgccgcaggcctcggcgtgacgccgacggcgcccatggcacaggagcccatcgacaagcaccacagcgagccgaccaagcctccgccgccgccgcaggagaggcaggcggaccaagacacgcgccgccacgcccacgcctacggggagcagcagcagcggacgctgcggccgctccaacccgccggcgtccaccaccaggaggccgcgggcagcagcgggagcagcagcaacggcggggccggggactggctccggctcggcctctccccggcgtcccccagcgccggcggaacgcagcccggcctagtcttcgcagaccgcgcggcggggccgccgttgctgctgtcgtcgcagccgcagacgcggacggcatcggaggcgctacggccgggcatgggcgtggcaccgggaccattcctgcaccaggccgcgcccggcattccgcaggcgtcgataaccctgcccgtgccgcgcgcgggacctccttggctgccgccgtggagcccctccgcggtggcgccgccgctggtccccttcgggaaccgcgcgttctacacgcccggcgccgcctccgggctcgacgccatcagggtggtcctgccgccgtcggccgtcgccggcgtctggttcgcgctccaggccgcgccgcaccaggggagggagccattcttgcctcagattccgagaagctacctacggatcaaggacgcgagggtgacggtccggctgttgagcaagtatctggcgggcaggcttggattagaggacgaatcagaggtggagatcacgtgccgagggcgacagctcccagcgttcctgaccctgcagcatgtccgggacggcatctggtgccagggcgacgctgctgccgcctcgccgtcggtggtgccggacatgtcagcagctaaccaccaccacctcatggttttgcagtacggcaggaggtcgtagcaggcagagacagacagagtaccacccgctcccccccaccgatgtccgatcgatgacactcagttgcaatgtagattctggcatcccctgcccggccctcctaaccctttttgtcggcacggccggcaataggcggcatgacggaacgaccacgagctcccgaccgccagcacgcgcgcacacctggacggcggatgaccggaggcggctgttctcttccacacaagtgctggagagaacataacagcttggaagttgcctggcagagagagagagagaaagaggggtcgtgtacgagtgctgatcgaagagtgggtgtggcgcgacttccaagccattttggccttcattcagctgacctgatctactaatccccagctgagctgagccgttacattttgttaatcaccagtcccttcccgctcccgcgacgataggccagctgctcgcttctcttctttgttgtggaagcagcaccttgtcccgctgttctttcagagggccaacttgacatcgattcatgacttgaccctagagaagctctttgtttctttcttcttttttttttctctttgcttcattcagcagttcagttgtagcgccttcttccattttcatgacatacaagatgtcggatgtgttcgcgacatttgccatccgcttatatctatttaatttatttatttatttggaactttagcaacttaagatgaaacaagctttcttcagcttttatttatttcaataaacagcagaataagatgaagaggtaacagtatattacacttacaacaacaaacaaattgtttgtttgtttatcctctagattatataatctaatctagcttaaataagctgagagttaaacaaacaacacatgtt

SEQ ID NO: 25323 - DNA, 965 bp, Zea Mays
ctcaaatccaccgcgcgcgctgcagcctctcttgctcgctccttcagctagcacgcaacgcaacctccctcaggtgtcgggtgccggcggccatgccgtcgacggcgcctgtagagctcgacttcctcggcctccgtcctgctgctgcggccgccgccgaagacgaccaccaccacggcagcagcaccacctccgccgccgcagctgcctcctcctccgtccgaggcatgaagacgagcgcgatagcgagcatcggggcgcacaagctgcgccgcgtcatcgccggcgacgaggcgaccaagcagcatcagcagcagcaggcccccatgacggtcttctacggcggcgccgtggccaccttcgacggcgtctcccaggacacggcggaggctataatgaagatggcgatggaggtcactgcttccagcggaggccgcatcgtccgccgcgacgcatttcgtggaaatttaaccaaagcagtttctacagaagcgaaaggagaggctgagtgggccgggtccttatctgccagcatcgggaggacgaagcagccgcgttggtgcagcgaccatgacgtttcatgtgaaggaggaagcagcttaataagcctatagctaccttacttggcttggagtccactgcagcaagctactaattcaaaaaggattctttgacagtattttctttattcgatagtataattgtatctacaatttttttaaaaaaaatccgcagggataagttcgtttcacaatttcattcatgattgtagataaggttaactctcgagttgatcatagccatatctatgcttgttatacatatatttatttctttttacccaggatgttcaacgcattacattgttccaaaaaaatggtgtaggctgaagatcccttaatttggtgcttttggtgtctttatccaatagctccaaaaaaatttgataaaccaataagtttttt

SEQ ID NO: 25324 - DNA, 677 bp, Zea Mays
accgtcaacggcggccgcgcgctcacgtcccggcggccacgggccgtgacagactcgagcccgtccgccgccttcgccgcgccgcctccgcctcctccatcgcacgccgactccgctgcctacatccgcgcacgtccgcctccactgcctccatccgctcgggagccgccgccctccgcgctaggcctcgcctccgtctggtctggattcttcgacatctggccatctgggcgctccgcgtcgccgacttctcgcaggcagagaatataccatggagcgccctcgatttagtgatcatcttgaagcaatcaagtttatctgcaaagatttttggtcagagctgttcaagaagcagattgacaatctgaaaacaaatcacaggggtacctttgtccttcaagataaccgttttcggtggcttactcgtgtttctctagatccacgtacagagaacacagattcaactgaaaatgattctgcagcattgggtgatactgcagcccaaacgactaccatgcttctgtatttcccatgcgggttgataagaggtgccttgaccaacttaggaatttcgtgttctgtctctgctgacatgtcaaaccttccagcatgggcctccaagcctccgaagaacacatcgttgtgacgtaatttaggctccggttgaatcaagtggc

SEQ ID NO: 25325 - DNA, 841 bp, Zea Mays
accgtcaacggcggccgcgcgctcacgtcccggcggccacgggccgtgacagactcgagcccgtccgccgccttcgccgcgccgcctccgcctcctccatcgcacgccgactccgctgcctacatccgcgcacgtccgcctccactgcctccatccgctcgggagccgccgccctccgcgctaggcctcgcctccgtctggtctggattcttcgacatctggccatctgggcgctccgcgtcgccgacttctcgcaggcagagagcatccttgatagacctgatggctatcgcagagagctgtgttgatgcggtggtcatggagatggtggcagtctactgcggtggcctctacaccgccaaaccagagcttgctgcccgccgcatcgaggccatcggcttccaagtcgggcaccagctctctgagagatataccatggagcgccctcgatttagtgatcatcttgaagcaatcaagtttatctgcaaagatttttggtcagagctgttcaagaagcagattgacaatctgaaaacaaatcacaggggtacctttgtccttcaagataaccgttttcggtggcttactcgtgtttctctagatccacgtacagagaacacagattcaactgaaaatgattctgcagcattgggtgatactgcagcccaaacgactaccatgcttctgtatttcccatgcgggttgataagaggtgccttgaccaacttaggaatttcgtgttctgtctctgctgacatgtcaaaccttccagcatgggcctccaagcctccgaagaacacatcgttgtgacgtaatttaggctccggttgaatcaagtggc

SEQ ID NO: 25326 - DNA, 828 bp, Zea Mays
accgtcaacggcggccgcgcgctcacgtcccggcggccacgggccgtgacagactcgagcccgtccgccgccttcgccgcgccgcctccgcctcctccatcgcacgccgactccgctgcctacatccgcgcacgtccgcctccactgcctccatccgctcgggagccgccgccctccgcgctaggcctcgcctccgtctggtctggattcttcgacatctggccatctgggcgctccgcgtcgccgacttctcgcaggcagagaagagctgtgttgatgcggtggtcatggagatggtggcagtctactgcggtggcctctacaccgccaaaccagagcttgctgcccgccgcatcgaggccatcggcttccaagtcgggcaccagctctctgagagatataccatggagcgccctcgatttagtgatcatcttgaagcaatcaagtttatctgcaaagatttttggtcagagctgttcaagaagcagattgacaatctgaaaacaaatcacaggggtacctttgtccttcaagataaccgttttcggtggcttactcgtgtttctctagatccacgtacagagaacacagattcaactgaaaatgattctgcagcattgggtgatactgcagcccaaacgactaccatgcttctgtatttcccatgcgggttgataagaggtgccttgaccaacttaggaatttcgtgttctgtctctgctgacatgtcaaaccttccagcatgaagttcgatttaagatactactacaatatgtaatctagtagcgagggctatacgaagtggaatgttagaagactggattgttg

SEQ ID NO: 25327 - DNA, 741 bp, Zea Mays
caaatttctttgtgaacaaaattccaccgaatcgctgtcgttcgacaccgtcaacggcggccgcgcgctcacgtcccggcggccacgggccgtgacagactcgagcccgtccgccgccttcgccgcgccgcctccgcctcctccatcgcacgccgactccgctgcctacatccgcgcacgtccgcctccactgcctccatccgctcgggagccgccgccctccgcgctaggcctcgcctccgtctggtctggattcttcgacatctggccatctgggcgctccgcgtcgccgacttctcgcaggcagagaatataccatggagcgccctcgatttagtgatcatcttgaagcaatcaagtttatctgcaaagatttttggtcagagctgttcaagaagcagattgacaatctgaaaacaaatcacaggggtacctttgtccttcaagataaccgttttcggtggcttactcgtgtttctctagatccacgtacagagaacacagattcaactgaaaatgattctgcagcattgggtgatactgcagcccaaacgactaccatgcttctgtatttcccatgcgggttgataagaggtgccttgaccaacttaggaatttcgtgttctgtctctgctgacatgtcaaaccttccagcatgaagttcgatttaagatactactacaatatgtaatctagtagcgagggctatacgaagtggaatgttagaagactggattgttg

SEQ ID NO: 25328 - DNA, 721 bp, Zea Mays
atgtcgtcggctagtgcagccccatgccagcacaatctatttgccgcccaaggaggccaatcccgcttgaaagatgatactggccaccgtcatcacgatgcggggacaacctcttccacgaccatccttgtaggcaaccgtctcatggttgcaaatgttggggactctgacagtcatatgcagaggagggaatgctatagcggtttcaagagaccacaagctggattagacgaatgagagacataagatagaggaagccgtagtttttgtgatgtgggctggaacatggcgtgtaggtggcgtcgtcacagttttatgagcatttggggacaagctcttgaagcagtatttggttgctaacccaaagatcaaggaggaggtggtggacaactcgtcctcatccttgcaaacgatggcctttgggatgtggtgaccaacgaggaagtcgttgccatggtgaagctgatcctagactcgaagcagaggcctcccaccgcggaacaactaaaacatcgtctgcgtcaccgtgcgctttctggagtagaacaatgggcttgcctcttcctggagcagcacaatggtcttcatgtcttgccagggccaccaacaatcaggcatcgttagttccttgagatgtcgaagggtttagggttatccgtgtgttgcgacggctcacaacaatacccacgtaaattatccaccaaaaagatctcaagatttt

SEQ ID NO: 25329 - DNA, 1132 bp, Zea Mays
taaattgaggcaagccttttttcgcatatgtggagactgttttgaacctgtgacctggtgaattagaatctgtcttggcagaccatttctcatcatttggggatctttcgtccttgtcctggaagatactgaagcccataaccttgatgcaaccctaaaaccttcgctgagttgctcagcttgtgtgacttacacaacacgacaatcagctgagaaagcatttattggtggtaaatcttgcaaaggacacacactacgatttatgtggttgacagcatctcctggctcaaataaccattataggcatcagaatacctcagttcatgtgaggccctctactatccctggccatactcaaagcatatcatctgagtcccccagccctgttgggaaagtatcatctcttgctacatctgttatggtagccattcctcataataaatccatctcaactgtggaaaatacaaagacttctccagcgggagtttccaaagtttcatgtggtagctcctctctatcatcaaatgataagtgtccttctgaatgtggttccacaaggaatgttatctcagattctgacgttccacaatgaggcttaatgctatctggacgaggtggtgttatgaatcttgatttggtggctcggctatttcatagcgcggttaaggctgtaaaaagaaaaaaaagagaatgtttaaagaaatatgggttcaaaagcatactggaagtggaggctttctcggtaaccaccgtctaatcatctcattgttcacggagactgagtggtgtaggttatttgtacacttcattttgggggcgcatcgtgctgaaagcagttggtaatatgctaattctgtagtttgtagctcctgctgaaatcagctttgtggattatgttgtgagcacgatgaacatcaaactctcgcaagtcccatcgaggcatcttgtcgaaaaacttctgctgtgcatactgaactaaattttgtgccggtgtatcatctgtcgactatcgtgttggtctatttagtatcccttgtgatcgtttaccttactgtgattctgatttccttttcatatatgtatgtgtatatctttatgttctccccacactcctgaataaaaaaataaagaa

SEQ ID NO: 25330 - DNA, 1139 bp, Zea Mays
gataaattgaggcaagccttttttcgcatatgtggagactgttttgaacctgtgacctggtgaattagaatctgtcttggcagaccatttctcatcatttggggatctttcgtccttgtcctggaagatactgaagcccataaccttgatgcaaccctaaaaccttcgctgagttgctcagcttgtgtgacttacacaacacgacaatcagctgagaaagcatttattggtggtaaatcttgcaaaggacacacactacgatttatgtggttgacagcatctcctggctcaaataaccattataggcatcagaatacctcagttcatgtgaggccctctactatccctggccatactcaaagcatatcatctgagtcccccagccctgttgggaaagtatcatctcttgctacatctgttatggtagccattcctcataataaatccatctcaactgtggaaaatacaaagacttctccagcgggagtttccaaagtttcatgtggtagctcctctctatcatcaaatgataagtgtccttctgaatgtggttccacaaggaatgttatctcagattctgacgttccacaatgaggcttaatgctatctggacgaggtggtgttatgaatcttgatttggtggctcggctatttcatagggcagcgcggttaaggctgtaaaaagaaaaaaaagagaatgtttaaagaaatatgggttcaaaagcatactggaagtggaggctttctcggtaaccaccgtctaatcatctcattgttcacggagactgagtggtgtaggttatttgtacacttcattttgggggcgcatcgtgctgaaagcagttggtaatatgctaattctgtagtttgtagctcctgctgaaatcagctttgtggattatgttgtgagcacgatgaacatcaaactctcgcaagtcccatcgaggcatcttgtcgaaaaacttctgctgtgcatactgaactaaattttgtgccggtgtatcatctgtcgactatcgtgttggtctatttagtatcccttgtgatcgtttaccttactgtgattctgatttccttttcatatatgtatgtgtatatctttatgttctccccacactcctgaataaaaaaataaagaa

SEQ ID NO: 25331 - DNA, 775 bp, Zea Mays
atttttctcactgctcgatgccactccttatcccttcatacaccgtactccatcatactcatccactcacagccgctagcttcgtcaaatttcttggcaccgtggcattccctgatgaatccaccgcttatttctccatgttcatttatcctctcctcgcgcatccaagaccaggacgatcgtcctcaccctctcggctctctgcccgtgccgtcattgcctgggcaaccagctctgttgcagcaagcgctctctcctgccgagcttcacacctcccatggcgcccagctgctttcctctctctcttgtgctcggcttctgtttttcctgcgcacgctgctttttctttccccagccgttcactactaccgtgatgctgtctctgctcgccgtgctctggaccttgctccagctcgccggcagaagctccctgacgcgccctccttgctcctccctgctcggttccatggccggcggatcccctggccgtgtgcccctgcgcgcggtcgcatctccctgtgctcgcctagcccagccggtgctcctccagtcgctgctccctgtgtgctcggcctcaagtttctgtgcgcgcgaaactctctgctcgccaacgctccagctcgctgttgtcgccaagtccgaatatcacagctcgttttagtggccatgagttcttccctgtgcgcgtgcgagcttctctgcttggcccgtcgtcgttctccagctccttaccgcactcgattgtttcgtcgtctcgtcttgatgccagtcccta

SEQ ID NO: 25332 - DNA, 932 bp, Zea Mays
cttattcagtagcactgacaataatcaagtcattttattgtgcaaatatctggaccaatttgatgaagcttcgttctgattataaagatgaatttgtcacaaagcatggtgtcaaattgggtcttatgtcttgctttgtcaaggctgctgtttctgcacttcaaaaccagccaattgttaatgctgtcattgatggcgatgacatcatatacagagactacgtagacgtcagtgttgctgttggcacttccaagggccttgtggtgcctgttatccgagatgctgataccatgaactttgctgacattgagaaagggataaacaaccttgcaaagaaggcaaatgagggggcgctctcgattgatgacatggcaggaggaacattcactatctccaatggtggtgtctatggaagcctcctcagcacacctatcatcaaccccccacagtcgtcaattctggggatgcattccattgtgcaacgccctgtggttgtgaatggtgacattctcgcaaggccaatgatgttccttgcgctgacatatgaccacaggctgatcgatggcagagaggctgtattcttcctccgtcgcatcaaggatgtcgttgaggaccccaggaggttgctgcttgacatataaagttacttaccagtgctttcccgccgactgttttgtgctttctggaaataataccatgcaaatttttgactgatgaaaaagaattgcttcctcggaaagacgaattctgagctgaggatacagtgaggtttttctctataatcgtagaagagagcagcaaactcaactcaatgtgaggtcatgtttcattttcgggtataagatgctccatttcgggatgcagttcccagtaattttatttgccatgcaagagcaatagaagctgctgcatttttgtttgttggttcacaa

SEQ ID NO: 25333 - DNA, 1737 bp, Zea Mays
gttgcgtctggagaataatctgctactctagtgttggctaggggcatatgcaagcaggacgtgatgataatcgaaggctgtgcgctggtgcttcatgcacgcacttcgcctcctccgatttggagtattccgtgacttgatgataattattcgactctagggctactaaggagtcatacacatgtcagaaactacagcagtcaactttcagctttgattccagctacttctcaatgctcaaatctgacaagaagacgctattacttacctaatccatctctgtaccaagtttggagtaggtcatttgcctcagacagcggagacaagttcgaggctgttgtgcccttcatgggtgaatctgtaactgatggaactcttgctaacttcttaaagaagcctggagacagagtcgaggccgatgaacccatagcgcagattgaaactgataaggtcactatagatgtcgcaagtcctgaagctggtgttattgaaaagctcattgctagtgaaggcgacacagttactccaggcactaaagttgcaatcatatccaagtctgctcaacctgctgaaacacatgttgctccatctgaggaagcaacttcaaaagggtcttctccgccgaaagttgaagagaaatcaagggtagaggaaaaagccccgaaagtagaacctcccaagatgcaagcaccgaagccaactgcaccattaaaaacgtccccttcagaaccacaactccctccaaaagaacgggagcggcgggtgccgatgccaaggctcaggaagcgtattgcaaaccgtcttaaggattctcagaacacctttgcaatgctatctacatttaatgaagttgacatgaccaatttgatgaagcttcgttctgattataaagatgaatttgtcacaaagcatggtgtcaaattgggtcttatgtcttgctttgtcaaggctgctgtttctgcacttcaaaaccagccaattgttaatgctgtcattgatggcgatgacatcatatacagagactacgtagacgtcagtgttgctgttggcacttccaagggccttgtggtgcctgttatccgagatgctgataccatgaactttgctgacattgagaaagggataaacaaccttgcaaagaaggcaaatgagggggcgctctcgattgatgacatggcaggaggaacattcactatctccaatggtggtgtctatggaagcctcctcagcacacctatcatcaaccccccacagtcgtcaattctggggatgcattccattgtgcaacgccctgtggttgtgaatggtgacattctcgcaaggccaatgatgttccttgcgctgacatatgaccacaggctgatcgatggcagagaggctgtattcttcctccgtcgcatcaaggatgtcgttgaggaccccaggaggttgctgcttgacatataaagttacttaccagtgctttcccgccgactgttttgtgctttctggaaataataccatgcaaatttttgactgatgaaaaagaattgcttcctcggaaagacgaattctgagctgaggatacagtgaggtttttctctataatcgtagaagagagcagcaaactcaactcaatgtgaggtcatgtttcattttcgggtataagatgctccatttcgggatgcagttcccagtaattttatttgccatgcaagagcaatagaagctgctgcatttttgtttgttggttcacaa

SEQ ID NO: 25334 - DNA, 1806 bp, Zea Mays
aaaccggagaacgggaagcgaccagagggcggccgcggcacgcgggtcgtccccattccagtcttttcagaacgagattgcatcgaggaaactacagaaaagggaccaaatcgaatccgtggtgcactgcccctccccctccctcacaagccgccgccgccgtgaggactccggcgaatggcgtcccgcgtcgcctcgggcctcctccgccgccgcgccgtcgccactctagggctactaaggagtcatacacatgtcagaaactacagcagtcaactttcagctttgattccagctacttctcaatgctcaaatctgacaagacgctattacttacctaatccatctctgtaccaagtttggagtaggtcatttgcctcagacagcggagacaagttcgaggctgttgtgcccttcatgggtgaatctgtaactgatggaactcttgctaacttcttaaagaagcctggagacagagtcgaggccgatgaacccatagcgcagattgaaactgataaggtcactatagatgtcgcaagtcctgaagctggtgttattgaaaagctcattgctagtgaaggcgacacagttactccaggcactaaagttgcaatcatatccaagtctgctcaacctgctgaaacacatgttgctccatctgaggaagcaacttcaaaagggtcttctccgccgaaagttgaagagaaatcaagggtagaggaaaaagccccgaaagtagaacctcccaagatgcaagcaccgaagccaactgcaccattaaaaacgtccccttcagaaccacaactccctccaaaagaacgggagcggcgggtgccgatgccaaggctcaggaagcgtattgcaaaccgtcttaaggattctcagaacacctttgcaatgctatctacatttaatgaagttgacatgaccaatttgatgaagcttcgttctgattataaagatgaatttgtcacaaagcatggtgtcaaattgggtcttatgtcttgctttgtcaaggctgctgtttctgcacttcaaaaccagccaattgttaatgctgtcattgatggcgatgacatcatatacagagactacgtagacgtcagtgttgctgttggcacttccaagggccttgtggtgcctgttatccgagatgctgataccatgaactttgctgacattgagaaagggataaacaaccttgcaaagaaggcaaatgagggggcgctctcgattgatgacatggcaggaggaacattcactatctccaatggtggtgtctatggaagcctcctcagcacacctatcatcaaccccccacagtcgtcaattctggggatgcattccattgtgcaacgccctgtggttgtgaatggtgacattctcgcaaggccaatgatgttccttgcgctgacatatgaccacaggctgatcgatggcagagaggctgtattcttcctccgtcgcatcaaggatgtcgttgaggaccccaggaggttgctgcttgacatataaagttacttaccagtgctttcccgccgactgttttgtgctttctggaaataataccatgcaaatttttgactgatgaaaaagaattgcttcctcggaaagacgaattctgagctgaggatacagtgaggtttttctctataatcgtagaagagagcagcaaactcaactcaatgtgaggtcatgtttcattttcgggtataagatgctccatttcgggatgcagttcccagtaattttatttgccatgcaagagcaatagaagctgctgcatttttgtttgttggttcacaa

SEQ ID NO: 25335 - DNA, 1744 bp, Zea Mays
aaaccggagaacgggaagcgaccagagggcggccgcggcacgcgggtcgtccccattccagtcttttcagaacgagattgcatcgaggaaactacagaaaagggaccaaatcgaatccgtggtgcactgcccctccccctccctcacaagccgccgccgccactctagggctactaaggagtcatacacatgtcagaaactacagcagtcaactttcagctttgattccagctacttctcaatgctcaaatctgacaagaagacgctattacttacctaatccatctctgtaccaagtttggagtaggtcatttgcctcagacagcggagacaagttcgaggctgttgtgcccttcatgggtgaatctgtaactgatggaactcttgctaacttcttaaagaagcctggagacagagtcgaggccgatgaacccatagcgcagattgaaactgataaggtcactatagatgtcgcaagtcctgaagctggtgttattgaaaagctcattgctagtgaaggcgacacagttactccaggcactaaagttgcaatcatatccaagtctgctcaacctgctgaaacacatgttgctccatctgaggaagcaacttcaaaagggtcttctccgccgaaagttgaagagaaatcaagggtagaggaaaaagccccgaaagtagaacctcccaagatgcaagcaccgaagccaactgcaccattaaaaacgtccccttcagaaccacaactccctccaaaagaacgggagcggcgggtgccgatgccaaggctcaggaagcgtattgcaaaccgtcttaaggattctcagaacacctttgcaatgctatctacatttaatgaagttgacatgaccaatttgatgaagcttcgttctgattataaagatgaatttgtcacaaagcatggtgtcaaattgggtcttatgtcttgctttgtcaggctgctgtttctgcacttcaaaaccagccaattgttaatgctgtcattgatggcgatgacatcatatacagagactacgtagacgtcagtgttgctgttggcacttccaagggccttgtggtgcctgttatccgagatgctgataccatgaactttgctgacattgagaaagggataaacaaccttgcaaagaaggcaaatgagggggcgctctcgattgatgacatggcaggaggaacattcactatctccaatggtggtgtctatggaagcctcctcagcacacctatcatcaaccccccacagtcgtcaattctggggatgcattccattgtgcaacgccctgtggttgtgaatggtgacattctcgcaaggccaatgatgttccttgcgctgacatatgaccacaggctgatcgatggcagagaggctgtattcttcctccgtcgcatcaaggatgtcgttgaggaccccaggaggttgctgcttgacatataaagttacttaccagtgctttcccgccgactgttttgtgctttctggaaataataccatgcaaatttttgactgatgaaaaagaattgcttcctcggaaagacgaattctgagctgaggatacagtgaggtttttctctataatcgtagaagagagcagcaaactcaactcaatgtgaggtcatgtttcattttcgggtataagatgctccatttcgggatgcagttcccagtaattttatttgccatgcaagagcaatagaagctgctgcatttttgtttgttggttcacaa

SEQ ID NO: 25336 - DNA, 1808 bp, Zea Mays
aaaccggagaacgggaagcgaccagagggcggccgcggcacgcgggtcgtccccattccagtcttttcagaacgagattgcatcgaggaaactacagaaaagggaccaaatcgaatccgtggtgcactgcccctccccctccctcacaagccgccgccgccgtgaggactccggcgaatggcgtcccgcgtcgcctcgggcctcctccgccgccgcgccgtcgccactctagggctactaaggagtcatacacatgtcagaaactacagcagtcaactttcagctttgattccagctacttctcaatgctcaaatctgacaagaagacgctattacttacctaatccatctctgtaccaagtttggagtaggtcatttgcctcagacagcggagacaagttcgaggctgttgtgcccttcatgggtgaatctgtaactgatggaactcttgctaacttcttaaagaagcctggagacagagtcgaggccgatgaacccatagcgcagattgaaactgataaggtcactatagatgtcgcaagtcctgaagctggtgttattgaaaagctcattgctagtgaaggcgacacagttactccaggcactaaagttgcaatcatatccaagtctgctcaacctgctgaaacacatgttgctccatctgaggaagcaacttcaaaagggtcttctccgccgaaagttgaagagaaatcaagggtagaggaaaaagccccgaaagtagaacctcccaagatgcaagcaccgaagccaactgcaccattaaaaacgtccccttcagaaccacaactccctccaaaagaacgggagcggcgggtgccgatgccaaggctcaggaagcgtattgcaaaccgtcttaaggattctcagaacacctttgcaatgctatctacatttaatgaagttgacatgaccaatttgatgaagcttcgttctgattataaagatgaatttgtcacaaagcatggtgtcaaattgggtcttatgtcttgctttgtcaggctgctgtttctgcacttcaaaaccagccaattgttaatgctgtcattgatggcgatgacatcatatacagagactacgtagacgtcagtgttgctgttggcacttccaagggccttgtggtgcctgttatccgagatgctgataccatgaactttgctgacattgagaaagggataaacaaccttgcaaagaaggcaaatgagggggcgctctcgattgatgacatggcaggaggaacattcactatctccaatggtggtgtctatggaagcctcctcagcacacctatcatcaaccccccacagtcgtcaattctggggatgcattccattgtgcaacgccctgtggttgtgaatggtgacattctcgcaaggccaatgatgttccttgcgctgacatatgaccacaggctgatcgatggcagagaggctgtattcttcctccgtcgcatcaaggatgtcgttgaggaccccaggaggttgctgcttgacatataaagttacttaccagtgctttcccgccgactgttttgtgctttctggaaataataccatgcaaatttttgactgatgaaaaagaattgcttcctcggaaagacgaattctgagctgaggatacagtgaggtttttctctataatcgtagaagagagcagcaaactcaactcaatgtgaggtcatgtttcattttcgggtataagatgctccatttcgggatgcagttcccagtaattttatttgccatgcaagagcaatagaagctgctgcatttttgtttgttggttcacaa

SEQ ID NO: 25337 - DNA, 2233 bp, Zea Mays
gctccgaagagtacctcccgtgtgtataaatagccagctgtcctcgctcggcgcctccacaaattagcaaagccgcgcgcattacattacattacatacaaacatacacagtttggccgttaattagccagcgctgacaaattaaccctcgtcttcgtcgcctgacccgccgccgaccgccgtacgtgaccaccaaccaggctatagagctacctccagccgccggcccgcgcgtcgtccgccgcggtgtacgtacgtctgccgcggagccacgcgcgcggacatggctcagctgaaggccgcgcgcgccaccgacgtcccgcccgccatgccggacccggacccggacgtcgtcgccgccgacctcggcgcgtgcgtacggcacgggcgcgttgacggtttggcagcaggaagcggcagggcggaggcgacggcgacggcgacgaccaccgcggcggcggccgatcagggacgacgacggccgccgctggtggtggtagggcaccgcggcaaggggatgaacgcgctggcgtcgccagacccgcggctgcgcggcgacatcagggagaacaccctccgcgccttcaacgccgccgccgccagccaccccgccgtcgcctacgtcgagttcgacgtccaggtaaaccatggtctctcctttttttttttatttgccaccaaaatcaatcagtgcattagaaatttgagaatgccggcatgcgccacctctgtctctgtgcgtggcgtcggcgtttctcagcgctgtccactgggccgtgtactaggcccagttaggaaaaaggtggaccggggggccgcagtaggggagctggggaggggcaggcaagcagcagcgtcctgcctgctgcgtccagaaacatcaggaggacggtggtttcctctcctccgttctagagaaccgaacctccattctagatccctcgcacaacgaaccttcccttgtcggtgcgcatgagaacctgtgtgtccgagccctagacgcagagtttggtttgtcgccttggaggagctgactcgtccgtcaccaggtgaccagggacggctgccctgtcatcttccatgacaacttcatctacacgcaacaagacggccaagtctcagcgaagcgtgttaccgagctgaacctggacgagttcctgtcctacgggccgcaaagagaccaggggaaggccggcaagccacttctccggaaactcaaggacgggaggatcctcaagtgggacgtgcagtccgaggacgcgctctgcacgctccgtgaggtcttcgagggcgtccaccggcgtgtcggcttcaacgtggagctcaagttcgatgacgacctcttctacacggaggagaggcttacctgcatcctaaaatccgttctcaaggttgtcttcgagcacgccaacgacaggcccatcatcttctccagcttccaacccgatgccgcgcagctcatccgcaagctgcaagacaaataccctgtgctcttcctgaccaacggagggacgcaggtgtacgccgacccgcgtcggaactcgctggaggaggccgtcaagctgtgcgtcgccggcgggctgcaggggatcgtgtcggaggtccgggcgatactcaggcagccgtcggcggtggccaagatcaaggaggccaacaaactgtcgctgatgacctacggtcagctcaacaacgtggcggaggtggtgtacgtgcagcacctgatgggggtggacggcgtcatcgtcgacctggtgcaggagatcgcggaggccgtgtcggcgttcacggtcgttacggccgtgcaggcgtcgggctcccaggacggcggcggcatcgtggtcggcgagaggatggagacggctgccgtggcggtggcagggacgccgagcttctcgccgcgggaggtgtccttcctcctgaggctcattcccgagctagtgcaatagcgcgttcttgctgctttgctggtggaatctcgcgacgagatcctctgtatccgtagagttaggtcactaacgtgtgaatccggcctttttgtttgtcaactgaaatcgaaaaaggttatgggttacattcgtagagactaccagcacagcgattacgatttccatttctgcttgctcgagtatagagtacaaaacataaaaattaagtaggtgtgaatataaatttgagctaacaaccttgattaaatttttttatcatttaaatgtgaaggagcgcgatgaggtaa

SEQ ID NO: 25338 - DNA, 1795 bp, Zea Mays
atgtcttcgtcgtgctcctcgtgctgtacctgctccgaagagtacctcccgtgtgtataaatagccagctgtcctcgctcggcgcctccacaaattagcaaagccgcgcgcattacattacattacatacaaacatacacagtttggccgttaattagccagcgctgacaaattaaccctcgtcttcgtcgcctgacccgccgccgaccgccgtacgtgaccaccaaccaggctatagagctacctccagccgccggcccgcgcgtcgtccgccgcggtgtacgtacgtctgccgcggagccacgcgcgcggacatggctcagctgaaggccgcgcgcgccaccgacgtcccgcccgccatgccggacccggacccggacgtcgtcgccgccgacctcggcgcgtgcgtacggcacgggcgcgttgacggtttggcagcaggaagcggcagggcggaggcgacggcgacggcgacgaccaccgcggcggcggccgatcagggacgacgacggccgccgctggtggtggtagggcaccgcggcaaggggatgaacgcgctggcgtcgccagacccgcggctgcgcggcgacatcagggagaacaccctccgcgccttcaacgccgccgccgccagccaccccgccgtcgcctacgtcgagttcgacgtccagggccaagtctcagcgaagcgtgttaccgagctgaacctggacgagttcctgtcctacgggccgcaaagagaccaggggaaggccggcaagccacttctccggaaactcaaggacgggaggatcctcaagtgggacgtgcagtccgaggacgcgctctgcacgctccgtgaggtcttcgagggcgtccaccggcgtgtcggcttcaacgtggagctcaagttcgatgacgacctcttctacacggaggagaggcttacctgcatcctaaaatccgttctcaaggttgtcttcgagcacgccaacgacaggcccatcatcttctccagcttccaacccgatgccgcgcagctcatccgcaagctgcaagacaaataccctgtgctcttcctgaccaacggagggacgcaggtgtacgccgacccgcgtcggaactcgctggaggaggccgtcaagctgtgcgtcgccggcgggctgcaggggatcgtgtcggaggtccgggcgatactcaggcagccgtcggcggtggccaagatcaaggaggccaacaaactgtcgctgatgacctacggtcagctcaacaacgtggcggaggtggtgtacgtgcagcacctgatgggggtggacggcgtcatcgtcgacctggtgcaggagatcgcggaggccgtgtcggcgttcacggtcgttacggccgtgcaggcgtcgggctcccaggacggcggcggcatcgtggtcggcgagaggatggagacggctgccgtggcggtggcagggacgccgagcttctcgccgcgggaggtgtccttcctcctgaggctcattcccgagctagtgcaatagcgcgttcttgctgctttgctggtggaatctcgcgacgagatcctctgtatccgtagagttaggtcactaacgtgtgaatccggcctttttgtttgtcaactgaaatcgaaaaaggttatgggttacattcgtagagactaccagcacagcgattacgatttccatttctgcttgctcgagtatagagtacaaaacataaaaattaagtaggtgtgaatataaatttgagctaacaaccttgattaaatttttttatcatttaaatgtgaaggagcgcgatgaggtaa

SEQ ID NO: 25339 - DNA, 1838 bp, Zea Mays
aattaacctgcccatgtcttcgtcgtgctcctcgtgctgtacctgctccgaagagtacctcccgtgtgtataaatagccagctgtcctcgctcggcgcctccacaaattagcaaagccgcgcgcattacattacattacatacaaacatacacagtttggccgttaattagccagcgctgacaaattaaccctcgtcttcgtcgcctgacccgccgccgaccgccgtacgtgaccaccaaccaggctatagagctacctccagccgccggcccgcgcgtcgtccgccgcggtgtacgtacgtctgccgcggagccacgcgcgcggacatggctcagctgaaggccgcgcgcgccaccgacgtcccgcccgccatgccggacccggacccggacgtcgtcgccgccgacctcggcgcgtgcgtacggcacgggcgcgttgacggtttggcagcaggaagcggcagggcggaggcgacggcgacggcgacgaccaccgcggcggcggccgatcagggacgacgacggccgccgctggtggtggtagggcaccgcggcaaggggatgaacgcgctggcgtcgccagacccgcggctgcgcggcgacatcagggagaacaccctccgcgccttcaacgccgccgccgccagccaccccgccgtcgcctacgtcgagttcgacgtccaggtgaccagggacggctgccctgtcatcttccatgacaacttcatctacacgcaacaagacggccaagtctcagcgaagcgtgttaccgagctgaacctggacgagttcctgtcctacgggccgcaaagagaccaggggaaggccggcaagccacttctccggaaactcaaggacgggaggatcctcaagtgggacgtgcagtccgaggacgcgctctgcacgctccgtgaggtcttcgagggcgtccaccggcgtgtcggcttcaacgtggagctcaagttcgatgacgacctcttctacacggaggagaggcttacctgcatcctaaaatccgttctcaaggttgtcttcgagcacgccaacgacaggcccatcatcttctccagcttccaacccgatgccgcgcagctcatccgcaagctgcaagacaaataccctgtgtacgccgacccgcgtcggaactcgctggaggaggccgtcaagctgtgcgtcgccggcgggctgcaggggatcgtgtcggaggtccgggcgatactcaggcagccgtcggcggtggccaagatcaaggaggccaacaaactgtcgctgatgacctacggtcagctcaacaacgtggcggaggtggtgtacgtgcagcacctgatgggggtggacggcgtcatcgtcgacctggtgcaggagatcgcggaggccgtgtcggcgttcacggtcgttacggccgtgcaggcgtcgggctcccaggacggcggcggcatcgtggtcggcgagaggatggagacggctgccgtggcggtggcagggacgccgagcttctcgccgcgggaggtgtccttcctcctgaggctcattcccgagctagtgcaatagcgcgttcttgctgctttgctggtggaatctcgcgacgagatcctctgtatccgtagagttaggtcactaacgtgtgaatccggcctttttgtttgtcaactgaaatcgaaaaaggttatgggttacattcgtagagactaccagcacagcgattacgatttccatttctgcttgctcgagtatagagtacaaaacataaaaattaagtaggtgtgaatataaatttgagctaacaaccttgattaaatttttttatcatttaaatgtgaaggagcgcgatgaggtaa

SEQ ID NO: 25340 - DNA, 1183 bp, Zea Mays
gcatatctccctcctgacaaggagcctttggattggaacactaggatgaaaattgctgcgggtgctgctaaagggctggagtacctgcatgacaaggcacagccaccagttatttacagggatttcaagtcatcaaatattctattgggcgagggcttccatccaaagctatcagacttcggtcttgctaagttgggtcctgttggtgacaagtctcatgtctcaacgcgtgttatgggaacatatggttattgtgctccagaatatgctatgacaggacaacttacagttaagtcagatgtttacagctttggagttgtcttgctcgagctgattactggccgaaaggccattgacagcaccagaccagcgtcagagcaaaaccttgtgtcatgggcacggccccttttcaatgacaggcgcaagctcccaaagatggctgacccgggcctggaggggcagtttcctacacggggactttaccaggcgcttgcggtggcatcaatgtgcatccagtcagaggctgcatcgcgcccactcatcgccgacgttgtgactgctctgtcataccttgcaaaccagatttatgatcctagcttagcgcacgcatccaagaaagcaggcggcagcgaccagcggaaccgggtcggtgacagtggaagggcgctttccaagaatgacgatgcaggcagctctggccacaggtcgccgagcaaggaccgggccgactcccccagagagcagttcccgggggctgcgaacaggggccaggacagggagcgaatggtggcagaggcaaagatgtggggcgagaactggcgggagaagcggcgagctgctcaggggagcctggattctccgaccggaggcgggtagcgtcagtcaccaaagactgtttcgcccgtgcgtgctctgtctcagactgttttttgcctttgtgtggtgaggatgaggattcccgtgtttgttaggtgtacatttgtaggtgtaaaacaacagaaaagggaacgttggggtgaaaatggagggaagagaaggatgcttgttctggatgtttatgagtggtgcctgtaaattatcggaaaattttgcaacggtgaaggactagccacgttggaagatgatctaagagttgcttggcgaggtgctgtttcgtgtttccaggtcacaagcaaacacggcc

SEQ ID NO: 25341 - DNA, 1698 bp, Zea Mays
gagtgacgaccgctgaccccgctgtccagagtcacagaccattggtagaccaagccctacggcagcagccgcaacaacggcgaccggcccgacccgccatgcagcagcagaagccgcagggcttcctcgtcgctggcggaataccgccggcgcagggatccggacgtatcgtcaccgcggtggcggcgcggacgcgcgcggcggaacagatggcatttgaagacgtatggaaggccctaaacccggacttcaggacgcccttcgcctccgttgaggacgccatcagcaggtggaaaacatcctagatgtatagcacgaattatattaattgtgatttcaaggagataaggactaacatatattagtctgatacacctgcccagacaaaacagctgctgccctaccacatattcgcagactatgaagaagacgatgacgtagttgaccccatcagtggcatcagcagcagcatatgcaccacaacggagaagtcaagcgcccataattgggaggatggcatggttacacagatggaaggttttctcgagcacttcgagaagcaggtgctgaccttcaatgtcatgactcagcaacacgctgcaggcttcaaccgcgccgaggaacagctcattctgcagatgtctatggtcgaagacgagcggcggcagttggagctcctgcgcgcggccattgtgcagcaccagcagcaggaggccgcgcgcgcgcgcctagcactcgcgcagccgcaggcggcgctgcccgctgcgtcttgtcaggcgttggtggctgcaggacgcggcgaaggtgcctcccgcgggcaggccctggcgccttccttggtgatgcagcagcaggagacgatgatgaccgcgggcgcctggcaggcgctcgccgcggcggcgtcgcgcggccagggggcttccaatgagcaggctctgatgcaggccatcatggcgcagcacatgcaacggcagaggcagcaagagattatggcagcggcgtcacgcggcgacggtgcaacctgcgggcaggcggaggcgctgccactggccgcggtaacacagcttatgcagcaacgtaaccagcagcggcagcaggaggagatgacgacgaccgcgtttcggtgcgacgtggctcccggctacctggcgctggcgtcggccgggatgatgcggcagcaacaacagcaccagcaggaggtgatggcggccggcgggtggcaactggacctgggtttgcggcacacagacatagcgcctcgcgttgacggcagctcgagctctcaggcagcgttgcctcctgcgatgctgcagcagccaggacaggggcaggccagcaccgctgggagtgggatggcgctgccgtggcgtggcgtcgctgacggaagggagcagtagcgttgctggggatttgcgcgattcgtacgagcaaaaaacaagtcatgccgtttgcgtctattggattataatagcatttttttagtagttgtagtgttcatttgaactaagctttctgaatcaaattcactataaaaaatctgaaatttcaatcaaagagctataggagctgattagatttctgaaaaatatatagatttctctaattgaatccagaatctaattctactctagatttttttttagatttccatcatccatattttcgaaaaattatttaattgtcatttcttttatgatc

SEQ ID NO: 25342 - DNA, 1239 bp, Zea Mays
cattgcgcacaccttgatgctgggcatgagcaggacggggttggccggagcggcgctgcgggtggcgctgacggcgctgctgccgctggtcctgccggcgtactacgtgtacaagctgaccacgtacctcctcggcgccgtcttccccgaggacgtcgccggcaaggtggtactcatcaccggcgcctcctccggcatcggcgagcacctggcctatgagtacgcgaagcggggagcctacctggcgctggtggcgaggagggaggcgagcctccgcgaggtcggcgacgtcgcgctggggctgggctcgccgggcgtcctcgtcctcccggctgacgtctccaagcctcgggactgcgagggcttcatcgacgacacgattagctacttcggtagactggatcacctggtgaacaacgcgtccatctggcaagtgtgcaagttcgaagagatccaggacgtcaggcacttgagagccctgatggacatcaacttctggggccacgtgtacccaacccggctcgccatccctcacctcaggagaagccgtggccggatcgtgggcgtcacctccaactcgtcctacatattcatcgggaggaacaccttctacaatgccagcaaggcggcggcgctcagcttctacgacaccctgaggatggagctgggcagcgacatccgcatcaccgaggtggtgccaggcgtggtggagtctgagatcaccaaggggaagatgctcaccaagggaggcgagatgaaggtggaccaggacgaaagagacgtacgccatcctggggccgacgccggccgagcccgtgggcgacttcgccaggaccgtggtgcgcgacgtgtgccggggcgcgaggtacgtgttcgagcccaggtggtacatgggcgtctacttgctgcgggcctgcctcccggaagtcctggcctggaactcccgcctgctcactgtcgacacggtcggcgcgtccaccacggacacgctcggaaagtggctggtcgagctgcccggcgtgcgccgcgtcgtgcagccgccgtcgctccgctcgccggagatcaaggactagtgacggtgatcgtgtacgttctgtggccatggatagcactagctgtatgagaccgaagttcctttagacatcgacacgattaataaaggactcaattatcttaatgctactacaaattactccctctgttgtttttttatttgtcgcttttttccaaaaataaaat

SEQ ID NO: 25343 - DNA, 1318 bp, Zea Mays
ggcgtacgcggcataagatcgagcaggtagcaattaataagcccacgctgtggcgagcttgcatcattgcgcacaccttgatgctgggcatgagcaggacggggttggccggagcggcgctgcgggtggcgctgacggcgctgctgccgctggtcctgccggcgtactacgtgtacaagctgaccacgtacctcctcggcgccgtcttccccgaggacgtcgccggcaaggtggtactcatcaccggcgcctcctccggcatcggcgagcacctggcctatgagtacgcgaagcggggagcctacctggcgctggtggcgaggagggaggcgagcctccgcgaggtcggcgacgtcgcgctggggctgggctcgccgggcgtcctcgtcctcccggctgacgtctccaagcctcgggactgcgagggcttcatcgacgacacgattagctacttcggtagactggatcacctggtgaacaacgcgtccatctggcaagtgtgcaagttcgaagagatccaggacgtcaggcacttgagagccctgatggacatcaacttctggggccacgtgtacccaacccggctcgccatccctcacctcaggagaagccgtggccggatcgtgggcgtcacctccaactcgtcctacatattcatcgggaggaacaccttctacaatgccagcaaggcggcggcgctcagcttctacgacaccctgaggatggagctgggcagcgacatccgcatcaccgaggtggtgccaggcgtggtggagtctgagatcaccaaggggaagatgctcaccaagggaggcgagatgaaggtggaccaggacgaaagagactgcgtgctttgtcctgcaggccatcctggggccgacgccggccgagcccgtgggcgacttcgccaggaccgtggtgcgcgacgtgtgccggggcgcgaggtacgtgttcgagcccaggtggtacatgggcgtctacttgctgcgggcctgcctcccggaagtcctggcctggaactcccgcctgctcactgtcgacacggtcggcgcgtccaccacggacacgctcggaaagtggctggtcgagctgcccggcgtgcgccgcgtcgtgcagccgccgtcgctccgctcgccggagatcaaggactagtgacggtgatcgtgtacgttctgtggccatggatagcactagctgtatgagaccgaagttcctttagacatcgacacgattaataaaggactcaattatcttaatgctactacaaattactccctctgttgtttttttatttgtcgcttttttccaaaaataaaat

SEQ ID NO: 25344 - DNA, 3251 bp, Zea Mays
gaaagagataggctagagattaacagagggtgctccgcctcctacatctttgctatggacaggaagacttatgagctcgtgggaccagactatcccggtaatcgagccgaagatgttaaggatccttcacttggctggatgatcagtttcttgttcctcattgctctcgttgggccatttagcattgtcttgcttcgaaaggtaatggtgattgattacaagcttgcattccctggtggaacagctacagctttgatgatcaatagcttgcatgggaaaacggatggtgatcttgcagggaaaaagctgcactgccttgtaaaatacatgggcattagttttgtttggagcttctttaaatggttctttagtggtgttggtgactcttgtggttttgacaatttcccaacatttgggcttgaagcttttaaaagcacgttttatttcgacttcagtcctagttatgtcgggtttggttttatttcccctcatattgtaaactgctcagttttccttggatctgtcatatcttggggctttctttggccatttattagtgcacaagctggtcattggtacccagataaccttggtaacagtgatttcagaggcctatatggttataaggtcttcatagccatttcgattatacttggagatggcctatacaacttggttaagatatttattgtcattgctagagaattatgcagcatgcaatcgaaacaacatgagctgcctgttcaagctctggaagatgacgggagttgtgaacaactagcagatgagaaactacaaacagagatattcctcaaagatagtatatctccttggtttgctgcttctggttacattgtcctggcagcaatatccaccgccagtgtgcccgccatatttccccagctcaagtggtaccttgtcctcctgtgctacttcttcgctcccgtggttgcgttctgcaactcctacggaatgggcctcaccaacctgaaccttgccccgacctacggcaagatcgccctcttcgcgttggcctcgctcgtcggcagtgatggcggtggagtcatcgccggccttgcagcctgtggcatcgtaatgtccgttgcctgttccacagccgatctaatgcaggacttgaagagcgggtacctgaccctctcgtcgccgcggtcgatgttcactgcccagctgatcggcatcgcgctcgggtgcgtcatagctccgctcacgctgtggctcttctggacagccttcgacatcggcgaccctgacggggagtacaaggccccctttgccatcatgttccgggagatggccatcctcgggatggagggcttctccgcgctgccactgcactgccttgacatctgctatgccgccttcttcctcgccttggccaccagtctcctcaaggacgtggcgcccgcaaacgtgtccagaagctgaaccgggagcaggctgatggttacgcggtggctgtggcgtccgggctgatctgtggagatgggatctggagcatcccttctgctcttctgtccatcctgggagctgttccacccatctgcatgtcgttcgaggcttcctctgctcccaggtgagagatgaacaatacgcagaagtttttattactggccatatgtttgcgccattgatgaaaccatatggattgtaacacaaaggaggtgttagttgttcgtaatttgtacctccgatgattttatatgaaacaaaaacacgtctttgcatgtaatgtaaatacatacattctctggtttgaaacttcgaatacacatcgtagatttttcattttaaacaactatacaacataagcatcaactgtaatgttgtgttctatacacgtgctctgttgtgatacatcgattgcctgtaatgatcactggctctaagacctgtatggagcattgcttcaacttgttttttttttacaaggcaatgacgaatggaccagcagaggccacctgccctgcttagaagctcacaggtagagctctgcatccccaggacaacactccacgtgccctgcagcctgtgacgtgtcaagctgtgaggacaccacgcagtcatgcttctccttcccgcgtctctcacatcatatggagcacaggggcgagcggcagcagcagaaggtcggcagcagccatggagatgctgagcatgctgaaggtggggtacaccatcctgcgcagcgagacgcccgcgacagacctcgtcaacaccttcatggactgggcggcgcgcagaggacgtcgcagggaaggttgtgctcatcaccggcgccgcctccggcatcggccaggccgtgaacttctggggcgcagttcatgcgacccactgcgctcttccccatctgaagaagagcggcggtgggaaggtcttcgtcaactcctcggctgcggcggcgctggcaatgccaggaatgagcctctacaatgccagcgaggctgctgttctcaacttcttcgagaccctgcgggtcgagctccgcgacgaggtcggcatcaccatcgcgacttccgggtggatcgtgtcggagatgaccggagggaagcagctgtccaaggaagggacggtggaggtcgccgtgcggtgcgccgaggccaccgtggacgccatctgccgcggccggcgccacctcaccgtcccgctgtggtaccgggcgctgttcctgtggcgggcgctcgcgcccgaggtggtggagttcagccagagactgttgtgccgacggaccgcgggcggccgcggtcatcaggcgaagggcaagaggttgcaggaggtcaccggcgccgtccagccggcgccgctgcacagctcggacatcaaacgggagtagtcgtaggcttcggtaaggcagctggcagtgacatggtgctagctgctgcttgtctgttcggtcaaatgtggacgagttgtaaatcagctgtcaccttcgttcgttgtgtgactttaaacttcgtgcatacagtatgttgttgtcccgatttttcttcgtgtgggcggagttattgcattgcatagatagattgctctaaaatccgtagtacgctaggccaatcactaggctaggtgcaacaaaacaaatatacgtgtgagctgctaaaagtcacttgtttttttagttttgctacaactctttttttttaaaaaaaagagacgacgagtatactaaaaatagagattcgttgcagtttatatattttggtttcaagaataaagaaacggttggaaaatca

SEQ ID NO: 25345 - DNA, 3429 bp, Zea Mays
ctgacacctcgatatcgagacgagggtgctccgcctcctacatctttgctatggacaggaagacttatgagctcgtgggaccagactatcccggtaatcgagccgaagatgttaaggatccttcacttggctggatgatcagtttcttgttcctcattgctctcgttgggccatttagcattgtcttgcttcgaaaggtaatggtgattgattacaagcttgcattccctggtggaacagctacagctttgatgatcaatagcttgcatgggaaaacggatggtgatcttgcagggaaaaagctgcactgccttgtaaaatacatgggcattagttttgtttggagcttctttaaatggttctttagtggtgttggtgactcttgtggttttgacaatttcccaacatttgggcttgaagcttttaaaagcacgttttatttcgacttcagtcctagttatgtcgggtttggttttatttcccctcatattgtaaactgctcagttttccttggatctgtcatatcttggggctttctttggccatttattagtgcacaagctggtcattggtacccagataaccttggtaacagtgatttcagaggcctatatggttataaggtcttcatagccatttcgattatacttggagatggcctatacaacttggttaagatatttattgtcattgctagagaattatgcagcatgcaatcgaaacaacatgagctgcctgttcaagctctggaaggtaaacatgttacttcttagttgtagtgcaatgcgttggccacatgctgtgagattaattttgtggcttgtgagttgcgaacattagttgcacaatatatagctcatctaatatgccgtcttacgaaaagctgacatgcccatagtatttgtccaatgcatgtttcgtcatctcatctgcagatgacgggagttgtgaacaactagcagatgagaaactacaaacagagatattcctcaaagatagtatatctccttggtttgctgcttctggttacattgtcctggcagcaatatccaccgccagtgtgcccgccatatttccccagctcaagtggtaccttgtcctcctgtgctacttcttcgctcccgtggttgcgttctgcaactcctacggaatgggcctcaccaacctgaaccttgccccgacctacggcaagatcgccctcttcgcgttggcctcgctcgtcggcagtgatggcggtggagtcatcgccggccttgcagcctgtggcatcgtaatgtccgttgcctgttccacagccgatctaatgcaggacttgaagagcgggtacctgaccctctcgtcgccgcggtcgatgttcactgcccagctgatcggcatcgcgctcgggtgcgtcatagctccgctcacgctgtggctcttctggacagccttcgacatcggcgaccctgacggggagtacaaggccccctttgccatcatgttccgggagatggccatcctcgggatggagggcttctccgcgctgccactgcactgccttgacatctgctatgccgccttcttcctcgccttggccaccagtctcctcaaggacgtggcgcccgcaaacgtgtccagaagctgaaccgggagcaggctgatggttacgcggtggctgtggcgtccgggctgatctgtggagatgggatctggagcatcccttctgctcttctgtccatcctgggagctgttccacccatctgcatgtcgttcgaggcttcctctgctcccaggtgagagatgaacaatacgcagaagtttttattactggccatatgtttgcgccattgatgaaaccatatggattgtaacacaaaggaggtgttagttgttcgtaatttgtacctccgatgattttatatgaaacaaaaacacgtctttgcatgtaatgtaaatacatacattctctggtttgaaacttcgaatacacatcgtagatttttcattttaaacaactatacaacataagcatcaactgtaatgttgtgttctatacacgtgctctgttgtgatacatcgattgcctgtaatgatcactggctctaagacctgtatggagcattgcttcaacttgttttttttttacaaggcaatgacgaatggaccagcagaggccacctgccctgcttagaagctcacaggtagagctctgcatccccaggacaacactccacgtgccctgcagcctgtgacgtgtcaagctgtgaggacaccacgcagtcatgcttctccttcccgcgtctctcacatcatatggagcacaggggcgagcggcagcagcagaaggtcggcagcagccatggagatgctgagcatgctgaaggtggggtacaccatcctgcgcagcgagacgcccgcgacagacctcgtcaacaccttcatggactgggcggcgcgcagaggacgtcgcagggaaggttgtgctcatcaccggcgccgcctccggcatcggccaggccgtgaacttctggggcgcagttcatgcgacccactgcgctcttccccatctgaagaagagcggcggtgggaaggtcttcgtcaactcctcggctgcggcggcgctggcaatgccaggaatgagcctctacaatgccagcgaggctgctgttctcaacttcttcgagaccctgcgggtcgagctccgcgacgaggtcggcatcaccatcgcgacttccgggtggatcgtgtcggagatgaccggagggaagcagctgtccaaggaagggacggtggaggtcgccgtgcggtgcgccgaggccaccgtggacgccatctgccgcggccggcgccacctcaccgtcccgctgtggtaccgggcgctgttcctgtggcgggcgctcgcgcccgaggtggtggagttcagccagagactgttgtgccgacggaccgcgggcggccgcggtcatcaggcgaagggcaagaggttgcaggaggtcaccggcgccgtccagccggcgccgctgcacagctcggacatcaaacgggagtagtcgtaggcttcggtaaggcagctggcagtgacatggtgctagctgctgcttgtctgttcggtcaaatgtggacgagttgtaaatcagctgtcaccttcgttcgttgtgtgactttaaacttcgtgcatacagtatgttgttgtcccgatttttcttcgtgtgggcggagttattgcattgcatagatagattgctctaaaatccgtagtacgctaggccaatcactaggctaggtgcaacaaaacaaatatacgtgtgagctgctaaaagtcacttgtttttttagttttgctacaactctttttttttaaaaaaaagagacgacgagtatactaaaaatagagattcgttgcagtttatatattttggtttcaagaataaagaaacggttggaaaatca

SEQ ID NO: 25346 - DNA, 5327 bp, Zea Mays
tttactcacactagtctgctcctcaggttttgcagatttaacacttcttatcatggatggcaagtgcaaagtcaataaggaaatagatggcccccttggaccacctcctcggtaagggggacttaaattctcaccaaaagtacctcagaagaaacttgtcaaggttgtctttgatagggaaccagttgaggagagcaaggaagaagatgtggataaggagtaattgatgaaacttaagatgtcacagcttgcctcattttgcagaacaagtattcctctacaagaattaagtctgaggaaaaagcaaaaagcggtacaaaggttgcatttggacaaggaaactcttcttatgcaagatattttcccatgcccaaaaaggattcttcagcaggtggaacttcgaagttaccaaaagaatatgcagaaccatgggattatacccatgattatcatgttactctcccactactctggaaatcctggtatattttttttagtctttagtcgaaattgcaagacattttcttcaactaaccccaccattcctacatcactgacacagaagttctggatgaggaagagtttggagaatcctctgccagcaggactgaagatgacaaattgccctatgcagtactaaggaagtcacattaactaactgtgcaggtttcatttggctcgaactgcatgtttccccaggaggttgcagcaaccaacaccagagaaaaacattgctgtacggtggggggagagcagcaagcgtgcctgtcgtcgccccggatattgactccatgttgggttctgttgacaagatgaaagaatagtccattttgtattatgccattacaagagagttttgctcccttatagagatgtgcagctacatgctggatacccagtcaaacaagggacaccaacgaaaggatgtctccttggacaactacagcactcagagatggaataggcattctgatcgtagtagtcatcttggatgcgacgttgcaaaggatgggatagaagaatcgcacatctgacgggagaaaacgcgagcaagcccttgcttgaccagtctcaagaaagctcgtctacggctctgctcctcgccggcgatgacgcccgcggagacctccccgccggcgccacctccacgtgcttctcaccctgtctcctccccgctcctcctacaagaccccacaacccaggccacgtgcccttggagggagcagctcaccgtccgtggcgtcgccgtggctgcggcgctgggcgcgctgctctgcgtggtaatccaccgcctcaacctcaccgtcggggttataccggcgcttaacgtcgcgtcgggcctcctcgccttcttcctcgccgcggcgtggcgtgctgccgccgggtggctagggtttggccgcgggccgcccttcacgaggcaggagaacaccgtcatccagacgtgcgccatagcatgcgccggcctcgcgtttagcgggtgctccgcctcctacatctttgctatggacaggaagacttatgagctcgtgggaccagactatcccggtaatcgagccgaagatgttaaggatccttcacttggctggatgatcagtttcttgttcctcattgctctcgttgggccatttagcattgtcttgcttcgaaaggtaatggtgattgattacaagcttgcattccctggtggaacagctacagctttgatgatcaatagcttgcatgggaaaacggatggtgatcttgcagggtaaggcaacaggaaaaagctgcactgccttgtaaaatacatgggcattagttttgtttggagcttctttaaatggttctttagtggtgttggtgactcttgtggttttgacaatttcccaacatttgggcttgaagcttttaaaagcacgttttatttcgacttcagtcctagttatgtcgggtttggttttatttcccctcatattgtaaactgctcagttttccttggatctgtcatatcttggggctttctttggccatttattagtgcacaagctggtcattggtacccagataaccttggtaacagtgatttcagaggcctatatggttataaggtcttcatagccatttcgattatacttggagatggcctatacaacttggttaagatatttattgtcattgctagagaattatgcagcatgcaatcgaaacaacatgagctgcctgttcaagctctggaaggtaaacatgttacttcttagttgtagtgcaatgcgttggccacatgctgtgagattaattttgtggcttgtgagttgcgaacattagttgcacaatatatagctcatctaatatgccgtcttacgaaaagctgacatgcccatagtatttgtccaatgcatgtttcgtcatctcatctgcagatgacgggagttgtgaacaactagcagatgagaaactacaaacagagatattcctcaaagatagtatatctccttggtttgctgcttctggttacattgtcctggcagcaatatccaccgccagtgtgcccgccatatttccccagctcaagtggtaccttgtcctcctgtgctacttcttcgctcccgtggttgcgttctgcaactcctacggaatgggcctcaccaacctgaaccttgccccgacctacggcaagatcgccctcttcgcgttggcctcgctcgtcggcagtgatggcggtggagtcatcgccggccttgcagcctgtggcatcgtaatgtccgttgcctgttccacagccgatctaatgcaggacttgaagagcgggtacctgaccctctcgtcgccgcggtcgatgttcactgcccagctgatcggcatcgcgctcgggtgcgtcatagctccgctcacgctgtggctcttctggacagccttcgacatcggcgaccctgacggggagtacaaggccccctttgccatcatgttccgggagatggccatcctcgggatggagggcttctccgcgctgccactgcactgccttgacatctgctatgccgccttcttcctcgccttggccaccagtctcctcaaggacgtggcgcccgcaaacgtgtccaggttcatccccataccgatcgctatggctgcgccgttctacgttggcgcctactttggcgtggacatgttcataggcacggcgatcttgtacgcctggcagaagctgaaccgggagcaggctgatggttacgcggtggctgtggcgtccgggctgatctgtggagatgggatctggagcatcccttctgctcttctgtccatcctgggagctgttccacccatctgcatgtcgttcgaggcttcctctgctcccaggtgagagatgaacaatacgcagaagtttttattactggccatatgtttgcgccattgatgaaaccatatggattgtaacacaaaggaggtgttagttgttcgtaatttgtacctccgatgattttatatgaaacaaaaacacgtctttgcatgtaatgtaaatacatacattctctggtttgaaacttcgaatacacatcgtagatttttcattttaaacaactatacaacataagcatcaactgtaatgttgtgttctatacacgtgctctgttgtgatacatcgattgcctgtaatgatcactggctctaagacctgtatggagcattgcttcaacttgttttttttttacaaggcaatgacgaatggaccagcagaggccacctgccctgcttagaagctcacaggtagagctctgcatccccaggacaacactccacgtgccctgcagcctgtgacgtgtcaagctgtgaggacaccacgcagtcatgcttctccttcccgcgtctctcacatcatatggagcacaggggcgagcggcagcagcagaaggtcggcagcagccatggagatgctgagcatgctgaaggtggggtacaccatcctgcgcagcgagacgcccgcgacagacctcgtcaacaccttcatggactgggcggcgcgcaggtcccttatgctcctggccatcttcctcccgccgtactacatctacaagctcaccacgtctgcgttcgctgctgccgtgccagaggacgtcgcagggaaggttgtgctcatcaccggcgccgcctccggcatcggccagcgagactggcgctagtggcgaggatggtgggaagcctgcatgatgtcgcggcgagagccagggatggcggctcgccagacgttctggttgttgccggggacgttgcgaaaccagaggattgccggaggtttgtgcaggccacagttgaacatttcggccgattggatcatcttgtgaacaacgctggtgtagcaaatgtctgctggtttgaggacgtaccggatgttgctgctttgaagcgagtcctggccgtgaacttctggggcgcagttcatgcgacccactgcgctcttccccatctgaagaagagcggcggtgggaaggtcttcgtcaactcctcggctgcggcggcgctggcaatgccaggaatgagcctctacaatgccagcgaggctgctgttctcaacttcttcgagaccctgcgggtcgagctccgcgacgaggtcggcatcaccatcgcgacttccgggtggatcgtgtcggagatgaccggagggaagcagctgtccaaggaagggacggtggaggtcgccgtgcggtgcgccgaggccaccgtggacgccatctgccgcggccggcgccacctcaccgtcccgctgtggtaccgggcgctgttcctgtggcgggcgctcgcgcccgaggtggtggagttcagccagagactgttgtgccgacggaccgcgggcggccgcggtcatcaggcgaagggcaagaggttgcaggaggtcaccggcgccgtccagccggcgccgctgcacagctcggacatcaaacgggagtagtcgtaggcttcggtaaggcagctggcagtgacatggtgctagctgctgcttgtctgttcggtcaaatgtggacgagttgtaaatcagctgtcaccttcgttcgttgtgtgactttaaacttcgtgcatacagtatgttgttgtcccgatttttcttcgtgtgggcggagttattgcattgcatagatagattgctctaaaatccgtagtacgctaggccaatcactaggctaggtgcaacaaaacaaatatacgtgtgagctgctaaaagtcacttgtttttttagttttgctacaactctttttttttaaaaaaaagagacgacgagtatactaaaaatagagattcgttgcagtttatatattttggtttcaagaataaagaaacggttggaaaatca

SEQ ID NO: 25347 - DNA, 5492 bp, Zea Mays
tttactcacactagtctgctcctcaggttttgcagatttaacacttcttatcatggatggcaagtgcaaagtcaataaggaaatagatggcccccttggaccacctcctcggtaagggggacttaaattctcaccaaaagtacctcagaagaaacttgtcaaggttgtctttgatagggaaccagttgaggagagcaaggaagaagatgtggataaggagtaattgatgaaacttaagatgtcacagcttgcctcattttgcagaacaagtattcctctacaagaattaagtctgaggaaaaagcaaaaagcggtacaaaggttgcatttggacaaggaaactcttcttatgcaagatattttcccatgcccaaaaaggattcttcagcaggtggaacttcgaagttaccaaaagaatatgcagaaccatgggattatacccatgattatcatgttactctcccactactctggaaatcctggtatattttttttagtctttagtcgaaattgcaagacattttcttcaactaaccccaccattcctacatcactgacacagaagttctggatgaggaagagtttggagaatcctctgccagcaggactgaagatgacaaattgccctatgcagtactaaggaagtcacattaactaactgtgcaggtttcatttggctcgaactgcatgtttccccaggaggttgcagcaaccaacaccagagaaaaacattgctgtacggtggggggagagcagcaagcgtgcctgtcgtcgccccggatattgactccatgttgggttctgttgacaagatgaaagaatagtccattttgtattatgccattacaagagagttttgctcccttatagagatgtgcagctacatgctggatacccagtcaaacaagggacaccaacgaaaggatgtctccttggacaactacagcactcagagatggaataggcattctgatcgtagtagtcatcttggatgcgacgttgcaaaggatgggatagaagaatcgcacatctgacgggagaaaacgcgagcaagcccttgcttgaccagtctcaagaaagctcgtctacggctctgctcctcgccggcgatgacgcccgcggagacctccccgccggcgccacctccacgtgcttctcaccctgtctcctccccgctcctcctacaagaccccacaacccaggccacgtgcccttggagggagcagctcaccgtccgtggcgtcgccgtggctgcggcgctgggcgcgctgctctgcgtggtaatccaccgcctcaacctcaccgtcggggttataccggcgcttaacgtcgcgtcgggcctcctcgccttcttcctcgccgcggcgtggcgtgctgccgccgggtggctagggtttggccgcgggccgcccttcacgaggcaggagaacaccgtcatccagacgtgcgccatagcatgcgccggcctcgcgtttagcgggtgctccgcctcctacatctttgctatggacaggaagacttatgagctcgtgggaccagactatcccggtaatcgagccgaagatgttaaggatccttcacttggctggatgatcagtttcttgttcctcattgctctcgttgggccatttagcattgtcttgcttcgaaaggtaatggtgattgattacaagcttgcattccctggtggaacagctacagctttgatgatcaatagcttgcatgggaaaacggatggtgatcttgcagggaaaaagctgcactgccttgtaaaatacatgggcattagttttgtttggagcttctttaaatggttctttagtggtgttggtgactcttgtggttttgacaatttcccaacatttgggcttgaagcttttaaaagcacgttttatttcgacttcagtcctagttatgtcgggtttggttttatttcccctcatattgtaaactgctcagttttccttggatctgtcatatcttggggctttctttggccatttattagtgcacaagctggtcattggtacccagataaccttggtaacagtgatttcagaggcctatatggttataaggtcttcatagccatttcgattatacttggagatggcctatacaacttggttaagatatttattgtcattgctagagaattatgcagcatgcaatcgaaacaacatgagctgcctgttcaagctctggaagatgacgggagttgtgaacaactagcagatgagaaactacaaacagagatattcctcaaagatagtatatctccttggtttgctgcttctggttacattgtcctggcagcaatatccaccgccagtgtgcccgccatatttccccagctcaagtggtaccttgtcctcctgtgctacttcttcgctcccgtggttgcgttctgcaactcctacggaatgggcctcaccaacctgaaccttgccccgacctacggcaagatcgccctcttcgcgttggcctcgctcgtcggcagtgatggcggtggagtcatcgccggccttgcagcctgtggcatcgtaatgtccgttgcctgttccacagccgatctaatgcaggacttgaagagcgggtacctgaccctctcgtcgccgcggtcgatgttcactgcccagctgatcggcatcgcgctcgggtgcgtcatagctccgctcacgctgtggctcttctggacagccttcgacatcggcgaccctgacggggagtacaaggccccctttgccatcatgttccgggagatggccatcctcgggatggagggcttctccgcgctgccactgcactgccttgacatctgctatgccgccttcttcctcgccttggccaccagtctcctcaaggacgtggcgcccgcaaacgtgtccaggttcatccccataccgatcgctatggctgcgccgttctacgttggcgcctactttggcgtggacatgttcataggcacggcgatcttgtacgcctggcagaagctgaaccgggagcaggctgatggttacgcggtggctgtggcgtccgggctgatctgtggagatgggatctggagcatcccttctgctcttctgtccatcctgggagctgttccacccatctgcatgtcgttcgaggcttcctctgctcccaggtgagagatgaacaatacgcagaagtttttattactggccatatgtttgcgccattgatgaaaccatatggattgtaacacaaaggaggtgttagttgttcgtaatttgtacctccgatgattttatatgaaacaaaaacacgtctttgcatgtaatgtaaatacatacattctctggtttgaaacttcgaatacacatcgtagatttttcattttaaacaactatacaacataagcatcaactgtaatgttgtgttctatacacgtgctctgttgtgatacatcgattgcctgtaatgatcactggctctaagacctgtatggagcattgcttcaacttgttttttttttacaaggcaatgacgaatggaccagcagaggccacctgccctgcttagaagctcacaggtagagctctgcatccccaggacaacactccacgtgccctgcagcctgtgacgtgtcaagctgtgaggacaccacgcagtcatgcttctccttcccgcgtctctcacatcatatggagcacaggggcgagcggcagcagcagaaggtcggcagcagccatggagatgctgagcatgctgaaggtggggtacaccatcctgcgcagcgagacgcccgcgacagacctcgtcaacaccttcatggactgggcggcgcgcaggtcccttatgctcctggccatcttcctcccgccgtactacatctacaagctcaccacgtctgcgttcgctgctgccgtgccagaggacgtcgcagggaaggttgtgctcatcaccggcgccgcctccggcatcggccaggtatgccaaccagtaactcctttgtgtacgcgtatttttgctgaaacaaactaaaccatggattcccatagatcttttcatgtcattttccttaataacaataacaacatcaccgacgacttcgattgcaaaaagggggattttgacttgcactaattgtgatgcgtaactcatggctaaacaaacgccaacatgctattgtgctttgccatgagctcgtagtcgtatctgtatgactgtatcccagcaaatagcttaccagtacgcaaagaaggtagcgagactggcgctagtggcgaggatggtgggaagcctgcatgatgtcgcggcgagagccagggatggcggctcgccagacgttctggttgttgccggggacgttgcgaaaccagaggattgccggaggtttgtgcaggccacagttgaacatttcggccgattggatcatcttgtgaacaacgctggtgtagcaaatgtctgctggtttgaggacgtaccggatgttgctgctttgaagcgagtcctggccgtgaacttctggggcgcagttcatgcgacccactgcgctcttccccatctgaagaagagcggcggtgggaaggtcttcgtcaactcctcggctgcggcggcgctggcaatgccaggaatgagcctctacaatcgaggctgctgttctcaacttcttcgagaccctgcgggtcgagctccgcgacgaggtcggcatcaccatcgcgacttccgggtggatcgtgtcggagatgaccggagggaagcagctgtccaaggaagggacggtggaggtcgatccatagacacactgacgatgacaatatgctgaccgaatgaatggtgtgtcttgaatcttgatcgttttgttcgtcctcaggtcgccgtgcggtgcgccgaggccaccgtggacgccatctgccgcggccggcgccacctcaccgtcccgctgtggtaccgggcgctgttcctgtggcgggcgctcgcgcccgaggtggtggagttcagccagagactgttgtgccgacggaccgcgggcggccgcggtcatcaggcgaagggcaagaggttgcaggaggtcaccggcgccgtccagccggcgccgctgcacagctcggacatcaaacgggagtagtcgtaggcttcggtaaggcagctggcagtgacatggtgctagctgctgcttgtctgttcggtcaaatgtggacgagttgtaaatcagctgtcaccttcgttcgttgtgtgactttaaacttcgtgcatacagtatgttgttgtcccgatttttcttcgtgtgggcggagttattgcattgcatagatagattgctctaaaatccgtagtacgctaggccaatcactaggctaggtgcaacaaaacaaatatacgtgtgagctgctaaaagtcacttgtttttttagttttgctacaactctttttttttaaaaaaaagagacgacgagtatactaaaaatagagattcgttgcagtttatatattttggtttcaagaataaagaaacggttggaaaatca

SEQ ID NO: 25348 - DNA, 5372 bp, Zea Mays
tttactcacactagtctgctcctcaggttttgcagatttaacacttcttatcatggatggcaagtgcaaagtcaataaggaaatagatggcccccttggaccacctcctcggtaagggggacttaaattctcaccaaaagtacctcagaagaaacttgtcaaggttgtctttgatagggaaccagttgaggagagcaaggaagaagatgtggataaggagtaattgatgaaacttaagatgtcacagcttgcctcattttgcagaacaagtattcctctacaagaattaagtctgaggaaaaagcaaaaagcggtacaaaggttgcatttggacaaggaaactcttcttatgcaagatattttcccatgcccaaaaaggattcttcagcaggtggaacttcgaagttaccaaaagaatatgcagaaccatgggattatacccatgattatcatgttactctcccactactctggaaatcctggtatattttttttagtctttagtcgaaattgcaagacattttcttcaactaaccccaccattcctacatcactgacacagaagttctggatgaggaagagtttggagaatcctctgccagcaggactgaagatgacaaattgccctatgcagtactaaggaagtcacattaactaactgtgcaggtttcatttggctcgaactgcatgtttccccaggaggttgcagcaaccaacaccagagaaaaacattgctgtacggtggggggagagcagcaagcgtgcctgtcgtcgccccggatattgactccatgttgggttctgttgacaagatgaaagaatagtccattttgtattatgccattacaagagagttttgctcccttatagagatgtgcagctacatgctggatacccagtcaaacaagggacaccaacgaaaggatgtctccttggacaactacagcactcagagatggaataggcattctgatcgtagtagtcatcttggatgcgacgttgcaaaggatgggatagaagaatcgcacatctgacgggagaaaacgcgagcaagcccttgcttgaccagtctcaagaaagctcgtctacggctctgctcctcgccggcgatgacgcccgcggagacctccccgccggcgccacctccacgtgcttctcaccctgtctcctccccgctcctcctacaagaccccacaacccaggccacgtgcccttggagggagcagctcaccgtccgtggcgtcgccgtggctgcggcgctgggcgcgctgctctgcgtggtaatccaccgcctcaacctcaccgtcggggttataccggcgcttaacgtcgcgtcgggcctcctcgccttcttcctcgccgcggcgtggcgtgctgccgccgggtggctagggtttggccgcgggccgcccttcacgaggcaggagaacaccgtcatccagacgtgcgccatagcatgcgccggcctcgcgtttagcgggtgctccgcctcctacatctttgctatggacaggaagacttatgagctcgtgggaccagactatcccggtaatcgagccgaagatgttaaggatccttcacttggctggatgatcagtttcttgttcctcattgctctcgttgggccatttagcattgtcttgcttcgaaaggtaatggtgattgattacaagcttgcattccctggtggaacagctacagctttgatgatcaatagcttgcatgggaaaacggatggtgatcttgcagggaaaaagctgcactgccttgtaaaatacatgggcattagttttgtttggagcttctttaaatggttctttagtggtgttggtgactcttgtggttttgacaatttcccaacatttgggcttgaagcttttaaaagcacgttttatttcgacttcagtcctagttatgtcgggtttggttttatttcccctcatattgtaaactgctcagttttccttggatctgtcatatcttggggctttctttggccatttattagtgcacaagctggtcattggtacccagataaccttggtaacagtgatttcagaggcctatatggttataagataatcccataaaacagatacgccttgtaactactatctgtaaacagtccagtgtttggcagtccaagcctaaatggaataaaatcatgtggggaacaatccccccctgttgagcttttaaaaaatgattaatgtgcatgggtttcttcaactgaattttgtttcaaggatctgggaaatgattttttttggcctgcaacactgaagataggtcatgctgtcatgcttgatttcctcataaaatgcgtattcatgcaggtcttcatagccatttcgattatacttggagatggcctatacaacttggttaagatatttattgtcattgctagagaattatgcagcatgcaatcgaaacaacatgagctgcctgttcaagctctggaaggtaaacatgttacttcttagttgtagtgcaatgcgttggccacatgctgtgagattaattttgtggcttgtgagttgcgaacattagttgcacaatatatagctcatctaatatgccgtcttacgaaaagctgacatgcccatagtatttgtccaatgcatgtttcgtcatctcatctgcagatgacgggagttgtgaacaactagcagatgagaaactacaaacagagatattcctcaaagatagtatatctccttggtttgctgcttctggttacattgtcctggcagcaatatccaccgccagtgtgcccgccatatttccccagctcaagtggtaccttgtcctcctgtgctacttcttcgctcccgtggttgcgttctgcaactcctacggaatgggcctcaccaacctgaaccttgccccgacctacggcaagatcgccctcttcgcgttggcctcgctcgtcggcagtgatggcggtggagtcatcgccggccttgcagcctgtggcatcgtaatgtccgttgcctgttccacagccgatctaatgcaggacttgaagagcgggtacctgaccctctcgtcgccgcggtcgatgttcactgcccagctgatcggcatcgcgctcgggtgcgtcatagctccgctcacgctgtggctcttctggacagccttcgacatcggcgaccctgacggggagtacaaggccccctttgccatcatgttccgggagatggccatcctcgggatggagggcttctccgcgctgccactgcactgccttgacatctgctatgccgccttcttcctcgccttggccaccagtctcctcaaggacgtggcgcccgcaaacgtgtccaggttcatccccataccgatcgctatggctgcgccgttctacgttggcgcctactttggcgtggacatgttcataggcacggcgatcttgtacgcctggcagaagctgaaccgggagcaggctgatggttacgcggtggctgtggcgtccgggctgatctgtggagatgggatctggagcatcccttctgctcttctgtccatcctgggagctgttccacccatctgcatgtcgttcgaggcttcctctgctcccaggcaatgacgaatggaccagcagaggccacctgccctgcttagaagctcacaggggcgagcggcagcagcagaaggtcggcagcagccatggagatgctgagcatgctgaaggtggggtacaccatcctgcgcagcgagacgcccgcgacagacctcgtcaacaccttcatggactgggcggcgcgcaggtcccttatgctcctggccatcttcctcccgccgtactacatctacaagctcaccacgtctgcgttcgctgctgccgtgccagaggacgtcgcagggaaggttgtgctcatcaccggcgccgcctccggcatcggccaggtatgccaaccagtaactcctttgtgtacgcgtatttttgctgaaacaaactaaaccatggattcccatagatcttttcatgtcattttccttaataacaataacaacatcaccgacgacttcgattgcaaaaagggggattttgacttgcactaattgtgatgcgtaactcatggctaaacaaacgccaacatgctattgtgctttgccatgagctcgtagtcgtatctgtatgactgtatcccagcaaatagcttaccagtacgcaaagaaggtagcgagactggcgctagtggcgaggatggtgggaagcctgcatgatgtcgcggcgagagccagggatggcggctcgccagacgttctggttgttgccggggacgttgcgaaaccagaggattgccggaggtttgtgcaggccacagttgaacatttcggccgattggatcatcttgtgaacaacgctggtgtagcaaatgtctgctggtttgaggacgtaccggatgttgctgctttgaagcgagtcctggccgtgaacttctggggcgcagttcatgcgacccactgcgctcttccccatctgaagaagagcggcggtgggaaggtcttcgtcaactcctcggctgcggcggcgctggcaatgccaggaatgagcctctacaatgccagcgaggctgctgttctcaacttcttcgagaccctgcgggtcgagctccgcgacgaggtcggcatcaccatcgcgacttccgggtggatcgtgtcggagatgaccggagggaagcagctgtccaaggaagggacggtggaggtcgccgtgcggtgcgccgaggccaccgtggacgccatctgccgcggccggcgccacctcaccgtcccgctgtggtaccgggcgctgttcctgtggcgggcgctcgcgcccgaggtggtggagttcagccagagactgttgtgccgacggaccgcgggcggccgcggtcatcaggcgaagggcaagaggttgcaggaggtcaccggcgccgtccagccggcgccgctgcacagctcggacatcaaacgggagtagtcgtaggcttcggtaaggcagctggcagtgacatggtgctagctgctgcttgtctgttcggtcaaatgtggacgagttgtaaatcagctgtcaccttcgttcgttgtgtgactttaaacttcgtgcatacagtatgttgttgtcccgatttttcttcgtgtgggcggagttattgcattgcatagatagattgctctaaaatccgtagtacgctaggccaatcactaggctaggtgcaacaaaacaaatatacgtgtgagctgctaaaagtcacttgtttttttagttttgctacaactctttttttttaaaaaaaagagacgacgagtatactaaaaatagagattcgttgcagtttatatattttggtttcaagaataaagaaacggttggaaaatca

SEQ ID NO: 25349 - DNA, 4983 bp, Zea Mays
tttactcacactagtctgctcctcaggttttgcagatttaacacttcttatcatggatggcaagtgcaaagtcaataaggaaatagatggcccccttggaccacctcctcggtaagggggacttaaattctcaccaaaagtacctcagaagaaacttgtcaaggttgtctttgatagggaaccagttgaggagagcaaggaagaagatgtggataaggagtaattgatgaaacttaagatgtcacagcttgcctcattttgcagaacaagtattcctctacaagaattaagtctgaggaaaaagcaaaaagcggtacaaaggttgcatttggacaaggaaactcttcttatgcaagatattttcccatgcccaaaaaggattcttcagcaggtggaacttcgaagttaccaaaagaatatgcagaaccatgggattatacccatgattatcatgttactctcccactactctggaaatcctggtatattttttttagtctttagtcgaaattgcaagacattttcttcaactaaccccaccattcctacatcactgacacagaagttctggatgaggaagagtttggagaatcctctgccagcaggactgaagatgacaaattgccctatgcagtactaaggaagtcacattaactaactgtgcaggtttcatttggctcgaactgcatgtttccccaggaggttgcagcaaccaacaccagagaaaaacattgctgtacggtggggggagagcagcaagcgtgcctgtcgtcgccccggatattgactccatgttgggttctgttgacaagatgaaagaatagtccattttgtattatgccattacaagagagttttgctcccttatagagatgtgcagctacatgctggatacccagtcaaacaagggacaccaacgaaaggatgtctccttggacaactacagcactcagagatggaataggcattctgatcgtagtagtcatcttggatgcgacgttgcaaaggatgggatagaagaatcgcacatctgacgggagaaaacgcgagcaagcccttgcttgaccagtctcaagaaagctcgtctacggctctgctcctcgccggcgatgacgcccgcggagacctccccgccggcgccacctccacgtgcttctcaccctgtctcctccccgctcctcctacaagaccccacaacccaggccacgtgcccttggagggagcagctcaccgtccgtggcgtcgccgtggctgcggcgctgggcgcgctgctctgcgtggtaatccaccgcctcaacctcaccgtcggggttataccggcgcttaacgtcgcgtcgggcctcctcgccttcttcctcgccgcggcgtggcgtgctgccgccgggtggctagggtttggccgcgggccgcccttcacgaggcaggagaacaccgtcatccagacgtgcgccatagcatgcgccggcctcgcgtttagcgggtgctccgcctcctacatctttgctatggacaggaagacttatgagctcgtgggaccagactatcccggtaatcgagccgaagatgttaaggatccttcacttggctggatgatcagtttcttgttcctcattgctctcgttgggccatttagcattgtcttgcttcgaaaggtaatggtgattgattacaagcttgcattccctggtggaacagctacagctttgatgatcaatagcttgcatgggaaaacggatggtgatcttgcagggaaaaagctgcactgccttgtaaaatacatgggcattagttttgtttggagcttctttaaatggttctttagtggtgttggtgactcttgtggttttgacaatttcccaacatttgggcttgaagcttttaaaagcacgttttatttcgacttcagtcctagttatgtcgggtttggttttatttcccctcatattgtaaactgctcagttttccttggatctgtcatatcttggggctttctttggccatttattagtgcacaagctggtcattggtacccagataaccttggtaacagtgatttcagaggcctatatggttataaggtcttcatagccatttcgattatacttggagatggcctatacaacttggttaagatatttattgtcattgctagagaattatgcagcatgcaatcgaaacaacatgagctgcctgttcaagctctggaagatgacgggagttgtgaacaactagcagatgagaaactacaaacagagatattcctcaaagatagtatatctccttggtttgctgcttctggttacattgtcctggcagcaatatccaccgccagtgtgcccgccatatttccccagctcaagtggtaccttgtcctcctgtgctacttcttcgctcccgtggttgcgttctgcaactcctacggaatgggcctcaccaacctgaaccttgccccgacctacggcaagatcgccctcttcgcgttggcctcgctcgtcggcagtgatggcggtggagtcatcgccggccttgcagcctgtggcatcgtaatgtccgttgcctgttccacagccgatctaatgcaggacttgaagagcgggtacctgaccctctcgtcgccgcggtcgatgttcactgcccagctgatcggcatcgcgctcgggtgcgtcatagctccgctcacgctgtggctcttctggacagccttcgacatcggcgaccctgacggggagtacaaggccccctttgccatcatgttccgggagatggccatcctcgggatggagggcttctccgcgctgccactgcactgccttgacatctgctatgccgccttcttcctcgccttggccaccagtctcctcaaggacgtggcgcccgcaaacgtgtccaggttcatccccataccgatcgctatggctgcgccgttctacgttggcgcctactttggcgtggacatgttcataggcacggcgatcttgtacgcctggcagaagctgaaccgggagcaggctgatggttacgcggtggctgtggcgtccgggctgatctgtggagatgggatctggagcatcccttctgctcttctgtccatcctgggagctgttccacccatctgcatgtcgttcgaggcttcctctgctcccaggacaacactccacgtgccctgcagcctgtgacgtgtcaagctgtgaggacaccacgcagtcatgcttctccttcccgcgtctctcacatcatatggagcacaggggcgagcggcagcagcagaaggtcggcagcagccatggagatgctgagcatgctgaaggtggggtacaccatcctgcgcagcgagacgcccgcgacagacctcgtcaacaccttcatggactgggcggcgcgcaggtcccttatgctcctggccatcttcctcccgccgtactacatctacaagctcaccacgtctgcgttcgctgctgccgtgccagaggacgtcgcagggaaggttgtgctcatcaccggcgccgcctccggcatcggccaggtatgccaaccagtaactcctttgtgtacgcgtatttttgctgaaacaaactaaaccatggattcccatagatcttttcatgtcattttccttaataacaataacaacatcaccgacgacttcgattgcaaaaagggggattttgacttgcactaattgtgatgcgtaactcatggctaaacaaacgccaacatgctattgtgctttgccatgagctcgtagtcgtatctgtatgactgtatcccagcaaatagcttaccagtacgcaaagaaggtagcgagactggcgctagtggcgaggatggtgggaagcctgcatgatgtcgcggcgagagccagggatggcggctcgccagacgttctggttgttgccggggacgttgcgaaaccagaggattgccggaggtttgtgcaggccacagttgaacatttcggccgattggatcatcttgtgaacaacgctggtgtagcaaatgtctgctggtttgaggacgtaccggatgttgctgctttgaagcgagtcctggccgtgaacttctggggcgcagttcatgcgacccactgcgctcttccccatctgaagaagagcggcggtgggaaggtcttcgtcaactcctcggctgcggcggcgctggcaatgccaggaatgagcctctacaatgccagcgaggctgctgttctcaacttcttcgagaccctgcgggtcgagctccgcgacgaggtcggcatcaccatcgcgacttccgggtggatcgtgtcggagatgaccggagggaagcagctgtccaaggaagggacggtggaggtcgccgtgcggtgcgccgaggccaccgtggacgccatctgccgcggccggcgccacctcaccgtcccgctgtggtaccgggcgctgttcctgtggcgggcgctcgcgcccgaggtggtggagttcagccagagactgttgtgccgacggaccgcgggcggccgcggtcatcaggcgaagggcaagaggttgcaggaggtcaccggcgccgtccagccggcgccgctgcacagctcggacatcaaacgggagtagtcgtaggcttcggtaaggcagctggcagtgacatggtgctagctgctgcttgtctgttcggtcaaatgtggacgagttgtaaatcagctgtcaccttcgttcgttgtgtgactttaaacttcgtgcatacagtatgttgttgtcccgatttttcttcgtgtgggcggagttattgcattgcatagatagattgctctaaaatccgtagtacgctaggccaatcactaggctaggtgcaacaaaacaaatatacgtgtgagctgctaaaagtcacttgtttttttagttttgctacaactctttttttttaaaaaaaagagacgacgagtatactaaaaatagagattcgttgcagtttatatattttggtttcaagaataaagaaacggttggaaaatca

SEQ ID NO: 25350 - DNA, 4602 bp, Zea Mays
tttactcacactagtctgctcctcaggttttgcagatttaacacttcttatcatggatggcaagtgcaaagtcaataaggaaatagatggcccccttggaccacctcctcggtaagggggacttaaattctcaccaaaagtacctcagaagaaacttgtcaaggttgtctttgatagggaaccagttgaggagagcaaggaagaagatgtggataaggagtaattgatgaaacttaagatgtcacagcttgcctcattttgcagaacaagtattcctctacaagaattaagtctgaggaaaaagcaaaaagcggtacaaaggttgcatttggacaaggaaactcttcttatgcaagatattttcccatgcccaaaaaggattcttcagcaggtggaacttcgaagttaccaaaagaatatgcagaaccatgggattatacccatgattatcatgttactctcccactactctggaaatcctggtatattttttttagtctttagtcgaaattgcaagacattttcttcaactaaccccaccattcctacatcactgacacagaagttctggatgaggaagagtttggagaatcctctgccagcaggactgaagatgacaaattgccctatgcagtactaaggaagtcacattaactaactgtgcaggtttcatttggctcgaactgcatgtttccccaggaggttgcagcaaccaacaccagagaaaaacattgctgtacggtggggggagagcagcaagcgtgcctgtcgtcgccccggatattgactccatgttgggttctgttgacaagatgaaagaatagtccattttgtattatgccattacaagagagttttgctcccttatagagatgtgcagctacatgctggatacccagtcaaacaagggacaccaacgaaaggatgtctccttggacaactacagcactcagagatggaataggcattctgatcgtagtagtcatcttggatgcgacgttgcaaaggatgggatagaagaatcgcacatctgacgggagaaaacgcgagcaagcccttgcttgaccagtctcaagaaagctcgtctacggctctgctcctcgccggcgatgacgcccgcggagacctccccgccggcgccacctccacgtgcttctcaccctgtctcctccccgctcctcctacaagaccccacaacccaggccacgtgcccttggagggagcagctcaccgtccgtggcgtcgccgtggctgcggcgctgggcgcgctgctctgcgtggtaatccaccgcctcaacctcaccgtcggggttataccggcgcttaacgtcgcgtcgggcctcctcgccttcttcctcgccgcggcgtggcgtgctgccgccgggtggctagggtttggccgcgggccgcccttcacgaggcaggagaacaccgtcatccagacgtgcgccatagcatgcgccggcctcgcgtttagcgggtgctccgcctcctacatctttgctatggacaggaagacttatgagctcgtgggaccagactatcccggtaatcgagccgaagatgttaaggatccttcacttggctggatgatcagtttcttgttcctcattgctctcgttgggccatttagcattgtcttgcttcgaaaggtaatggtgattgattacaagcttgcattccctggtggaacagctacagctttgatgatcaatagcttgcatgggaaaacggatggtgatcttgcagggaaaaagctgcactgccttgtaaaatacatgggcattagttttgtttggagcttctttaaatggttctttagtggtgttggtgactcttgtggttttgacaatttcccaacatttgggcttgaagcttttaaaagcacgttttatttcgacttcagtcctagttatgtcgggtttggttttatttcccctcatattgtaaactgctcagttttccttggatctgtcatatcttggggctttctttggccatttattagtgcacaagctggtcattggtacccagataaccttggtaacagtgatttcagaggcctatatggttataaggtcttcatagccatttcgattatacttggagatggcctatacaacttggttaagatatttattgtcattgctagagaattatgcagcatgcaatcgaaacaacatgagctgcctgttcaagctctggaagatgacgggagttgtgaacaactagcagatgagaaactacaaacagagatattcctcaaagatagtatatctccttggtttgctgcttctggttacattgtcctggcagcaatatccaccgccagtgtgcccgccatatttccccagctcaagtggtaccttgtcctcctgtgctacttcttcgctcccgtggttgcgttctgcaactcctacggaatgggcctcaccaacctgaaccttgccccgacctacggcaagatcgccctcttcgcgttggcctcgctcgtcggcagtgatggcggtggagtcatcgccggccttgcagcctgtggcatcgtaatgtccgttgcctgttccacagccgatctaatgcaggacttgaagagcgggtacctgaccctctcgtcgccgcggtcgatgttcactgcccagctgatcggcatcgcgctcgggtgcgtcatagctccgctcacgctgtggctcttctggacagccttcgacatcggcgaccctgacggggagtacaaggccccctttgccatcatgttccgggagatggccatcctcgggatggagggcttctccgcgctgccactgcactgccttgacatctgctatgccgccttcttcctcgccttggccaccagtctcctcaaggacgtggcgcccgcaaacgtgtccaggttcatccccataccgatcgctatggctgcgccgttctacgttggcgcctactttggcgtggacatgttcataggcacggcgatcttgtacgcctggcagaagctgaaccgggagcaggctgatggttacgcggtggctgtggcgtccgggctgatctgtggagatgggatctggagcatcccttctgctcttctgtccatcctgggagctgttccacccatctgcatgtcgttcgaggcttcctctgctcccaggcaatgacgaatggaccagcagaggccacctgccctgcttagaagctcacaggggcgagcggcagcagcagaaggtcggcagcagccatggagatgctgagcatgctgaaggtggggtacaccatcctgcgcagcgagacgcccgcgacagacctcgtcaacaccttcatggactgggcggcgcgcagaggacgtcgcagggaaggttgtgctcatcaccggcgccgcctccggcatcggccagcaaatagcttaccagtacgcaaagaaggtagcgagactggcgctagtggcgaggatggtgggaagcctgcatgatgtcgcggcgagagccagggatggcggctcgccagacgttctggttgttgccggggacgttgcgaaaccagaggattgccggaggtttgtgcaggccacagttgaacatttcggccgattggatcatcttgtgaacaacgctggtgtagcaaatgtctgctggtttgaggacgtaccggatgttgctgctttgaagcgagtcctggccgtgaacttctggggcgcagttcatgcgacccactgcgctcttccccatctgaagaagagcggcggtgggaaggtcttcgtcaactcctcggctgcggcggcgctggcaatgccaggaatgagcctctacaatgccagcgaggctgctgttctcaacttcttcgagaccctgcgggtcgagctccgcgacgaggtcggcatcaccatcgcgacttccgggtggatcgtgtcggagatgaccggagggaagcagctgtccaaggaagggacggtggaggtcgccgtgcggtgcgccgaggccaccgtggacgccatctgccgcggccggcgccacctcaccgtcccgctgtggtaccgggcgctgttcctgtggcgggcgctcgcgcccgaggtggtggagttcagccagagactgttgtgccgacggaccgcgggcggccgcggtcatcaggcgaagggcaagaggttgcaggaggtcaccggcgccgtccagccggcgccgctgcacagctcggacatcaaacgggagtagtcgtaggcttcggtaaggcagctggcagtgacatggtgctagctgctgcttgtctgttcggtcaaatgtggacgagttgtaaatcagctgtcaccttcgttcgttgtgtgactttaaacttcgtgcatacagtatgttgttgtcccgatttttcttcgtgtgggcggagttattgcattgcatagatagattgctctaaaatccgtagtacgctaggccaatcactaggctaggtgcaacaaaacaaatatacgtgtgagctgctaaaagtcacttgtttttttagttttgctacaactctttttttttaaaaaaaagagacgacgagtatactaaaaatagagattcgttgcagtttatatattttggtttcaagaataaagaaacggttggaaaatca

SEQ ID NO: 25351 - DNA, 4587 bp, Zea Mays
tttactcacactagtctgctcctcaggttttgcagatttaacacttcttatcatggatggcaagtgcaaagtcaataaggaaatagatggcccccttggaccacctcctcggtaagggggacttaaattctcaccaaaagtacctcagaagaaacttgtcaaggttgtctttgatagggaaccagttgaggagagcaaggaagaagatgtggataaggagtaattgatgaaacttaagatgtcacagcttgcctcattttgcagaacaagtattcctctacaagaattaagtctgaggaaaaagcaaaaagcggtacaaaggttgcatttggacaaggaaactcttcttatgcaagatattttcccatgcccaaaaaggattcttcagcaggtggaacttcgaagttaccaaaagaatatgcagaaccatgggattatacccatgattatcatgttactctcccactactctggaaatcctggtatattttttttagtctttagtcgaaattgcaagacattttcttcaactaaccccaccattcctacatcactgacacagaagttctggatgaggaagagtttggagaatcctctgccagcaggactgaagatgacaaattgccctatgcagtactaaggaagtcacattaactaactgtgcaggtttcatttggctcgaactgcatgtttccccaggaggttgcagcaaccaacaccagagaaaaacattgctgtacggtggggggagagcagcaagcgtgcctgtcgtcgccccggatattgactccatgttgggttctgttgacaagatgaaagaatagtccattttgtattatgccattacaagagagttttgctcccttatagagatgtgcagctacatgctggatacccagtcaaacaagggacaccaacgaaaggatgtctccttggacaactacagcactcagagatggaataggcattctgatcgtagtagtcatcttggatgcgacgttgcaaaggatgggatagaagaatcgcacatctgacgggagaaaacgcgagcaagcccttgcttgaccagtctcaagaaagctcgtctacggctctgctcctcgccggcgatgacgcccgcggagacctccccgccggcgccacctccacgtgcttctcaccctgtctcctccccgctcctcctacaagaccccacaacccaggccacgtgcccttggagggagcagctcaccgtccgtggcgtcgccgtggctgcggcgctgggcgcgctgctctgcgtggtaatccaccgcctcaacctcaccgtcggggttataccggcgcttaacgtcgcgtcgggcctcctcgccttcttcctcgccgcggcgtggcgtgctgccgccgggtggctagggtttggccgcgggccgcccttcacgaggcaggagaacaccgtcatccagacgtgcgccatagcatgcgccggcctcgcgtttagcgggtgctccgcctcctacatctttgctatggacaggaagacttatgagctcgtgggaccagactatcccggtaatcgagccgaagatgttaaggatccttcacttggctggatgatcagtttcttgttcctcattgctctcgttgggccatttagcattgtcttgcttcgaaaggtaatggtgattgattacaagcttgcattccctggtggaacagctacagctttgatgatcaatagcttgcatgggaaaacggatggtgatcttgcagggtaaggcaacaggaaaaagctgcactgccttgtaaaatacatgggcattagttttgtttggagcttctttaaatggttctttagtggtgttggtgactcttgtggttttgacaatttcccaacatttgggcttgaagcttttaaaagcacgttttatttcgacttcagtcctagttatgtcgggtttggttttatttcccctcatattgtaaactgctcagttttccttggatctgtcatatcttggggctttctttggccatttattagtgcacaagctggtcattggtacccagataaccttggtaacagtgatttcagaggcctatatggttataaggtcttcatagccatttcgattatacttggagatggcctatacaacttggttaagatatttattgtcattgctagagaattatgcagcatgcaatcgaaacaacatgagctgcctgttcaagctctggaagatgacgggagttgtgaacaactagcagatgagaaactacaaacagagatattcctcaaagatagtatatctccttggtttgctgcttctggttacattgtcctggcagcaatatccaccgccagtgtgcccgccatatttccccagctcaagtggtaccttgtcctcctgtgctacttcttcgctcccgtggttgcgttctgcaactcctacggaatgggcctcaccaacctgaaccttgccccgacctacggcaagatcgccctcttcgcgttggcctcgctcgtcggcagtgatggcggtggagtcatcgccggccttgcagcctgtggcatcgtaatgtccgttgcctgttccacagccgatctaatgcaggacttgaagagcgggtacctgaccctctcgtcgccgcggtcgatgttcactgcccagctgatcggcatcgcgctcgggtgcgtcatagctccgctcacgctgtggctcttctggacagccttcgacatcggcgaccctgacggggagtacaaggccccctttgccatcatgttccgggagatggccatcctcgggatggagggcttctccgcgctgccactgcactgccttgacatctgctatgccgccttcttcctcgccttggccaccagtctcctcaaggacgtggcgcccgcaaacgtgtccaggttcatccccataccgatcgctatggctgcgccgttctacgttggcgcctactttggcgtggacatgttcataggcacggcgatcttgtacgcctggcagaagctgaaccgggagcaggctgatggttacgcggtggctgtggcgtccgggctgatctgtggagatgggatctggagcatcccttctgctcttctgtccatcctgggagctgttccacccatctgcatgtcgttcgaggcttcctctgctcccaggcaatgacgaatggaccagcagaggccacctgccctgcttagaagctcacaggggcgagcggcagcagcagaaggtcggcagcagccatggagatgctgagcatgctgaaggtggggtacaccatcctgcgcagcgagacgcccgcgacagacctcgtcaacaccttcatggactgggcggcgcgcagaggacgtcgcagggaaggttgtgctcatcaccggcgccgcctccggcatcggccaggtagcgagactggcgctagtggcgaggatggtgggaagcctgcatgatgtcgcggcgagagccagggatggcggctcgccagacgttctggttgttgccggggacgttgcgaaaccagaggattgccggaggtttgtgcaggccacagttgaacatttcggccgattggatcatcttgtgaacaacgctggtgtagcaaatgtctgctggtttgaggacgtaccggatgttgctgctttgaagcgagtcctggccgtgaacttctggggcgcagttcatgcgacccactgcgctcttccccatctgaagaagagcggcggtgggaaggtcttcgtcaactcctcggctgcggcggcgctggcaatgccaggaatgagcctctacaatgccagcgaggctgctgttctcaacttcttcgagaccctgcgggtcgagctccgcgacgaggtcggcatcaccatcgcgacttccgggtggatcgtgtcggagatgaccggagggaagcagctgtccaaggaagggacggtggaggtcgccgtgcggtgcgccgaggccaccgtggacgccatctgccgcggccggcgccacctcaccgtcccgctgtggtaccgggcgctgttcctgtggcgggcgctcgcgcccgaggtggtggagttcagccagagactgttgtgccgacggaccgcgggcggccgcggtcatcaggcgaagggcaagaggttgcaggaggtcaccggcgccgtccagccggcgccgctgcacagctcggacatcaaacgggagtagtcgtaggcttcggtaaggcagctggcagtgacatggtgctagctgctgcttgtctgttcggtcaaatgtggacgagttgtaaatcagctgtcaccttcgttcgttgtgtgactttaaacttcgtgcatacagtatgttgttgtcccgatttttcttcgtgtgggcggagttattgcattgcatagatagattgctctaaaatccgtagtacgctaggccaatcactaggctaggtgcaacaaaacaaatatacgtgtgagctgctaaaagtcacttgtttttttagttttgctacaactctttttttttaaaaaaaagagacgacgagtatactaaaaatagagattcgttgcagtttatatattttggtttcaagaataaagaaacggttggaaaatca

SEQ ID NO: 25352 - DNA, 4737 bp, Zea Mays
tttactcacactagtctgctcctcaggttttgcagatttaacacttcttatcatggatggcaagtgcaaagtcaataaggaaatagatggcccccttggaccacctcctcggtaagggggacttaaattctcaccaaaagtacctcagaagaaacttgtcaaggttgtctttgatagggaaccagttgaggagagcaaggaagaagatgtggataaggagtaattgatgaaacttaagatgtcacagcttgcctcattttgcagaacaagtattcctctacaagaattaagtctgaggaaaaagcaaaaagcggtacaaaggttgcatttggacaaggaaactcttcttatgcaagatattttcccatgcccaaaaaggattcttcagcaggtggaacttcgaagttaccaaaagaatatgcagaaccatgggattatacccatgattatcatgttactctcccactactctggaaatcctggtatattttttttagtctttagtcgaaattgcaagacattttcttcaactaaccccaccattcctacatcactgacacagaagttctggatgaggaagagtttggagaatcctctgccagcaggactgaagatgacaaattgccctatgcagtactaaggaagtcacattaactaactgtgcaggtttcatttggctcgaactgcatgtttccccaggaggttgcagcaaccaacaccagagaaaaacattgctgtacggtggggggagagcagcaagcgtgcctgtcgtcgccccggatattgactccatgttgggttctgttgacaagatgaaagaatagtccattttgtattatgccattacaagagagttttgctcccttatagagatgtgcagctacatgctggatacccagtcaaacaagggacaccaacgaaaggatgtctccttggacaactacagcactcagagatggaataggcattctgatcgtagtagtcatcttggatgcgacgttgcaaaggatgggatagaagaatcgcacatctgacgggagaaaacgcgagcaagcccttgcttgaccagtctcaagaaagctcgtctacggctctgctcctcgccggcgatgacgcccgcggagacctccccgccggcgccacctccacgtgcttctcaccctgtctcctccccgctcctcctacaagaccccacaacccaggccacgtgcccttggagggagcagctcaccgtccgtggcgtcgccgtggctgcggcgctgggcgcgctgctctgcgtggtaatccaccgcctcaacctcaccgtcggggttataccggcgcttaacgtcgcgtcgggcctcctcgccttcttcctcgccgcggcgtggcgtgctgccgccgggtggctagggtttggccgcgggccgcccttcacgaggcaggagaacaccgtcatccagacgtgcgccatagcatgcgccggcctcgcgtttagcgggtgctccgcctcctacatctttgctatggacaggaagacttatgagctcgtgggaccagactatcccggtaatcgagccgaagatgttaaggatccttcacttggctggatgatcagtttcttgttcctcattgctctcgttgggccatttagcattgtcttgcttcgaaaggtaatggtgattgattacaagcttgcattccctggtggaacagctacagctttgatgatcaatagcttgcatgggaaaacggatggtgatcttgcagggtaaggcaacaggaaaaagctgcactgccttgtaaaatacatgggcattagttttgtttggagcttctttaaatggttctttagtggtgttggtgactcttgtggttttgacaatttcccaacatttgggcttgaagcttttaaaagcacgttttatttcgacttcagtcctagttatgtcgggtttggttttatttcccctcatattgtaaactgctcagttttccttggatctgtcatatcttggggctttctttggccatttattagtgcacaagctggtcattggtacccagataaccttggtaacagtgatttcagaggcctatatggttataaggtcttcatagccatttcgattatacttggagatggcctatacaacttggttaagatatttattgtcattgctagagaattatgcagcatgcaatcgaaacaacatgagctgcctgttcaagctctggaagatgacgggagttgtgaacaactagcagatgagaaactacaaacagagatattcctcaaagatagtatatctccttggtttgctgcttctggttacattgtcctggcagcaatatccaccgccagtgtgcccgccatatttccccagctcaagtggtaccttgtcctcctgtgctacttcttcgctcccgtggttgcgttctgcaactcctacggaatgggcctcaccaacctgaaccttgccccgacctacggcaagatcgccctcttcgcgttggcctcgctcgtcggcagtgatggcggtggagtcatcgccggccttgcagcctgtggcatcgtaatgtccgttgcctgttccacagccgatctaatgcaggacttgaagagcgggtacctgaccctctcgtcgccgcggtcgatgttcactgcccagctgatcggcatcgcgctcgggtgcgtcatagctccgctcacgctgtggctcttctggacagccttcgacatcggcgaccctgacggggagtacaaggccccctttgccatcatgttccgggagatggccatcctcgggatggagggcttctccgcgctgccactgcactgccttgacatctgctatgccgccttcttcctcgccttggccaccagtctcctcaaggacgtggcgcccgcaaacgtgtccaggttcatccccataccgatcgctatggctgcgccgttctacgttggcgcctactttggcgtggacatgttcataggcacggcgatcttgtacgcctggcagaagctgaaccgggagcaggctgatggttacgcggtggctgtggcgtccgggctgatctgtggagatgggatctggagcatcccttctgctcttctgtccatcctgggagctgttccacccatctgcatgtcgttcgaggcttcctctgctcccaggcaatgacgaatggaccagcagaggccacctgccctgcttagaagctcacaggtagagctctgcatccccaggacaacactccacgtgccctgcagcctgtgacgtgtcaagctgtgaggacaccacgcagtcatgcttctccttcccgcgtctctcacatcatatggagcacaggggcgagcggcagcagcagaaggtcggcagcagccatggagatgctgagcatgctgaaggtggggtacaccatcctgcgcagcgagacgcccgcgacagacctcgtcaacaccttcatggactgggcggcgcgcagaggacgtcgcagggaaggttgtgctcatcaccggcgccgcctccggcatcggccagcaaatagcttaccagtacgcaaagaaggtagcgagactggcgctagtggcgaggatggtgggaagcctgcatgatgtcgcggcgagagccagggatggcggctcgccagacgttctggttgttgccggggacgttgcgaaaccagaggattgccggaggtttgtgcaggccacagttgaacatttcggccgattggatcatcttgtgaacaacgctggtgtagcaaatgtctgctggtttgaggacgtaccggatgttgctgctttgaagcgagtcctggccgtgaacttctggggcgcagttcatgcgacccactgcgctcttccccatctgaagaagagcggcggtgggaaggtcttcgtcaactcctcggctgcggcggcgctggcaatgccaggaatgagcctctacaatgccagcgaggctgctgttctcaacttcttcgagaccctgcgggtcgagctccgcgacgaggtcggcatcaccatcgcgacttccgggtggatcgtgtcggagatgaccggagggaagcagctgtccaaggaagggacggtggaggtcgccgtgcggtgcgccgaggccaccgtggacgccatctgccgcggccggcgccacctcaccgtcccgctgtggtaccgggcgctgttcctgtggcgggcgctcgcgcccgaggtggtggagttcagccagagactgttgtgccgacggaccgcgggcggccgcggtcatcaggcgaagggcaagaggttgcaggaggtcaccggcgccgtccagccggcgccgctgcacagctcggacatcaaacgggagtagtcgtaggcttcggtaaggcagctggcagtgacatggtgctagctgctgcttgtctgttcggtcaaatgtggacgagttgtaaatcagctgtcaccttcgttcgttgtgtgactttaaacttcgtgcatacagtatgttgttgtcccgatttttcttcgtgtgggcggagttattgcattgcatagatagattgctctaaaatccgtagtacgctaggccaatcactaggctaggtgcaacaaaacaaatatacgtgtgagctgctaaaagtcacttgtttttttagttttgctacaactctttttttttaaaaaaaagagacgacgagtatactaaaaatagagattcgttgcagtttatatattttggtttcaagaataaagaaacggttggaaaatca

SEQ ID NO: 25353 - DNA, 5598 bp, Zea Mays
tttactcacactagtctgctcctcaggttttgcagatttaacacttcttatcatggatggcaagtgcaaagtcaataaggaaatagatggcccccttggaccacctcctcggtaagggggacttaaattctcaccaaaagtacctcagaagaaacttgtcaaggttgtctttgatagggaaccagttgaggagagcaaggaagaagatgtggataaggagtaattgatgaaacttaagatgtcacagcttgcctcattttgcagaacaagtattcctctacaagaattaagtctgaggaaaaagcaaaaagcggtacaaaggttgcatttggacaaggaaactcttcttatgcaagatattttcccatgcccaaaaaggattcttcagcaggtggaacttcgaagttaccaaaagaatatgcagaaccatgggattatacccatgattatcatgttactctcccactactctggaaatcctggtatattttttttagtctttagtcgaaattgcaagacattttcttcaactaaccccaccattcctacatcactgacacagaagttctggatgaggaagagtttggagaatcctctgccagcaggactgaagatgacaaattgccctatgcagtactaaggaagtcacattaactaactgtgcaggtttcatttggctcgaactgcatgtttccccaggaggttgcagcaaccaacaccagagaaaaacattgctgtacggtggggggagagcagcaagcgtgcctgtcgtcgccccggatattgactccatgttgggttctgttgacaagatgaaagaatagtccattttgtattatgccattacaagagagttttgctcccttatagagatgtgcagctacatgctggatacccagtcaaacaagggacaccaacgaaaggatgtctccttggacaactacagcactcagagatggaataggcattctgatcgtagtagtcatcttggatgcgacgttgcaaaggatgggatagaagaatcgcacatctgacgggagaaaacgcgagcaagcccttgcttgaccagtctcaagaaagctcgtctacggctctgctcctcgccggcgatgacgcccgcggagacctccccgccggcgccacctccacgtgcttctcaccctgtctcctccccgctcctcctacaagaccccacaacccaggccacgtgcccttggagggagcagctcaccgtccgtggcgtcgccgtggctgcggcgctgggcgcgctgctctgcgtggtaatccaccgcctcaacctcaccgtcggggttataccggcgcttaacgtcgcgtcgggcctcctcgccttcttcctcgccgcggcgtggcgtgctgccgccgggtggctagggtttggccgcgggccgcccttcacgaggcaggagaacaccgtcatccagacgtgcgccatagcatgcgccggcctcgcgtttagcgggtgctccgcctcctacatctttgctatggacaggaagacttatgagctcgtgggaccagactatcccggtaatcgagccgaagatgttaaggatccttcacttggctggatgatcagtttcttgttcctcattgctctcgttgggccatttagcattgtcttgcttcgaaaggtaatggtgattgattacaagcttgcattccctggtggaacagctacagctttgatgatcaatagcttgcatgggaaaacggatggtgatcttgcagggaaaaagctgcactgccttgtaaaatacatgggcattagttttgtttggagcttctttaaatggttctttagtggtgttggtgactcttgtggttttgacaatttcccaacatttgggcttgaagcttttaaaagcacgttttatttcgacttcagtcctagttatgtcgggtttggttttatttcccctcatattgtaaactgctcagttttccttggatctgtcatatcttggggctttctttggccatttattagtgcacaagctggtcattggtacccagataaccttggtaacagtgatttcagaggcctatatggttataaggtcttcatagccatttcgattatacttggagatggcctatacaacttggttaagatatttattgtcattgctagagaattatgcagcatgcaatcgaaacaacatgagctgcctgttcaagctctggaaggtaaacatgttacttcttagttgtagtgcaatgcgttggccacatgctgtgagattaattttgtggcttgtgagttgcgaacattagttgcacaatatatagctcatctaatatgccgtcttacgaaaagctgacatgcccatagtatttgtccaatgcatgtttcgtcatctcatctgcagatgacgggagttgtgaacaactagcagatgagaaactacaaacagagatattcctcaaagatagtatatctccttggtttgctgcttctggttacattgtcctggcagcaatatccaccgccagtgtgcccgccatatttccccagctcaagtggtaccttgtcctcctgtgctacttcttcgctcccgtggttgcgttctgcaactcctacggaatgggcctcaccaacctgaaccttgccccgacctacggcaagatcgccctcttcgcgttggcctcgctcgtcggcagtgatggcggtggagtcatcgccggccttgcagcctgtggcatcgtaatgtccgttgcctgttccacagccgatctaatgcaggacttgaagagcgggtacctgaccctctcgtcgccgcggtcgatgttcactgcccagctgatcggcatcgcgctcgggtgcgtcatagctccgctcacgctgtggctcttctggacagccttcgacatcggcgaccctgacggggagtacaaggccccctttgccatcatgttccgggagatggccatcctcgggatggagggcttctccgcgctgccactgcactgccttgacatctgctatgccgccttcttcctcgccttggccaccagtctcctcaaggacgtggcgcccgcaaacgtgtccaggttcatccccataccgatcgctatggctgcgccgttctacgttggcgcctactttggcgtggacatgttcataggcacggcgatcttgtacgcctggcagaagctgaaccgggagcaggctgatggttacgcggtggctgtggcgtccgggctgatctgtggagatgggatctggagcatcccttctgctcttctgtccatcctgggagctgttccacccatctgcatgtcgttcgaggcttcctctgctcccaggtgagagatgaacaatacgcagaagtttttattactggccatatgtttgcgccattgatgaaaccatatggattgtaacacaaaggaggtgttagttgttcgtaatttgtacctccgatgattttatatgaaacaaaaacacgtctttgcatgtaatgtaaatacatacattctctggtttgaaacttcgaatacacatcgtagatttttcattttaaacaactatacaacataagcatcaactgtaatgttgtgttctatacacgtgctctgttgtgatacatcgattgcctgtaatgatcactggctctaagacctgtatggagcattgcttcaacttgttttttttttacaaggcaatgacgaatggaccagcagaggccacctgccctgcttagaagctcacaggtagagctctgcatccccaggacaacactccacgtgccctgcagcctgtgacgtgtcaagctgtgaggacaccacgcagtcatgcttctccttcccgcgtctctcacatcatatggagcacaggggcgagcggcagcagcagaaggtcggcagcagccatggagatgctgagcatgctgaaggtggggtacaccatcctgcgcagcgagacgcccgcgacagacctcgtcaacaccttcatggactgggcggcgcgcaggtcccttatgctcctggccatcttcctcccgccgtactacatctacaagctcaccacgtctgcgttcgctgctgccgtgccagaggacgtcgcagggaaggttgtgctcatcaccggcgccgcctccggcatcggccaggtatgccaaccagtaactcctttgtgtacgcgtatttttgctgaaacaaactaaaccatggattcccatagatcttttcatgtcattttccttaataacaataacaacatcaccgacgacttcgattgcaaaaagggggattttgacttgcactaattgtgatgcgtaactcatggctaaacaaacgccaacatgctattgtgctttgccatgagctcgtagtcgtatctgtatgactgtatcccagcaaatagcttaccagtacgcaaagaaggtagcgagactggcgctagtggcgaggatggtgggaagcctgcatgatgtcgcggcgagagccagggatggcggctcgccagacgttctggttgttgccggggacgttgcgaaaccagaggattgccggaggtttgtgcaggccacagttgaacatttcggccgattggatcatcttgtgaacaacgctggtgtagcaaatgtctgctggtttgaggacgtaccggatgttgctgctttgaagcgagtcctggtagggccgtgaacttctggggcgcagttcatgcgacccactgcgctcttccccatctgaagaagagcggcggtgggaaggtcttcgtcaactcctcggctgcggcggcgctggcaatgccaggaatgagcctctacaatgccagcgaggctgctgttctcaacttcttcgagaccctgcgggtcgagctccgcgacgaggtcggcatcaccatcgcgacttccgggtggatcgtgtcggagatgaccggagggaagcagctgtccaaggaagggacggtggaggtcgccgtgcggtgcgccgaggccaccgtggacgccatctgccgcggccggcgccacctcaccgtcccgctgtggtaccgggcgctgttcctgtggcgggcgctcgcgcccgaggtggtggagttcagccagagactgttgtgccgacggaccgcgggcggccgcggtcatcaggcgaagggcaagaggttgcaggaggtcaccggcgccgtccagccggcgccgctgcacagctcggacatcaaacgggagtagtcgtaggcttcggtaaggcagctggcagtgacatggtgctagctgctgcttgtctgttcggtcaaatgtggacgagttgtaaatcagctgtcaccttcgttcgttgtgtgactttaaacttcgtgcatacagtatgttgttgtcccgatttttcttcgtgtgggcggagttattgcattgcatagatagattgctctaaaatccgtagtacgctaggccaatcactaggctaggtgcaacaaaacaaatatacgtgtgagctgctaaaagtcacttgtttttttagttttgctacaactctttttttttaaaaaaaagagacgacgagtatactaaaaatagagattcgttgcagtttatatattttggtttcaagaataaagaaacggttggaaaatca

SEQ ID NO: 25354 - DNA, 5049 bp, Zea Mays
tttactcacactagtctgctcctcaggttttgcagatttaacacttcttatcatggatggcaagtgcaaagtcaataaggaaatagatggcccccttggaccacctcctcggtaagggggacttaaattctcaccaaaagtacctcagaagaaacttgtcaaggttgtctttgatagggaaccagttgaggagagcaaggaagaagatgtggataaggagtaattgatgaaacttaagatgtcacagcttgcctcattttgcagaacaagtattcctctacaagaattaagtctgaggaaaaagcaaaaagcggtacaaaggttgcatttggacaaggaaactcttcttatgcaagatattttcccatgcccaaaaaggattcttcagcaggtggaacttcgaagttaccaaaagaatatgcagaaccatgggattatacccatgattatcatgttactctcccactactctggaaatcctggtatattttttttagtctttagtcgaaattgcaagacattttcttcaactaaccccaccattcctacatcactgacacagaagttctggatgaggaagagtttggagaatcctctgccagcaggactgaagatgacaaattgccctatgcagtactaaggaagtcacattaactaactgtgcaggtttcatttggctcgaactgcatgtttccccaggaggttgcagcaaccaacaccagagaaaaacattgctgtacggtggggggagagcagcaagcgtgcctgtcgtcgccccggatattgactccatgttgggttctgttgacaagatgaaagaatagtccattttgtattatgccattacaagagagttttgctcccttatagagatgtgcagctacatgctggatacccagtcaaacaagggacaccaacgaaaggatgtctccttggacaactacagcactcagagatggaataggcattctgatcgtagtagtcatcttggatgcgacgttgcaaaggatgggatagaagaatcgcacatctgacgggagaaaacgcgagcaagcccttgcttgaccagtctcaagaaagctcgtctacggctctgctcctcgccggcgatgacgcccgcggagacctccccgccggcgccacctccacgtgcttctcaccctgtctcctccccgctcctcctacaagaccccacaacccaggccacgtgcccttggagggagcagctcaccgtccgtggcgtcgccgtggctgcggcgctgggcgcgctgctctgcgtggtaatccaccgcctcaacctcaccgtcggggttataccggcgcttaacgtcgcgtcgggcctcctcgccttcttcctcgccgcggcgtggcgtgctgccgccgggtggctagggtttggccgcgggccgcccttcacgaggcaggagaacaccgtcatccagacgtgcgccatagcatgcgccggcctcgcgtttagcgggtgctccgcctcctacatctttgctatggacaggaagacttatgagctcgtgggaccagactatcccggtaatcgagccgaagatgttaaggatccttcacttggctggatgatcagtttcttgttcctcattgctctcgttgggccatttagcattgtcttgcttcgaaaggtaatggtgattgattacaagcttgcattccctggtggaacagctacagctttgatgatcaatagcttgcatgggaaaacggatggtgatcttgcagggaaaaagctgcactgccttgtaaaatacatgggcattagttttgtttggagcttctttaaatggttctttagtggtgttggtgactcttgtggttttgacaatttcccaacatttgggcttgaagcttttaaaagcacgttttatttcgacttcagtcctagttatgtcgggtttggttttatttcccctcatattgtaaactgctcagttttccttggatctgtcatatcttggggctttctttggccatttattagtgcacaagctggtcattggtacccagataaccttggtaacagtgatttcagaggcctatatggttataaggtcttcatagccatttcgattatacttggagatggcctatacaacttggttaagatatttattgtcattgctagagaattatgcagcatgcaatcgaaacaacatgagctgcctgttcaagctctggaagatgacgggagttgtgaacaactagcagatgagaaactacaaacagagatattcctcaaagatagtatatctccttggtttgctgcttctggttacattgtcctggcagcaatatccaccgccagtgtgcccgccatatttccccagctcaagtggtaccttgtcctcctgtgctacttcttcgctcccgtggttgcgttctgcaactcctacggaatgggcctcaccaacctgaaccttgccccgacctacggcaagatcgccctcttcgcgttggcctcgctcgtcggcagtgatggcggtggagtcatcgccggccttgcagcctgtggcatcgtaatgtccgttgcctgttccacagccgatctaatgcaggacttgaagagcgggtacctgaccctctcgtcgccgcggtcgatgttcactgcccagctgatcggcatcgcgctcgggtgcgtcatagctccgctcacgctgtggctcttctggacagccttcgacatcggcgaccctgacggggagtacaaggccccctttgccatcatgttccgggagatggccatcctcgggatggagggcttctccgcgctgccactgcactgccttgacatctgctatgccgccttcttcctcgccttggccaccagtctcctcaaggacgtggcgcccgcaaacgtgtccaggttcatccccataccgatcgctatggctgcgccgttctacgttggcgcctactttggcgtggacatgttcataggcacggcgatcttgtacgcctggcagaagctgaaccgggagcaggctgatggttacgcggtggctgtggcgtccgggctgatctgtggagatgggatctggagcatcccttctgctcttctgtccatcctgggagctgttccacccatctgcatgtcgttcgaggcttcctctgctcccaggcaatgacgaatggaccagcagaggccacctgccctgcttagaagctcacaggtagagctctgcatccccaggacaacactccacgtgccctgcagcctgtgacgtgtcaagctgtgaggacaccacgcagtcatgcttctccttcccgcgtctctcacatcatatggagcacaggggcgagcggcagcagcagaaggtcggcagcagccatggagatgctgagcatgctgaaggtggggtacaccatcctgcgcagcgagacgcccgcgacagacctcgtcaacaccttcatggactgggcggcgcgcaggtcccttatgctcctggccatcttcctcccgccgtactacatctacaagctcaccacgtctgcgttcgctgctgccgtgccagaggacgtcgcagggaaggttgtgctcatcaccggcgccgcctccggcatcggccaggtatgccaaccagtaactcctttgtgtacgcgtatttttgctgaaacaaactaaaccatggattcccatagatcttttcatgtcattttccttaataacaataacaacatcaccgacgacttcgattgcaaaaagggggattttgacttgcactaattgtgatgcgtaactcatggctaaacaaacgccaacatgctattgtgctttgccatgagctcgtagtcgtatctgtatgactgtatcccagcaaatagcttaccagtacgcaaagaaggtagcgagactggcgctagtggcgaggatggtgggaagcctgcatgatgtcgcggcgagagccagggatggcggctcgccagacgttctggttgttgccggggacgttgcgaaaccagaggattgccggaggtttgtgcaggccacagttgaacatttcggccgattggatcatcttgtgaacaacgctggtgtagcaaatgtctgctggtttgaggacgtaccggatgttgctgctttgaagcgagccgtgaacttctggggcgcagttcatgcgacccactgcgctcttccccatctgaagaagagcggcggtgggaaggtcttcgtcaactcctcggctgcggcggcgctggcaatgccaggaatgagcctctacaatgccagcgaggctgctgttctcaacttcttcgagaccctgcgggtcgagctccgcgacgaggtcggcatcaccatcgcgacttccgggtggatcgtgtcggagatgaccggagggaagcagctgtccaaggaagggacggtggaggtcgccgtgcggtgcgccgaggccaccgtggacgccatctgccgcggccggcgccacctcaccgtcccgctgtggtaccgggcgctgttcctgtggcgggcgctcgcgcccgaggtggtggagttcagccagagactgttgtgccgacggaccgcgggcggccgcggtcatcaggcgaagggcaagaggttgcaggaggtcaccggcgccgtccagccggcgccgctgcacagctcggacatcaaacgggagtagtcgtaggcttcggtaaggcagctggcagtgacatggtgctagctgctgcttgtctgttcggtcaaatgtggacgagttgtaaatcagctgtcaccttcgttcgttgtgtgactttaaacttcgtgcatacagtatgttgttgtcccgatttttcttcgtgtgggcggagttattgcattgcatagatagattgctctaaaatccgtagtacgctaggccaatcactaggctaggtgcaacaaaacaaatatacgtgtgagctgctaaaagtcacttgtttttttagttttgctacaactctttttttttaaaaaaaagagacgacgagtatactaaaaatagagattcgttgcagtttatatattttggtttcaagaataaagaaacggttggaaaatca

SEQ ID NO: 25355 - DNA, 4047 bp, Zea Mays
tttactcacactagtctgctcctcaggttttgcagatttaacacttcttatcatggatggcaagtgcaaagtcaataaggaaatagatggcccccttggaccacctcctcggtaagggggacttaaattctcaccaaaagtacctcagaagaaacttgtcaaggttgtctttgatagggaaccagttgaggagagcaaggaagaagatgtggataaggagtaattgatgaaacttaagatgtcacagcttgcctcattttgcagaacaagtattcctctacaagaattaagtctgaggaaaaagcaaaaagcggtacaaaggttgcatttggacaaggaaactcttcttatgcaagatattttcccatgcccaaaaaggattcttcagcaggtggaacttcgaagttaccaaaagaatatgcagaaccatgggattatacccatgattatcatgttactctcccactactctggaaatcctggtatattttttttagtctttagtcgaaattgcaagacattttcttcaactaaccccaccattcctacatcactgacacagaagttctggatgaggaagagtttggagaatcctctgccagcaggactgaagatgacaaattgccctatgcagtactaaggaagtcacattaactaactgtgcaggtttcatttggctcgaactgcatgtttccccaggaggttgcagcaaccaacaccagagaaaaacattgctgtacggtggggggagagcagcaagcgtgcctgtcgtcgccccggatattgactccatgttgggttctgttgacaagatgaaagaatagtccattttgtattatgccattacaagagagttttgctcccttatagagatgtgcagctacatgctggatacccagtcaaacaagggacaccaacgaaaggatgtctccttggacaactacagcactcagagatggaataggcattctgatcgtagtagtcatcttggatgcgacgttgcaaaggatgggatagaagaatcgcacatctgacgggagaaaacgcgagcaagcccttgcttgaccagtctcaagaaagctcgtctacggctctgctcctcgccggcgatgacgcccgcggagacctccccgccggcgccacctccacgtgcttctcaccctgtctcctccccgctcctcctacaagaccccacaacccaggccacgtgcccttggagggagcagctcaccgtccgtggcgtcgccgtggctgcggcgctgggcgcgctgctctgcgtggtaatccaccgcctcaacctcaccgtcggggttataccggcgcttaacgtcgcgtcgggcctcctcgccttcttcctcgccgcggcgtggcgtgctgccgccgggtggctagggtttggccgcgggccgcccttcacgaggcaggagaacaccgtcatccagacgtgcgccatagcatgcgccggcctcgcgtttagcgggtgctccgcctcctacatctttgctatggacaggaagacttatgagctcgtgggaccagactatcccggtaatcgagccgaagatgttaaggatccttcacttggctggatgatcagtttcttgttcctcattgctctcgttgggccatttagcattgtcttgcttcgaaaggtaatggtgattgattacaagcttgcattccctggtggaacagctacagctttgatgatcaatagcttgcatgggaaaacggatggtgatcttgcagggtaaggcaacaggaaaaagctgcactgccttgtaaaatacatgggcattagttttgtttggagcttctttaaatggttctttagtggtgttggtgactcttgtggttttgacaatttcccaacatttgggcttgaagcttttaaaagcacgttttatttcgacttcagtcctagttatgtcgggtttggttttatttcccctcatattgtaaactgctcagttttccttggatctgtcatatcttggggctttctttggccatttattagtgcacaagctggtcattggtacccagataaccttggtaacagtgatttcagaggcctatatggttataaggtcttcatagccatttcgattatacttggagatggcctatacaacttggttaagatatttattgtcattgctagagaattatgcagcatgcaatcgaaacaacatgagctgcctgttcaagctctggaaggcaatgacgaatggaccagcagaggccacctgccctgcttagaagctcacaggtagagctctgcatccccaggacaacactccacgtgccctgcagcctgtgacgtgtcaagctgtgaggacaccacgcagtcatgcttctccttcccgcgtctctcacatcatatggagcacaggggcgagcggcagcagcagaaggtcggcagcagccatggagatgctgagcatgctgaaggtggggtacaccatcctgcgcagcgagacgcccgcgacagacctcgtcaacaccttcatggactgggcggcgcgcagaggacgtcgcagggaaggttgtgctcatcaccggcgccgcctccggcatcggccaggtatgccaaccagtaactcctttgtgtacgcgtatttttgctgaaacaaactaaaccatggattcccatagatcttttcatgtcattttccttaataacaataacaacatcaccgacgacttcgattgcaaaaagggggattttgacttgcactaattgtgatgcgtaactcatggctaaacaaacgccaacatgctattgtgctttgccatgagctcgtagtcgtatctgtatgactgtatcccagcaaatagcttaccagtacgcaaagaaggtagcgagactggcgctagtggcgaggatggtgggaagcctgcatgatgtcgcggcgagagccagggatggcggctcgccagacgttctggttgttgccggggacgttgcgaaaccagaggattgccggaggtttgtgcaggccacagttgaacatttcggccgattggatcatcttgtgaacaacgctggtgtagcaaatgtctgctggtttgaggacgtaccggatgttgctgctttgaagcgagtcctggccgtgaacttctggggcgcagttcatgcgacccactgcgctcttccccatctgaagaagagcggcggtgggaaggtcttcgtcaactcctcggctgcggcggcgctggcaatgccaggaatgagcctctacaatgccagcgaggctgctgttctcaacttcttcgagaccctgcgggtcgagctccgcgacgaggtcggcatcaccatcgcgacttccgggtggatcgtgtcggagatgaccggagggaagcagctgtccaaggaagggacggtggaggtcgccgtgcggtgcgccgaggccaccgtggacgccatctgccgcggccggcgccacctcaccgtcccgctgtggtaccgggcgctgttcctgtggcgggcgctcgcgcccgaggtggtggagttcagccagagactgttgtgccgacggaccgcgggcggccgcggtcatcaggcgaagggcaagaggttgcaggaggtcaccggcgccgtccagccggcgccgctgcacagctcggacatcaaacgggagtagtcgtaggcttcggtaaggcagctggcagtgacatggtgctagctgctgcttgtctgttcggtcaaatgtggacgagttgtaaatcagctgtcaccttcgttcgttgtgtgactttaaacttcgtgcatacagtatgttgttgtcccgatttttcttcgtgtgggcggagttattgcattgcatagatagattgctctaaaatccgtagtacgctaggccaatcactaggctaggtgcaacaaaacaaatatacgtgtgagctgctaaaagtcacttgtttttttagttttgctacaactctttttttttaaaaaaaagagacgacgagtatactaaaaatagagattcgttgcagtttatatattttggtttcaagaataaagaaacggttggaaaatca

SEQ ID NO: 25356 - DNA, 4035 bp, Zea Mays
tttactcacactagtctgctcctcaggttttgcagatttaacacttcttatcatggatggcaagtgcaaagtcaataaggaaatagatggcccccttggaccacctcctcggtaagggggacttaaattctcaccaaaagtacctcagaagaaacttgtcaaggttgtctttgatagggaaccagttgaggagagcaaggaagaagatgtggataaggagtaattgatgaaacttaagatgtcacagcttgcctcattttgcagaacaagtattcctctacaagaattaagtctgaggaaaaagcaaaaagcggtacaaaggttgcatttggacaaggaaactcttcttatgcaagatattttcccatgcccaaaaaggattcttcagcaggtggaacttcgaagttaccaaaagaatatgcagaaccatgggattatacccatgattatcatgttactctcccactactctggaaatcctggtatattttttttagtctttagtcgaaattgcaagacattttcttcaactaaccccaccattcctacatcactgacacagaagttctggatgaggaagagtttggagaatcctctgccagcaggactgaagatgacaaattgccctatgcagtactaaggaagtcacattaactaactgtgcaggtttcatttggctcgaactgcatgtttccccaggaggttgcagcaaccaacaccagagaaaaacattgctgtacggtggggggagagcagcaagcgtgcctgtcgtcgccccggatattgactccatgttgggttctgttgacaagatgaaagaatagtccattttgtattatgccattacaagagagttttgctcccttatagagatgtgcagctacatgctggatacccagtcaaacaagggacaccaacgaaaggatgtctccttggacaactacagcactcagagatggaataggcattctgatcgtagtagtcatcttggatgcgacgttgcaaaggatgggatagaagaatcgcacatctgacgggagaaaacgcgagcaagcccttgcttgaccagtctcaagaaagctcgtctacggctctgctcctcgccggcgatgacgcccgcggagacctccccgccggcgccacctccacgtgcttctcaccctgtctcctccccgctcctcctacaagaccccacaacccaggccacgtgcccttggagggagcagctcaccgtccgtggcgtcgccgtggctgcggcgctgggcgcgctgctctgcgtggtaatccaccgcctcaacctcaccgtcggggttataccggcgcttaacgtcgcgtcgggcctcctcgccttcttcctcgccgcggcgtggcgtgctgccgccgggtggctagggtttggccgcgggccgcccttcacgaggcaggagaacaccgtcatccagacgtgcgccatagcatgcgccggcctcgcgtttagcgggtgctccgcctcctacatctttgctatggacaggaagacttatgagctcgtgggaccagactatcccggtaatcgagccgaagatgttaaggatccttcacttggctggatgatcagtttcttgttcctcattgctctcgttgggccatttagcattgtcttgcttcgaaaggtaatggtgattgattacaagcttgcattccctggtggaacagctacagctttgatgatcaatagcttgcatgggaaaacggatggtgatcttgcagggaaaaagctgcactgccttgtaaaatacatgggcattagttttgtttggagcttctttaaatggttctttagtggtgttggtgactcttgtggttttgacaatttcccaacatttgggcttgaagcttttaaaagcacgttttatttcgacttcagtcctagttatgtcgggtttggttttatttcccctcatattgtaaactgctcagttttccttggatctgtcatatcttggggctttctttggccatttattagtgcacaagctggtcattggtacccagataaccttggtaacagtgatttcagaggcctatatggttataaggtcttcatagccatttcgattatacttggagatggcctatacaacttggttaagatatttattgtcattgctagagaattatgcagcatgcaatcgaaacaacatgagctgcctgttcaagctctggaaggcaatgacgaatggaccagcagaggccacctgccctgcttagaagctcacaggtagagctctgcatccccaggacaacactccacgtgccctgcagcctgtgacgtgtcaagctgtgaggacaccacgcagtcatgcttctccttcccgcgtctctcacatcatatggagcacaggggcgagcggcagcagcagaaggtcggcagcagccatggagatgctgagcatgctgaaggtggggtacaccatcctgcgcagcgagacgcccgcgacagacctcgtcaacaccttcatggactgggcggcgcgcagaggacgtcgcagggaaggttgtgctcatcaccggcgccgcctccggcatcggccaggtatgccaaccagtaactcctttgtgtacgcgtatttttgctgaaacaaactaaaccatggattcccatagatcttttcatgtcattttccttaataacaataacaacatcaccgacgacttcgattgcaaaaagggggattttgacttgcactaattgtgatgcgtaactcatggctaaacaaacgccaacatgctattgtgctttgccatgagctcgtagtcgtatctgtatgactgtatcccagcaaatagcttaccagtacgcaaagaaggtagcgagactggcgctagtggcgaggatggtgggaagcctgcatgatgtcgcggcgagagccagggatggcggctcgccagacgttctggttgttgccggggacgttgcgaaaccagaggattgccggaggtttgtgcaggccacagttgaacatttcggccgattggatcatcttgtgaacaacgctggtgtagcaaatgtctgctggtttgaggacgtaccggatgttgctgctttgaagcgagtcctggccgtgaacttctggggcgcagttcatgcgacccactgcgctcttccccatctgaagaagagcggcggtgggaaggtcttcgtcaactcctcggctgcggcggcgctggcaatgccaggaatgagcctctacaatgccagcgaggctgctgttctcaacttcttcgagaccctgcgggtcgagctccgcgacgaggtcggcatcaccatcgcgacttccgggtggatcgtgtcggagatgaccggagggaagcagctgtccaaggaagggacggtggaggtcgccgtgcggtgcgccgaggccaccgtggacgccatctgccgcggccggcgccacctcaccgtcccgctgtggtaccgggcgctgttcctgtggcgggcgctcgcgcccgaggtggtggagttcagccagagactgttgtgccgacggaccgcgggcggccgcggtcatcaggcgaagggcaagaggttgcaggaggtcaccggcgccgtccagccggcgccgctgcacagctcggacatcaaacgggagtagtcgtaggcttcggtaaggcagctggcagtgacatggtgctagctgctgcttgtctgttcggtcaaatgtggacgagttgtaaatcagctgtcaccttcgttcgttgtgtgactttaaacttcgtgcatacagtatgttgttgtcccgatttttcttcgtgtgggcggagttattgcattgcatagatagattgctctaaaatccgtagtacgctaggccaatcactaggctaggtgcaacaaaacaaatatacgtgtgagctgctaaaagtcacttgtttttttagttttgctacaactctttttttttaaaaaaaagagacgacgagtatactaaaaatagagattcgttgcagtttatatattttggtttcaagaataaagaaacggttggaaaatca

SEQ ID NO: 25357 - DNA, 5056 bp, Zea Mays
ctggagtcaaagaaatttgaaacatctcattttggttggagtctgtagataaatgcagtgctgaaattgatgtttactcacactagtctgctcctcaggttttgcagatttaacacttcttatcatggatggcaagtgcaaagtcaataaggaaatagatggcccccttggaccacctcctcggtaagggggacttaaattctcaccaaaagtacctcagaagaaacttgtcaaggttgtctttgatagggaaccagttgaggagagcaaggaagaagatgtggataaggagtaattgatgaaacttaagatgtcacagcttgcctcattttgcagaacaagtattcctctacaagaattaagtctgaggaaaaagcaaaaagcggtacaaaggttgcatttggacaaggaaactcttcttatgcaagatattttcccatgcccaaaaaggattcttcagcaggtggaacttcgaagttaccaaaagaatatgcagaaccatgggattatacccatgattatcatgttactctcccactactctggaaatcctggtatattttttttagtctttagtcgaaattgcaagacattttcttcaactaaccccaccattcctacatcactgacacagaagttctggatgaggaagagtttggagaatcctctgccagcaggactgaagatgacaaattgccctatgcagtactaaggaagtcacattaactaactgtgcaggtttcatttggctcgaactgcatgtttccccaggaggttgcagcaaccaacaccagagaaaaacattgctgtacggtggggggagagcagcaagcgtgcctgtcgtcgccccggatattgactccatgttgggttctgttgacaagatgaaagaatagtccattttgtattatgccattacaagagagttttgctcccttatagagatgtgcagctacatgctggatacccagtcaaacaagggacaccaacgaaaggatgtctccttggacaactacagcactcagagatggaataggcattctgatcgtagtagtcatcttggatgcgacgttgcaaaggatgggatagaagaatcgcacatctgacgggagaaaacgcgagcaagcccttgcttgaccagtctcaagaaagctcgtctacggctctgctcctcgccggcgatgacgcccgcggagacctccccgccggcgccacctccacgtgcttctcaccctgtctcctccccgctcctcctacaagaccccacaacccaggccacgtgcccttggagggagcagctcaccgtccgtggcgtcgccgtggctgcggcgctgggcgcgctgctctgcgtggtaatccaccgcctcaacctcaccgtcggggttataccggcgcttaacgtcgcgtcgggcctcctcgccttcttcctcgccgcggcgtggcgtgctgccgccgggtggctagggtttggccgcgggccgcccttcacgaggcaggagaacaccgtcatccagacgtgcgccatagcatgcgccggcctcgcgtttagcgggtgctccgcctcctacatctttgctatggacaggaagacttatgagctcgtgggaccagactatcccggtaatcgagccgaagatgttaaggatccttcacttggctggatgatcagtttcttgttcctcattgctctcgttgggccatttagcattgtcttgcttcgaaaggtaatggtgattgattacaagcttgcattccctggtggaacagctacagctttgatgatcaatagcttgcatgggaaaacggatggtgatcttgcagggtaaggcaacaggaaaaagctgcactgccttgtaaaatacatgggcattagttttgtttggagcttctttaaatggttctttagtggtgttggtgactcttgtggttttgacaatttcccaacatttgggcttgaagcttttaaaagcacgttttatttcgacttcagtcctagttatgtcgggtttggttttatttcccctcatattgtaaactgctcagttttccttggatctgtcatatcttggggctttctttggccatttattagtgcacaagctggtcattggtacccagataaccttggtaacagtgatttcagaggcctatatggttataaggtcttcatagccatttcgattatacttggagatggcctatacaacttggttaagatatttattgtcattgctagagaattatgcagcatgcaatcgaaacaacatgagctgcctgttcaagctctggaagatgacgggagttgtgaacaactagcagatgagaaactacaaacagagatattcctcaaagatagtatatctccttggtttgctgcttctggttacattgtcctggcagcaatatccaccgccagtgtgcccgccatatttccccagctcaagtggtaccttgtcctcctgtgctacttcttcgctcccgtggttgcgttctgcaactcctacggaatgggcctcaccaacctgaaccttgccccgacctacggcaagatcgccctcttcgcgttggcctcgctcgtcggcagtgatggcggtggagtcatcgccggccttgcagcctgtggcatcgtaatgtccgttgcctgttccacagccgatctaatgcaggacttgaagagcgggtacctgaccctctcgtcgccgcggtcgatgttcactgcccagctgatcggcatcgcgctcgggtgcgtcatagctccgctcacgctgtggctcttctggacagccttcgacatcggcgaccctgacggggagtacaaggccccctttgccatcatgttccgggagatggccatcctcgggatggagggcttctccgcgctgccactgcactgccttgacatctgctatgccgccttcttcctcgccttggccaccagtctcctcaaggacgtggcgcccgcaaacgtgtccaggttcatccccataccgatcgctatggctgcgccgttctacgttggcgcctactttggcgtggacatgttcataggcacggcgatcttgtacgcctggcagaagctgaaccgggagcaggctgatggttacgcggtggctgtggcgtccgggctgatctgtggagatgggatctggagcatcccttctgctcttctgtccatcctgggagctgttccacccatctgcatgtcgttcgaggcttcctctgctcccaggcaatgacgaatggaccagcagaggccacctgccctgcttagaagctcacaggtagagctctgcatccccaggacaacactccacgtgccctgcagcctgtgacgtgtcaagctgtgaggacaccacgcagtcatgcttctccttcccgcgtctctcacatcatatggagcacaggggcgagcggcagcagcagaaggtcggcagcagccatggagatgctgagcatgctgaaggtggggtacaccatcctgcgcagcgagacgcccgcgacagacctcgtcaacaccttcatggactgggcggcgcgcagaggacgtcgcagggaaggttgtgctcatcaccggcgccgcctccggcatcggccaggtatgccaaccagtaactcctttgtgtacgcgtatttttgctgaaacaaactaaaccatggattcccatagatcttttcatgtcattttccttaataacaataacaacatcaccgacgacttcgattgcaaaaagggggattttgacttgcactaattgtgatgcgtaactcatggctaaacaaacgccaacatgctattgtgctttgccatgagctcgtagtcgtatctgtatgactgtatcccagcaaatagcttaccagtacgcaaagaaggtagcgagactggcgctagtggcgaggatggtgggaagcctgcatgatgtcgcggcgagagccagggatggcggctcgccagacgttctggttgttgccggggacgttgcgaaaccagaggattgccggaggtttgtgcaggccacagttgaacatttcggccgattggatcatcttgtgaacaacgctggtgtagcaaatgtctgctggtttgaggacgtaccggatgttgctgctttgaagcgagtcctggccgtgaacttctggggcgcagttcatgcgacccactgcgctcttccccatctgaagaagagcggcggtgggaaggtcttcgtcaactcctcggctgcggcggcgctggcaatgccaggaatgagcctctacaatgccagcgaggctgctgttctcaacttcttcgagaccctgcgggtcgagctccgcgacgaggtcggcatcaccatcgcgacttccgggtggatcgtgtcggagatgaccggagggaagcagctgtccaaggaagggacggtggaggtcgccgtgcggtgcgccgaggccaccgtggacgccatctgccgcggccggcgccacctcaccgtcccgctgtggtaccgggcgctgttcctgtggcgggcgctcgcgcccgaggtggtggagttcagccagagactgttgtgccgacggaccgcgggcggccgcggtcatcaggcgaagggcaagaggttgcaggaggtcaccggcgccgtccagccggcgccgctgcacagctcggacatcaaacgggagtagtcgtaggcttcggtaaggcagctggcagtgacatggtgctagctgctgcttgtctgttcggtcaaatgtggacgagttgtaaatcagctgtcaccttcgttcgttgtgtgactttaaacttcgtgcatacagtatgttgttgtcccgatttttcttcgtgtgggcggagttattgcattgcatagatagattgctctaaaatccgtagtacgctaggccaatcactaggctaggtgcaacaaaacaaatatacgtgtgagctgctaaaagtcacttgtttttttagttttgctacaactctttttttttaaaaaaaagagacgacgagtatactaaaaatagagattcgttgcagtttatatattttggtttcaagaataaagaaacggttggaaaatca

SEQ ID NO: 25358 - DNA, 2173 bp, Zea Mays
attaatgcactcgcagttggcacgcaacctaccccgtcgaactcctcatcgcctcatcgtcatctacctcgctcgcaccacacgcgaaaccgaacaaactactcaggcattgccgatactcacgccggcgaccgatgggatcggagggtgagatcaccggcccgctcctcgcgtcgggcgccggcgcgccggcgccggaggcggtgcccccgtggcgggagcaggtgacggctcgggggctggcggtcagcgccgtcctgggggtgctcttctgcctcattacgcacaagctcaacctcaccgtcgggatcatcccctcgctcaacgtcgccgcggggctgctcggctacttcctggtccgcacctggacggcggcgctcgagaggttcggcgtcgtctccaagcccttcaccaagcaggagaacaccgtcattcagacatgcgtcgtcgcctgctacggcctcgccttcagcggggggtttggaagctatatgcttgcaatggaccagagaacctatgaacttatcgggccagattatcctggcaacagggccgtggatgtcaagactccttcactgggctggatgattggattcatgtttgttgttagcttccttgggctgtttagtcttgttgcactacgcaaggttatggtaattgattacaagctgacttatcccagtgggacagccacggctatgttgataaatagtttccacacaactactggagctgagcttgcagacaagcaagtcaggtgtcttgggaagtacttgagcattagttttatatggaactgctttaaatggttcttcagcggtgttggagattcttgtggtttcgataatttcccttctttgggacttgcagcatttaagaatacctggggactggtatccagctgaccttggaagcaatgacttcaaaggactctatggatacaaggtttttatatctgtatctgtgatacttggggatggtctttataacctcatcaagatcatttatgctactatcaaggaaataatgaatgcacgggctaagcaaggaagactgccactagcccaagttcaggatggcgatgaaggttcaaatttatcagctgaggaaaagcatctgaatgagacattcataaaggacagtatccctccctggttggcaggatctggttacattggccttgcagcaatatcgattgcaaccgtcccaatgatctttccgcagatcaagtggtaccttgtcctctcggcatacgttgttgctcccctcctcgctttctgcaactcatatggcactggactaacggactggaatcttgcgtctacatatggaaagatcggcctcttcatttttgcatcatgggttggtcagaatggcggtgtgattgctggcttagcagcctgcggtgttatgatgtccatcgtgtccactgcagccgatctcatgcaggacttcaagaccggttacctcacactctcttcccctaggtccatgttcgtgtcgcagttgatcgggaccgcccttggttgtgtcattgctccactcaccttttggctctactggtcggctttcgatattggtaaccctgacggcgcattcaaagctccatatgctgtaatcttccgtgagatgtcaattcttggcgtggaagggttttctgcactgcctcagcactgcctagcgatctgctcgtttttcttcattgcatctctagtgatcaacctcctcagggacgtcaccccaaagaatgtctccagattcatcccaatcccgatggctatggccattcccttctacatcggtgcgtacttcgccatcgacatgtttgttgggacagttatccttttcgtctgggagagggtgaaccgcaaggagtgtgatgacttcgcaggtgcggttgcctctggcttgatctgtggtgatgggatctggactgttccttctgcgatactgtcaatccttaggattgacccgccaatttgcatgtacttcaagccatcccttagcagctaaagttgggacaagtgttatccattttctgtatatcaaaataggacctaattgtgtatatctttaatttactacatgtaaactgttctaggaagaaaagctgtagcctaatgcaatctgttgattcttatttgcgtatgataatccagcattcgtttatcct

SEQ ID NO: 25359 - DNA, 1629 bp, Zea Mays
cgcaggccggcctcggttagcggcgcccacccattcccctccccgctcgctacatataggtgacccatcccattatacatacccaccggccggcgtcacagacacgcgagcagagcacagacacagagcacacagcacagaggcagccaccaccacaggcactcacccgcaccgctcggtcaccgaggagtggaggagctttgcagtcgcagcagcagcagtacagtgtgtgagtgtgaagggactagagcagggcacacagcgcaggccgcatgggcgaggcggaggtggagaagcccaaggaggcggcagaggaggagaagaagaaggaagacaagcccatggacgccacggcggcggcggaggacaagcccaaggacgccgcggcggcggaggacaagcccaaggacggggaggagaagaaggacgacgcgccccctccccccccgccgccgccgccgcccgaggaggtcgagatgcgggtctacatgcactgcgagggatgcgcccgcaaggtcaagaagatcctcaagcgcttcgacggagtggaggacgtggtcgccgactccaagtcgcacaaggtggtggtgaaggggaagaaggcggccgccgaccccatgagggtggtggagcgcgtgcagaagaagaccggccgcaaggtggagttgctgtcgccgatcccgccgccaacgccgccggaggagaagaaggcagaggaggagcccgagccgccaaagccggaggagaagaaggagccggtcccggcgccaccgccggagagcggcgccggcgacaacacgggggccaaggaggaggagaaggggcaggaggaggagaaggagaaggaaggaggaggcgatggcggtggcgaggagaagaagaaggaagggggcaaggaggaagagaagaaggacggcgagaagcaggaggaggagaaggagggcggcggtggcggcgagaaggtggaggaaaaggagggagataaagacgctgccgctgccgccgccgccagcatgtacatgcactacccgaggttcccgttcccgggaggctactacgcgccgcctccggggtacgtctaccagccggtgtacccggcgccggcgtacgcggcgtacgcgccgccgcaccaccagcccatggcgccgcagatcttcagcgacgagaaccccaacgcatgctccgtcatgtaactaaaaaacagaaggagccttggcgagagagggggagaaaaggaaaaaaaaagaataataagaaggtgggaagagcgagggagctgcgtgcataagccagagccagaggtagggagggaggtcccctgagagaaatgcagcatccagcagtgtcccctgagcgaagcaaatgggcaactttgtttgaaacaaaacaaaaatacccagctttttcggggggggggggggggggaggaggggcgggtagatttcgctcttattttttttcttctttcttttgtaattttaacccttcctttcatcttttttttcctggtgtaaagtaagcgtggactttgtcggtttatggacgctagctatctttatgtaggatgatgccttggcatgtactgcttgcagcttcagacttcatatataaaactgtatgtattataaa

SEQ ID NO: 25360 - DNA, 3556 bp, Zea Mays
cgttcccatcctcctttcccgaacaaccggagcgcggcgcgagacaggcctctactccccgtctcccccgctccagctgacctcgcccactagggggacgtgcgatcgatcacgtgcgcggcgactgatggcaggctagattccggcaatccacagtcagacacatacattttgcgatcgatttttggtgaagcgaccttgatctgaaaatggggctgttccgggcggcgtccggtctggctcgtttggcgctgcggcggaacctctcgcgcgccgcagcgagccccttcgccggcagcggtggcgccgtcccgggtgcaatgccggcgcggtacttccactccacacgcccgcgcaggttcgccgcgcccgcgccccgtgcggtgccgctctcgcgcctcaccgacagcttcctcgacgggaccagtagcgtctacctcgaggagctgcagcgagcatgggaggccgaccccaactccgtcgacgagtcctgggacaactttttccgcaacttcgtcggccaggctgccgccacctcgcctggcctctccgggcagaccatccaggagagcatgaggctgctgctgctcgtaagggcgtaccaggtgagcggccacctgaaggccaagctcgacccactggggcttgaggagcgcccagtcccggatgtgctggacccggggttctatggattctctgaggcagacttggaccgtgaattcttccttggggtgtggatgatggctgggttcttgtccgagaaccggccagtgcagacactgcgttccgtgctggagcggctcgagcaggcttactgcggcaccattgggtatgagtacatgcacatacctgacagggagaagtgcaactggctcagggataggatcgaaacagttaacccaagggagtacacttatgatcgtcgtcaggtcatgctggataggcttatctggagtacacagtttgagaatttcttggcgaccaagtggacgactgcaaaacggtttggtcttgaaggcgctgagactctgatccctggcatgaaggagatgtttgacagagcagctgatcttggtgtagagagtattgtcattgggatgccgcacagaggcaggttaaatgtcttgggaaatgttgtgaggaagcccttgcgacagatatttagtgagtttagtggtggtaccaagcctgtcaatgaaggggaggggttgtatacaggtactggtgatgtcaaataccatcttggaacttcatatgacaggcctaccaggggcgggaaacatatccatctgtcactggttgcgaacccaagtcatttggaagcagtcgatcctgttgttgctgggaagacaagagcgaaacagtactattccaatgaccgtgacaggaccaagaatttgggtgtgttgctgcatggtgatggtagtttctcagggcagggcgttgtgtatgagacactgcatctcagtgcccttgaaaactacaccactggtgggacaatacatatcgtggtcaacaatcaggttgctttcactactgatccaaggtcagggagatcctctcagtattgcacagatgtagcgaaagcattggatgcgccgatttttcatgttaatggtgatgatttggaggccgtggttcatgtctgtgagctcgctgcagaatggcgacagacatttcattcagatgtagtggtggacattgtatgctaccggcgatttggccataatgaaattgatgagccgtccttcacccaacctaagatgtacaaggtgattaggaaccatccaagtgcgcttgagatttatcaaagaaagttgttagagtctggaaagatctcaaaggaagatattgataagttaaacaagaaggtcagcactatacttaatgaggaattccagaacagcaaggactatgttcccaacaagagggactggctttcagcttactggactgggttcaagtcaccagagcagatttcgcgtatccaaaacactggagtcaagccagagattctaaaacgagttggagaagccatgactactctaccagaaaatttcaatcctcacagggctgtgaagaagattttttatcagaggcgtcagatgatcgagactggagaaggcattgattgggcagttggtgaagcacttgcttttgctactcttatcattgaggggaaccatgtcaggttaagtggtcaggatgttgagaggggtacatttagccaccgtcattctgtcctccatgaccaagaaactggagagcagtactgcccactggatcatcttgttatgaaccaagatgaggagctttttactgtgagcaacagttccctgtcagaatttgctgttttgggctttgaattgggttactctatggagaacccaaactcattggtcatatgggaagctcagtttggtgatttttccaatggagctcaagtgatatttgatcagttcctgagtagcggggagtcaaaatggctccgccagactggccttgtggtttgtcttcctcatggatatgatggccaggggcctgaacattctagtgcaagattggagcgctttcttcagatgagtgatgacaacccttatgttatacctgagatggatccaacactgcggaagcaaatccagcagtgcaattggcaagtcgttaatgtaacaactcctgcaaattatttccatgttctgcgtcgccagatacaccgggactttaggaaacctttgattgtgatgtccccaaagaacctccttcgccacaaggactgcaagtcgaacttatctgaatttgatgatcttgcgggccaccctggattcgacaagcaagggacacgcttcaagcggctcattaaagaccagaataatcacaaggacctcgaggagggaattaaccgtctagttctttgctctggaaaggtgtactacgaactggatgaagaaagaaggaagacggagcgcactgatgttgctatatgtagagttgagcagctctgcccattcccctatgacctcatccagcgcgagttgaagagatatccaagaggagccgatgaacatgggagcgtacagctacatcaacccccggctgctgacggcaatgaaggctctgggccgtggtggcatcgaggacatcaagtacgtcggcagggccccgtcggctgctactgctacgggcttctactcggtgcacgtgcaggagcagacggagctggtgcaaaaggccctgcagcgcgaccccatcaactacccgttctgaaagaaacgagacccctgtaaattcttggaaaattgggcaccttttgattttgatatacctctatagagagagcaggccttaaggtatgcctgtgctgctgtgcagccatttgttgaaataatcgtttcggactctacagtaccgcattatatagtttataattccatgataaatattgtataagtaattattgattaattaatattatttacttcctccgtccacaaatgtttatcgttatgatattcgtgctagaagtttaactgaatttatagaatatataagtgatatt

SEQ ID NO: 25361 - DNA, 1338 bp, Zea Mays
cgttcccatcctcctttcccgaacaaccggagcgcggcgcgagacaggcctctactccccgtctcccccgctccagctgacctcgcccactttccctgtcagaatttgctgttttgggctttgaattgggttactctatggagaacccaaactcattggtcatatgggaagctcagtttggtgatttttccaatggagctcaagtgatatttgatcagttcctgagtagcggggagtcaaaatggctccgccagactggccttgtggtttgtcttcctcatggatatgatggccaggggcctgaacattctagtgcaagattggagcgctttcttcagatgagtgatgacaacccttatgttatacctgagatggatccaacactgcggaagcaaatccagcagtgcaattggcaagtcgttaatgtaacaactcctgcaaattatttccatgttctgcgtcgccagatacaccgggactttaggaaacctttgattgtgatgtccccaaagaacctccttcgccacaaggactgcaagtcgaacttatctgaatttgatgatcttgcgggccaccctggattcgacaagcaagggacacgcttcaagcggctcattaaagaccagaataatcacaaggacctcgaggagggaattaaccgtctagttctttgctctggaaaggtgtactacgaactggatgaagaaagaaggaagacggagcgcactgatgttgctatatgtagagttgagcagctctgcccattcccctatgacctcatccagcgcgagttgaagagatatccaaatgctgagatcgtgtggtgccaggaggagccgatgaacatgggagcgtacagctacatcaacccccggctgctgacggcaatgaaggctctgggccgtggtggcatcgaggacatcaagtacgtcggcagggccccgtcggctgctactgctacgggcttctactcggtgcacgtgcaggagcagacggagctggtgcaaaaggccctgcagcgcgaccccatcaactacccgttctgaaagaaacgagacccctgtaaattcttggaaaattgggcaccttttgattttgatatacctctatagagagagcaggccttaaggtatgcctgtgctgctgtgcagccatttgttgaaataatcgtttcggactctacagtaccgcattatatagtttataattccatgataaatattgtataagtaattattgattaattaatattatttacttcctccgtccacaaatgtttatcgttatgatattcgtgctagaagtttaactgaatttatagaatatataagtgatatt

SEQ ID NO: 25362 - DNA, 1091 bp, Zea Mays
cgttcccatcctcctttcccgaacaaccggagcgcggcgcgagacaggcctctactccccgtctcccccgctccagctgacctcgcccactatgagtgatgacaacccttatgttatacctgagatggatccaacactgcggaagcaaatccagcagtgcaattggcaagtcgttaatgtaacaactcctgcaaattatttccatgttctgcgtcgccagatacaccgggactttaggaaacctttgattgtgatgtccccaaagaacctccttcgccacaaggactgcaagtcgaacttatctgaatttgatgatcttgcgggccaccctggattcgacaagcaagggacacgcttcaagcggctcattaaagaccagaataatcacaaggacctcgaggagggaattaaccgtctagttctttgctctggaaaggtgtactacgaactggatgaagaaagaaggaagacggagcgcactgatgttgctatatgtagagttgagcagctctgcccattcccctatgacctcatccagcgcgagttgaagagatatccaaatgctgagatcgtgtggtgccaggaggagccgatgaacatgggagcgtacagctacatcaacccccggctgctgacggcaatgaaggctctgggccgtggtggcatcgaggacatcaagtacgtcggcagggccccgtcggctgctactgctacgggcttctactcggtgcacgtgcaggagcagacggagctggtgcaaaaggccctgcagcgcgaccccatcaactacccgttctgaaagaaacgagacccctgtaaattcttggaaaattgggcaccttttgattttgatatacctctatagagagagcaggccttaaggtatgcctgtgctgctgtgcagccatttgttgaaataatcgtttcggactctacagtaccgcattatatagtttataattccatgataaatattgtataagtaattattgattaattaatattatttacttcctccgtccacaaatgtttatcgttatgatattcgtgctagaagtttaactgaatttatagaatatataagtgatatt

SEQ ID NO: 25363 - DNA, 3579 bp, Zea Mays
cgttcccatcctcctttcccgaacaaccggagcgcggcgcgagacaggcctctactccccgtctcccccgctccagctgacctcgcccactagggggacgtgcgatcgatcacgtgcgcggcgactgatggcaggctagattccggcaatccacagtcagacacatacattttgcgatcgatttttggtgaagcgaccttgatctgaaaatggggctgttccgggcggcgtccggtctggctcgtttggcgctgcggcggaacctctcgcgcgccgcagcgagccccttcgccggcagcggtggcgccgtcccgggtgcaatgccggcgcggtacttccactccacacgcccgcgcaggttcgccgcgcccgcgccccgtgcggtgccgctctcgcgcctcaccgacagcttcctcgacgggaccagtagcgtctacctcgaggagctgcagcgagcatgggaggccgaccccaactccgtcgacgagtcctgggacaactttttccgcaacttcgtcggccaggctgccgccacctcgcctggcctctccgggcagaccatccaggagagcatgaggctgctgctgctcgtaagggcgtaccaggtgagcggccacctgaaggccaagctcgacccactggggcttgaggagcgcccagtcccggatgtgctggacccggggttctatggattctctgaggcagacttggaccgtgaattcttccttggggtgtggatgatggctgggttcttgtccgagaaccggccagtgcagacactgcgttccgtgctggagcggctcgagcaggcttactgcggcaccattgggtatgagtacatgcacatacctgacagggagaagtgcaactggctcagggataggatcgaaacagttaacccaagggagtacacttatgatcgtcgtcaggtcatgctggataggcttatctggagtacacagtttgagaatttcttggcgaccaagtggacgactgcaaaacggtttggtcttgaaggcgctgagactctgatccctggcatgaaggagatgtttgacagagcagctgatcttggtgtagagagtattgtcattgggatgccgcacagaggcaggttaaatgtcttgggaaatgttgtgaggaagcccttgcgacagatatttagtgagtttagtggtggtaccaagcctgtcaatgaaggggaggggttgtatacaggtactggtgatgtcaaataccatcttggaacttcatatgacaggcctaccaggggcgggaaacatatccatctgtcactggttgcgaacccaagtcatttggaagcagtcgatcctgttgttgctgggaagacaagagcgaaacagtactattccaatgaccgtgacaggaccaagaatttgggtgtgttgctgcatggtgatggtagtttctcagggcagggcgttgtgtatgagacactgcatctcagtgcccttgaaaactacaccactggtgggacaatacatatcgtggtcaacaatcaggttgctttcactactgatccaaggtcagggagatcctctcagtattgcacagatgtagcgaaagcattggatgcgccgatttttcatgttaatggtgatgatttggaggccgtggttcatgtctgtgagctcgctgcagaatggcgacagacatttcattcagatgtagtggtggacattgtatgctaccggcgatttggccataatgaaattgatgagccgtccttcacccaacctaagatgtacaaggtgattaggaaccatccaagtgcgcttgagatttatcaaagaaagttgttagagtctggaaagatctcaaaggaagatattgataagttaaacaagaaggtcagcactatacttaatgaggaattccagaacagcaaggactatgttcccaacaagagggactggctttcagcttactggactgggttcaagtcaccagagcagatttcgcgtatccaaaacactggagtcaagccagagattctaaaacgagttggagaagccatgactactctaccagaaaatttcaatcctcacagggctgtgaagaagattttttatcagaggcgtcagatgatcgagactggagaaggcattgattgggcagttggtgaagcacttgcttttgctactcttatcattgaggggaaccatgtcaggttaagtggtcaggatgttgagaggggtacatttagccaccgtcattctgtcctccatgaccaagaaactggagagcagtactgcccactggatcatcttgttatgaaccaagatgaggagctttttactgtgagcaacagttccctgtcagaatttgctgttttgggctttgaattgggttactctatggagaacccaaactcattggtcatatgggaagctcagtttggtgatttttccaatggagctcaagtgatatttgatcagttcctgagtagcggggagtcaaaatggctccgccagactggccttgtggtttgtcttcctcatggatatgatggccaggggcctgaacattctagtgcaagattggagcgctttcttcagatgagtgatgacaacccttatgttatacctgagatggatccaacactgcggaagcaaatccagcagtgcaattggcaagtcgttaatgtaacaactcctgcaaattatttccatgttctgcgtcgccagatacaccgggactttaggaaacctttgattgtgatgtccccaaagaacctccttcgccacaaggactgcaagtcgaacttatctgaatttgatgatcttgcgggccaccctggattcgacaagcaagggacacgcttcaagcggctcattaaagaccagaataatcacaaggacctcgaggagggaattaaccgtctagttctttgctctggaaaggtgtactacgaactggatgaagaaagaaggaagacggagcgcactgatgttgctatatgtagagttgagcagctctgcccattcccctatgacctcatccagcgcgagttgaagagatatccaaatgctgagatcgtgtggtgccaggaggagccgatgaacatgggagcgtacagctacatcaacccccggctgctgacggcaatgaaggctctgggccgtggtggcatcgaggacatcaagtacgtcggcagggccccgtcggctgctactgctacgggcttctactcggtgcacgtgcaggagcagacggagctggtgcaaaaggccctgcagcgcgaccccatcaactacccgttctgaaagaaacgagacccctgtaaattcttggaaaattgggcaccttttgattttgatatacctctatagagagagcaggccttaaggtatgcctgtgctgctgtgcagccatttgttgaaataatcgtttcggactctacagtaccgcattatatagtttataattccatgataaatattgtataagtaattattgattaattaatattatttacttcctccgtccacaaatgtttatcgttatgatattcgtgctagaagtttaactgaatttatagaatatataagtgatatt

SEQ ID NO: 25364 - DNA, 3536 bp, Zea Mays
ccccatcccgcgcgtccatcttggtcaagaaaccccaacggcgcgtcgcccccaaaccttagaccccctgcggaaatctctagagccagggtctatccatgggccatcgctgtgcgccagctcttgctccatctctccgcggcggcagcgcaacagccgcccccatgaaagtcgccatcctcaccccccgcgagcctgccccatcccgcttagcgtcgtcccccgccgctgcgcagccgcgacccatctggataaggatgcatccgcttctcccatagccgccactacccctgcctgccctctgctacgaacacgaagataccctggatggaggtggagctctcagaggcttaagatctagaactctatcgcgtactacggattccacagggtgaggagagatacgagcaggtgtcccaccggcgatgcgggtccaatcttcggcattgggagcaatccgcctactcgaccacgaaggttctctgaggcggtgtagccagagatcatgcgggcaacagggaaggacgatagctacgcagcccacatcacgaaggcatataagtgggagttcgccgaaagggaaggtttgcaactggttgtgctaaatccagggactactctgggcccatttttcatgtcatcagtcaataccagcctgaataatctattgcaactcctaagaggttgaaaattaaccaggccaacgtcttgagttggaccctgtcaacacagggtgggtctatcaaggaggacaaacaggttggttgatgagagcaaaggagctttccaagaagttgattgatctgggcatttgtttccttccgtttgatgtgaccatcagggagaccgtcgattgcttcagaagcaaagggctcatctagccctgtgaacatttccagatgtacgttttattctatagaactgctacagtaatacttggctcatacaaattaaaccgcctaaacgcactggaaaaaattaaactacacgatgatgatataggtaccagggttactattgcttactagaatgaggcgagagctgcttagctcctttgacattccttctacttagtggcaattggtttggttacttgaacctatgctccatatgatccacgctgattgaattttggtttgttaatacattttgggcaagcagtgctatgagatggagatgatggttaggcatgatctttctataggttaaaagaacagattatccaacagctgatggaacctgcattagagatattatgttgatgtcacaaatttagttgatgctcatgtgaaagcgctcaacaaggcagacactagaaaagtcagtatttacaacgttggaacaggaagagatagagaggcccgcaaatagttaatctgggacaacatatctctgtactggccatagaggacaacaaaaaaatcaaaagttgaagaatcaccaacggtgcctcctttgcaccctccggctcaagaacctaggcccgagccagttcaacaagtcatgcccacagctgaagtgctgaaccaacagatttactgggaatcaatgaatcagcccgaggcacatctgaaatagatcaaaacaaggtagtcgccttggtcgtggttccacatgataatccgccaaaagcaccttcttctaccagtcctggaagcgtggtgactagctggagcaattcagattctgtgcgttgaaaaggaagtgaaagaggtgactgtgctgattggtggacacacctgtacctcaagtgcaagaaggaaaaccactacacccactagtgcttgggtagcttctaaagctgttcatatcctgcaaaagaaaccagccatgaagactgttgagctgagggacaagttacaggaagacttctgttaagaggtttggtggtgttccctcgagctgagcaaagggagtgcttcaggcatttgatgaataattttgttaagaggtttggtggtgatattttctcaaagatgtatccaacggcaagagcctataggaaagaggtgtctcagtattttttcaaccaagttgtagaggcttcccctgatgccaaggattggctagacaaaaaccacaaactgttatggaggaggagtgaattcaacccagaaatcaaatgtgattacatcacaaacaatcttgcagaagtcttcaataattggattaaggacttcaaagacttgcctgtacatgaacttgctgacaagtataggcagatggtaatggtgttgtggaacaagaggagaattattggagaaagacttagtggaaggatccttcctgcaataatacatcaattaaaagcaaggactaggggattaggacatctatctgttgttaaggctaactgcatttctgcagagattttggatagtagcagcacccataacaggcatgtggtgaagtcttatttgcatcactgcacttgtgaggaatggcagcaaacaggtaaaccttgtcaacatgctcttgctttgatcacagcacaacaaacagtagatgtaaacatggaagactttgtgcatgaatattattctgttgagaggtttaggaaagcatactcaagattgattgagccacttcctgacagaacacaatggcctgaagtggacttgccatttgttgttggagcaccactggacaaaaggcttgctggtagacagagaaaacttaggatcaaaagttgtttggagggtggaggtggtggaaaacccaaaaaagatgcaaaggtggctgctgtagaagctgaatgggggacaaagaaacaaatgatccgaggaaaaagaaagtgcaaaagatgtggagagctagggcacggagaaacaagctacaagtgttcgctaaatggaacaaaaaagaggaagaggaaaccacgaaagaataccactaagtatggagagaatgccaaactaccaacaaaaaggagaggccaaaatgtggaagagacaaatgctgctgtagaccaaactgcgcaagagacagctaatgcataccaagatgtgcaagagacaaatgctatcatatcaagtcctatcagaccaaatagagaaacaatattacaggatagccctgttagattgactagaaggggcttgctatgttgcttggggagagcacaagcgagcaggctgacttcaaccttggcagcaacaaatatttgaatgtgtcgccaacaaagcttgcaacaataaagaatgcaaagcctgcaaaaaaaataacaccaaggaagaagaacctgacagcaagtgaatgacaccaaggaagaagaagaacaacaaatatttgaatgtgtctgtttgaacctgtctgaaatcaatatgtatgaactgtgtgactctttgtatgggtcgaatgtgtgtaaaatttactatctagctttctgaacatatatgaaaccagtgagtctaaactgtgaacatctatgaggtcatttgaactgtgaacacctctgaaatttcatgtgaattttgtcgtttggtgtgctgaaaactttgcgccagctttgtcatttgaatgctgtttttttgctg

SEQ ID NO: 25365 - DNA, 3532 bp, Zea Mays
ccccatcccgcgcgtccatcttggtcaagaaaccccaacggcgcgtcgcccccaaaccttagaccccctgcggaaatctctagagccagggtctatccatgggccatcgctgtgcgccagctcttgctccatctctccgcggcggcagcgcaacagccgcccccatgaaagtcgccatcctcaccccccgcgagcctgccccatcccgcttagcgtcgtcccccgccgctgcgcagccgcgacccatctggataaggatgcatccgcttctcccatagccgccactacccctgcctgccctctgctacgaacacgaagataccctggatggaggtggagctctcagaggcttaagatctagaactctatcgcgtactacggattccacagggtgaggagagatacgagcaggtgtcccaccggcgatgcgggtccaatcttcggcattgggagcaatccgcctactcgaccacgaaggttctctgaggcggtgtagccagagatcatgcgggcaacagggaaggacgatagctacgcagcccacatcacgaaggcatataagtgggagttcgccgaaagggaaggtttgcaactggttgtgctaaatccagggactactctgggcccatttttcatgtcatcagtcaataccagcctgaataatctattgcaactcctaagaggttgaaaattaaccaggccaacgtcttgagttggaccctgtcaacacagggtgggtctatcaaggaggacaaacaggttggttgatgagagcaaaggagctttccaagaagttgattgatctgggcatttgtttccttccgtttgatgtgaccatcagggagaccgtcgattgcttcagaagcaaagggctcatctagccctgtgaacatttccagatgtacgttttattctatagaactgctacagtaatacttggctcatacaaattaaaccgcctaaacgcactggaaaaaattaaactacacgatgatgatataggtaccagggttactattgcttactagaatgaggcgagagctgcttagctcctttgacattccttctacttagtggcaattggtttggttacttgaacctatgctccatatgatccacgctgattgaattttggtttgttaatacattttgggcaagcagtgctatgagatggagatgatggttaggcatgatctttctataggttaaaagaacagattatccaacagctgatggaacctgcattagagatattatgttgatgtcacaaatttagttgatgctcatgtgaaagcgctcaacaaggcagacactagaaaagtcagtatttacaacgttggaacaggaagagagaggcccgcaaatagttaatctgggacaacatatctctgtactggccatagaggacaacaaaaaaatcaaaagttgaagaatcaccaacggtgcctcctttgcaccctccggctcaagaacctaggcccgagccagttcaacaagtcatgcccacagctgaagtgctgaaccaacagatttactgggaatcaatgaatcagcccgaggcacatctgaaatagatcaaaacaaggtagtcgccttggtcgtggttccacatgataatccgccaaaagcaccttcttctaccagtcctggaagcgtggtgactagctggagcaattcagattctgtgcgttgaaaaggaagtgaaagaggtgactgtgctgattggtggacacacctgtacctcaagtgcaagaaggaaaaccactacacccactagtgcttgggtagcttctaaagctgttcatatcctgcaaaagaaaccagccatgaagactgttgagctgagggacaagttacaggaagacttctgttaagaggtttggtggtgttccctcgagctgagcaaagggagtgcttcaggcatttgatgaataattttgttaagaggtttggtggtgatattttctcaaagatgtatccaacggcaagagcctataggaaagaggtgtctcagtattttttcaaccaagttgtagaggcttcccctgatgccaaggattggctagacaaaaaccacaaactgttatggaggaggagtgaattcaacccagaaatcaaatgtgattacatcacaaacaatcttgcagaagtcttcaataattggattaaggacttcaaagacttgcctgtacatgaacttgctgacaagtataggcagatggtaatggtgttgtggaacaagaggagaattattggagaaagacttagtggaaggatccttcctgcaataatacatcaattaaaagcaaggactaggggattaggacatctatctgttgttaaggctaactgcatttctgcagagattttggatagtagcagcacccataacaggcatgtggtgaagtcttatttgcatcactgcacttgtgaggaatggcagcaaacaggtaaaccttgtcaacatgctcttgctttgatcacagcacaacaaacagtagatgtaaacatggaagactttgtgcatgaatattattctgttgagaggtttaggaaagcatactcaagattgattgagccacttcctgacagaacacaatggcctgaagtggacttgccatttgttgttggagcaccactggacaaaaggcttgctggtagacagagaaaacttaggatcaaaagttgtttggagggtggaggtggtggaaaacccaaaaaagatgcaaaggtggctgctgtagaagctgaatgggggacaaagaaacaaatgatccgaggaaaaagaaagtgcaaaagatgtggagagctagggcacggagaaacaagctacaagtgttcgctaaatggaacaaaaaagaggaagaggaaaccacgaaagaataccactaagtatggagagaatgccaaactaccaacaaaaaggagaggccaaaatgtggaagagacaaatgctgctgtagaccaaactgcgcaagagacagctaatgcataccaagatgtgcaagagacaaatgctatcatatcaagtcctatcagaccaaatagagaaacaatattacaggatagccctgttagattgactagaaggggcttgctatgttgcttggggagagcacaagcgagcaggctgacttcaaccttggcagcaacaaatatttgaatgtgtcgccaacaaagcttgcaacaataaagaatgcaaagcctgcaaaaaaaataacaccaaggaagaagaacctgacagcaagtgaatgacaccaaggaagaagaagaacaacaaatatttgaatgtgtctgtttgaacctgtctgaaatcaatatgtatgaactgtgtgactctttgtatgggtcgaatgtgtgtaaaatttactatctagctttctgaacatatatgaaaccagtgagtctaaactgtgaacatctatgaggtcatttgaactgtgaacacctctgaaatttcatgtgaattttgtcgtttggtgtgctgaaaactttgcgccagctttgtcatttgaatgctgtttttttgctg

SEQ ID NO: 25366 - DNA, 548 bp, Zea Mays
cccatttgtaaacatggattccaatcttagtgatactgtgtcaatgctcgatggagagcctgagcttactttagctgttgttgacccaattgttgctattgacgatatgccacaagcacaacatattgattggaacacactgcaaatagtagaaagacaagatgaagagggaaggctggaagtaatagatgaggatcagctgtataatctattgggcttgactgttgatgtagagactccttctatagatggtatgggtaatgatggtgatgctggtagggttgatagtgaggcagggagggttgatggtgaggctcctcatcttttggatgatagttttggcgcagagattccagttgatgatgatgtgcctgaggagagagtgtttgtgcatgacccagataagcccagcatgagtattggcacagtgtatcctgacatgaaagagtttagattggctatgcgtcaatttgccataaatgaggaatttgagcttcacattgcaaaaactgaccgagctaggtacattgggtattgcaaaggagatg

SEQ ID NO: 25367 - DNA, 1723 bp, Zea Mays
ccccatcccgcgcgtccatcttggtcaagaaaccccaacggcgcgtcgcccccaaaccttagaccccctgcggaaatctctagagccagggtctatccatgggccatcgctgtgcgccagctcttgctccatctctccgcggcggcagcgcaacagccgcccccatgaaagtcgccatcctcaccccccgcgagcctgccccatcccgcttagcgtcgtcccccgccgctgcgcagccgcgacccatctggataaggatgcatccgcttctcccatagccgccactacccctgcctgccctctgctacgaacacgaagataccctggatggaggtggagctctcagaggcttaagatctagaactctatcgcgtactacggattccacagggtgaggagagatacgagcaggtgtcccaccggcgatgcgggtccaatcttcggcattgggagcaatccgcctactcgaccacgaaggttctctgaggcggtgtagccagagatcatgcgggcaacagggaaggacgatagctacgcagcccacatcacgaaggcatataagtgggagttcgccgaaagggaaggtttgcaactggttgtgctaaatccagggactactctgggcccatttttcatgtcatcagtcaataccagcctgaataatctattgcaactcctaagagggtgggtctatcaaggaggacaaacaggttggttgatgagagcaaaggagctttccaagaagttgattgatctgggcatttgtttccttccgtttgatgtgaccatcagggagaccgtcgattgcttcagaagcaaagggctcatctagccctgtgaacatttccagatgtaccagggttactattgcttactagaatgaggcgagagctgcttagctcctttgacattccttctacttagtggcaattggtttggttacttgaacctatgctccatatgatccacgctgattgaattttggtttgttaatacattttgggcaagcagtgctatgagatggagatgatggttaggcatgatctttctataggttaaaagaacagattatccaacagctgatggaacctgcattagagatattatgttgatgtcacaaatttagttgatgctcatgtgaaagcgctcaacaaggcagacactagaaaagtcagtatttacaacgttggaacaggaagaggtttggtaacacgagaattgtttatttatttgtataactattatttattcatatggatagttgtaccctgcacaggttttaatcagtactttacttaatttacatggtaacaagatagagaggcccgcaaatagttaatctgggacaacatatctctgtactggccatagaggacaacaaaaaaatcaaaagttgaagaatcaccaacggtgcctcctttgcaccctccggctcaagaacctaggcccgagccagttcaacaagtcatgcccacagctgaagtgctgaaccaacagatttactgggaatcaatgaatcagcccgaggcacatctgaaatagatcaaaacaaggtagtcgccttggtcgtggttccacatgataatccgccaaaagcaccttcttctaccagtcctggaagcgtggtgactagctggagcaattcagattctgtgcgttgaaaaggaagtgaaagagggagcttcggttcgcgatggaagtcttcctctctgtagaaggtctt

SEQ ID NO: 25368 - DNA, 2716 bp, Zea Mays
ccccatcccgcgcgtccatcttggtcaagaaaccccaacggcgcgtcgcccccaaaccttagaccccctgcggaaatctctagagccagggtctatccatgggccatcgctgtgcgccagctcttgctccatctctccgcggcggcagcgcaacagccgcccccatgaaagtcgccatcctcaccccccgcgagcctgccccatcccgcttagcgtcgtcccccgccgctgcgcagccgcgacccatctggataaggatgcatccgcttctcccatagccgccactacccctgcctgccctctgctacgaacacgaagataccctggatggaggtggagctctcagaggcttaagatctagaactctatcgcgtactacggattccacagggtgaggagagatacgagcaggtgtcccaccggcgatgcgggtccaatcttcggcattgggagcaatccgcctactcgaccacgaaggttctctgaggcggtgtagccagagatcatgcgggcaacagggaaggacgatagctacgcagcccacatcacgaaggcatataagtgggagttcgccgaaagggaaggtttgcaactggttgtgctaaatccagggactactctgggcccatttttcatgtcatcagtcaataccagcctgaataatctattgcaactcctaagaggttgaaaattaaccaggccaacgtcttgagttggaccctgtcaacacagggtgggtctatcaaggaggacaaacaggttggttgatgagagcaaaggagctttccaagaagttgattgatctgggcatttgtttccttccgtttgatgtgaccatcagggagaccgtcgattgcttcagaagcaaagggctcatctagccctgtgaacatttccagatgttaaaagaacagattatccaacagctgatggaacctgcattagagatattatgttgatgtcacaaatttagttgatgctcatgtgaaagcgctcaacaaggcagacactagaaaagtcagtatttacaacgttggaacaggaagaggtttggtaacacgagaattgtttatttatttgtataactattatttattcatatggatagttgtaccctgcacaggttttaatcagtactttacttaatttacatggtaacaagatagagaggcccgcaaatagttaatctgggacaacatatctctgtactggccatagaggacaacaaaaaaatcaaaagttgaagaatcaccaacggtgcctcctttgcaccctccggctcaagaacctaggcccgagccagttcaacaagtcatgcccacagctgaagtgctgaaccaacagatttactgtagggaatcaatgaatcagcccgaggcacatctgaaatagatcaaaacaaggtagtcgccttggtcgtggttccacatgataatccgccaaaagcaccttcttctaccagtcctggaagcgtggtgactagctggagcaattcagattctgtgcgttgaaaaggaagtgaaagagttaaatcatgtaattggaatacagtggtgccgtcagtggtgcggattgggggcttctagagaaagggtctagcgtcgtgcccttcttgacgaacagtgtgttgatgtgtgccatcatcgcactgggaacgaacgtgatggctagcacggggagcatcttgagcatctgctttgtctccaccactcaccatgctctgagcctgtgttggtatgcagacttttccctttgtttcagaagaagatgcagttgcattgcacattgttagaacccacgatcaccacaaaattgagggaatatgtcataactcattagtcattaccttgtcaaggtttatgctttccatcacgaacggttggagttgcaacataacgatactttggtataccaaataaagttactctattcaccaaatcatgcagtgttagttttttgttgtgctaaatactgaatataatttgggtgtgttaatattttatttattgtctgcacatggttttctgatgatggctcatgaatcctgtaaaatacgtgttaggatttggagatccatgcgggcactaccacagtccatagggtgctcatctcttgtgttcttggctcttgcaagcattaggtcgtttctaaaatcacattggcacaatgaactctatggtgtttgaggttgctgaattggatggagcaacaatgatttgtcgcactaacagtaaaagaaacggttacttgttggttttaaatgttagtaattactacgaagtacaataatttgtatggagcatatccagtttagcaactattccatattttaatctatcttttttataagttttagttcatgtgacttattttagaaacttgaactcacaaactttctcttatttggtctctatatggtggaattatgtcattctataatctctgttcgtttattcagtcgttgtgaactctcttctaattgctcccttcattggttgtgttgtactaatacatattggatgaagtaaacagcaatatcagttagtcaaataaaaaaatattatgtggagagcgaagacaatcaataaaaaaccttgagatctttttggtggatagtttacgtgggtattgttgtgagccgtcgcaacgcacgggcaaccgactagtaaatatataagccatgtgtttcattagtaaaaataaggataattatttg

SEQ ID NO: 25369 - DNA, 2207 bp, Zea Mays
ccccatcccgcgcgtccatcttggtcaagaaaccccaacggcgcgtcgcccccaaaccttagaccccctgcggaaatctctagagccagggtctatccatgggccatcgctgtgcgccagctcttgctccatctctccgcggcggcagcgcaacagccgcccccatgaaagtcgccatcctcaccccccgcgagcctgccccatcccgcttagcgtcgtcccccgccgctgcgcagccgcgacccatctggataaggatgcatccgcttctcccatagccgccactacccctgcctgccctctgctacgaacacgaagataccctggatggaggtggagctctcagaggcttaagatctagaactctatcgcgtactacggattccacagggtgaggagagatacgagcaggtgtcccaccggcgatgcgggtccaatcttcggcattgggagcaatccgcctactcgaccacgaaggttctctgaggcggtgtagccagagatcatgcgggcaacagggaaggacgatagctacgcagcccacatcacgaaggcatataagtgggagttcgccgaaagggaaggtttgcaactggttgtgctaaatccagggactactctgggcccatttttcatgtcatcagtcaataccagcctgaataatctattgcaactcctaagaggttgaaaattaaccaggccaacgtcttgagttggaccctgtcaacacagggtgggtctatcaaggaggacaaacaggttggttgatgagagcaaaggagctttccaagaagttgattgatctgggcatttgtttccttccgtttgatgtgaccatcagggagaccgtcgattgcttcagaagcaaagggctcatctagccctgtgaacatttccagatagaggcccgcaaatagttaatctgggacaacatatctctgtactggccatagaggacaacaaaaaaatcaaaagttgaagaatcaccaacggtgcctcctttgcaccctccggctcaagaacctaggcccgagccagttcaacaagtcatgcccacagctgaagtgctgaaccaacagatttactgggaatcaatgaatcagcccgaggcacatctgaaatagatcaaaacaaggtagtcgccttggtcgtggttccacatgataatccgccaaaagcaccttcttctaccagtcctggaagcgtggtgactagctggagcaattcagattctgtgcgttgaaaaggaagtgaaagaggctattgttcaggtactaatttgccatagtgttggtctatgactgaatggtacaaaatgcatgcaatgaatggatgatactttccagttaaatcatgtaattggaatacagtggtgccgtcagtggtgcggattgggggcttctagagaaagggtctagcgtcgtgcccttcttgacgaacagtgtgttgatgtgtgccatcatcgcactgggaacgaacgtgatggctagcacggggagcatcttgagcatctgctttgtctccaccactcaccatgctctgagcctgtgttggatttggagatccatgcgggcactaccacagtccatagggtgctcatctcttgtgttcttggctcttgcaagcattaggtcgtttctaaaatcacattggcacaatgaactctatggtgtttgaggttgctgaattggatggagcaacaatgatttgtcgcactaacagtaaaagaaacggttacttgttggttttaaatgttagtaattactacgaagtacaataatttgtatggagcatatccagtttagcaactattccatattttaatctatcttttttataagttttagttcatgtgacttattttagaaacttgaactcacaaactttctcttatttggtctctatatggtggaattatgtcattctataatctctgttcgtttattcagtcgttgtgaactctcttctaattgctcccttcattggttgtgttgtactaatacatattggatgaagtaaacagcaatatcagttagtcaaataaaaaaatattatgtggagagcgaagacaatcaataaaaaaccttgagatctttttggtggatagtttacgtgggtattgttgtgagccgtcgcaacgcacgggcaaccgactagtaaatatataagccatgtgtttcattagtaaaaataaggataattatttg

SEQ ID NO: 25370 - DNA, 3095 bp, Zea Mays
ccccatcccgcgcgtccatcttggtcaagaaaccccaacggcgcgtcgcccccaaaccttagaccccctgcggaaatctctagagccagggtctatccatgggccatcgctgtgcgccagctcttgctccatctctccgcggcggcagcgcaacagccgcccccatgaaagtcgccatcctcaccccccgcgagcctgccccatcccgcttagcgtcgtcccccgccgctgcgcagccgcgacccatctggataaggatgcatccgcttctcccatagccgccactacccctgcctgccctctgctacgaacacgaagataccctggatggaggtggagctctcagaggcttaagatctagaactctatcgcgtactacggattccacagggtgaggagagatacgagcaggtgtcccaccggcgatgcgggtccaatcttcggcattgggagcaatccgcctactcgaccacgaaggttctctgaggcggtgtagccagagatcatgcgggcaacagggaaggacgatagctacgcagcccacatcacgaaggcatataagtgggagttcgccgaaagggaaggtttgcaactggttgtgctaaatccagggactactctgggcccatttttcatgtcatcagtcaataccagcctgaataatctattgcaactcctaagaggttgaaaattaaccaggccaacgtcttgagttggaccctgtcaacacagggtgggtctatcaaggaggacaaacaggttggttgatgagagcaaaggagctttccaagaagttgattgatctgggcatttgtttccttccgtttgatgtgaccatcagggagaccgtcgattgcttcagaagcaaagggctcatctagccctgtgaacatttccagatgttaaaagaacagattatccaacagctgatggaacctgcattagagatattatgttgatgtcacaaatttagttgatgctcatgtgaaagcgctcaacaaggcagacactagaaaagtcagtatttacaacgttggaacaggaagagatagagaggcccgcaaatagttaatctgggacaacatatctctgtactggccatagaggacaacaaaaaaatcaaaagttgaagaatcaccaacggtgcctcctttgcaccctccggctcaagaacctaggcccgagccagttcaacaagtcatgcccacagctgaagtgctgaaccaacagatttactgtagggaatcaatgaatcagcccgaggcacatctgaaatagatcaaaacaaggtagtcgccttggtcgtggttccacatgataatccgccaaaagcaccttcttctaccagtcctggaagcgtggtgactagctggagcaattcagattctgtgcgttgaaaaggaagtgaaagaggtatatcttgtttacattaaaatatcaaagtactttgcagattttatttcagctctgttgcatgatgcactcgcactactgtctactgcaagtaccatcaccataaactctgaacgctctatgttcggtttcatctttttctttaactagattcgctttcctgtttcttataggctattgttcaggtactaatttgccatagtgttggtctatgactgaatggtacaaaatgcatgcaatgaatggatgatactttccagttaaatcatgtaattggaatacagtggtgccgtcagtggtgcggattgggggcttctagagaaagggtctagcgtcgtgcccttcttgacgaacagtgtgttgatgtgtgccatcatcgcactgggaacgaacgtgatggctagcacggggagcatcttgagcatctgctttgtctccaccactcaccatgctctgagcctgtgttggtatgcagacttttccctttgtttcagaagaagatgcagttgcattgcacattgttagaacccacgatcaccacaaaattgagggaatatgtcataactcattagtcattaccttgtcaaggtttatgctttccatcacgaacggttggagttgcaacataacattcatggtagtaaattgggacagggctaatatagtgatgtatttccttccatagcaaacatcaatgatggcttatgggcttgtcttatgtagcgcttctgatttacaatgcatctgtctgaacttgtgtgctctaaaacatacagtgcttcagcaaccaacatacttgtctgctcatgacttttgatgtatcctgctcagttagtattattagtttcgtatataagctaaacgatactttggtataccaaataaagttactctattcaccaaatcatgcagtgttagttttttgttgtgctaaatactgaatataatttgggtgtgttaatattttatttattgtctgcacatggttttctgatgatggctcatgaatcctgtaaaatacgtgttaggatttggagatccatgcgggcactaccacagtccatagggtgctcatctcttgtgttcttggctcttgcaagcattaggtcgtttctaaaatcacattggcacaatgaactctatggtgtttgaggttgctgaattggatggagcaacaatgatttgtcgcactaacagtaaaagaaacggttacttgttggttttaaatgttagtaattactacgaagtacaataatttgtatggagcatatccagtttagcaactattccatattttaatctatcttttttataagttttagttcatgtgacttattttagaaacttgaactcacaaactttctcttatttggtctctatatggtggaattatgtcattctataatctctgttcgtttattcagtcgttgtgaactctcttctaattgctcccttcattggttgtgttgtactaatacatattggatgaagtaaacagcaatatcagttagtcaaataaaaaaatattatgtggagagcgaagacaatcaataaaaaaccttgagatctttttggtggatagtttacgtgggtattgttgtgagccgtcgcaacgcacgggcaaccgactagtaaatatataagccatgtgtttcattagtaaaaataaggataattatttg

SEQ ID NO: 25371 - DNA, 3013 bp, Zea Mays
ccccatcccgcgcgtccatcttggtcaagaaaccccaacggcgcgtcgcccccaaaccttagaccccctgcggaaatctctagagccagggtctatccatgggccatcgctgtgcgccagctcttgctccatctctccgcggcggcagcgcaacagccgcccccatgaaagtcgccatcctcaccccccgcgagcctgccccatcccgcttagcgtcgtcccccgccgctgcgcagccgcgacccatctggataaggatgcatccgcttctcccatagccgccactacccctgcctgccctctgctacgaacacgaagataccctggatggaggtggagctctcagaggcttaagatctagaactctatcgcgtactacggattccacagggtgaggagagatacgagcaggtgtcccaccggcgatgcgggtccaatcttcggcattgggagcaatccgcctactcgaccacgaaggttctctgaggcggtgtagccagagatcatgcgggcaacagggaaggacgatagctacgcagcccacatcacgaaggcatataagtgggagttcgccgaaagggaaggtttgcaactggttgtgctaaatccagggactactctgggcccatttttcatgtcatcagtcaataccagcctgaataatctattgcaactcctaagaggttgaaaattaaccaggccaacgtcttgagttggaccctgtcaacacagggtgggtctatcaaggaggacaaacaggttggttgatgagagcaaaggagctttccaagaagttgattgatctgggcatttgtttccttccgtttgatgtgaccatcagggagaccgtcgattgcttcagaagcaaagggctcatctagccctgtgaacatttccagatgtaccagggttactattgcttactagaatgaggcgagagctgcttagctcctttgacattccttctacttagtggcaattggtttggttacttgaacctatgctccatatgatccacgctgattgaattttggtttgttaatacattttgggcaagcagtgctatgagatggagatgatggttaggcatgatctttctataggttaaaagaacagattatccaacagctgatggaacctgcattagagatattatgttgatgtcacaaatttagttgatgctcatgtgaaagcgctcaacaaggcagacactagaaaagtcagtatttacaacgttggaacaggaagagatagagaggcccgcaaatagttaatctgggacaacatatctctgtactggccatagaggacaacaaaaaaatcaaaagttgaagaatcaccaacggtgcctcctttgcaccctccggctcaagaacctaggcccgagccagttcaacaagtcatgcccacagctgaagtgctgaaccaacagatttactgtagggaatcaatgaatcagcccgaggcacatctgaaatagatcaaaacaaggtagtcgccttggtcgtggttccacatgataatccgccaaaagcaccttcttctaccagtcctggaagcgtggtgactagctggagcaattcagattctgtgcgttgaaaaggaagtgaaagagtggtgccgtcagtggtgcggattgggggcttctagagaaagggtctagcgtcgtgcccttcttgacgaacagtgtgttgatgtgtgccatcatcgcactgggaacgaacgtgatggctagcacggggagcatcttgagcatctgctttgtctccaccactcaccatgctctgagcctgtgttggtatgcagacttttccctttgtttcagaagaagatgcagttgcattgcacattgttagaacccacgatcaccacaaaattgagggaatatgtcataactcattagtcattaccttgtcaaggtttatgctttccatcacgaacggttggagttgcaacataacattcatggtagtaaattgggacagggctaatatagtgatgtatttccttccatagcaaacatcaatgatggcttatgggcttgtcttatgtagcgcttctgatttacaatgcatctgtctgaacttgtgtgctctaaaacatacagtgcttcagcaaccaacatacttgtctgctcatgacttttgatgtatcctgctcagttagtattattagtttcgtatataagctaaacgatactttggtataccaaataaagttactctattcaccaaatcatgcagtgttagttttttgttgtgctaaatactgaatataatttgggtgtgttaatattttatttattgtctgcacatggttttctgatgatggctcatgaatcctgtaaaatacgtgttaggatttggagatccatgcgggcactaccacagtccatagggtgctcatctcttgtgttcttggctcttgcaagcattaggtcgtttctaaaatcacattggcacaatgaactctatggtgtttgaggttgctgaattggatggagcaacaatgatttgtcgcactaacagtaaaagaaacggttacttgttggttttaaatgttagtaattactacgaagtacaataatttgtatggagcatatccagtttagcaactattccatattttaatctatcttttttataagttttagttcatgtgacttattttagaaacttgaactcacaaactttctcttatttggtctctatatggtggaattatgtcattctataatctctgttcgtttattcagtcgttgtgaactctcttctaattgctcccttcattggttgtgttgtactaatacatattggatgaagtaaacagcaatatcagttagtcaaataaaaaaatattatgtggagagcgaagacaatcaataaaaaaccttgagatctttttggtggatagtttacgtgggtattgttgtgagccgtcgcaacgcacgggcaaccgactagtaaatatataagccatgtgtttcattagtaaaaataaggataattatttg

SEQ ID NO: 25372 - DNA, 2468 bp, Zea Mays
ccccatcccgcgcgtccatcttggtcaagaaaccccaacggcgcgtcgcccccaaaccttagaccccctgcggaaatctctagagccagggtctatccatgggccatcgctgtgcgccagctcttgctccatctctccgcggcggcagcgcaacagccgcccccatgaaagtcgccatcctcaccccccgcgagcctgccccatcccgcttagcgtcgtcccccgccgctgcgcagccgcgacccatctggataaggatgcatccgcttctcccatagccgccactacccctgcctgccctctgctacgaacacgaagataccctggatggaggtggagctctcagaggcttaagatctagaactctatcgcgtactacggattccacagggtgaggagagatacgagcaggtgtcccaccggcgatgcgggtccaatcttcggcattgggagcaatccgcctactcgaccacgaaggttctctgaggcggtgtagccagagatcatgcgggcaacagggaaggacgatagctacgcagcccacatcacgaaggcatataagtgggagttcgccgaaagggaaggtttgcaactggttgtgctaaatccagggactactctgggcccatttttcatgtcatcagtcaataccagcctgaataatctattgcaactcctaagaggttgaaaattaaccaggccaacgtcttgagttggaccctgtcaacacagggtgggtctatcaaggaggacaaacaggttggttgatgagagcaaaggagctttccaagaagttgattgatctgggcatttgtttccttccgtttgatgtgaccatcagggagaccgtcgattgcttcagaagcaaagggctcatctagccctgtgaacatttccagatgtaccagggttactattgcttactagaatgaggcgagagctgcttagctcctttgacattccttctacttagtggcaattggtttggttacttgaacctatgctccatatgatccacgctgattgaattttggtttgttaatacattttgggcaagcagtgctatgagatggagatgatggttaggcatgatctttctataggttaaaagaacagattatccaacagctgatggaacctgcattagagatattatgttgatgtcacaaatttagttgatgctcatgtgaaagcgctcaacaaggcagacactagaaaagtcagtatttacaacgttggaacaggaagaggtttggtaacacgagaattgtttatttatttgtataactattatttattcatatggatagttgtaccctgcacaggttttaatcagtactttacttaatttacatggtaacaagatagagaggcccgcaaatagttaatctgggacaacatatctctgtactggccatagaggacaacaaaaaaatcaaaagttgaagaatcaccaacggtgcctcctttgcaccctccggctcaagaacctaggcccgagccagttcaacaagtcatgcccacagctgaagtgctgaaccaacagatttactggtaatttccaatgatactgcactaacaaggtgccaatccttatcatgtttcggtcatgtgccctaatacttccgtattttgttagtagggaatcaatgaatcagcccgaggcacatctgaaatagatcaaaacaaggtagtcgccttggtcgtggttccacatgataatccgccaaaagcaccttcttctaccagtcctggaagcgtggtgactagctggagcaattcagattctgtgcgttgaaaaggaagtgaaagaggatttggagatccatgcgggcactaccacagtccatagggtgctcatctcttgtgttcttggctcttgcaagcattaggtcgtttctaaaatcacattggcacaatgaactctatggtgtttgaggttgctgaattggatggagcaacaatgatttgtcgcactaacagtaaaagaaacggttacttgttggttttaaatgttagtaattactacgaagtacaataatttgtatggagcatatccagtttagcaactattccatattttaatctatcttttttataagttttagttcatgtgacttattttagaaacttgaactcacaaactttctcttatttggtctctatatggtggaattatgtcattctataatctctgttcgtttattcagtcgttgtgaactctcttctaattgctcccttcattggttgtgttgtactaatacatattggatgaagtaaacagcaatatcagttagtcaaataaaaaaatattatgtggagagcgaagacaatcaataaaaaaccttgagatctttttggtggatagtttacgtgggtattgttgtgagccgtcgcaacgcacgggcaaccgactagtaaatatataagccatgtgtttcattagtaaaaataaggataattatttg

SEQ ID NO: 25373 - DNA, 2811 bp, Zea Mays
ccccatcccgcgcgtccatcttggtcaagaaaccccaacggcgcgtcgcccccaaaccttagaccccctgcggaaatctctagagccagggtctatccatgggccatcgctgtgcgccagctcttgctccatctctccgcggcggcagcgcaacagccgcccccatgaaagtcgccatcctcaccccccgcgagcctgccccatcccgcttagcgtcgtcccccgccgctgcgcagccgcgacccatctggataaggatgcatccgcttctcccatagccgccactacccctgcctgccctctgctacgaacacgaagataccctggatggaggtggagctctcagaggcttaagatctagaactctatcgcgtactacggattccacagggtgaggagagatacgagcaggtgtcccaccggcgatgcgggtccaatcttcggcattgggagcaatccgcctactcgaccacgaaggttctctgaggcggtgtagccagagatcatgcgggcaacagggaaggacgatagctacgcagcccacatcacgaaggcatataagtgggagttcgccgaaagggaaggtttgcaactggttgtgctaaatccagggactactctgggcccatttttcatgtcatcagtcaataccagcctgaataatctattgcaactcctaagaggttgaaaattaaccaggccaacgtcttgagttggaccctgtcaacacagggtgggtctatcaaggaggacaaacaggttggttgatgagagcaaaggagctttccaagaagttgattgatctgggcatttgtttccttccgtttgatgtgaccatcagggagaccgtcgattgcttcagaagcaaagggctcatctagccctgtgaacatttccagatgttaaaagaacagattatccaacagctgatggaacctgcattagagatattatgttgatgtcacaaatttagttgatgctcatgtgaaagcgctcaacaaggcagacactagaaaagtcagtatttacaacgttggaacaggaagagatagagaggcccgcaaatagttaatctgggacaacatatctctgtactggccatagaggacaacaaaaaaatcaaaagttgaagaatcaccaacggtgcctcctttgcaccctccggctcaagaacctaggcccgagccagttcaacaagtcatgcccacagctgaagtgctgaaccaacagatttactgtagggaatcaatgaatcagcccgaggcacatctgaaatagatcaaaacaaggtagtcgccttggtcgtggttccacatgataatccgccaaaagcaccttcttctaccagtcctggaagcgtggtgactagctggagcaattcagattctgtgcgttgaaaaggaagtgaaagagtggtgccgtcagtggtgcggattgggggcttctagagaaagggtctagcgtcgtgcccttcttgacgaacagtgtgttgatgtgtgccatcatcgcactgggaacgaacgtgatggctagcacggggagcatcttgagcatctgctttgtctccaccactcaccatgctctgagcctgtgttggtatgcagacttttccctttgtttcagaagaagatgcagttgcattgcacattgttagaacccacgatcaccacaaaattgagggaatatgtcataactcattagtcattaccttgtcaaggtttatgctttccatcacgaacggttggagttgcaacataacattcatggtagtaaattgggacagggctaatatagtgatgtatttccttccatagcaaacatcaatgatggcttatgggcttgtcttatgtagcgcttctgatttacaatgcatctgtctgaacttgtgtgctctaaaacatacagtgcttcagcaaccaacatacttgtctgctcatgacttttgatgtatcctgctcagttagtattattagtttcgtatataagctaaacgatactttggtataccaaataaagttactctattcaccaaatcatgcagtgttagttttttgttgtgctaaatactgaatataatttgggtgtgttaatattttatttattgtctgcacatggttttctgatgatggctcatgaatcctgtaaaatacgtgttaggatttggagatccatgcgggcactaccacagtccatagggtgctcatctcttgtgttcttggctcttgcaagcattaggtcgtttctaaaatcacattggcacaatgaactctatggtgtttgaggttgctgaattggatggagcaacaatgatttgtcgcactaacagtaaaagaaacggttacttgttggttttaaatgttagtaattactacgaagtacaataatttgtatggagcatatccagtttagcaactattccatattttaatctatcttttttataagttttagttcatgtgacttattttagaaacttgaactcacaaactttctcttatttggtctctatatggtggaattatgtcattctataatctctgttcgtttattcagtcgttgtgaactctcttctaattgctcccttcattggttgtgttgtactaatacatattggatgaagtaaacagcaatatcagttagtcaaataaaaaaatattatgtggagagcgaagacaatcaataaaaaaccttgagatctttttggtggatagtttacgtgggtattgttgtgagccgtcgcaacgcacgggcaaccgactagtaaatatataagccatgtgtttcattagtaaaaataaggataattatttg

SEQ ID NO: 25374 - DNA, 2924 bp, Zea Mays
ccccatcccgcgcgtccatcttggtcaagaaaccccaacggcgcgtcgcccccaaaccttagaccccctgcggaaatctctagagccagggtctatccatgggccatcgctgtgcgccagctcttgctccatctctccgcggcggcagcgcaacagccgcccccatgaaagtcgccatcctcaccccccgcgagcctgccccatcccgcttagcgtcgtcccccgccgctgcgcagccgcgacccatctggataaggatgcatccgcttctcccatagccgccactacccctgcctgccctctgctacgaacacgaagataccctggatggaggtggagctctcagaggcttaagatctagaactctatcgcgtactacggattccacagggtgaggagagatacgagcaggtgtcccaccggcgatgcgggtccaatcttcggcattgggagcaatccgcctactcgaccacgaaggttctctgaggcggtgtagccagagatcatgcgggcaacagggaaggacgatagctacgcagcccacatcacgaaggcatataagtgggagttcgccgaaagggaaggtttgcaactggttgtgctaaatccagggactactctgggcccatttttcatgtcatcagtcaataccagcctgaataatctattgcaactcctaagagggtgggtctatcaaggaggacaaacaggttggttgatgagagcaaaggagctttccaagaagttgattgatctgggcatttgtttccttccgtttgatgtgaccatcagggagaccgtcgattgcttcagaagcaaagggctcatctagccctgtgaacatttccagatgttaaaagaacagattatccaacagctgatggaacctgcattagagatattatgttgatgtcacaaatttagttgatgctcatgtgaaagcgctcaacaaggcagacactagaaaagtcagtatttacaacgttggaacaggaagaggtttggtaacacgagaattgtttatttatttgtataactattatttattcatatggatagttgtaccctgcacaggttttaatcagtactttacttaatttacatggtaacaagatagagaggcccgcaaatagttaatctgggacaacatatctctgtactggccatagaggacaacaaaaaaatcaaaagttgaagaatcaccaacggtgcctcctttgcaccctccggctcaagaacctaggcccgagccagttcaacaagtcatgcccacagctgaagtgctgaaccaacagatttactgggaatcaatgaatcagcccgaggcacatctgaaatagatcaaaacaaggtagtcgccttggtcgtggttccacatgataatccgccaaaagcaccttcttctaccagtcctggaagcgtggtgactagctggagcaattcagattctgtgcgttgaaaaggaagtgaaagaggtatatcttgtttacattaaaatatcaaagtactttgcagattttatttcagctctgttgcatgatgcactcgcactactgtctactgcaagtaccatcaccataaactctgaacgctctatgttcggtttcatctttttctttaactagattcgctttcctgtttcttataggctattgttcaggtactaatttgccatagtgttggtctatgactgaatggtacaaaatgcatgcaatgaatggatgatactttccagttaaatcatgtaattggaatacagtggtgccgtcagtggtgcggattgggggcttctagagaaagggtctagcgtcgtgcccttcttgacgaacagtgtgttgatgtgtgccatcatcgcactgggaacgaacgtgatggctagcacggggagcatcttgagcatctgctttgtctccaccactcaccatgctctgagcctgtgttggtatgcagacttttccctttgtttcagaagaagatgcagttgcattgcacattgttagaacccacgatcaccacaaaattgagggaatatgtcataactcattagtcattaccttgtcaaggtttatgctttccatcacgaacggttggagttgcaacataacgatactttggtataccaaataaagttactctattcaccaaatcatgcagtgttagttttttgttgtgctaaatactgaatataatttgggtgtgttaatattttatttattgtctgcacatggttttctgatgatggctcatgaatcctgtaaaatacgtgttaggatttggagatccatgcgggcactaccacagtccatagggtgctcatctcttgtgttcttggctcttgcaagcattaggtcgtttctaaaatcacattggcacaatgaactctatggtgtttgaggttgctgaattggatggagcaacaatgatttgtcgcactaacagtaaaagaaacggttacttgttggttttaaatgttagtaattactacgaagtacaataatttgtatggagcatatccagtttagcaactattccatattttaatctatcttttttataagttttagttcatgtgacttattttagaaacttgaactcacaaactttctcttatttggtctctatatggtggaattatgtcattctataatctctgttcgtttattcagtcgttgtgaactctcttctaattgctcccttcattggttgtgttgtactaatacatattggatgaagtaaacagcaatatcagttagtcaaataaaaaaatattatgtggagagcgaagacaatcaataaaaaaccttgagatctttttggtggatagtttacgtgggtattgttgtgagccgtcgcaacgcacgggcaaccgactagtaaatatataagccatgtgtttcattagtaaaaataaggataattatttg

SEQ ID NO: 25375 - DNA, 3028 bp, Zea Mays
ccccatcccgcgcgtccatcttggtcaagaaaccccaacggcgcgtcgcccccaaaccttagaccccctgcggaaatctctagagccagggtctatccatgggccatcgctgtgcgccagctcttgctccatctctccgcggcggcagcgcaacagccgcccccatgaaagtcgccatcctcaccccccgcgagcctgccccatcccgcttagcgtcgtcccccgccgctgcgcagccgcgacccatctggataaggatgcatccgcttctcccatagccgccactacccctgcctgccctctgctacgaacacgaagataccctggatggaggtggagctctcagaggcttaagatctagaactctatcgcgtactacggattccacagggtgaggagagatacgagcaggtgtcccaccggcgatgcgggtccaatcttcggcattgggagcaatccgcctactcgaccacgaaggttctctgaggcggtgtagccagagatcatgcgggcaacagggaaggacgatagctacgcagcccacatcacgaaggcatataagtgggagttcgccgaaagggaaggtttgcaactggttgtgctaaatccagggactactctgggcccatttttcatgtcatcagtcaataccagcctgaataatctattgcaactcctaagaggttgaaaattaaccaggccaacgtcttgagttggaccctgtcaacacagggtgggtctatcaaggaggacaaacaggttggttgatgagagcaaaggagctttccaagaagttgattgatctgggcatttgtttccttccgtttgatgtgaccatcagggagaccgtcgattgcttcagaagcaaagggctcatctagccctgtgaacatttccagatgtacgttttattctatagaactgctacagtaatacttggctcatacaaattaaaccgcctaaacgcactggaaaaaattaaactacacgatgatgatataggtaccagggttactattgcttactagaatgaggcgagagctgcttagctcctttgacattccttctacttagtggcaattggtttggttacttgaacctatgctccatatgatccacgctgattgaattttggtttgttaatacattttgggcaagcagtgctatgagatggagatgatggttaggcatgatctttctataggttaaaagaacagattatccaacagctgatggaacctgcattagagatattatgttgatgtcacaaatttagttgatgctcatgtgaaagcgctcaacaaggcagacactagaaaagtcagtatttacaacgttggaacaggaagaggttttaatcagtactttacttaatttacatggtaacaagatagagaggcccgcaaatagttaatctgggacaacatatctctgtactggccatagaggacaacaaaaaaatcaaaagttgaagaatcaccaacggtgcctcctttgcaccctccggctcaagaacctaggcccgagccagttcaacaagtcatgcccacagctgaagtgctgaaccaacagatttactgggaatcaatgaatcagcccgaggcacatctgaaatagatcaaaacaaggtagtcgccttggtcgtggttccacatgataatccgccaaaagcaccttcttctaccagtcctggaagcgtggtgactagctggagcaattcagattctgtgcgttgaaaaggaagtgaaagaggctattgttcaggtactaatttgccatagtgttggtctatgactgaatggtacaaaatgcatgcaatgaatggatgatactttccagttaaatcatgtaattggaatacagtggtgccgtcagtggtgcggattgggggcttctagagaaagggtctagcgtcgtgcccttcttgacgaacagtgtgttgatgtgtgccatcatcgcactgggaacgaacgtgatggctagcacggggagcatcttgagcatctgctttgtctccaccactcaccatgctctgagcctgtgttggtatgcagacttttccctttgtttcagaagaagatgcagttgcattgcacattgttagaacccacgatcaccacaaaattgagggaatatgtcataactcattagtcattaccttgtcaaggtttatgctttccatcacgaacggttggagttgcaacataacgatactttggtataccaaataaagttactctattcaccaaatcatgcagtgttagttttttgttgtgctaaatactgaatataatttgggtgtgttaatattttatttattgtctgcacatggttttctgatgatggctcatgaatcctgtaaaatacgtgttaggatttggagatccatgcgggcactaccacagtccatagggtgctcatctcttgtgttcttggctcttgcaagcattaggtcgtttctaaaatcacattggcacaatgaactctatggtgtttgaggttgctgaattggatggagcaacaatgatttgtcgcactaacagtaaaagaaacggttacttgttggttttaaatgttagtaattactacgaagtacaataatttgtatggagcatatccagtttagcaactattccatattttaatctatcttttttataagttttagttcatgtgacttattttagaaacttgaactcacaaactttctcttatttggtctctatatggtggaattatgtcattctataatctctgttcgtttattcagtcgttgtgaactctcttctaattgctcccttcattggttgtgttgtactaatacatattggatgaagtaaacagcaatatcagttagtcaaataaaaaaatattatgtggagagcgaagacaatcaataaaaaaccttgagatctttttggtggatagtttacgtgggtattgttgtgagccgtcgcaacgcacgggcaaccgactagtaaatatataagccatgtgtttcattagtaaaaataaggataattatttg

SEQ ID NO: 25376 - DNA, 2867 bp, Zea Mays
ccccatcccgcgcgtccatcttggtcaagaaaccccaacggcgcgtcgcccccaaaccttagaccccctgcggaaatctctagagccagggtctatccatgggccatcgctgtgcgccagctcttgctccatctctccgcggcggcagcgcaacagccgcccccatgaaagtcgccatcctcaccccccgcgagcctgccccatcccgcttagcgtcgtcccccgccgctgcgcagccgcgacccatctggataaggatgcatccgcttctcccatagccgccactacccctgcctgccctctgctacgaacacgaagataccctggatggaggtggagctctcagaggcttaagatctagaactctatcgcgtactacggattccacagggtgaggagagatacgagcaggtgtcccaccggcgatgcgggtccaatcttcggcattgggagcaatccgcctactcgaccacgaaggttctctgaggcggtgtagccagagatcatgcgggcaacagggaaggacgatagctacgcagcccacatcacgaaggcatataagtgggagttcgccgaaagggaaggtttgcaactggttgtgctaaatccagggactactctgggcccatttttcatgtcatcagtcaataccagcctgaataatctattgcaactcctaagaggttgaaaattaaccaggccaacgtcttgagttggaccctgtcaacacagggtgggtctatcaaggaggacaaacaggttggttgatgagagcaaaggagctttccaagaagttgattgatctgggcatttgtttccttccgtttgatgtgaccatcagggagaccgtcgattgcttcagaagcaaagggctcatctagccctgtgaacatttccagatgtacgttttattctatagaactgctacagtaatacttggctcatacaaattaaaccgcctaaacgcactggaaaaaattaaactacacgatgatgatataggtaccagggttactattgcttactagaatgaggcgagagctgcttagctcctttgacattccttctacttagtggcaattggttaaaagaacagattatccaacagctgatggaacctgcattagagatattatgttgatgtcacaaatttagttgatgctcatgtgaaagcgctcaacaaggcagacactagaaaagtcagtatttacaacgttggaacaggaagagagaggcccgcaaatagttaatctgggacaacatatctctgtactggccatagaggacaacaaaaaaatcaaaagttgaagaatcaccaacggtgcctcctttgcaccctccggctcaagaacctaggcccgagccagttcaacaagtcatgcccacagctgaagtgctgaaccaacagatttactgtagggaatcaatgaatcagcccgaggcacatctgaaatagatcaaaacaaggtagtcgccttggtcgtggttccacatgataatccgccaaaagcaccttcttctaccagtcctggaagcgtggtgactagctggagcaattcagattctgtgcgttgaaaaggaagtgaaagaggctattgttcaggtactaatttgccatagtgttggtctatgactgaatggtacaaaatgcatgcaatgaatggatgatactttccagttaaatcatgtaattggaatacagtggtgccgtcagtggtgcggattgggggcttctagagaaagggtctagcgtcgtgcccttcttgacgaacagtgtgttgatgtgtgccatcatcgcactgggaacgaacgtgatggctagcacggggagcatcttgagcatctgctttgtctccaccactcaccatgctctgagcctgtgttggtatgcagacttttccctttgtttcagaagaagatgcagttgcattgcacattgttagaacccacgatcaccacaaaattgagggaatatgtcataactcattagtcattaccttgtcaaggtttatgctttccatcacgaacggttggagttgcaacataacgatactttggtataccaaataaagttactctattcaccaaatcatgcagtgttagttttttgttgtgctaaatactgaatataatttgggtgtgttaatattttatttattgtctgcacatggttttctgatgatggctcatgaatcctgtaaaatacgtgttaggatttggagatccatgcgggcactaccacagtccatagggtgctcatctcttgtgttcttggctcttgcaagcattaggtcgtttctaaaatcacattggcacaatgaactctatggtgtttgaggttgctgaattggatggagcaacaatgatttgtcgcactaacagtaaaagaaacggttacttgttggttttaaatgttagtaattactacgaagtacaataatttgtatggagcatatccagtttagcaactattccatattttaatctatcttttttataagttttagttcatgtgacttattttagaaacttgaactcacaaactttctcttatttggtctctatatggtggaattatgtcattctataatctctgttcgtttattcagtcgttgtgaactctcttctaattgctcccttcattggttgtgttgtactaatacatattggatgaagtaaacagcaatatcagttagtcaaataaaaaaatattatgtggagagcgaagacaatcaataaaaaaccttgagatctttttggtggatagtttacgtgggtattgttgtgagccgtcgcaacgcacgggcaaccgactagtaaatatataagccatgtgtttcattagtaaaaataaggataattatttg

SEQ ID NO: 25377 - DNA, 2915 bp, Zea Mays
ccccatcccgcgcgtccatcttggtcaagaaaccccaacggcgcgtcgcccccaaaccttagaccccctgcggaaatctctagagccagggtctatccatgggccatcgctgtgcgccagctcttgctccatctctccgcggcggcagcgcaacagccgcccccatgaaagtcgccatcctcaccccccgcgagcctgccccatcccgcttagcgtcgtcccccgccgctgcgcagccgcgacccatctggataaggatgcatccgcttctcccatagccgccactacccctgcctgccctctgctacgaacacgaagataccctggatggaggtggagctctcagaggcttaagatctagaactctatcgcgtactacggattccacagggtgaggagagatacgagcaggtgtcccaccggcgatgcgggtccaatcttcggcattgggagcaatccgcctactcgaccacgaaggttctctgaggcggtgtagccagagatcatgcgggcaacagggaaggacgatagctacgcagcccacatcacgaaggcatataagtgggagttcgccgaaagggaaggtttgcaactggttgtgctaaatccagggactactctgggcccatttttcatgtcatcagtcaataccagcctgaataatctattgcaactcctaagaggttgaaaattaaccaggccaacgtcttgagttggaccctgtcaacacagggtgggtctatcaaggaggacaaacaggttggttgatgagagcaaaggagctttccaagaagttgattgatctgggcatttgtttccttccgtttgatgtgaccatcagggagaccgtcgattgcttcagaagcaaagggctcatctagccctgtgaacatttccagatgttaaaagaacagattatccaacagctgatggaacctgcattagagatattatgttgatgtcacaaatttagttgatgctcatgtgaaagcgctcaacaaggcagacactagaaaagtcagtatttacaacgttggaacaggaagagagaggcccgcaaatagttaatctgggacaacatatctctgtactggccatagaggacaacaaaaaaatcaaaagttgaagaatcaccaacggtgcctcctttgcaccctccggctcaagaacctaggcccgagccagttcaacaagtcatgcccacagctgaagtgctgaaccaacagatttactgggaatcaatgaatcagcccgaggcacatctgaaatagatcaaaacaaggtagtcgccttggtcgtggttccacatgataatccgccaaaagcaccttcttctaccagtcctggaagcgtggtgactagctggagcaattcagattctgtgcgttgaaaaggaagtgaaagaggctattgttcaggtactaatttgccatagtgttggtctatgactgaatggtacaaaatgcatgcaatgaatggatgatactttccagttaaatcatgtaattggaatacagtggtgccgtcagtggtgcggattgggggcttctagagaaagggtctagcgtcgtgcccttcttgacgaacagtgtgttgatgtgtgccatcatcgcactgggaacgaacgtgatggctagcacggggagcatcttgagcatctgctttgtctccaccactcaccatgctctgagcctgtgttggtatgcagacttttccctttgtttcagaagaagatgcagttgcattgcacattgttagaacccacgatcaccacaaaattgagggaatatgtcataactcattagtcattaccttgtcaaggtttatgctttccatcacgaacggttggagttgcaacataacattcatggtagtaaattgggacagggctaatatagtgatgtatttccttccatagcaaacatcaatgatggcttatgggcttgtcttatgtagcgcttctgatttacaatgcatctgtctgaacttgtgtgctctaaaacatacagtgcttcagcaaccaacatacttgtctgctcatgacttttgatgtatcctgctcagttagtattattagtttcgtatataagctaaacgatactttggtataccaaataaagttactctattcaccaaatcatgcagtgttagttttttgttgtgctaaatactgaatataatttgggtgtgttaatattttatttattgtctgcacatggttttctgatgatggctcatgaatcctgtaaaatacgtgttaggatttggagatccatgcgggcactaccacagtccatagggtgctcatctcttgtgttcttggctcttgcaagcattaggtcgtttctaaaatcacattggcacaatgaactctatggtgtttgaggttgctgaattggatggagcaacaatgatttgtcgcactaacagtaaaagaaacggttacttgttggttttaaatgttagtaattactacgaagtacaataatttgtatggagcatatccagtttagcaactattccatattttaatctatcttttttataagttttagttcatgtgacttattttagaaacttgaactcacaaactttctcttatttggtctctatatggtggaattatgtcattctataatctctgttcgtttattcagtcgttgtgaactctcttctaattgctcccttcattggttgtgttgtactaatacatattggatgaagtaaacagcaatatcagttagtcaaataaaaaaatattatgtggagagcgaagacaatcaataaaaaaccttgagatctttttggtggatagtttacgtgggtattgttgtgagccgtcgcaacgcacgggcaaccgactagtaaatatataagccatgtgtttcattagtaaaaataaggataattatttg

SEQ ID NO: 25378 - DNA, 2798 bp, Zea Mays
ccccatcccgcgcgtccatcttggtcaagaaaccccaacggcgcgtcgcccccaaaccttagaccccctgcggaaatctctagagccagggtctatccatgggccatcgctgtgcgccagctcttgctccatctctccgcggcggcagcgcaacagccgcccccatgaaagtcgccatcctcaccccccgcgagcctgccccatcccgcttagcgtcgtcccccgccgctgcgcagccgcgacccatctggataaggatgcatccgcttctcccatagccgccactacccctgcctgccctctgctacgaacacgaagataccctggatggaggtggagctctcagaggcttaagatctagaactctatcgcgtactacggattccacagggtgaggagagatacgagcaggtgtcccaccggcgatgcgggtccaatcttcggcattgggagcaatccgcctactcgaccacgaaggttctctgaggcggtgtagccagagatcatgcgggcaacagggaaggacgatagctacgcagcccacatcacgaaggcatataagtgggagttcgccgaaagggaaggtttgcaactggttgtgctaaatccagggactactctgggcccatttttcatgtcatcagtcaataccagcctgaataatctattgcaactcctaagagggtgggtctatcaaggaggacaaacaggttggttgatgagagcaaaggagctttccaagaagttgattgatctgggcatttgtttccttccgtttgatgtgaccatcagggagaccgtcgattgcttcagaagcaaagggctcatctagccctgtgaacatttccagatgtaccagggttactattgcttactagaatgaggcgagagctgcttagctcctttgacattccttctacttagtggcaattggtttggttacttgaacctatgctccatatgatccacgctgattgaattttggtttgttaatacattttgggcaagcagtgctatgagatggagatgatggttaggcatgatctttctataggttaaaagaacagattatccaacagctgatggaacctgcattagagatattatgttgatgtcacaaatttagttgatgctcatgtgaaagcgctcaacaaggcagacactagaaaagtcagtatttacaacgttggaacaggaagaggtttggtaacacgagaattgtttatttatttgtataactattatttattcatatggatagttgtaccctgcacaggttttaatcagtactttacttaatttacatggtaacaagatagagaggcccgcaaatagttaatctgggacaacatatctctgtactggccatagaggacaacaaaaaaatcaaaagttgaagaatcaccaacggtgcctcctttgcaccctccggctcaagaacctaggcccgagccagttcaacaagtcatgcccacagctgaagtgctgaaccaacagatttactgggaatcaatgaatcagcccgaggcacatctgaaatagatcaaaacaaggtagtcgccttggtcgtggttccacatgataatccgccaaaagcaccttcttctaccagtcctggaagcgtggtgactagctggagcaattcagattctgtgcgttgaaaaggaagtgaaagaggtatatcttgtttacattaaaatatcaaagtactttgcagattttatttcagctctgttgcatgatgcactcgcactactgtctactgcaagtaccatcaccataaactctgaacgctctatgttcggtttcatctttttctttaactagattcgctttcctgtttcttataggctattgttcaggtactaatttgccatagtgttggtctatgactgaatggtacaaaatgcatgcaatgaatggatgatactttccagttaaatcatgtaattggaatacagtggtgccgtcagtggtgcggattgggggcttctagagaaagggtctagcgtcgtgcccttcttgacgaacagtgtgttgatgtgtgccatcatcgcactgggaacgaacgtgatggctagcacggggagcatcttgagcatctgctttgtctccaccactcaccatgctctgagcctgtgttggatttggagatccatgcgggcactaccacagtccatagggtgctcatctcttgtgttcttggctcttgcaagcattaggtcgtttctaaaatcacattggcacaatgaactctatggtgtttgaggttgctgaattggatggagcaacaatgatttgtcgcactaacagtaaaagaaacggttacttgttggttttaaatgttagtaattactacgaagtacaataatttgtatggagcatatccagtttagcaactattccatattttaatctatcttttttataagttttagttcatgtgacttattttagaaacttgaactcacaaactttctcttatttggtctctatatggtggaattatgtcattctataatctctgttcgtttattcagtcgttgtgaactctcttctaattgctcccttcattggttgtgttgtactaatacatattggatgaagtaaacagcaatatcagttagtcaaataaaaaaatattatgtggagagcgaagacaatcaataaaaaaccttgagatctttttggtggatagtttacgtgggtattgttgtgagccgtcgcaacgcacgggcaaccgactagtaaatatataagccatgtgtttcattagtaaaaataaggataattatttg

SEQ ID NO: 25379 - DNA, 2790 bp, Zea Mays
ccgaatttagcgaagtgaatctcagtgttgcatagtggtttgatggaagtacatgctctttccgagctgaaatgtcagttctccatgaaatagagctatcgataagctaaggcaatgaagatttctaatctggatgcacacttaatcttgtccagttcttgatcttgggctttgctgcttcctctcaagttagtttgttggccaatcgagtccagaggcgcagatgagtgaggagtacaatatggatgtggccctaaaagccaaaaatgttgctgagaccaagttccatgcccgagacatcaggggtgctcggaagtatgcactcaaggcccagaatctctgcccaacacttgaaggcatattgcagatggtctcaacgcttgaagttcatcttgcagctgagtccaagattgatggagagagtgactggtataggatattgtgtctaggtgcctttgcagatgaagaggaggtgaggaagcaatataggaagctagctctgctgctgcacccagacaagaacaagtctgttggtgctgaggaggccttcaaactgatctctgaggcgtggagtgtgttgtcagatactagcaggaaggtagtttatgatgagaagcgaagaaatcattctgttgtcaatgtaaccaatggcatttatacctatgataagaaggcaaacaagagggctcgaaagaatgctgctgctgcagctgctgccgctgctgctgccgctgcagctgaggctactactcgtcctgttgggattgatacattttggacatcttgcaaccgctgccggatgcagtatgagtacttaaggatttatcttaatcataacctgttgtgcccaaattgccataatgcattcttggcagtggagactgggttcccttgcaatggaagcagctcatcattctcatggtcaaccaagcagcagccgcagcagaaccacaattcaaccaagcattcatatggctcaacaagcaggacttctagcatccctggtacagggaatggggggtaccagcaagataatacttatgattcttacaacaatcaaggcttccagtggaatcagtactccaagacaacaactgcagctgttactaatgcttatagtacacaggccttggagaaacagagaaggaagcatgacgagagctacagctacaactattctgaaagcggcaacacatatgttcatgagaaagctgcttcaaggcgcggtcgcttctcaaagcggagaaggcataactatgatgcttataccactgtggattatggtggcgataacaaagaaacagttgctgcaactgcaagcacagaaccaactgctgtttttactgatgtgggacgggtcaatggtacttcagtggaaaggtttaaatctgcagtgagtggaagaagagcaaatattctgggtgagattacccagattgatacacgaaatttacttcttgagaaagccaaggcaactgtctgtgaaaaattgcatgaattaaacatcacaccatcttcacgagctgcagatagaagaggatctgaaggaaagctgtatccttgtgacaacaacataaaggtcaacggtgtcctctctgacaaacctggcaagggagtcaagctatgcaactcaagaagcatggaaatccaagtgcctgctaccgatgacaaaaatccagagcaacgccgtgtgcctgtgtccatcgatgtcccagaccctgacttccatgatttcgataaagaccgaacggagaaggcttttgatactgatcaagtatgggctacctatgactgcgaggacggcatgccccgcctatatgtaatggttcagaaagttctttcaacgaggcccttccggatccgcatgagctttctcaactcgaagtcaaatatcgaactggcgcctataaactgggtcgcctctggtttccaaaagacatgtggtgacttcagggttgggagatatcaggttgccggattcaaagccgtcttccacagacacgtggatcccgaggaggtgaggaggataccaaaggaagagctgttccggttctcgcaccgggttccttctcgtctcctgacgggcgaagagggcagcaatgccccgaaaggctgccatgagctggaccctgctgccactccagtggaccttctcaaggttatcacggagcacaaggaagacgcggtggcgcagagtcctaaataggagtgagcgactccgataacagcgaagataaggtagctggatgtctgagtgaccagatccccacttggttaatgacagcgtgccagcacatgatggtgtctaaagctctactacgccatcttattttcggctgatggcttggacaacacttccagggcaagcagcctgtgtgtgtgtgtgacggacttctgaccttgttaattcttaggcattcctaacatttgattctatcactacacaagccaaccgccacgtagattaaatggccattgggaggaggccggccgcgcacggcaccgagatgagatgaggaggttagtcacggaggtagggagggtgaagatgttacttgtttgtgttgctcactctgtaatgtaggaggcaggctcgagccgagggaaagagctgcttggctttgcttgcccatgtaccccgcatttctgtacctgtttttttacttatgatgatgatgatgtatttccttcttgttttatagtagtaagtaattcacggccagtaattgtagactctggtaaccgtttcggaaaatctagtgctttatctggtggatgattctgtctgac

SEQ ID NO: 25380 - DNA, 3111 bp, Zea Mays
cagatccaaacaccatggtctccgttccccatgagcccatgaaccaaacacatagtcagttccttctcttcttaaggctgtggatcacgcggatcgaggcgtttcttcgattctagctggggtttgggggaggtgttcgtgaactggattcaaggcccaggcagtgaagatttctaatctggatgtacttaactgcaggctaaggcaatgaagatttctaatctggatgcacacttaatcttgtccagttcttgatcttgggctttgctgcttcctctcaagttagtttgttggccaatcgagtccagaggcgcagatgagtgaggagtacaatatggatgtggccctaaaagccaaaaatgttgctgagaccaagttccatgcccgagacatcaggggtgctcggaagtatgcactcaaggcccagaatctctgcccaacacttgaaggcatattgcagatggtctcaacgcttgaagttcatcttgcagctgagtccaagattgatggagagagtgactggtataggatattgtgtctaggtgcctttgcagatgaagaggaggtgaggaagcaatataggaagctagctctgctgctgcacccagacaagaacaagtctgttggtgctgaggaggccttcaaactgatctctgaggcgtggagtgtgttgtcagatactagcaggaaggtagtttatgatgagaagcgaagaaatcattctgttgtcaatgtaaccaatggcatttatacctatgataagaaggcaaacaagagggctcgaaagaatgctgctgctgcagctgctgccgctgctgctgccgctgcagctgaggctactactcgtcctgttgggattgatacattttggacatcttgcaaccgctgccggatgcagtatgagtacttaaggatttatcttaatcataacctgttgtgcccaaattgccataatgcattcttggcagtggagactgggttcccttgcaatggaagcagctcatcattctcatggtcaaccaagcagcagccgcagcagaaccacaattcaaccaagcattcatatggctcaacaagcaggacttctagcatccctggtacagggaatggggggtaccagcaagataatacttatgattcttacaacaatcaaggcttccagtggaatcagtactccaagacaacaactgcagctgttactaatgcttatagtacacaggccttggagaaacagagaaggaagcatgacgagagctacagctacaactattctgaaagcggcaacacatatgttcatgagaaagctgcttcaaggcgcggtcgcttctcaaagcggagaaggcataactatgatgcttataccactgtggattatggtggcgataacaaagaaacagttgctgcaactgcaagcacagaaccaactgctgtttttactgatgtgggacgggtcaatggtacttcagtggaaaggtttaaatctgcagtgagtggaagaagagcaaatattctgggtgagattacccagattgatacacgaaatttacttcttgagaaagccaaggcaactgtctgtgaaaaattgcatgaattaaacatcacaccatcttcacgagctgcagatagaagaggatctgaaggaaagctgtatccttgtgacaacaacataaaggtcaacggtgtcctctctgacaaacctggcaagggagtcaagctatgcaactcaagaagcatggaaatccaagtgcctgctaccgatgacaaaaatccagagcaacgccgtgtgcctgtgtccatcgatgtcccagaccctgacttccatgatttcgataaagaccgaacggagaaggcttttgatactgatcaagtatgggctacctatgactgcgaggacggcatgccccgcctatatgtaatggttcagaaagttctttcaacgaggcccttccggatccgcatgagctttctcaactcgaagtcaaatatcgaactggcgcctataaactgggtcgcctctggtttccaaaagacatgtggtgacttcagggttgggagatatcaggtgagcgaaacggtgaacatattttcacatagagtgaggtggactaaaggtccccgtggcatcatcaggatcgttccccagaaaggggacacgtgggccttgtaccgtaactggtcccccgactggaacgagctgacgcctgatgacgtgatatacaagtacgagatagtggaagtcgctgatgatttcactgaggagcgagggctgactgtcatcccgttgctgaaggttgccggattcaaagccgtcttccacagacacgtggatcccgaggaggtgaggaggataccaaaggaagagctgttccggttctcgcaccgggttccttctcgtctcctgacgggcgaagagggcagcaatgccccgaaaggctgccatgagctggaccctgctgccactccagtggaccttctcaaggttatcacggagcacaaggaagacgcggtggcgcagagtcctaaataggagtgagcgactccgataacagcgaagataaggtagctggatgtctgagtgaccagatccccacttggttaatgacagcgtgccagcacatgatggtgtctaaagctctactacgccatcttattttcggctgatggcttggacaacacttccagggcaagcagcctgtgtgtgtgtgtgacggacttctgaccttgttaattcttaggcattcctaacatttgattctatcactacacaagccaaccgccacgtagattaaatggccattgggaggaggccggccgcgcacggcaccgagatgagatgaggaggttagtcacggaggtagggagggtgaagatgttacttgtttgtgttgctcactctgtaatgtaggaggcaggctcgagccgagggaaagagctgcttggctttgcttgcccatgtaccccgcatttctgtacctgtttttttacttatgatgatgatgatgtatttccttcttgttttatagtagtaagtaattcacggccagtaattgtagactctggtaaccgtttcggaaaatctagtgctttatctggtggatgattctgtctgac

SEQ ID NO: 25381 - DNA, 2983 bp, Zea Mays
gttttttcgagcttgctcctgccccgaaataaaattcggggccccaaaaattcgcaattctgggggctggccccccgaattagcgcgcctcccggagatccggcgccggcccaggcagtgaagatttctaatctggatgtacttaactgcaggctaagtttgttggccaatcgagtccagaggcgcagatgagtgaggagtacaatatggatgtggccctaaaagccaaaaatgttgctgagaccaagttccatgcccgagacatcaggggtgctcggaagtatgcactcaaggcccagaatctctgcccaacacttgaaggcatattgcagatggtctcaacgcttgaagttcatcttgcagctgagtccaagattgatggagagagtgactggtataggatattgtgtctaggtgcctttgcagatgaagaggaggtgaggaagcaatataggaagctagctctgctgctgcacccagacaagaacaagtctgttggtgctgaggaggccttcaaactgatctctgaggcgtggagtgtgttgtcagatactagcaggaaggtagtttatgatgagaagcgaagaaatcattctgttgtcaatgtaaccaatggcatttatacctatgataagaaggcaaacaagagggctcgaaagaatgctgctgctgcagctgctgccgctgctgctgccgctgcagctgaggctactactcgtcctgttgggattgatacattttggacatcttgcaaccgctgccggatgcagtatgagtacttaaggatttatcttaatcataacctgttgtgcccaaattgccataatgcattcttggcagtggagactgggttcccttgcaatggaagcagctcatcattctcatggtcaaccaagcagcagccgcagcagaaccacaattcaaccaagcattcatatggctcaacaagcaggacttctagcatccctggtacagggaatggggggtaccagcaagataatacttatgattcttacaacaatcaaggcttccagtggaatcagtactccaagacaacaactgcagctgttactaatgcttatagtacacaggccttggagaaacagagaaggaagcatgacgagagctacagctacaactattctgaaagcggcaacacatatgttcatgagaaagctgcttcaaggcgcggtcgcttctcaaagcggagaaggcataactatgatgcttataccactgtggattatggtggcgataacaaagaaacagttgctgcaactgcaagcacagaaccaactgctgtttttactgatgtgggacgggtcaatggtacttcagtggaaaggtttaaatctgcagtgagtggaagaagagcaaatattctgggtgagattacccagattgatacacgaaatttacttcttgagaaagccaaggcaactgtctgtgaaaaattgcatgaattaaacatcacaccatcttcacgagctgcagatagaagaggatctgaaggaaagctgtatccttgtgacaacaacataaaggtcaacggtgtcctctctgacaaacctggcaagggagtcaagctatgcaactcaagaagcatggaaatccaagtgcctgctaccgatgacaaaaatccagagcaacgccgtgtgcctgtgtccatcgatgtcccagaccctgacttccatgatttcgataaagaccgaacggagaaggcttttgatactgatcaagtatgggctacctatgactgcgaggacggcatgccccgcctatatgtaatggttcagaaagttctttcaacgaggcccttccggatccgcatgagctttctcaactcgaagtcaaatatcgaactggcgcctataaactgggtcgcctctggtttccaaaagacatgtggtgacttcagggttgggagatatcaggtgagcgaaacggtgaacatattttcacatagagtgaggtggactaaaggtccccgtggcatcatcaggatcgttccccagaaaggggacacgtgggccttgtaccgtaactggtcccccgactggaacgagctgacgcctgatgacgtgatatacaagtacgagatagtggaagtcgctgatgatttcactgaggagcgagggctgactgtcatcccgttgctgaaggttgccggattcaaagccgtcttccacagacacgtggatcccgaggaggtgaggaggataccaaaggaagagctgttccggttctcgcaccgggttccttctcgtctcctgacgggcgaagagggcagcaatgccccgaaaggctgccatgagctggaccctgctgccactccagtggaccttctcaaggttatcacggagcacaaggaagacgcggtggcgcagagtcctaaataggagtgagcgactccgataacagcgaagataaggtagctggatgtctgagtgaccagatccccacttggttaatgacagcgtgccagcacatgatggtgtctaaagctctactacgccatcttattttcggctgatggcttggacaacacttccagggcaagcagcctgtgtgtgtgtgtgacggacttctgaccttgttaattcttaggcattcctaacatttgattctatcactacacaagccaaccgccacgtagattaaatggccattgggaggaggccggccgcgcacggcaccgagatgagatgaggaggttagtcacggaggtagggagggtgaagatgttacttgtttgtgttgctcactctgtaatgtaggaggcaggctcgagccgagggaaagagctgcttggctttgcttgcccatgtaccccgcatttctgtacctgtttttttacttatgatgatgatgatgtatttccttcttgttttatagtagtaagtaattcacggccagtaattgtagactctggtaaccgtttcggaaaatctagtgctttatctggtggatgattctgtctgac

SEQ ID NO: 25382 - DNA, 2837 bp, Zea Mays
gtcgtgtattgcaaaatttcggaggctttgactaaaaaagcttcgttttttcgagcttgctcctgccccgaaataaaattcggggccccaaaaattcgcaattctgggggctggccccccgaattagcgcgcctcccggagatccggcgccggctaaggcaatgaagatttctaatctggatgcacacttaatcttgtccagttcttgatcttgggctttgctgcttcctctcaagttagtttgttggccaatcgagtccagaggcgcagatgagtgaggagtacaatatggatgtggccctaaaagccaaaaatgttgctgagaccaagttccatgcccgagacatcaggggtgctcggaagtatgcactcaaggcccagaatctctgcccaacacttgaaggcatattgcagatggtctcaacgcttgaagttcatcttgcagctgagtccaagattgatggagagagtgactggtataggatattgtgtctaggtgcctttgcagatgaagaggaggtgaggaagcaatataggaagctagctctgctgctgcacccagacaagaacaagtctgttggtgctgaggaggccttcaaactgatctctgaggcgtggagtgtgttgtcagatactagcaggaaggtagtttatgatgagaagcgaagaaatcattctgttgtcaatgtaaccaatggcatttatacctatgataagaaggcaaacaagagggctcgaaagaatgctgctgctgcagctgctgccgctgctgctgccgctgcagctgaggctactactcgtcctgttgggattgatacattttggacatcttgcaaccgctgccggatgcagtatgagtacttaaggatttatcttaatcataacctgttgtgcccaaattgccataatgcattcttggcagtggagactgggttcccttgcaatggaagcagctcatcattctcatggtcaaccaagcagcagccgcagcagaaccacaattcaaccaagcattcatatggctcaacaagcaggacttctagcatccctggtacagggaatggggggtaccagcaagataatacttatgattcttacaacaatcaaggcttccagtggaatcagtactccaagacaacaactgcagctgttactaatgcttatagtacacaggccttggagaaacagagaaggaagcatgacgagagctacagctacaactattctgaaagcggcaacacatatgttcatgagaaagctgcttcaaggcgcggtcgcttctcaaagcggagaaggcataactatgatgcttataccactgtggattatggtggcgataacaaagaaacagttgctgcaactgcaagcacagaaccaactgctgtttttactgatgtgggacgggtcaatggtacttcagtggaaaggtttaaatctgcagtgagtggaagaagagcaaatattctgggtgagattacccagattgatacacgaaatttacttcttgagaaagccaaggcaactgtctgtgaaaaattgcatgaattaaacatcacaccatcttcacgagctgcagatagaagaggatctgaaggaaagctgtatccttgtgacaacaacataaaggtcaacggtgtcctctctgacaaacctggcaagggagtcaagctatgcaactcaagaagcatggaaatccaagtgcctgctaccgatgacaaaaatccagagcaacgccgtgtgcctgtgtccatcgatgtcccagaccctgacttccatgatttcgataaagaccgaacggagaaggcttttgatactgatcaagtatgggctacctatgactgcgaggacggcatgccccgcctatatgtaatggttcagaaagttctttcaacgaggcccttccggatccgcatgagctttctcaactcgaagtcaaatatcgaactggcgcctataaactgggtcgcctctggtttccaaaagacatgtggtgacttcagggttgggagatatcaggttgccggattcaaagccgtcttccacagacacgtggatcccgaggaggtgaggaggataccaaaggaagagctgttccggttctcgcaccgggttccttctcgtctcctgacgggcgaagagggcagcaatgccccgaaaggctgccatgagctggaccctgctgccactccagtggaccttctcaaggttatcacggagcacaaggaagacgcggtggcgcagagtcctaaataggagtgagcgactccgataacagcgaagataaggtagctggatgtctgagtgaccagatccccacttggttaatgacagcgtgccagcacatgatggtgtctaaagctctactacgccatcttattttcggctgatggcttggacaacacttccagggcaagcagcctgtgtgtgtgtgtgacggacttctgaccttgttaattcttaggcattcctaacatttgattctatcactacacaagccaaccgccacgtagattaaatggccattgggaggaggccggccgcgcacggcaccgagatgagatgaggaggttagtcacggaggtagggagggtgaagatgttacttgtttgtgttgctcactctgtaatgtaggaggcaggctcgagccgagggaaagagctgcttggctttgcttgcccatgtaccccgcatttctgtacctgtttttttacttatgatgatgatgatgtatttccttcttgttttatagtagtaagtaattcacggccagtaattgtagactctggtaaccgtttcggaaaatctagtgctttatctggtggatgattctgtctgac

SEQ ID NO: 25383 - DNA, 2881 bp, Zea Mays
gtcgtgtattgcaaaatttcggaggctttgactaaaaaagcttcgttttttcgagcttgctcctgccccgaaataaaattcggggccccaaaaattcgcaattctgggggctggccccccgaattagcgcgcctcccggagatccggcgccggcccaggcagtgaagatttctaatctggatgtacttaactgcaggctaaggcaatgaagatttctaatctggatgcacacttaatcttgtccagttcttgatcttgggctttgctgcttcctctcaagttagtttgttggccaatcgagtccagaggcgcagatgagtgaggagtacaatatggatgtggccctaaaagccaaaaatgttgctgagaccaagttccatgcccgagacatcaggggtgctcggaagtatgcactcaaggcccagaatctctgcccaacacttgaaggcatattgcagatggtctcaacgcttgaagttcatcttgcagctgagtccaagattgatggagagagtgactggtataggatattgtgtctaggtgcctttgcagatgaagaggaggtgaggaagcaatataggaagctagctctgctgctgcacccagacaagaacaagtctgttggtgctgaggaggccttcaaactgatctctgaggcgtggagtgtgttgtcagatactagcaggaaggtagtttatgatgagaagcgaagaaatcattctgttgtcaatgtaaccaatggcatttatacctatgataagaaggcaaacaagagggctcgaaagaatgctgctgctgcagctgctgccgctgctgctgccgctgcagctgaggctactactcgtcctgttgggattgatacattttggacatcttgcaaccgctgccggatgcagtatgagtacttaaggatttatcttaatcataacctgttgtgcccaaattgccataatgcattcttggcagtggagactgggttcccttgcaatggaagcagctcatcattctcatggtcaaccaagcagcagccgcagcagaaccacaattcaaccaagcattcatatggctcaacaagcaggacttctagcatccctggtacagggaatggggggtaccagcaagataatacttatgattcttacaacaatcaaggcttccagtggaatcagtactccaagacaacaactgcagctgttactaatgcttatagtacacaggccttggagaaacagagaaggaagcatgacgagagctacagctacaactattctgaaagcggcaacacatatgttcatgagaaagctgcttcaaggcgcggtcgcttctcaaagcggagaaggcataactatgatgcttataccactgtggattatggtggcgataacaaagaaacagttgctgcaactgcaagcacagaaccaactgctgtttttactgatgtgggacgggtcaatggtacttcagtggaaaggtttaaatctgcagtgagtggaagaagagcaaatattctgggtgagattacccagattgatacacgaaatttacttcttgagaaagccaaggcaactgtctgtgaaaaattgcatgaattaaacatcacaccatcttcacgagctgcagatagaagaggatctgaaggaaagctgtatccttgtgacaacaacataaaggtcaacggtgtcctctctgacaaacctggcaagggagtcaagctatgcaactcaagaagcatggaaatccaagtgcctgctaccgatgacaaaaatccagagcaacgccgtgtgcctgtgtccatcgatgtcccagaccctgacttccatgatttcgataaagaccgaacggagaaggcttttgatactgatcaagtatgggctacctatgactgcgaggacggcatgccccgcctatatgtaatggttcagaaagttctttcaacgaggcccttccggatccgcatgagctttctcaactcgaagtcaaatatcgaactggcgcctataaactgggtcgcctctggtttccaaaagacatgtggtgacttcagggttgggagatatcaggttgccggattcaaagccgtcttccacagacacgtggatcccgaggaggtgaggaggataccaaaggaagagctgttccggttctcgcaccgggttccttctcgtctcctgacgggcgaagagggcagcaatgccccgaaaggctgccatgagctggaccctgctgccactccagtggaccttctcaaggttatcacggagcacaaggaagacgcggtggcgcagagtcctaaataggagtgagcgactccgataacagcgaagataaggtagctggatgtctgagtgaccagatccccacttggttaatgacagcgtgccagcacatgatggtgtctaaagctctactacgccatcttattttcggctgatggcttggacaacacttccagggcaagcagcctgtgtgtgtgtgtgacggacttctgaccttgttaattcttaggcattcctaacatttgattctatcactacacaagccaaccgccacgtagattaaatggccattgggaggaggccggccgcgcacggcaccgagatgagatgaggaggttagtcacggaggtagggagggtgaagatgttacttgtttgtgttgctcactctgtaatgtaggaggcaggctcgagccgagggaaagagctgcttggctttgcttgcccatgtaccccgcatttctgtacctgtttttttacttatgatgatgatgatgtatttccttcttgttttatagtagtaagtaattcacggccagtaattgtagactctggtaaccgtttcggaaaatctagtgctttatctggtggatgattctgtctgac

SEQ ID NO: 25384 - DNA, 3077 bp, Zea Mays
cagcacattgccgtcgtgtattgcaaaatttcggaggctttgactaaaaaagcttcgttttttcgagcttgctcctgccccgaaataaaattcggggccccaaaaattcgcaattctgggggctggccccccgaattagcgcgcctcccggagatccggcgccggctaaggcaatgaagatttctaatctggatgcacacttaatcttgtccagttcttgatcttgggctttgctgcttcctctcaagttagtttgttggccaatcgagtccagaggcgcagatgagtgaggagtacaatatggatgtggccctaaaagccaaaaatgttgctgagaccaagttccatgcccgagacatcaggggtgctcggaagtatgcactcaaggcccagaatctctgcccaacacttgaaggcatattgcagatggtctcaacgcttgaagttcatcttgcagctgagtccaagattgatggagagagtgactggtataggatattgtgtctaggtgcctttgcagatgaagaggaggtgaggaagcaatataggaagctagctctgctgctgcacccagacaagaacaagtctgttggtgctgaggaggccttcaaactgatctctgaggcgtggagtgtgttgtcagatactagcaggaaggtagtttatgatgagaagcgaagaaatcattctgttgtcaatgtaaccaatggcatttatacctatgataagaaggcaaacaagagggctcgaaagaatgctgctgctgcagctgctgccgctgctgctgccgctgcagctgaggctactactcgtcctgttgggattgatacattttggacatcttgcaaccgctgccggatgcagtatgagtacttaaggatttatcttaatcataacctgttgtgcccaaattgccataatgcattcttggcagtggagactgggttcccttgcaatggaagcagctcatcattctcatggtcaaccaagcagcagccgcagcagaaccacaattcaaccaagcattcatatggctcaacaagcaggacttctagcatccctggtacagggaatggggggtaccagcaagataatacttatgattcttacaacaatcaaggcttccagtggaatcagtactccaagacaacaactgcagctgttactaatgcttatagtacacaggccttggagaaacagagaaggaagcatgacgagagctacagctacaactattctgaaagcggcaacacatatgttcatgagaaagctgcttcaaggcgcggtcgcttctcaaagcggagaaggcataactatgatgcttataccactgtggattatggtggcgataacaaagaaacagttgctgcaactgcaagcacagaaccaactgctgtttttactgatgtgggacgggtcaatggtacttcagtggaaaggtttaaatctgcagtgagtggaagaagagcaaatattctgggtgagattacccagattgatacacgaaatttacttcttgagaaagccaaggcaactgtctgtgaaaaattgcatgaattaaacatcacaccatcttcacgagctgcagatagaagaggatctgaaggaaagctgtatccttgtgacaacaacataaaggtcaacggtgtcctctctgacaaacctggcaagggagtcaagctatgcaactcaagaagcatggaaatccaagtgcctgctaccgatgacaaaaatccagagcaacgccgtgtgcctgtgtccatcgatgtcccagaccctgacttccatgatttcgataaagaccgaacggagaaggcttttgatactgatcaagtatgggctacctatgactgcgaggacggcatgccccgcctatatgtaatggttcagaaagttctttcaacgaggcccttccggatccgcatgagctttctcaactcgaagtcaaatatcgaactggcgcctataaactgggtcgcctctggtttccaaaagacatgtggtgacttcagggttgggagatatcaggtgagcgaaacggtgaacatattttcacatagagtgaggtggactaaaggtccccgtggcatcatcaggatcgttccccagaaaggggacacgtgggccttgtaccgtaactggtcccccgactggaacgagctgacgcctgatgacgtgatatacaagtacgagatagtggaagtcgctgatgatttcactgaggagcgagggctgactgtcatcccgttgctgaaggttgccggattcaaagccgtcttccacagacacgtggatcccgaggaggtgaggaggataccaaaggaagagctgttccggttctcgcaccgggttccttctcgtctcctgacgggcgaagagggcagcaatgccccgaaaggctgccatgagctggaccctgctgccactccagtggaccttctcaaggttatcacggagcacaaggaagacgcggtggcgcagagtcctaaataggagtgagcgactccgataacagcgaagataaggtagctggatgtctgagtgaccagatccccacttggttaatgacagcgtgccagcacatgatggtgtctaaagctctactacgccatcttattttcggctgatggcttggacaacacttccagggcaagcagcctgtgtgtgtgtgtgacggacttctgaccttgttaattcttaggcattcctaacatttgattctatcactacacaagccaaccgccacgtagattaaatggccattgggaggaggccggccgcgcacggcaccgagatgagatgaggaggttagtcacggaggtagggagggtgaagatgttacttgtttgtgttgctcactctgtaatgtaggaggcaggctcgagccgagggaaagagctgcttggctttgcttgcccatgtaccccgcatttctgtacctgtttttttacttatgatgatgatgatgtatttccttcttgttttatagtagtaagtaattcacggccagtaattgtagactctggtaaccgtttcggaaaatctagtgctttatctggtggatgattctgtctgac

SEQ ID NO: 25385 - DNA, 2967 bp, Zea Mays
atgtccatatccattccacttccacccatccccgtggcttctgtctgctgcgaccctgctccactccgtctgcatcacctgtcacggttgtcacctccaccacggctccagctccacccgcgctggtttagggccgctgctgggcgggtgacgagcgcggctgtcggattccgccgagcctcagtatgcgggcagcgggcgcggcctccgcctccgccacaccagccctggcgttccccttgtcttcccctatatatacagatcgatgtgtgttgttatctttattggaacaaatggccagacgtatttcatcacggcttcacttgttacaagcatccagaatttcccaaagagcaggggcccaacagtgggcatcctcaaaggatttatgggcctaactagcgccattctgacacaagtttatacagtgatgcacacaccagaccatgctgcgcttatcttcatggttgctgttggtccgtcgctggttgccattggcttgatgtttgttattaggcctgttggtggtcacaggcagatacggccatctgacaagaacagcttcatgttcatctacactgtatgcttgctcctcgcctcataccttgtcggtgctatgcttgtccaagatttcctgcaaccaagctatgatgtggttgtttttctgactgtgattctgttcgtcctccttatttcaccaatcgcaatccctgtgattgtgtcgttcatgccggaaaaagctcaacatctcatggaagatgctctcctatctgaaccattgacaggagaggcaagcagttcacgacaaaaggaggatcaaccagaggtcattttaagtgaggtagaagaggagaagtctaaggaaactgattcattgccgccatctgaaaggagaaagaggattgcggaattgcaggccaagctagtggaagcagcggcaagaggtggggttagaatcaaaagaaggccacaccgaggggataacttcaccctgatgcaggcattggtgaaggctgatttttggcttatttggctatcacttttgcttgggtcgggatcagggctgacagtgattgataacctgggtcagatgagccaggctattggttataaaaatgcacatatctttgtgtcactggtgagcatatggaactttcttggtcgtgttggaggtggctacttctctgagatcattgtcagggaacgtacatacccaaggcacatagcattggcagttgctcagatcgtgatggctgctgggcatttcctctttgctatggcttggcctggaactatgtacattgcgagcttgctggttggacttggatatggagctcactgggctattgtgccagctgctgtctccgagctttttggtgtaaaacactttggtgcgatgtacaattttctcatactagcgaaccccgcaggatccctcatcttctcagagctaattgtcagcaacctctatgaacatgaagctgagaaacaagctagccaacaccagatgtcagcattgctgtctccacgattgcttcgtgatactggctttcttgcagatgatgcactcaagtgtgaagggcctgcttgtttctttttcagctctctgattatgtcggtgttctgtgctgttgccgctgggttgagcctcctcgtcgttcaaaggaccagacaagtttatcctcgcctctacagttctgtccggacttgagattctccaattctgcatggatgggaagctcaaatcctcgtattctatgtccgtttattcttgcatacatatgcacaaagataagtatgtgaataaattctcaaatcttttcctaagctggtattgtaaaaacagatattcttgaatggattgtcccttgtgacttgcgtatggattctggcacttgctgtcctgaaaagaaactatccctctccttttttttgaagcaattactgtatggagttcctacaatatttttctattaaatatgggtatgtacaagtgtaagtattcaaattacaaggaaatcaactataaacatgatttaattttggctgctatttggggttttactctatgacaaagaatcatttcttttacaaacatttctttgcatattgtcgccatgggggtttattctcaaagatccatccatttctgcattttcatatgcaccaaaccatgatgatgataatctccatcctccaagttttcgttagttgcgcaggcatatgttgcacagctagaaattgattggaagtgcgcggtggtacaaccctatcagttgccagcatctttctgtataattgcatttcaggaagagatgcgagatagtttcttccttctggcgaatgcagttttcacatgtatacgagtcaagttccatgttcctccttttgagcatagatcttatgttcaatctatttttcaggaaaagccagaagaataccttgtgtttcggttgacattttgttttctacaaccagacataggcggggtggactgcctcgttcccagtttataagctttcggcgctgagtattggactgtcccccaatgtatacccatttgtcatgatggtcagatagttgttgtctttataaggattcaaacaggatttagtattgctcataagctatttctgacattggggtgtgaaacaaattgtgagggtattccacatcttttgcatgtattattgtaatatccttattcctgacaaaagaaaaaagctcagggaaagcatattcaggcactcggttgtctcactagtccaaccatagttgtttagtcctgtcgtcctctatcatcaccctatagaaccccttgaaagtgttcattgtctttaatacatatttccaccagaaagatcacacctcccttgagaaaggtattgttccacccaagtaatgcttgcttgttccaaacgatgtttacccacggtatattgatctgttgaagaatttgtgcatgag

SEQ ID NO: 25386 - DNA, 2885 bp, Zea Mays
atgtccatatccattccacttccacccatccccgtggcttctgtctgctgcgaccctgctccactccgtctgcatcacctgtcacggttgtcacctccaccacggctccagctccacccgcgctggtttagggccgctgctgggcgggtgacgagcgcggctgtcggattccgccgagcctcaatgtgtgttgttatctttattggaacaaatggccagacgtatttcatcacggcttcacttgttacaagcatccagaatttcccaaagagcaggggcccaacagtgggcatcctcaaaggatttatgggcctaactagcgccattctgacacaagtttatacagtgatgcacacaccagaccatgctgcgcttatcttcatggttgctgttggtccgtcgctggttgccattggcttgatgtttgttattaggcctgttggtggtcacaggcagatacggccatctgacaagaacagcttcatgttcatctacactgtatgcttgctcctcgcctcataccttgtcggtgctatgcttgtccaagatttcctgcaaccaagctatgatgtggttgtttttctgactgtgattctgttcgtcctccttatttcaccaatcgcaatccctgtgattgtgtcgttcatgccggaaaaagctcaacatctcatggaagatgctctcctatctgaaccattgacaggagaggcaagcagttcacgacaaaaggaggatcaaccagaggtcattttaagtgaggtagaagaggagaagtctaaggaaactgattcattgccgccatctgaaaggagaaagaggattgcggaattgcaggccaagctagtggaagcagcggcaagaggtggggttagaatcaaaagaaggccacaccgaggggataacttcaccctgatgcaggcattggtgaaggctgatttttggcttatttggctatcacttttgcttgggtcgggatcagggctgacagtgattgataacctgggtcagatgagccaggctattggttataaaaatgcacatatctttgtgtcactggtgagcatatggaactttcttggtcgtgttggaggtggctacttctctgagatcattgtcagggaacgtacatacccaaggcacatagcattggcagttgctcagatcgtgatggctgctgggcatttcctctttgctatggcttggcctggaactatgtacattgcgagcttgctggttggacttggatatggagctcactgggctattgtgccagctgctgtctccgagctttttggtgtaaaacactttggtgcgatgtacaattttctcatactagcgaaccccgcaggatccctcatcttctcagagctaattgtcagcaacctctatgaacatgaagctgagaaacaagctagccaacaccagatgtcagcattgctgtctccacgattgcttcgtgatactggctttcttgcagatgatgcactcaagtgtgaagggcctgcttgtttctttttcagctctctgattatgtcggtgttctgtgctgttgccgctgggttgagcctcctcgtcgttcaaaggaccagacaagtttatcctcgcctctacagttctgtccggacttgagattctccaattctgcatggatgggaagctcaaatcctcgtattctatgtccgtttattcttgcatacatatgcacaaagataagtatgtgaataaattctcaaatcttttcctaagctggtattgtaaaaacagatattcttgaatggattgtcccttgtgacttgcgtatggattctggcacttgctgtcctgaaaagaaactatccctctccttttttttgaagcaattactgtatggagttcctacaatatttttctattaaatatgggtatgtacaagtgtaagtattcaaattacaaggaaatcaactataaacatgatttaattttggctgctatttggggttttactctatgacaaagaatcatttcttttacaaacatttctttgcatattgtcgccatgggggtttattctcaaagatccatccatttctgcattttcatatgcaccaaaccatgatgatgataatctccatcctccaagttttcgttagttgcgcaggcatatgttgcacagctagaaattgattggaagtgcgcggtggtacaaccctatcagttgccagcatctttctgtataattgcatttcaggaagagatgcgagatagtttcttccttctggcgaatgcagttttcacatgtatacgagtcaagttccatgttcctccttttgagcatagatcttatgttcaatctatttttcaggaaaagccagaagaataccttgtgtttcggttgacattttgttttctacaaccagacataggcggggtggactgcctcgttcccagtttataagctttcggcgctgagtattggactgtcccccaatgtatacccatttgtcatgatggtcagatagttgttgtctttataaggattcaaacaggatttagtattgctcataagctatttctgacattggggtgtgaaacaaattgtgagggtattccacatcttttgcatgtattattgtaatatccttattcctgacaaaagaaaaaagctcagggaaagcatattcaggcactcggttgtctcactagtccaaccatagttgtttagtcctgtcgtcctctatcatcaccctatagaaccccttgaaagtgttcattgtctttaatacatatttccaccagaaagatcacacctcccttgagaaaggtattgttccacccaagtaatgcttgcttgttccaaacgatgtttacccacggtatattgatctgttgaagaatttgtgcatgag

SEQ ID NO: 25387 - DNA, 3199 bp, Zea Mays
atgtccatatccattccacttccacccatccccgtggcttctgtctgctgcgaccctgctccactccgtctgcatcacctgtcacggttgtcacctccaccacggctccagctccacccgcgctggtttagggccgctgctgggcgggtgacgagcgcggctgtcggattccgccgagcctcagtatgcgggcagcgggcgcggcctccgcctccgccacaccagccctggcgttccccttgtcttcccctatatatacagatcggtctgattttactttttttgacatggctccatttatgcttactccctcacacccaaaattagtctccactctcgcattttgaaagaaaattgtatcaatatttctatcttcaaatagatttactacgaagattcatgacgtgattaatctaatgatgcttgtctgatatcataaatattactagtatgttttggtatagatttggccaaagttaatattgtttggcttatcgaagtgcgggatggagacttattttaggacaggacggagggagtacatcggagctgctcttgtgtcatgactgtgccacattatgccagaggggagtaaactatgcgagttttccattctgaaaacaagtgattcaacatatttcacgccacaccataaacggacacctcaaagttatgattttgctgtggatggctggcaactggtatcagcacaaaatctggttaccatcattatttgcatgtttccagctcaactgaaaatgatgtgcactgcatttgtttctgccttgtcttgctttattgtttttttccttttatcgtgttcctcttatttcaaggttaatgtacctactcttgcacgcccccccccctaacatcgctctggtttgattttagagaaataattaatgttaccatgaactcctcaagttaaaacttatcctatacatgccatgccagccatgagaccacaactgcaactcgtatgaataaaatggatatccttttacgttattctagtgttgtttttactcatccctcatattcaaatgaattgaacaaaagtacataactttattgtttattttctcaacctaacatgcaacatttcatcgttttcgtatccagatgtgtgttgttatctttattggaacaaatggccagacgtatttcatcacggcttcacttgttacaagcatccagaatttcccaaagagcaggggcccaacagtgggcatcctcaaaggatttatgggcctaactagcgccattctgacacaagtttatacagtgatgcacacaccagaccatgctgcgcttatcttcatggttgctgttggtccgtcgctggttgccattggcttgatgtttgttattaggcctgttggtggtcacaggcagatacggccatctgacaagaacagcttcatgttcatctacactgtatgcttgctcctcgcctcataccttgtcggtgctatgcttgtccaagatttcctgcaaccaagctatgatgtggttgtttttctgactgtgattctgttcgtcctccttatttcaccaatcgcaatccctgtgattgtgtcgttcatgccggaaaaagctcaacatctcatggaagatgctctcctatctgaaccattgacaggagaggcaagcagttcacgacaaaaggaggatcaaccagaggtcattttaagtgaggtagaagaggagaagtctaaggaaactgattcattgccgccatctgaaaggagaaagaggattgcggaattgcaggccaagctagtggaagcagcggcaagaggtggggttagaatcaaaagaaggccacaccgaggggataacttcaccctgatgcaggcattggtgaaggctgatttttggcttatttggctatcacttttgcttgggtcgggatcagggctgacagtgattgataacctgggtcagatgagccaggctattggttataaaaatgcacatatctttgtgtcactggtgagcatatggaactttcttggtcgtgttggaggtggctacttctctgagatcattgtcagggaacgtacatacccaaggcacatagcattggcagttgctcagatcgtgatggctgctgggcatttcctctttgctatggcttggcctggaactatgtacattgcgagcttgctggttggacttggatatggagctcactgggctattgtgccagctgctgtctccgagctttttggtgtaaaacactttggtgcgatgtacaattttctcatactagcgaaccccgcaggatccctcatcttctcagagctaattgtcagcaacctctatgaacatgaagctgagaaacaagctagccaacaccagatgtcagcattgctgtctccacgattgcttcgtgatactggctttcttgcagatgatgcactcaagtgtgaagggcctgcttgtttctttttcagctctctgattatgtcggtgttctgtgctgttgccgctgggttgagcctcctcgtcgttcaaaggaccagacaagtttatcctcgcctctacagttctgtccggacttgagattctccaattctgcatggatgggaagctcaaatcctcgtattctatgtccgtttattcttgcatacatatgcacaaagataagaaaagccagaagaataccttgtgtttcggttgacattttgttttctacaaccagacataggcggggtggactgcctcgttcccagtttataagctttcggcgctgagtattggactgtcccccaatgtatacccatttgtcatgatggtcagatagttgttgtctttataaggattcaaacaggatttagtattgctcataagctatttctgacattggggtgtgaaacaaattgtgagggtattccacatcttttgcatgtattattgtaatatccttattcctgacaaaagaaaaaagctcagggaaagcatattcaggcactcggttgtctcactagtccaaccatagttgtttagtcctgtcgtcctctatcatcaccctatagaaccccttgaaagtgttcattgtctttaatacatatttccaccagaaagatcacacctcccttgagaaaggtattgttccacccaagtaatgcttgcttgttccaaacgatgtttacccacggtatattgatctgttgaagaatttgtgcatgag

SEQ ID NO: 25388 - DNA, 3403 bp, Zea Mays
atgtccatatccattccacttccacccatccccgtggcttctgtctgctgcgaccctgctccactccgtctgcatcacctgtcacggttgtcacctccaccacggctccagctccacccgcgctggtttagggccgctgctgggcgggtgacgagcgcggctgtcggattccgccgagcctcagtatgcgggcagcgggcgcggcctccgcctccgccacaccagccctggcgttccccttgtcttcccctatatatacagatcggtctgattttactttttttgacatggctccatttatgcttactccctcacacccaaaattagtctccactctcgcattttgaaagaaaattgtatcaatatttctatcttcaaatagatttactacgaagattcatgacgtgattaatctaatgatgcttgtctgatatcataaatattactagtatgttttggtatagatttggccaaagttaatattgtttggcttatcgaagtgcgggatggagacttattttaggacaggacggagggagtacatcggagctgctcttgtgtcatgactgtgccacattatgccagaggggagtaaactatgcgagttttccattctgaaaacaagtgattcaacatatttcacgccacaccataaacggacacctcaaagttatgattttgctgtggatggctggcaactgatgtgtgttgttatctttattggaacaaatggccagacgtatttcatcacggcttcacttgttacaagcatccagaatttcccaaagagcaggggcccaacagtgggcatcctcaaaggatttatgggcctaactagcgccattctgacacaagtttatacagtgatgcacacaccagaccatgctgcgcttatcttcatggttgctgttggtccgtcgctggttgccattggcttgatgtttgttattaggcctgttggtggtcacaggcagatacggccatctgacaagaacagcttcatgttcatctacactgtatgcttgctcctcgcctcataccttgtcggtgctatgcttgtccaagatttcctgcaaccaagctatgatgtggttgtttttctgactgtgattctgttcgtcctccttatttcaccaatcgcaatccctgtgattgtgtcgttcatgccggaaaaagctcaacatctcatggaagatgctctcctatctgaaccattgacaggagaggcaagcagttcacgacaaaaggaggatcaaccagaggtcattttaagtgaggtagaagaggagaagtctaaggaaactgattcattgccgccatctgaaaggagaaagaggattgcggaattgcaggccaagctagtggaagcagcggcaagaggtggggttagaatcaaaagaaggccacaccgaggggataacttcaccctgatgcaggcattggtgaaggctgatttttggcttatttggctatcacttttgcttgggtcgggatcagggctgacagtgattgataacctgggtcagatgagccaggctattggttataaaaatgcacatatctttgtgtcactggtgagcatatggaactttcttggtcgtgttggaggtggctacttctctgagatcattgtcagggaacgtacatacccaaggcacatagcattggcagttgctcagatcgtgatggctgctgggcatttcctctttgctatggcttggcctggaactatgtacattgcgagcttgctggttggacttggatatggagctcactgggctattgtgccagctgctgtctccgagctttttggtgtaaaacactttggtgcgatgtacaattttctcatactagcgaaccccgcaggatccctcatcttctcagagctaattgtcagcaacctctatgaacatgaagctgagaaacaagctagccaacaccagatgtcagcattgctgtctccacgattgcttcgtgatactggctttcttgcagatgatgcactcaagtgtgaagggcctgcttgtttctttttcagctctctgattatgtcggtgttctgtgctgttgccgctgggttgagcctcctcgtcgttcaaaggaccagacaagtttatcctcgcctctacagttctgtccggacttgagattctccaattctgcatggatgggaagctcaaatcctcgtattctatgtccgtttattcttgcatacatatgcacaaagataagtatgtgaataaattctcaaatcttttcctaagctggtattgtaaaaacagatattcttgaatggattgtcccttgtgacttgcgtatggattctggcacttgctgtcctgaaaagaaactatccctctccttttttttgaagcaattactgtatggagttcctacaatatttttctattaaatatgggtatgtacaagtgtaagtattcaaattacaaggaaatcaactataaacatgatttaattttggctgctatttggggttttactctatgacaaagaatcatttcttttacaaacatttctttgcatattgtcgccatgggggtttattctcaaagatccatccatttctgcattttcatatgcaccaaaccatgatgatgataatctccatcctccaagttttcgttagttgcgcaggcatatgttgcacagctagaaattgattggaagtgcgcggtggtacaaccctatcagttgccagcatctttctgtataattgcatttcaggaagagatgcgagatagtttcttccttctggcgaatgcagttttcacatgtatacgagtcaagttccatgttcctccttttgagcatagatcttatgttcaatctatttttcaggaaaagccagaagaataccttgtgtttcggttgacattttgttttctacaaccagacataggcggggtggactgcctcgttcccagtttataagctttcggcgctgagtattggactgtcccccaatgtatacccatttgtcatgatggtcagatagttgttgtctttataaggattcaaacaggatttagtattgctcataagctatttctgacattggggtgtgaaacaaattgtgagggtattccacatcttttgcatgtattattgtaatatccttattcctgacaaaagaaaaaagctcagggaaagcatattcaggcactcggttgtctcactagtccaaccatagttgtttagtcctgtcgtcctctatcatcaccctatagaaccccttgaaagtgttcattgtctttaatacatatttccaccagaaagatcacacctcccttgagaaaggtattgttccacccaagtaatgcttgcttgttccaaacgatgtttacccacggtatattgatctgttgaagaatttgtgcatgag

SEQ ID NO: 25389 - DNA, 2788 bp, Zea Mays
atgtccatatccattccacttccacccatccccgtggcttctgtctgctgcgaccctgctccactccgtctgcatcacctgtcacgatgtgtgttgttatctttattggaacaaatggccagacgtatttcatcacggcttcacttgttacaagcatccagaatttcccaaagagcaggggcccaacagtgggcatcctcaaaggatttatgggcctaactagcgccattctgacacaagtttatacagtgatgcacacaccagaccatgctgcgcttatcttcatggttgctgttggtccgtcgctggttgccattggcttgatgtttgttattaggcctgttggtggtcacaggcagatacggccatctgacaagaacagcttcatgttcatctacactgtatgcttgctcctcgcctcataccttgtcggtgctatgcttgtccaagatttcctgcaaccaagctatgatgtggttgtttttctgactgtgattctgttcgtcctccttatttcaccaatcgcaatccctgtgattgtgtcgttcatgccggaaaaagctcaacatctcatggaagatgctctcctatctgaaccattgacaggagaggcaagcagttcacgacaaaaggaggatcaaccagaggtcattttaagtgaggtagaagaggagaagtctaaggaaactgattcattgccgccatctgaaaggagaaagaggattgcggaattgcaggccaagctagtggaagcagcggcaagaggtggggttagaatcaaaagaaggccacaccgaggggataacttcaccctgatgcaggcattggtgaaggctgatttttggcttatttggctatcacttttgcttgggtcgggatcagggctgacagtgattgataacctgggtcagatgagccaggctattggttataaaaatgcacatatctttgtgtcactggtgagcatatggaactttcttggtcgtgttggaggtggctacttctctgagatcattgtcagggaacgtacatacccaaggcacatagcattggcagttgctcagatcgtgatggctgctgggcatttcctctttgctatggcttggcctggaactatgtacattgcgagcttgctggttggacttggatatggagctcactgggctattgtgccagctgctgtctccgagctttttggtgtaaaacactttggtgcgatgtacaattttctcatactagcgaaccccgcaggatccctcatcttctcagagctaattgtcagcaacctctatgaacatgaagctgagaaacaagctagccaacaccagatgtcagcattgctgtctccacgattgcttcgtgatactggctttcttgcagatgatgcactcaagtgtgaagggcctgcttgtttctttttcagctctctgattatgtcggtgttctgtgctgttgccgctgggttgagcctcctcgtcgttcaaaggaccagacaagtttatcctcgcctctacagttctgtccggacttgagattctccaattctgcatggatgggaagctcaaatcctcgtattctatgtccgtttattcttgcatacatatgcacaaagataagtatgtgaataaattctcaaatcttttcctaagctggtattgtaaaaacagatattcttgaatggattgtcccttgtgacttgcgtatggattctggcacttgctgtcctgaaaagaaactatccctctccttttttttgaagcaattactgtatggagttcctacaatatttttctattaaatatgggtatgtacaagtgtaagtattcaaattacaaggaaatcaactataaacatgatttaattttggctgctatttggggttttactctatgacaaagaatcatttcttttacaaacatttctttgcatattgtcgccatgggggtttattctcaaagatccatccatttctgcattttcatatgcaccaaaccatgatgatgataatctccatcctccaagttttcgttagttgcgcaggcatatgttgcacagctagaaattgattggaagtgcgcggtggtacaaccctatcagttgccagcatctttctgtataattgcatttcaggaagagatgcgagatagtttcttccttctggcgaatgcagttttcacatgtatacgagtcaagttccatgttcctccttttgagcatagatcttatgttcaatctatttttcaggaaaagccagaagaataccttgtgtttcggttgacattttgttttctacaaccagacataggcggggtggactgcctcgttcccagtttataagctttcggcgctgagtattggactgtcccccaatgtatacccatttgtcatgatggtcagatagttgttgtctttataaggattcaaacaggatttagtattgctcataagctatttctgacattggggtgtgaaacaaattgtgagggtattccacatcttttgcatgtattattgtaatatccttattcctgacaaaagaaaaaagctcagggaaagcatattcaggcactcggttgtctcactagtccaaccatagttgtttagtcctgtcgtcctctatcatcaccctatagaaccccttgaaagtgttcattgtctttaatacatatttccaccagaaagatcacacctcccttgagaaaggtattgttccacccaagtaatgcttgcttgttccaaacgatgtttacccacggtatattgatctgttgaagaatttgtgcatgag

SEQ ID NO: 25390 - DNA, 3697 bp, Zea Mays
atgtccatatccattccacttccacccatccccgtggcttctgtctgctgcgaccctgctccactccgtctgcatcacctgtcacggttgtcacctccaccacggctccagctccacccgcgctggtttagggccgctgctgggcgggtgacgagcgcggctgtcggattccgccgagcctcagtatgcgggcagcgggcgcggcctccgcctccgccacaccagccctggcgttccccttgtcttcccctatatatacagatcggtctgattttactttttttgacatggctccatttatgcttactccctcacacccaaaattagtctccactctcgcattttgaaagaaaattgtatcaatatttctatcttcaaatagatttactacgaagattcatgacgtgattaatctaatgatgcttgtctgatatcataaatattactagtatgttttggtatagatttggccaaagttaatattgtttggcttatcgaagtgcgggatggagacttattttaggacaggacggagggagtacatcggagctgctcttgtgtcatgactgtgccacattatgccagaggggagtaaactatgcgagttttccattctgaaaacaagtgattcaacatatttcacgccacaccataaacggacacctcaaagttatgattttgctgtggatggctggcaactggtatcagcacaaaatctggttaccatcattatttgcatgtttccagctcaactgaaaatgatgtgcactgcatttgtttctgccttgtcttgctttattgtttttttccttttatcgtgttcctcttatttcaaggttaatgtacctactcttgcacgcccccccccctaacatcgctctggtttgattttagagaaataattaatgttaccatgaactcctcaagttaaaacttatcctatacatgccatgccagccatgagaccacaactgcaactcgtatgaataaaatggatatccttttacgttattctagtgttgtttttactcatccctcatattcaaatgaattgaacaaaagtacataactttattgtttattttctcaacctaacatgcaacatttcatcgttttcgtatccagatgtgtgttgttatctttattggaacaaatggccagacgtatttcatcacggcttcacttgttacaagcatccagaatttcccaaagagcaggggcccaacagtgggcatcctcaaaggatttatgggcctaactagcgccattctgacacaagtttatacagtgatgcacacaccagaccatgctgcgcttatcttcatggttgctgttggtccgtcgctggttgccattggcttgatgtttgttattaggcctgttggtggtcacaggcagatacggccatctgacaagaacagcttcatgttcatctacactgtatgcttgctcctcgcctcataccttgtcggtgctatgcttgtccaagatttcctgcaaccaagctatgatgtggagaggcaagcagttcacgacaaaaggaggatcaaccagaggtcattttaagtgaggtagaagaggagaagtctaaggaaactgattcattgccgccatctgaaaggagaaagaggattgcggaattgcaggccaagctagtggaagcagcggcaagaggtggggttagaatcaaaagaaggccacaccgaggggataacttcaccctgatgcaggcattggtgaaggctgatttttggcttatttggctatcacttttgcttgggtcgggatcagggctgacagtgattgataacctgggtcagatgagccaggctattggttataaaaatgcacatatctttgtgtcactggtgagcatatggaactttcttggtcgtgttggaggtggctacttctctgagatcattgtcagggaacgtacatacccaaggcacatagcattggcagttgctcagatcgtgatggctgctgggcatttcctctttgctatggcttggcctggaactatgtacattgcgagcttgctggttggacttggatatggagctcactgggctattgtgccagctgctgtctccgagctttttggtgtaaaacactttggtgcgatgtacaattttctcatactagcgaaccccgcaggatccctcatcttctcagagctaattgtcagcaacctctatgaacatgaagctgagaaacaagctagccaacaccagatgtcagcattgctgtctccacgattgcttcgtgatactggctttcttgcagatgatgcactcaagtgtgaagggcctgcttgtttctttttcagctctctgattatgtcggtgttctgtgctgttgccgctgggttgagcctcctcgtcgttcaaaggaccagacaagtttatcctcgcctctacagttctgtccggacttgagattctccaattctgcatggatgggaagctcaaatcctcgtattctatgtccgtttattcttgcatacatatgcacaaagataagtatgtgaataaattctcaaatcttttcctaagctggtattgtaaaaacagatattcttgaatggattgtcccttgtgacttgcgtatggattctggcacttgctgtcctgaaaagaaactatccctctccttttttttgaagcaattactgtatggagttcctacaatatttttctattaaatatgggtatgtacaagtgtaagtattcaaattacaaggaaatcaactataaacatgatttaattttggctgctatttggggttttactctatgacaaagaatcatttcttttacaaacatttctttgcatattgtcgccatgggggtttattctcaaagatccatccatttctgcattttcatatgcaccaaaccatgatgatgataatctccatcctccaagttttcgttagttgcgcaggcatatgttgcacagctagaaattgattggaagtgcgcggtggtacaaccctatcagttgccagcatctttctgtataattgcatttcaggaagagatgcgagatagtttcttccttctggcgaatgcagttttcacatgtatacgagtcaagttccatgttcctccttttgagcatagatcttatgttcaatctatttttcaggaaaagccagaagaataccttgtgtttcggttgacattttgttttctacaaccagacataggcggggtggactgcctcgttcccagtttataagctttcggcgctgagtattggactgtcccccaatgtatacccatttgtcatgatggtcagatagttgttgtctttataaggattcaaacaggatttagtattgctcataagctatttctgacattggggtgtgaaacaaattgtgagggtattccacatcttttgcatgtattattgtaatatccttattcctgacaaaagaaaaaagctcagggaaagcatattcaggcactcggttgtctcactagtccaaccatagttgtttagtcctgtcgtcctctatcatcaccctatagaaccccttgaaagtgttcattgtctttaatacatatttccaccagaaagatcacacctcccttgagaaaggtattgttccacccaagtaatgcttgcttgttccaaacgatgtttacccacggtatattgatctgttgaagaatttgtgcatgag

SEQ ID NO: 25391 - DNA, 2538 bp, Zea Mays
gtgcgtcgcttgtttgtctaccgtacttgcgtgtgcgtctcttgtttgcctgcgattgaaagccttctctgacctgtctccaaattggcattcctgagcaaaaatcccctgcaacccgacccatggccatgggcaagctcgaggagaggacgcgtgcgttctggacgaaccgatggcttgtgttcgttggggccatgtggatgcagtccatggccggcaccacttacatcttcggcgccatctcgccggtggtcaaggccaggctgggctacgaccagccgcaggtggccgcgctgggtgtcgccaagaacgttggcggctgcctcggcctcctcgccggcgcgctctcggcgacgtggccgccgtgggcgctgctggccatcggcgccgcgcagaacttcctcggctacggctggctctggctcgtcgtctccgggaacgcgccggcgctgcccctctggctgatgtgtgttgttatctttattggaacaaatggccagacgtatttcatcacggcttcacttgttacaagcatccagaatttcccaaagagcaggggcccaacagtgggcatcctcaaaggatttatgggcctaactagcgccattctgacacaagtttatacagtgatgcacacaccagaccatgctgcgcttatcttcatggttgctgttggtccgtcgctggttgccattggcttgatgtttgttattaggcctgttggtggtcacaggcagatacggccatctgacaagaacagcttcatgttcatctacactgtatgcttgctcctcgcctcataccttgtcggtgctatgcttgtccaagatttcctgcaaccaagctatgatgtggttgtttttctgactgtgattctgttcgtcctccttatttcaccaatcgcaatccctgtgattgtgtcgttcatgccggaaaaagctcaacatctcatggaagatgctctcctatctgaaccattgacaggagaggcaagcagttcacgacaaaaggaggatcaaccagaggtcattttaagtgaggtagaagaggagaagtctaaggaaactgattcattgccgccatctgaaaggagaaagaggattgcggaattgcaggccaagctagtggaagcagcggcaagaggtggggttagaatcaaaagaaggccacaccgaggggataacttcaccctgatgcaggcattggtgaaggctgatttttggcttatttggctatcacttttgcttgggtcgggatcagggctgacagtgattgataacctgggtcagatgagccaggctattggttataaaaatgcacatatctttgtgtcactggtgagcatatggaactttcttggtcgtgttggaggtggctacttctctgagatcattgtcagggaacgtacatacccaaggcacatagcattggcagttgctcagatcgtgatggctgctgggcatttcctctttgctatggcttggcctggaactatgtacattgcgagcttgctggttggacttggatatggagctcactgggctattgtgccagctgctgtctccgagctttttggtgtaaaacactttggtgcgatgtacaattttctcatactagcgaaccccgcaggatccctcatcttctcagagctaattgtcagcaacctctatgaacatgaagctgagaaacaagctagccaacaccagatgtcagcattgctgtctccacgattgcttcgtgatactggctttcttgcagatgatgcactcaagtgtgaagggcctgcttgtttctttttcagctctctgattatgtcggtgttctgtgctgttgccgctgggttgagcctcctcgtcgttcaaaggaccagacaagtttatcctcgcctctacagttctgtccggacttgagattctccaattctgcatggatgggaagctcaaatcctcgtattctatgtccgtttattcttgcatacatatgcacaaagataagaaaagccagaagaataccttgtgtttcggttgacattttgttttctacaaccagacataggcggggtggactgcctcgttcccagtttataagctttcggcgctgagtattggactgtcccccaatgtatacccatttgtcatgatggtcagatagttgttgtctttataaggattcaaacaggatttagtattgctcataagctatttctgacattggggtgtgaaacaaattgtgagggtattccacatcttttgcatgtattattgtaatatccttattcctgacaaaagaaaaaagctcagggaaagcatattcaggcactcggttgtctcactagtccaaccatagttgtttagtcctgtcgtcctctatcatcaccctatagaaccccttgaaagtgttcattgtctttaatacatatttccaccagaaagatcacacctcccttgagaaaggtattgttccacccaagtaatgcttgcttgttccaaacgatgtttacccacggtatattgatctgttgaagaatttgtgcatgag

SEQ ID NO: 25392 - DNA, 2596 bp, Zea Mays
gtgcgtcgcttgtttgtctaccgtacttgcgtgtgcgtctcttgtttgcctgcgattgaaagccttctctgacctgtctccaaattggcattcctgagcaaaaatcccctgcaacccgacccatggccatgggcaagctcgaggagaggacgcgtgcgttctggacgaaccgatggcttgtgttcgttggggccatgtggatgcagtccatggccggcaccacttacatcttcggcgccatctcgccggtggtcaaggccaggctgggctacgaccagccgcaggtggccgcgctgggtgtcgccaagaacgttggcggctgcctcggcctcctcgccggcgcgctctcggcgacgtggccgccgtgggcgctgctggccatcggcgccgcgcagaacttcctcggctacggctggctctggctcgtcgtctccgggaacgcgccggcgctgcccctctggctgatgtgtgttgttatctttattggaacaaatggccagacgtatttcatcacggcttcacttgttacaagcatccagaatttcccaaagagcaggggcccaacagtgggcatcctcaaaggatttatgggcctaactagcgccattctgacacaagtttatacagtgatgcacacaccagaccatgctgcgcttatcttcatggttgctgttggtccgtcgctggttgccattggcttgatgtttgttattaggcctgttggtggtcacaggcagatacggccatctgacaagaacagcttcatgttcatctacactgtatgcttgctcctcgcctcataccttgtcggtgctatgcttgtccaagatttcctgcaaccaagctatgatgtggagaggcaagcagttcacgacaaaaggaggatcaaccagaggtcattttaagtgaggtagaagaggagaagtctaaggaaactgattcattgccgccatctgaaaggagaaagaggattgcggaattgcaggccaagctagtggaagcagcggcaagaggtggggttagaatcaaaagaaggccacaccgaggggataacttcaccctgatgcaggcattggtgaaggctgatttttggcttatttggctatcacttttgcttgggtcgggatcagggctgacagtgattgataacctgggtcagatgagccaggctattggttataaaaatgcacatatctttgtgtcactggtgagcatatggaactttcttggtcgtgttggaggtggctacttctctgagatcattgtcagggaacgtacatacccaaggcacatagcattggcagttgctcagatcgtgatggctgctgggcatttcctctttgctatggcttggcctggaactatgtacattgcgagcttgctggttggacttggatatggagctcactgggctattgtgccagctgctgtctccgagctttttggtgtaaaacactttggtgcgatgtacaattttctcatactagcgaaccccgcaggatccctcatcttctcagagctaattgtcagcaacctctatgaacatgaagctgagaaacaagctagccaacaccagatgtcagcattgctgtctccacgattgcttcgtgatactggctttcttgcagatgatgcactcaagtgtgaagggcctgcttgtttctttttcagctctctgattatgtcggtgttctgtgctgttgccgctgggttgagcctcctcgtcgttcaaaggaccagacaagtttatcctcgcctctacagttctgtccggacttgagattctccaattctgcatggatgggaagctcaaatcctcgtattctatgtccgtttattcttgcatacatatgcacaaagataagtatgtgaataaattctcaaatcttttcctaagctggtattgtaaaaacagatattcttgaatggattgtcccttgtgacttgcgtatggattctggcacttgctgtcctgaaaagaaactatccctctccttttttttgaagcaattactgtatggagttcctacaatatttttctattaaatatgggaaaagccagaagaataccttgtgtttcggttgacattttgttttctacaaccagacataggcggggtggactgcctcgttcccagtttataagctttcggcgctgagtattggactgtcccccaatgtatacccatttgtcatgatggtcagatagttgttgtctttataaggattcaaacaggatttagtattgctcataagctatttctgacattggggtgtgaaacaaattgtgagggtattccacatcttttgcatgtattattgtaatatccttattcctgacaaaagaaaaaagctcagggaaagcatattcaggcactcggttgtctcactagtccaaccatagttgtttagtcctgtcgtcctctatcatcaccctatagaaccccttgaaagtgttcattgtctttaatacatatttccaccagaaagatcacacctcccttgagaaaggtattgttccacccaagtaatgcttgcttgttccaaacgatgtttacccacggtatattgatctgttgaagaatttgtgcatgag

SEQ ID NO: 25393 - DNA, 1998 bp, Zea Mays
aaatcagcagaagcagctgatcgatttactcaccaatatgttctctccccctctcaccctagggtatgccctgtctgccctgctgtatcctcatctgcgctgcgggagccagtaaagggcacaggaggagttcttgtggcgtactgcagcttctcctcgtcctccctaactcttgtttgttagcggctaatttcagagcttttgttggcaactgggggaaccatagtgcgggggttcctcgcccccctctttccatgggagcttagaagctgttggatctctgcaagtgaccatgagccagagttttgacatcaacgtacttcgtgaagaagcaaggagtaggtggttaaagccttctgaagtgtactatatcttgcagaatcacgagaggttccctatcacccatgaggcaccaaagaagccacccagtggttccctattcctttacaatcgtcgtgtcaatcggtatttccggagagatggtcacacatggcggaggaagaaggatggaagaacagttggggaggctcatgaacgactgaaggttggaaatgttgattctttgagctgctattacgctcatggggagcaaaatccatgtttccagagacggtgtttctggatggaaaagatggttgctgcacttcttgctgctggtgcatcggcaacagcagttactgatcccactgcacaagacccagtgggtaaaacagcagctttcctggcttctgaacgagggcatacgggacttgcaggttatctttctgaagtgtcgctaactagctatcttgcatcactcactatagaagaaagtgatgtctcaaaaggatcagctgaagttgaagcagagagagctgtggaaggcatatctcagaggaatgcccaacggcatggtggcacagaagatgagctatcaatgaaggattctttggcggcagtgaggaatgcagctcaagcagcagctcgcatccagaatgctttccgtgccttctctttcaggaagagacagcagaagactgctcgacttagggatgtgtatggaatgacccaagaggatatagatgaacttgcagctgcatcaaggttgtaccaccaagctcatgcttcaagtggtcagttttatgatagagcagctgtttcgattcagaagaaatacaaaggatggaaaggtcgcaaacattttctcaacatgagaagaaatgcagttaaaatacaggctcatgtaagaggccatcaagtgagaaagaaatacagaacaattgtaagcactgtcagtgtgctagagaaagtaatacttcggtggcgccggaaaggtcatggcctacgtggcttccgagctgagcagcaaccaatggtcgaagcaatagaggaagatgatgaggaagacgacgatttcgatgatgatgaagcagtcaaggtcttccgtcggcagaaggtcgatcaagctgtaaaagaggctgtgtcaagggtgctgtccatggtagactctaccgaagcgaggatgcaatatcgacgaatgcttgaggagtttcgccaggcaactgcagaattggaaggatcaaatgaagtgacatcaatatttgacagtgacttagagttattagggatcaacaatttcatgtaaagagcatttcggtttcaagatctgagcaatgacataaattaagtatctacggaatgggtttcacctgctactaactaggacctgataatggtcgtcagtttatacagtgtttacgaaatggaaagtagattattgctgctatgatgtattgccactctatatttaggtgtattttcccagtggcagttcaatgaacactacattgtggtgtttgtaacttttaataccccgtttggatgtagatattagagtacaaaattgaaaattagaatcagctttccaaaattctgatgtttgattgcacatagaattgagatttagaatcagagactcaattccctgaaattgaactataactagaaattcagcttttc

SEQ ID NO: 25394 - DNA, 3611 bp, Zea Mays
aaatcagcagaagcagctgatcgatttactcaccaatatgttctctccccctctcaccctagggtatgccctgtctgccctgctgtatcctcatctgcgctgcgggagccagtaaagggcacaggaggagttcttgtggcgtactgcagcttctcctcgtcctccctaactcttgtttgttagcggctaatttcagagcttttgttggcaactgggggaaccatagtgcgggggttcctcgcccccctctttccatgggagcttagaagctgttggatctctgcaagtgaccatgagccagagttttgacatcaacgtacttcgtgaagaagcaaggagtaggtggttaaagccttctgaagtgtactatatcttgcagaatcacgagaggttccctatcacccatgaggcaccaaagaagccacccagtggttccctattcctttacaatcgtcgtgtcaatcggtatttccggagagatggtcacacatggcggaggaagaaggatggaagaacagttggggaggctcatgaacgactgaaggttggaaatgttgattctttgagctgctattacgctcatggggagcaaaatccatgtttccagagacggtgtttctggatgttggaaccggcagatattattcatcacaactatcaaatggccccccagaacctctttcatccttgggatatccaaatgccatctgtggaaaccaataccacagatccacttctggcactagtgagggcagtgagtcccatcagagctattccaatttgagttctgtaactgaagtaagttcctattccggtaacaaggagtacaacaaaaatgatggcagtttactaagcataccagaggttggacacacttgtcaacaaaatcagactggtaatggtaactcaaaaaataaatctgagcttaatatggctttaaagaagatagctgagcagttaagtttgggtgaagatgatgatgatgactatatttactcaaatcaaactcattccatgggaggtgacaaccaaataaaacaaattcgacaagaaggaacacagaaaggtttgagtaggaatatagcaccatcatgggaagatgtactgcactccagttcaggtttaccaacttcatccatataccagcaatctgatgtcaagtatcagaaaaaatcagaataccagccaccggaaatcctggacagcagtgatttgcgcatacaactttctgctactaaaaggtttcttttaggaccagaagccagcattgactcaccatctttgaactctgtgctgagaaacagagtcaacagtgtaactgataccatttcagcttatgacagtagatttgaaagctctctgaacccagattggcaaacaaaaacagcattaacatttcaaagcaattctcagggctctgaaataacggagttgtttgaccatgatcattttgaaccctactccagagaagatacaacaatttccttaggacagacaaacaagtttaacattcgtgaggtctctccagaatgggcattttcctatgagatcaccaaggtcatcattacgggagattttctgtgtgatccatcgaatttgtgttgggctgtgatgtttggtgacaatgaggtacccgttgaaatagttcagccaggtgttctccgctgtcacacaccactgcacagcaatgggaatctcagaatctgcattacttcgggaaacagagaagtttgtagtgaattcaaagactttgagttccgctcaaaaccaacctcttctagtttcacagacattgcaccatcttctagacatctgaaatccagtgaagagttattacttcttgcaaaatttgctagaatgcttttgtctgggaatggaaaccgtgaagttccagatggtgatccccaatctggacagtgtccaaaacttaagacgaacgaagagctctgggataggttgattaacgaacttaaagtagggtgtgaaaatccattaagctcggttgattggattgtggagcaactgctgaaaagtaatctacaacagtggttatcagtgaagctcagaggattcaatggaacggattttttatccaagcaagagcagggtattatacacttaatctctgccctaggctatgagtgggcattgtctccagttctcagtgctggtgttggtctaaattttcgtgattcaaatggatggactgctcttcattgggctgcttattttggaagggaaaagatggttgctgcacttcttgctgctggtgcatcggcaacagcagttactgatcccactgcacaagacccagtgggtaaaacagcagctttcctggcttctgaacgagggcatacgggacttgcaggttatctttctgaagtgtcgctaactagctatcttgcatcactcactatagaagaaagtgatgtctcaaaaggatcagctgaagttgaagcagagagagctgtggaaggcatatctcagaggaatgcccaacggcatggtggcacagaagatgagctatcaatgaaggattctttggcggcagtgaggaatgcagctcaagcagcagctcgcatccagaatgctttccgtgccttctctttcaggaagagacagcagaagactgctcgacttagggatgtgtatggaatgacccaagaggatatagatgaacttgcagctgcatcaaggttgtaccaccaagctcatgcttcaagtggtcagttttatgatagagcagctgtttcgattcagaagaaatacaaaggatggaaaggtcgcaaacattttctcaacatgagaagaaatgcagttaaaatacaggctcatgtaagaggccatcaagtgagaaagaaatacagaacaattgtaagcactgtcagtgtgctagagaaagtaatacttcggtggcgccggaaaggtcatggcctacgtggcttccgagctgagcagcaaccaatggtcgaagcaatagaggaagatgatgaggaagacgacgatttcgatgatgatgaagcagtcaaggtcttccgtcggcagaaggtcgatcaagctgtaaaagaggctgtgtcaagggtgctgtccatggtagactctaccgaagcgaggatgcaatatcgacgaatgcttgaggagtttcgccaggcaactgcagaattggaaggatcaaatgaagtgacatcaatatttgacagtgacttagagttattagggatcaacaatttcatgtaaagagcatttcggtttcaagatctgagcaatgacataaattaagtatctacggaatgggtttcacctgctactaactaggacctgataatggtcgtcagtttatacagtgtttacgaaatggaaagtagattattgctgctatgatgtattgccactctatatttaggtgtattttcccagtggcagttcaatgaacactacattgtggtgtttgtaacttttaataccccgtttggatgtagatattagagtacaaaattgaaaattagaatcagctttccaaaattctgatgtttgattgcacatagaattgagatttagaatcagagactcaattccctgaaattgaactataactagaaattcagcttttc

SEQ ID NO: 25395 - DNA, 3518 bp, Zea Mays
ctcaggcaccaatatcttctctctccctctcaccaatatgttctaaatcagcagaagcagctgatcgatttactcaccaatatgttctctccccctctcaccctaggagcttttgttggcaactgggggaaccatagtgcgggggttcctcgcccccctctttccatgggagcttagaagctgttggatctctgcaagtgaccatgagccagagttttgacatcaacgtacttcgtgaagaagcaaggagtaggtggttaaagccttctgaagtgtactatatcttgcagaatcacgagaggttccctatcacccatgaggcaccaaagaagccacccagtggttccctattcctttacaatcgtcgtgtcaatcggtatttccggagagatggtcacacatggcggaggaagaaggatggaagaacagttggggaggctcatgaacgactgaaggttggaaatgttgattctttgagctgctattacgctcatggggagcaaaatccatgtttccagagacggtgtttctggatgttggaaccggcagatattattcatcacaactatcaaatggccccccagaacctctttcatccttgggatatccaaatgccatctgtggaaaccaataccacagatccacttctggcactagtgagggcagtgagtcccatcagagctattccaatttgagttctgtaactgaagtaagttcctattccggtaacaaggagtacaacaaaaatgatggcagtttactaagcataccagaggttggacacacttgtcaacaaaatcagactggtaatggtaactcaaaaaataaatctgagcttaatatggctttaaagaagatagctgagcagttaagtttgggtgaagatgatgatgatgactatatttactcaaatcaaactcattccatgggaggtgacaaccaaataaaacaaattcgacaagaaggaacacagaaaggtttgagtaggaatatagcaccatcatgggaagatgtactgcactccagttcaggtttaccaacttcatccatataccagcaatctgatgtcaagtatcagaaaaaatcagaataccagccaccggaaatcctggacagcagtgatttgcgcatacaactttctgctactaaaaggtttcttttaggaccagaagccagcattgactcaccatctttgaactctgtgctgagaaacagagtcaacagtgtaactgataccatttcagcttatgacagtagatttgaaagctctctgaacccagattggcaaacaaaaacagcattaacatttcaaagcaattctcagggctctgaaataacggagttgtttgaccatgatcattttgaaccctactccagagaagatacaacaatttccttaggacagacaaacaagtttaacattcgtgaggtctctccagaatgggcattttcctatgagatcaccaaggtcatcattacgggagattttctgtgtgatccatcgaatttgtgttgggctgtgatgtttggtgacaatgaggtacccgttgaaatagttcagccaggtgttctccgctgtcacacaccactgcacagcaatgggaatctcagaatctgcattacttcgggaaacagagaagtttgtagtgaattcaaagactttgagttccgctcaaaaccaacctcttctagtttcacagacattgcaccatcttctagacatctgaaatccagtgaagagttattacttcttgcaaaatttgctagaatgcttttgtctgggaatggaaaccgtgaagttccagatggtgatccccaatctggacagtgtccaaaacttaagacgaacgaagagctctgggataggttgattaacgaacttaaagtagggtgtgaaaatccattaagctcggttgattggattgtggagcaactgctgaaaagtaatctacaacagtggttatcagtgaagctcagaggattcaatggaacggattttttatccaagcaagagcagggtattatacacttaatctctgccctaggctatgagtgggcattgtctccagttctcagtgctggtgttggtctaaattttcgtgattcaaatggatggactgctcttcattgggctgcttattttggaagggaaaagatggttgctgcacttcttgctgctggtgcatcggcaacagcagttactgatcccactgcacaagacccagtgggtaaaacagcagctttcctggcttctgaacgagggcatacgggacttgcaggttatctttctgaagtgtcgctaactagctatcttgcatcactcactatagaagaaagtgatgtctcaaaaggatcagctgaagttgaagcagagagagctgtggaaggcatatctcagaggaatgcccaacggcatggtggcacagaagatgagctatcaatgaaggattctttggcggcagtgaggaatgcagctcaagcagcagctcgcatccagaatgctttccgtgccttctctttcaggaagagacagcagaagactgctcgacttagggatgtgtatggaatgacccaagaggatatagatgaacttgcagctgcatcaaggttgtaccaccaagctcatgcttcaagtggtcagttttatgatagagcagctgtttcgattcagaagaaatacaaaggatggaaaggtcgcaaacattttctcaacatgagaagaaatgcagttaaaatacaggctcatgtaagaggccatcaagtgagaaagaaatacagaacaattgtaagcactgtcagtgtgctagagaaagtaatacttcggtggcgccggaaaggtcatggcctacgtggcttccgagctgagcagcaaccaatggtcgaagcaatagaggaagatgatgaggaagacgacgatttcgatgatgatgaagcagtcaaggtcttccgtcggcagaaggtcgatcaagctgtaaaagaggctgtgtcaagggtgctgtccatggtagactctaccgaagcgaggatgcaatatcgacgaatgcttgaggagtttcgccaggcaactaattggaaggatcaaatgaagtgacatcaatatttgacagtgacttagagttattagggatcaacaatttcatgtaaagagcatttcggtttcaagatctgagcaatgacataaattaagtatctacggaatgggtttcacctgctactaactaggacctgataatggtcgtcagtttatacagtgtttacgaaatggaaagtagattattgctgctatgatgtattgccactctatatttaggtgtattttcccagtggcagttcaatgaacactacattgtggtgtttgtaacttttaataccccgtttggatgtagatattagagtacaaaattgaaaattagaatcagctttccaaaattctgatgtttgattgcacatagaattgagatttagaatcagagactcaattccctgaaattgaactataactagaaattcagcttttc

SEQ ID NO: 25396 - DNA, 3732 bp, Zea Mays
ggccagtcactgtcttgaattgcagaagcagcagactcaggcaccaatatcttctctctccctctcaccaatatgttctaaatcagcagaagcagctgatcgatttactcaccaatatgttctctccccctctcaccctagggtatgccctgtctgccctgctgtatcctcatctgcgctgcgggagccagtaaagggcacaggaggagttcttgtggcgtactgcagcttctcctcgtcctccctaactcttgtttgttagcggctaatttcagagcttttgttggcaactgggggaaccatagtgcgggggttcctcgcccccctctttccatgggagcttagaagctgttggatctctgcaagtgaccatgagccagagttttgacatcaacgtacttcgtgaagaagcaaggagtaggtggttaaagccttctgaagtgtactatatcttgcagaatcacgagaggttccctatcacccatgaggcaccaaagaagccacccagtggttccctattcctttacaatcgtcgtgtcaatcggtatttccggagagatggtcacacatggcggaggaagaaggatggaagaacagttggggaggctcatgaacgactgaaggttggaaatgttgattctttgagctgctattacgctcatggggagcaaaatccatgtttccagagacggtgtttctggatgttggaacctgcatatgaacacattgtgctggtacaatacagagaggttgctgagggcagatattattcatcacaactatcaaatggccccccagaacctctttcatccttgggatatccaaatgccatctgtggaaaccaataccacagatccacttctggcactagtgagggcagtgagtcccatcagagctattccaatttgagttctgtaactgaagtaagttcctattccggtaacaaggagtacaacaaaaatgatggcagtttactaagcataccagaggttggacacacttgtcaacaaaatcagactggtaatggtaactcaaaaaataaatctgagcttaatatggctttaaagaagatagctgagcagttaagtttgggtgaagatgatgatgatgactatatttactcaaatcaaactcattccatgggaggtgacaaccaaataaaacaaattcgacaagaaggaacacagaaaggtttgagtaggaatatagcaccatcatgggaagatgtactgcactccagttcaggtttaccaacttcatccatataccagcaatctgatgtcaagtatcagaaaaaatcagaataccagccaccggaaatcctggacagcagtgatttgcgcatacaactttctgctactaaaaggtttcttttaggaccagaagccagcattgactcaccatctttgaactctgtgctgagaaacagagtcaacagtgtaactgataccatttcagcttatgacagtagatttgaaagctctctgaacccagattggcaaacaaaaacagcattaacatttcaaagcaattctcagggctctgaaataacggagttgtttgaccatgatcattttgaaccctactccagagaagatacaacaatttccttaggacagacaaacaagtttaacattcgtgaggtctctccagaatgggcattttcctatgagatcaccaaggtcatcattacgggagattttctgtgtgatccatcgaatttgtgttgggctgtgatgtttggtgacaatgaggtacccgttgaaatagttcagccaggtgttctccgctgtcacacaccactgcacagcaatgggaatctcagaatctgcattacttcgggaaacagagaagtttgtagtgaattcaaagactttgagttccgctcaaaaccaacctcttctagtttcacagacattgcaccatcttctagacatctgaaatccagtgaagagttattacttcttgcaaaatttgctagaatgcttttgtctgggaatggaaaccgtgaagttccagatggtgatccccaatctggacagtgtccaaaacttaagacgaacgaagagctctgggataggttgattaacgaacttaaagtagggtgtgaaaatccattaagctcggttgattggattgtggagcaactgctgaaaagtaatctacaacagtggttatcagtgaagctcagaggattcaatggaacggattttttatccaagcaagagcagggtattatacacttaatctctgccctaggctatgagtgggcattgtctccagttctcagtgctggtgttggtctaaattttcgtgattcaaatggatggactgctcttcattgggctgcttattttggaagggaaaagatggttgctgcacttcttgctgctggtgcatcggcaacagcagttactgatcccactgcacaagacccagtgggtaaaacagcagctttcctggcttctgaacgagggcatacgggacttgcaggttatctttctgaagtgtcgctaactagctatcttgcatcactcactatagaagaaagtgatgtctcaaaaggatcagctgaagttgaagcagagagagctgtggaaggcatatctcagaggaatgcccaacggcatggtggcacagaagatgagctatcaatgaaggattctttggcggcagtgaggaatgcagctcaagcagcagctcgcatccagaatgctttccgtgccttctctttcaggaagagacagcagaagactgctcgacttagggatgtgtatggaatgacccaagaggatatagatgaacttgcagctgcatcaaggttgtaccaccaagctcatgcttcaagtggtcagttttatgatagagcagctgtttcgattcagaagaaatacaaaggatggaaaggtcgcaaacattttctcaacatgagaagaaatgcagttaaaatacaggctcatgtaagaggccatcaagtgagaaagaaatacagaacaattgtaagcactgtcagtgtgctagagaaagtaatacttcggtggcgccggaaaggtcatggcctacgtggcttccgagctgagcagcaaccaatggtcgaagcaatagaggaagatgatgaggaagacgacgatttcgatgatgatgaagcagtcaaggtcttccgtcggcagaaggtcgatcaagctgtaaaagaggctgtgtcaagggtgctgtccatggtagactctaccgaagcgaggatgcaatatcgacgaatgcttgaggagtttcgccaggcaactaattggaaggatcaaatgaagtgacatcaatatttgacagtgacttagagttattagggatcaacaatttcatgtaaagagcatttcggtttcaagatctgagcaatgacataaattaagtatctacggaatgggtttcacctgctactaactaggacctgataatggtcgtcagtttatacagtgtttacgaaatggaaagtagattattgctgctatgatgtattgccactctatatttaggtgtattttcccagtggcagttcaatgaacactacattgtggtgtttgtaacttttaataccccgtttggatgtagatattagagtacaaaattgaaaattagaatcagctttccaaaattctgatgtttgattgcacatagaattgagatttagaatcagagactcaattccctgaaattgaactataactagaaattcagcttttc

SEQ ID NO: 25397 - DNA, 1944 bp, Zea Mays
caagggccagtcactgtcttgaattgcagaagcagcagactcaggcaccaatatcttctctctccctctcaccaatatgttctaaatcagcagaagcagctgatcgatttactcaccaatatgttctctccccctctcaccctaggagcttttgttggcaactgggggaaccatagtgcgggggttcctcgcccccctctttccatgggagcttagaagctgttggatctctgcaagtgaccatgagccagagttttgacatcaacgtacttcgtgaagaagcaaggagtaggtggttaaagccttctgaagtgtactatatcttgcagaatcacgagaggttccctatcacccatgaggcaccaaagaagccacccagtggttccctattcctttacaatcgtcgtgtcaatcggtatttccggagagatggtcacacatggcggaggaagaaggatggaagaacagttggggaggctcatgaacgactgaaggttggaaatgttgattctttgagctgctattacgctcatggggagcaaaatccatgtttccagagacggtgtttctggatggaaaagatggttgctgcacttcttgctgctggtgcatcggcaacagcagttactgatcccactgcacaagacccagtgggtaaaacagcagctttcctggcttctgaacgagggcatacgggacttgcaggttatctttctgaagtgtcgctaactagctatcttgcatcactcactatagaagaaagtgatgtctcaaaaggatcagctgaagttgaagcagagagagctgtggaaggcatatctcagaggaatgcccaacggcatggtggcacagaagatgagctatcaatgaaggattctttggcggcagtgaggaatgcagctcaagcagcagctcgcatccagaatgctttccgtgccttctctttcaggaagagacagcagaagactgctcgacttagggatgtgtatggaatgacccaagaggatatagatgaacttgcagctgcatcaaggttgtaccaccaagctcatgcttcaagtggtcagttttatgatagagcagctgtttcgattcagaagaaatacaaaggatggaaaggtcgcaaacattttctcaacatgagaagaaatgcagttaaaatacaggctcatgtaagaggccatcaagtgagaaagaaatacagaacaattgtaagcactgtcagtgtgctagagaaagtaatacttcggtggcgccggaaaggtcatggcctacgtggcttccgagctgagcagcaaccaatggtcgaagcaatagaggaagatgatgaggaagacgacgatttcgatgatgatgaagcagtcaaggtcttccgtcggcagaaggtcgatcaagctgtaaaagaggctgtgtcaagggtgctgtccatggtagactctaccgaagcgaggatgcaatatcgacgaatgcttgaggagtttcgccaggcaactaattggaaggatcaaatgaagtgacatcaatatttgacagtgacttagagttattagggatcaacaatttcatgtaaagagcatttcggtttcaagatctgagcaatgacataaattaagtatctacggaatgggtttcacctgctactaactaggacctgataatggtcgtcagtttatacagtgtttacgaaatggaaagtagattattgctgctatgatgtattgccactctatatttaggtgtattttcccagtggcagttcaatgaacactacattgtggtgtttgtaacttttaataccccgtttggatgtagatattagagtacaaaattgaaaattagaatcagctttccaaaattctgatgtttgattgcacatagaattgagatttagaatcagagactcaattccctgaaattgaactataactagaaattcagcttttc

SEQ ID NO: 25398 - DNA, 480 bp, Zea Mays
gcaacgcacgggcactgacctaccaccttcctccgctcgccgtgcttctgcttcctccgccaccaccgccggcatggctgcgcgctgcccctacttcgccgtcgaggagtcctcccgcggcatccgctcgggggagtccccggccgcggcgctccgccggatcctcgcgacgcctggtgcgcaccaggcgccctgctgctacgacgcgctcggcgcgcgcctcgtcgagcgcgcggggtttccgatcgggttcatgggcggtttctgtgtttctgccgcgcgacttggcttgcctgatgttggcctcatttcctatggagaaatggtagatcaagggcgtctcatcaatgaagctgtttcaatcccagtgattggtgatggagacaatggttacggaaactctatgaatatcaagagaaccataaaaggatatatcaatgctggttttgctggaattatgcttgaggatcaggtggcaaa

SEQ ID NO: 25399 - DNA, 679 bp, Zea Mays
gcaacgcacgggcactgacctaccaccttcctccgctcgccgtgcttctgcttcctccgccaccaccgccggcatggctgcgcgctgcccctacttcgccgtcgaggagtcctcccgcggcatccgctcgggggagtccccggccgcggcgctccgccggatcctcgcgacgcctggtgcgcaccaggcgccctgctgctacgacgcgctcggcgcgcgcctcgtcgagcgcgcggggtttccgatcgggttcatgggcggtttctgtgtttctgccgcgcgacttggcttgcctgatgttggcctcatttcctatggagaaatggtagatcaagggcgtctcatcaatgaagctgtttcaatcccagtgattggtgatggagacaatggttacggaaactctatgaatatcaagagaaccataaaaggatatatcaatgctggttttgctggaattatgcttgaggatcaggtctggagaaacggttgttcatccctgaggagtcaaagctatcaggcccagtctctgcaaaattaaagcccaagcttgttgagcaaacacatacgagatgatgatgtgttggatattttcctccgcctgatcataaagcgggcacaccgctggatgaggaagccaagcttagtaagatgataatctttccaacacctgtttttgatg

SEQ ID NO: 25400 - DNA, 1866 bp, Zea Mays
gctcgtcggccctccacgcaaacgaaatccagcagaccgacgcgaaccgagaaaaatcccacgaaatctcgtggccgcggcgaccggaagaagaggacgacgacggacggagcggcgatggcgtgccgcgcacttgccctccgctccctgctcctccccgacccgctacaccgcctcccggccgcggcgccacctgtttggagagcgtcccgcggtggccgccgtccgcacctccgctgctgctccggcggcgggggcggggagcccgggcagccgccgcaagaagctgtgctcgaggccatatccaagatagcaaggtctaaaggaagggttgcactcacaacaaatatggtcatgggtggtactgtgactgacgatgcaagtgatgaatggcttgttctggatcagaaggtaaattcctaccccacagatagaggatttacagcaattggcactggaggtgatgattttgtccagtcaatggtagttgctgttgaatctgttcttcaagaatcaattcccaagggccgggtatctcagaaattatcttcaagagggaaatatgtttctgtaaacattgggccaattcgtgttgtttctagtgagcagacgataactgccaaatccaagaaaattcctccaggaaagaaaaggagatgaggatgcatgcgtcttttgccaatgttcttaatatgtccaagctgtgtatcgtgccatgagaagagataacaggatgaaatacttcttatgaagtgcaatttcatgtcctggatgttccctagtccattccatgttgtatcctacgatgcattttcgccatatttgctggacctccggtgaattccaatgacttttatgtgccattcaagcccaaattgaagcttctctactacaaaacaatatgttgggtccagctacgttatttagtgcagggggcgtatatagctactatgtattccctttcttctataatgaataagattcaaaggtgcttgcaagcaataactgtcaaatccaagagatatcctctacaaaaggaaaggagataaggatacagcttcttttgccaacgttcctaatatatctgaaaatttctaggaacttgtttattatgggacggatggagtatgttaaagatgtatgttagtgtttcatattacatgtgttttactattttataaacagtatgaatagtagtataagtgctcctaaattatcgatgtgtgtcttcaattccaagagactattttttactctctatttgactctttatttacctctctataaagattaaaccctatatatagtatcttattcgaacagactttctaacagacaaattagtttagctagtcagagtgggtagctaagtttggctagagagaggaccaatttggagagccagatagcttagggagttggatggttagactgttggagagttattttattgttaaataaacaatttagcttgacgagtcatttggttagtctcttggagttgctcttcctaccttaaaagcctactaaaaggtaccatctactagttctttaatattatcttcggtggatcgtgtaaaatatgagacattgtactataaatgacactgtttgcagagtgaagtttaaaatatgtgatgagataggtatagataggggatctactggaaatggcataagtaactccctaaaggcttgtttagatcccatgtgcgctaacgtttatcacaccttgaaaagctaaattattattgggtgctaaagtttagaactcatgtttggaccttcaaatgctaaagtttagctaaagtgtagggctaaacataatcactatggattcaaacagactctaaatcttaaatttta

SEQ ID NO: 25401 - DNA, 1808 bp, Zea Mays
aaaaaagaagggaaaagagggggggaaataacggctcgtcggccctccacgcaaacgaaatccagcagaccgacgcgaaccgagaaaaatcccacgaaatctcgtggccgcggcgaccggaagaagaggacgacgacggacggagcggcgatggcgtgccgcgcacttgccctccgctccctgctcctccccgacccgctacaccgcctcccggccgcggcgccacctgtttggagagcgtcccgcggtggccgccgtccgcacctccgctgctgctccggcggcgggggcggggagcccgggcagccgccgcaagaagctgtgctcgaggccatatccacaaggtctaaaggaagggttgcactcacaacaaatatggtcatgggtggtactgtgactgacgatgcaagtgatgaatggcttgttctggatcagaaggtaaattcctaccccacagatagaggatttacagcaattggcactggaggtgatgattttgtccagtcaatggtagttgctgttgaatctgttcttcaagaatcaattcccaagggccgggtatctcagaaattatcttcaagagggaaatatgtttctgtaaacattgggccaattcgtgttgtttctagtgagcaggtccaagctgtgtatcgtgccatgagaagagataacaggatgaaatacttcttatgaagtgcaatttcatgtcctggatgttccctagtccattccatgttgtatcctacgatgcattttcgccatatttgctggacctccggtgaattccaatgacttttatgtgccattcaagcccaaattgaagcttctctactacaaaacaatatgttgggtccagctacgttatttagtgcagggggcgtatatagctactatgtattccctttcttctataatgaataagattcaaaggtgcttgcaagcaataactgtcaaatccaagagatatcctctacaaaaggaaaggagataaggatacagcttcttttgccaacgttcctaatatatctgaaaatttctaggaacttgtttattatgggacggatggagtatgttaaagatgtatgttagtgtttcatattacatgtgttttactattttataaacagtatgaatagtagtataagtgctcctaaattatcgatgtgtgtcttcaattccaagagactattttttactctctatttgactctttatttacctctctataaagattaaaccctatatatagtatcttattcgaacagactttctaacagacaaattagtttagctagtcagagtgggtagctaagtttggctagagagaggaccaatttggagagccagatagcttagggagttggatggttagactgttggagagttattttattgttaaataaacaatttagcttgacgagtcatttggttagtctcttggagttgctcttcctaccttaaaagcctactaaaaggtaccatctactagttctttaatattatcttcggtggatcgtgtaaaatatgagacattgtactataaatgacactgtttgcagagtgaagtttaaaatatgtgatgagataggtatagataggggatctactggaaatggcataagtaactccctaaaggcttgtttagatcccatgtgcgctaacgtttatcacaccttgaaaagctaaattattattgggtgctaaagtttagaactcatgtttggaccttcaaatgctaaagtttagctaaagtgtagggctaaacataatcactatggattcaaacagactctaaatcttaaatttta

SEQ ID NO: 25402 - DNA, 1822 bp, Zea Mays
gaaaaaaagaagggaaaagagggggggaaataacggctcgtcggccctccacgcaaacgaaatccagcagaccgacgcgaaccgagaaaaatcccacgaaatctcgtggccgcggcgaccggaagaagaggacgacgacggacggagcggcgatggcgtgccgcgcacttgccctccgctccctgctcctccccgacccgctacaccgcctcccggccgcggcgccacctgtttggagagcgtcccgcggtggccgccgtccgcacctccgctgctgctccggcggcgggggcggggagcccgggcagccgccgcaagaagctgtgctcgaggccatatccaagatagcaaggtctaaaggaagggttgcactcacaacaaatatggtcatgggtggtactgtgactgacgatgcaagtgatgaatggcttgttctggatcagaaggtaaattcctaccccacagatagaggatttacagcaattggcactggaggtgatgattttgtccagtcaatggtagttgctgttgaatctgttcttcaagaatcaattcccaagggccgggtatctcagaaattatcttcaagagggaaatatgtttctgtaaacattgggccaattcgtgttgtttctagtgagcaggtccaagctgtgtatcgtgccatgagaagagataacaggatgaaatacttcttatgaagtgcaatttcatgtcctggatgttccctagtccattccatgttgtatcctacgatgcattttcgccatatttatgcaggctggacctccggtgaattccaatgacttttatgtgccattcaagcccaaattgaagcttctctactacaaaacaatatgttgggtccagctacgttatttagtgcagggggcgtatatagctactatgtattccctttcttctataatgaataagattcaaaggtgcttgcaagcaataactgtcaaatccaagagatatcctctacaaaaggaaaggagataaggatacagcttcttttgccaacgttcctaatatatctgaaaatttctaggaacttgtttattatgggacggatggagtatgttaaagatgtatgttagtgtttcatattacatgtgttttactattttataaacagtatgaatagtagtataagtgctcctaaattatcgatgtgtgtcttcaattccaagagactattttttactctctatttgactctttatttacctctctataaagattaaaccctatatatagtatcttattcgaacagactttctaacagacaaattagtttagctagtcagagtgggtagctaagtttggctagagagaggaccaatttggagagccagatagcttagggagttggatggttagactgttggagagttattttattgttaaataaacaatttagcttgacgagtcatttggttagtctcttggagttgctcttcctaccttaaaagcctactaaaaggtaccatctactagttctttaatattatcttcggtggatcgtgtaaaatatgagacattgtactataaatgacactgtttgcagagtgaagtttaaaatatgtgatgagataggtatagataggggatctactggaaatggcataagtaactccctaaaggcttgtttagatcccatgtgcgctaacgtttatcacaccttgaaaagctaaattattattgggtgctaaagtttagaactcatgtttggaccttcaaatgctaaagtttagctaaagtgtagggctaaacataatcactatggattcaaacagactctaaatcttaaatttta

SEQ ID NO: 25403 - DNA, 1837 bp, Zea Mays
cagaaccgaagattgtatagggaaaaaaagaagggaaaagagggggggaaataacggctcgtcggccctccacgcaaacgaaatccagcagaccgacgcgaaccgagaaaaatcccacgaaatctcgtggccgcggcgaccggaagaagaggacgacgacggacggagcggcgatggcgtgccgcgcacttgccctccgctccctgctcctccccgacccgctacaccgcctcccggccgcggcgccacctgtttggagagcgtcccgcggtggccgccgtccgcacctccgctgctgctccggcggcgggggcggggagcccgggcagccgccgcaagaagctgtgctcgaggccatatccaagatagcaaggtctaaaggaagggttgcactcacaacaaatatggtcatgggtggtactgtgactgacgatgcaagtgatgaatggcttgttctggatcagaaggtaaattcctaccccacagatagaggatttacagcaattggcactggaggtgatgattttgtccagtcaatggtagttgctgttgaatctgttcttcaagaatcaattcccaagggccgggtatctcagaaattatcttcaagagggaaatatgtttctgtaaacattgggccaattcgtgttgtttctagtgagcaggtccaagctgtgtatcgtgccatgagaagagataacaggatgaaatacttcttatgaagtgcaatttcatgtcctggatgttccctagtccattccatgttgtatcctacgatgcattttcgccatatttgctggacctccggtgaattccaatgacttttatgtgccattcaagcccaaattgaagcttctctactacaaaacaatatgttgggtccagctacgttatttagtgcagggggcgtatatagctactatgtattccctttcttctataatgaataagattcaaaggtgcttgcaagcaataactgtcaaatccaagagatatcctctacaaaaggaaaggagataaggatacagcttcttttgccaacgttcctaatatatctgaaaatttctaggaacttgtttattatgggacggatggagtatgttaaagatgtatgttagtgtttcatattacatgtgttttactattttataaacagtatgaatagtagtataagtgctcctaaattatcgatgtgtgtcttcaattccaagagactattttttactctctatttgactctttatttacctctctataaagattaaaccctatatatagtatcttattcgaacagactttctaacagacaaattagtttagctagtcagagtgggtagctaagtttggctagagagaggaccaatttggagagccagatagcttagggagttggatggttagactgttggagagttattttattgttaaataaacaatttagcttgacgagtcatttggttagtctcttggagttgctcttcctaccttaaaagcctactaaaaggtaccatctactagttctttaatattatcttcggtggatcgtgtaaaatatgagacattgtactataaatgacactgtttgcagagtgaagtttaaaatatgtgatgagataggtatagataggggatctactggaaatggcataagtaactccctaaaggcttgtttagatcccatgtgcgctaacgtttatcacaccttgaaaagctaaattattattgggtgctaaagtttagaactcatgtttggaccttcaaatgctaaagtttagctaaagtgtagggctaaacataatcactatggattcaaacagactctaaatcttaaatttta

SEQ ID NO: 25404 - DNA, 1757 bp, Zea Mays
aacagcttgtgaagctgttggtggcagaaccgaagattgtatagggaaaaaaagaagggaaaagagggggggaaataacggctcgtcggccctccacgcaaacgaaatccagcagaccgacgcgaaccgagaaaaatcccacgaaatctcgtggccgcggcgaccggaagaagaggacgacgacggacggagcggcgatggcgtgccgcgcacttgccctccgctccctgctcctccccgacccgctacaccgcctcccggccgcggcgccacctgtttggagagcgtcccgcggtggccgccgtccgcacctccgctgctgctccggcggcgggggcggggagcccgggcagccgccgcaagaagctgtgctcgaggccatatccagtaaattcctaccccacagatagaggatttacagcaattggcactggaggtgatgattttgtccagtcaatggtagttgctgttgaatctgttcttcaagaatcaattcccaagggccgggtatctcagaaattatcttcaagagggaaatatgtttctgtaaacattgggccaattcgtgttgtttctagtgagcaggtccaagctgtgtatcgtgccatgagaagagataacaggatgaaatacttcttatgaagtgcaatttcatgtcctggatgttccctagtccattccatgttgtatcctacgatgcattttcgccatatttgctggacctccggtgaattccaatgacttttatgtgccattcaagcccaaattgaagcttctctactacaaaacaatatgttgggtccagctacgttatttagtgcagggggcgtatatagctactatgtattccctttcttctataatgaataagattcaaaggtgcttgcaagcaataactgtcaaatccaagagatatcctctacaaaaggaaaggagataaggatacagcttcttttgccaacgttcctaatatatctgaaaatttctaggaacttgtttattatgggacggatggagtatgttaaagatgtatgttagtgtttcatattacatgtgttttactattttataaacagtatgaatagtagtataagtgctcctaaattatcgatgtgtgtcttcaattccaagagactattttttactctctatttgactctttatttacctctctataaagattaaaccctatatatagtatcttattcgaacagactttctaacagacaaattagtttagctagtcagagtgggtagctaagtttggctagagagaggaccaatttggagagccagatagcttagggagttggatggttagactgttggagagttattttattgttaaataaacaatttagcttgacgagtcatttggttagtctcttggagttgctcttcctaccttaaaagcctactaaaaggtaccatctactagttctttaatattatcttcggtggatcgtgtaaaatatgagacattgtactataaatgacactgtttgcagagtgaagtttaaaatatgtgatgagataggtatagataggggatctactggaaatggcataagtaactccctaaaggcttgtttagatcccatgtgcgctaacgtttatcacaccttgaaaagctaaattattattgggtgctaaagtttagaactcatgtttggaccttcaaatgctaaagtttagctaaagtgtagggctaaacataatcactatggattcaaacagactctaaatcttaaatttta

SEQ ID NO: 25405 - DNA, 1941 bp, Zea Mays
atggtctccctctgcccgacgcaccttctttcacgtctcctctcaccccatgcgatgcttgggactcaacaaccgctccagtcgttgccctacaactctgccgccgtagtgcaacagatcctcactccccggcgcgatgctcggcacccgccccaccacgtcctcggcatgatgctcggcgcatgcccccacccctgtgacaatgtgacaccagcccacccctacctcgctctacatatccacgtcgggcagccaacgacggagccctggaggaggatatcggatggacgaccaggcgaccaggcttgtcaaaaccggaacaggaggcgggtattgatgttgggattagccgtggagaaggaatgcagaatatgttgtcaagcgtcctatttgcaagagataaatggcttacgcctgggggcttattcttccttctcatggcgactaggcttgtcaaaactggaacggtgtatgctgtcaagcgtcctatttgcaagagataaatggcttacgcctaggggcttattcttccttctcatggtacgatataattagcacacaaaaatgttacactgcttttacaaggcgcacttcatctatttgcttatacaagtcatcttactactgctttgacaaacattggtctgcttggctctggtctgttctttaggattctgtttcattgggagaaacaaatggcctttcttgcttttatttattcttttctgaataattaagaagactagcctcatgttgtaatcttcagcgttatatataatacaacaacaaaaaaagagatttgcaatgaaaagttaataaggggtcttttctccaatacaaggaatcatagaatataaaacttttcttctaaacatagcgtacaatggttttagctgattattgtgtattttagaagatggtggattgtgggaatacttccctagccctttttgctacatataggtcttcaggaggaaccttgcttttgacaccaggaatgttgtaagcattacagtatgcaatcagttccttctttattaccatatatatgaacttagaaccatgatacagtctctaatcgcaccaggcgatagttctacctgatgaccacggtcattttattacaaaatttgcaagaccatgacaaggatgtatcaacagatttcaaatgattaatcaaatgaagaacatacatttgttttataggtattcctttttgccaactcgaaatgcaagcgctacttccacgactacctgaagcctacaaagcttacctagacaacaatgcacaggaagcaacaaaagaagggatgtgatattacctagctaactttcttaacttcctaagagtgtcattcgttcatttctcttataaagattccatgttttttattatagattagctacaactttctagtattagcaaaatacaagtcttattaaactaggaccaggattccaataaaccaaagctttggacattttcttgccattctggaatctagattatgattcatatgttaactttgatatttatctgcagcactggtatataacattaactatataatcttcaggtgttaatgtacatttaatgttagctaatatggttagtttcttctcaatcatgtgattgttgcatcctttgtaaccttacacttcgtcattatctttgtattgaactatttgacgcatgacatctaataagatgtttgcaaaacaattatttttaccatgctcatattggtgctggaagtctaactcacatgtatttgacatttttctctataggatatccatgatgaagctgtcaagaagaggcgctgcaccaccaagaagccatactcgaggtcaactgtgggtgcttccttggaagttatacagaagaatagagctaagaagctagatgtctatggtactattagagaagttgtgtggtaa

SEQ ID NO: 25406 - DNA, 1020 bp, Zea Mays
attaactgcctctcctccctagcccatccgcgcgccgtcgtctcctccccagccgggcggccgcgtgccgtcccgtccccagcccatccgcgcgccgtcgtctcctccccagtcgaccggccacgcgccgtcccgtccccagccagccacgcgcgcagtccgtcgtcccgtccccagccacacgcgcgcagtctcctccccagccacacgcgcgcagtccgccgtcccgtccccagccacgcacgtctaatggttcagcaacaagttagtgcaagatttggtaaatgccttcttgaacttagcggaaacaatgccaccattgttatggatgatgcagatatccagctagatgtgcgatctgtcttgttcgctgctgttggtacagcaggacaacgctgcactacatgtcataggctgattcttcatgagaatatatatcaaaccttccttgatcagcttgttgaggtatacaaacaagtccgaattggggatccgttggagaaaggcaccttactgggaccactgcacactcctgcttcaaaagagaactttttaaaaggcattcagactatcaaatcttaggtgaagggagggaaaatcctttttggaggatctgccattgaatcagaaggaaactttgtgcaaccaacaattatggaaattacacgttctgcaccagttgtgaaagaagaactctttggtcctgtcctttatgttatgaaatttcagaccttgaaggaagcaattgaaatcaataactctgttcctcaaggattgagcagttctatatttacaaagaggccaaatattatttttaagtggctcgggccccatggtagtgattgtggtatagtgaatgtgaacatacctactaatggtgctgaaattggtggagcatttggtggagaaaaagcagctggtggtggacgagaagcagggagtgattcctggaagcagtacatgaggagggcgacttggagggaggtcctagaggtagtaagtcacttgtttactccatga

SEQ ID NO: 25407 - DNA, 941 bp, Zea Mays
attaactgcctctcctccctagcccatccgcgcgccgtcgtctcctccccagccgggcggccgcgtgccgtcccgtccccagcccatccgcgcgccgtcgtctcctccccagtcgaccggccacgcgccgtcccgtccccagccagccacgcgcgcagtccgtcgtcccgtccccagccacacgcgcgcagtctcctccccagccacacgcgcgcagtccgccgtcccgtccccagccacgcacgtctaatggttcagcaacaaatatccagctagatgtgcgatctgtcttgttcgctgctgttggtacagcaggacaacgctgcactacatgtcataggctgattcttcatgagaatatatatcaaaccttccttgatcagcttgttgaggtatacaaacaagtccgaattggggatccgttggagaaaggcaccttactgggaccactgcacactcctgcttcaaaagagaactttttaaaaggcattcagactatcaaatcttagggagggaaaatcctttttggaggatctgccattgaatcagaaggaaactttgtgcaaccaacaattatggaaattacacgttctgcaccagttgtgaaagaagaactctttggtcctgtcctttatgttatgaaatttcagaccttgaaggaagcaattgaaatcaataactctgttcctcaaggattgagcagttctatatttacaaagaggccaaatattatttttaagtggctcgggccccatggtagtgattgtggtatagtgaatgtgaacatacctactaatggtgctgaaattggtggagcatttggtggagaaaaagcagctggtggtggacgagaagcagggagtgattcctggaagcagtacatgaggagggcgacttggagggaggtcctagaggtagtaagtcacttgtttactccatga

SEQ ID NO: 25408 - DNA, 824 bp, Zea Mays
attaactgcctctcctccctagcccatccgcgcgccgtcgtctcctccccagccgggcggccgcgtgccgtcccgtccccagcccatccgcgcgccgtcgtctcctccccagtcgaccggccacgcgccgtcccgtccccagccagccacgcgcgcagtccgtcgtcccgtccccagccacacgcgcgcagtctcctccccagccacacgcgcgcagtccgccgtcccgtccccagccacgcacgtctaatggttcagcaacaaatatccagctagatgtgcgatctgtcttgttcgctgctgttggtacagcaggacaacgctgcactacatgtcataggctgattcttcatgagaatatatatcaaaccttccttgatcagcttgttgagggagggaaaatcctttttggaggatctgccattgaatcagaaggaaactttgtgcaaccaacaattatggaaattacacgttctgcaccagttgtgaaagaagaactctttggtcctgtcctttatgttatgaaatttcagaccttgaaggaagcaattgaaatcaataactctgttcctcaaggattgagcagttctatatttacaaagaggccaaatattatttttaagtggctcgggccccatggtagtgattgtggtatagtgaatgtgaacatacctactaatggtgctgaaattggtggagcatttggtggagaaaaagcagctggtggtggacgagaagcagggagtgattcctggaagcagtacatgaggagggcgacttggagggaggtcctagaggtagtaagtcacttgtttactccatga

SEQ ID NO: 25409 - DNA, 4010 bp, Zea Mays
cccttcagaaaacagagcgagtccaattcgagacggctctccccacatcaccacagcgcagccgcaaccatggcttccgccgaaaccctagcccgctccccctcacgcgagccctcttccgacctgacccgcgccgactcttccgagccccaccacaacatcgatggctccggcgcgggcgccggagactcatcccgccgccgccgccgctcccgctgggagcagtctaacgacgactccgccgccaacaactccggcggcgagggcgggaccgggggccggaagcgcaagacgcggtgggccgaggaggagccgcgcccggcgatcgcgctcccggacttcatgaaggacttcgccgccgagatggaccccgaggtgcacgccctaaacgcgcgcctcctcgagatctcgcgtctgctgcaatcgggcctcccgctcgacgatcgccccgagggggcgcgctcgccctcccctgagcctgtctacgacaacctcggcatccgcatcaacacccgcgaataccgcgctagggagcgcctcaaccgcgagaggcaggagatcatctcgcagcttatccgccgcaaccccgccttcaagcccccctccgactaccgcccacccaagctccagaagaagctctacatccccatgaaggagtacccaggctacaactttatcggcctcatcattggccctcgtggcaacacgcagaagcgcatggagaaggagactggtgccaagattgtcatcagggggaagggtagtgtcaaggaagggaagctgctccagaagagggacctcaagccagatcccagcgagaacgaagacctccacgtgcttgttgaggcagatacacaggaggcactggatgcagctgctggtatggtggagaagctgctcaccccggtggatgaggtgctcaatgagcacaagcggcagcagctccgggagcttgccgcgcttaatggaacaattagggacgatgaattttgtaggacatgtggtgaggctggtcacaggcagtatgcttgccccaacaagatgaacactggacagagcaaaggatatggatttgtcaagtattcagatgtgtcacaggccaatgcagcgattgctgcaatgaatggtcaccatcttgaagggcgagttattgcggttagagttgcaggaaagccgccacagacagcaccagcagtgtcagcacccccatcatatcctcctccggatcctacttcaggtggctattcctcccagtcctacatgggggcaccaccacctcctcctccagggagttatgctccagttccttgggggcagccgccaccatatgcttcatatcctccgccaccaccaggctctggtgtctacagtcctgcaccccctgcaccaggtcaagctgccccacctccgtatgggatgcaatatccaccaccaccaccacccccagcagctccaatccctccaccaggcactgctccatcaagtgatggagctcagaactatccacctggtgtaacaccaccaagttctggctcatccactcaccctgttgcaacatcagtatatgcatcatctggtgcaccaaatgcaccatcgatataccctccaccaccttatagttattcctcatactaccctccaccatttcagccaccacctccaccaccaccaccaccggctagtgttgatccctctcagagtattgcaactgcaccttggctaacccacagtgtggtggtgccaccaccacccacgagtgttgatccttctcagagtatttcaactgcaccttggttaacccacagcgcagtgccgccaccaccaccacctttgtcctccacaaccgaccagtctactgcttcctatggtgccgatgcagagtatgacaagtttatgtcagagatgaagtgatacgagcgaagctggatgattcttccaatgaagggcaaaaggcttgatctttcttggagcttataccaacctgatttatttcttgttggaagtttcggactcacatcttaaccttgctgtgtgctgttgtgaccgttgcagaggttgcatgcttaagaaggcatcaagtattactggctcagctggcatcagaatatttgctcatcttcttggaactattttaaggaatcttttactaatgcttttgttgtgatgtctattcttgttattatttgagattactctgtgttttcactttaatgctctgttctttgtgacatgtgttaatctcactttattattcatatatattattcttcatcttgatttggtagtgctagcactcctctccatctggagcagaaaagcctgctgctccgtgctggttggtataacttcaaaaatttaaatgcttgtttggtatcttctgataatctgtcatgcatttctttcttacgtcttcacctaagttgtttggcagttgtcgtgacagcttggcacaggcagccagagtttttagcacgtgatgaatgaatatcaggtataatggaggtgctgtgaattgttctgtgaacccaatgttttcatttggtttctgcacaattttctactgacaaacagtaacgagtttcccatttggtagttgatgtgtgtgcattagggtaaccaagcatgcacgcatgctggaaaaaaatctttgatgaagagcttacatatatattttgcattgctaatgctcttttaacatcattggaatttttgtttgcggttcaagtaggacatgctggcgtgcagatctagtctggagtcctatgctcaaggtgcatactgtcacaatgatatttgtgagatgaactgaaggtttggaggttggctcagattagtttttgctaagtaaagtaggatattaccataatcttgtcctagtgaaataatgcgatagtcagtccacaaccagcattaagtacctttatcacgttgcatatatatcagtttgatgtgacctcgtatctagcattagccacctcaatttgcactacaaattttattaagccttcgatttcttgtatgaaaaatgcttgagccaacctggattactggttgcagcaatgaggaatcctaaatcaagtttgtcagctgagtgcacacaattattatggattaatatactttattctgggcttgtttcactgttttcaattcatccaattaatcgtgattaatcgtccaagtcagtttggacaaatcgcgattaattgcccaagtcatctgactaatcgtgattaaacgttcaagtcggtcagctagaatgaccagctagtggtccgacttgaaaacaatggcttgtttttataggagttctagtttgtagctatttaaaaatcatagttaacagaaaatacaatggaataaacagtttgtgtgccactaatttaaaatggggaaggtaatttcacagtaagaaatgatctaggtgttctttgtttttttcttgcttgtttgcaactagtgagaacattttttgttcttacgattaatatgttgcatgcgctctgtttagtttctgctatcttcatatatctggtgaatgcaaattttgaggcattccatgctgacctgtttattcatttaggatatctatttgatttggtggcatccatatgttattgacataatactgttttactgatcatattaccggaaatcctcgaaaacagcataaattattctgcatgcgaagctgcggctaaaatcgggtttggccaactgctttattttctaacaggggtgtattgagaaagaagaaattggaatctgctgatgtttaggaggaagtggatgtctgaaatttgtgacctaaacaagcacaaagaagttacaaaatgagacatgaattttgtaccattgtcactgtgaattgctttgaagtcatcctttggaatcttattttacaaccaaaaaaaatcaaaccttgagcatgagaacaactctcatcctttgcctacatgaaaaacaccaagaatagtgtgaaaagtcatcaacaatcaccaaaacatgtc

SEQ ID NO: 25410 - DNA, 3186 bp, Zea Mays
ctccattgatcttttcccttcagaaaacagagcgagtccaattcgagacggctctccccacatcaccacagcgcagccgcaaccatggcttccgccgaaaccctagcccgctccccctcacgcgagccctcttccgacctgacccgcgccgactcttccgagccccaccacaacatcgatggctccggcgcgggcgccggagactcatcccgccgccgccgccgctcccgctgggagcagtctaacgacgactccgccgccaacaactccggcggcgagggcgggaccgggggccggaagcgcaagacgcggtgggccgaggaggagccgcgcccggcgatcgcgctcccggacttcatgaaggacttcgccgccgagatggaccccgaggtgcacgccctaaacgcgcgcctcctcgagatctcgcgtctgctgcaatcgggcctcccgctcgacgatcgccccgagggggcgcgctcgccctcccctgagcctgtctacgacaacctcggcatccgcatcaacacccgcgaataccgcgctagggagcgcctcaaccgcgagaggcaggagatcatctcgcagcttatccgccgcaaccccgccttcaagcccccctccgactaccgcccacccaagctccagaagaagctctacatccccatgaaggagtacccaggctacaactttatcggcctcatcattggccctcgtggcaacacgcagaagcgcatggagaaggagactggtgccaagattgtcatcagggggaagggtagtgtcaaggaagggaagctgctccagaagagggacctcaagccagatcccagcgagaacgaagacctccacgtgcttgttgaggcagatacacaggaggcactggatgcagctgctggtatggtggagaagctgctcaccccggtggatgaggtgctcaatgagcacaagcggcagcagctccgggagcttgccgcgcttaatggaacaattagggacgatgaattttgtaggacatgtggtgaggctggtcacaggcagtatgcttgccccaacaagatgaacacatttaagagtgatgttcagtgcaagatctgcggggacggtgggcacccaactattgattgtccggtcaagggcacttctgggaagaagatggatgatgaataccagaacttcctggctgagcttggtggtgggagtgcacctgagtccatgaacaaatctggtggtccgatgttggctcttacaggaagtggtggtagcggtggtgcttctactggaactgggagtaacccgccttggtcggccggtggtggtgccgcttccactgggctcaatggtatcaagaaagattatgacgagacaaatctttatattggatacctgccacctacaatggacgatgcaggtttagtcagtctgttttcgcagtttggggagattgtcatggctaaggtgatcaaggatcgaaacactggacagagcaaaggatatggatttgtcaagtattcagatgtgtcacaggccaatgcagcgattgctgcaatgaatggtcaccatcttgaagggcgagttattgcggttagagttgcaggaaagccgccacagacagcaccagcagtgtcagcacccccatcatatcctcctccggatcctacttcaggtggctattcctcccagtcctacatgggggcaccaccacctcctcctccagggagttatgctccagttccttgggggcagccgccaccatatgcttcatatcctccgccaccaccaggctctggtgtctacagtcctgcaccccctgcaccaggtcaagctgccccacctccgtatgggatgcaatatccaccaccaccaccacccccagcagctccaatccctccaccaggcactgctccatcaagtgatggagctcagaactatccacctggtgtaacaccaccaagttctggctcatccactcaccctgttgcaacatcagtatatgcatcatctggtgcaccaaatgcaccatcgatataccctccaccaccttatagttattcctcatactaccctccaccatttcagccaccacctccaccaccaccaccaccggctagtgttgatccctctcagagtattgcaactgcaccttggctaacccacagtgtggtggtgccaccaccacccacgagtgttgatccttctcagagtatttcaactgcaccttggttaacccacagcgcagtgccgccaccaccaccacctttgtcctccacaaccgaccagtctactgcttcctatggtgccgatgcagagtatgacaagtttatgtcagagatgaagtgatacgagcgaagctggatgattcttccaatgaagggcaaaaggcttgatctttcttggagcttataccaacctgatttatttcttgttggaagtttcggactcacatcttaaccttgctgtgtgctgttgtgaccgttgcagaggttgcatgcttaagaaggcatcaagtattactggctcagctggcatcagaatatttgctcatcttcttggaactattttaaggaatcttttactaatgcttttgttgtgatgtctattcttgttattatttgagattactctgtgttttcactttaatgctctgttctttgtgacatgtgttaatctcactttattattcatatatattattcttcatcttgatttggtagtgctagcactcctctccatctggagcagaaaagcctgctgctccgtgctgttgtcgtgacagcttggcacaggcagccagagtttttagcacgtgatgaatgaatatcaggacatgctggcgtgcagatctagtctggagtcctatgctcaaggtgcatactgtcacaatgatatttgtgagatgaactgaaggtttggaggggtgtattgagaaagaagaaattggaatctgctgatgtttaggaggaagtggatgtctgaaatttgtgacctaaacaagcacaaagaagttacaaaatgagacatgaattttgtaccattgtcactgtgaattgctttgaagtcatcctttggaatcttattttacaaccaaaaaaaatcaaaccttgagcatgagaacaactctcatcctttgcctacatgaaaaacaccaagaatagtgtgaaaagtcatcaacaatcaccaaaacatgtc

SEQ ID NO: 25411 - DNA, 4099 bp, Zea Mays
ctccattgatcttttcccttcagaaaacagagcgagtccaattcgagacggctctccccacatcaccacagcgcagccgcaaccatggcttccgccgaaaccctagcccgctccccctcacgcgagccctcttccgacctgacccgcgccgactcttccgagccccaccacaacatcgatggctccggcgcgggcgccggagactcatcccgccgccgccgccgctcccgctgggagcagtctaacgacgactccgccgccaacaactccggcggcgagggcgggaccgggggccggaagcgcaagacgcggtgggccgaggaggagccgcgcccggcgatcgcgctcccggacttcatgaaggacttcgccgccgagatggaccccgaggtgcacgccctaaacgcgcgcctcctcgagatctcgcgtctgctgcaatcgggcctcccgctcgacgatcgccccgagggggcgcgctcgccctcccctgagcctgtctacgacaacctcggcatccgcatcaacacccgcgaataccgcgctagggagcgcctcaaccgcgagaggcaggagatcatctcgcagcttatccgccgcaaccccgccttcaagcccccctccgactaccgcccacccaagctccagaagaagctctacatccccatgaaggagtacccaggctacaactttatcggcctcatcattggccctcgtggcaacacgcagaagcgcatggagaaggagactggtgccaagattgtcatcagggggaagggtagtgtcaaggaagggaagctgctccagaagagggacctcaagccagatcccagcgagaacgaagacctccacgtgcttgttgaggcagatacacaggaggcactggatgcagctgctggtatggtggagaagctgctcaccccggtggatgaggtgctcaatgagcacaagcggcagcagctccgggagcttgccgcgcttaatggaacaattagggacgatgaattttgtaggacatgtggtgaggctggtcacaggcagtatgcttgccccaacaagatgaacacatttaagagtgatgttcagtgcaagatctgcggggacggtgggcacccaactattgattgtccggtcaagggcacttctgggaagaagatggatgatgaataccagaacttcctggctgagcttggtggtgggagtgcacctgagtccatgaacaaatctggtggtccgatgttggctcttacaggaagtggtggtagcggtggtgcttctactggaactgggagtaacccgccttggtcggccggtggtggtgccgcttccactgggctcaatggtatcaagaaagattatgacgagacaaatctttatattggatacctgccacctacaatggacgatgcaggtttagtcagtctgttttcgcagtttggggagattgtcatggctaaggtgatcaaggatcgaaacactggacagagcaaaggatatggatttgtcaagtattcagatgtgtcacaggccaatgcagcgattgctgcaatgaatggtcaccatcttgaagggcgagttattgcggttagagttgcaggaaagccgccacagacagcaccagcagtgtcagcacccccatcatatcctcctccggatcctacttcaggtggctattcctcccagtcctacatgggggcaccaccacctcctcctccagggagttatgctccagttccttgggggcagccgccaccatatgcttcatatcctccgccaccaccaggctctggtgtctacagtcctgcaccccctgcaccaggtcaagctgccccacctccgtatgggatgcaatatccaccaccaccaccacccccagcagctccaatccctccaccaggcactgctccatcaagtgatggagctcagaactatccacctggtgtaacaccaccaagttctggctcatccactcaccctgttgcaacatcagtatatgcatcatctggtgcaccaaatgcaccatcgatataccctccaccaccttatagttattcctcatactaccctccaccatttcagccaccacctccaccaccaccaccaccggctagtgttgatccctctcagagtattgcaactgcaccttggctaacccacagtgtggtggtgccaccaccacccacgagtgttgatccttctcagagtatttcaactgcaccttggttaacccacagcgcagtgccgccaccaccaccacctttgtcctccacaaccgaccagtctactgcttcctatggtgccgatgcagagtatgacaagtttatgtcagagatgaagtgatacgagcgaagctggatgattcttccaatgaagggcaaaagaggttgcatgcttaagaaggcatcaagtattactggctcagctggcatcagaatatttgctcatcttcttggaactattttaaggaatcttttactaatgcttttgttgtgatgtctattcttgttattatttgagattactctgtgttttcactttaatgctctgttctttgtgacatgtgttaatctcactttattattcatatatattattcttcatcttgatttggtagtgctagcactcctctccatctggagcagaaaagcctgctgctccgtgctggttggtataacttcaaaaatttaaatgcttgtttggtatcttctgataatctgtcatgcatttctttcttacgtcttcacctaagttgtttggcagttgtcgtgacagcttggcacaggcagccagagtttttagcacgtgatgaatgaatatcaggacatgctggcgtgcagatctagtctggagtcctatgctcaaggtgcatactgtcacaatgatatttgtgagatgaactgaaggtttggaggttggctcagattagtttttgctaagtaaagtaggatattaccataatcttgtcctagtgaaataatgcgatagtcagtccacaaccagcattaagtacctttatcacgttgcatatatatcagtttgatgtgacctcgtatctagcattagccacctcaatttgcactacaaattttattaagccttcgatttcttgtatgaaaaatgcttgagccaacctggattactggttgcagcaatgaggaatcctaaatcaagtttgtcagctgagtgcacacaattattatggattaatatactttattctgggcttgtttcactgttttcaattcatccaattaatcgtgattaatcgtccaagtcagtttggacaaatcgcgattaattgcccaagtcatctgactaatcgtgattaaacgttcaagtcggtcagctagaatgaccagctagtggtccgacttgaaaacaatggcttgtttttataggagttctagtttgtagctatttaaaaatcatagttaacagaaaatacaatggaataaacagtttgtgtgccactaatttaaaatggggaaggtaatttcacagtaagaaatgatctaggtgttctttgtttttttcttgcttgtttgcaactagtgagaacattttttgttcttacgattaatatgttgcatgcgctctgtttagtttctgctatcttcatatatctggtgaatgcaaattttgaggcattccatgctgacctgtttattcatttaggatatctatttgatttggtggcatccatatgttattgacataatactgttttactgatcatattaccggaaatcctcgaaaacagcataaattattctgcatgcgaagctgcggctaaaatcgggtttggccaactgctttattttctaacaggggtgtattgagaaagaagaaattggaatctgctgatgtttaggaggaagtggatgtctgaaatttgtgacctaaacaagcacaaagaagttacaaaatgagacatgaattttgtaccattgtcactgtgaattgctttgaagtcatcctttggaatcttattttacaaccaaaaaaaatcaaaccttgagcatgagaacaactctcatcctttgcctacatgaaaaacaccaagaatagtgtgaaaagtcatcaacaatcaccaaaacatgtc

SEQ ID NO: 25412 - DNA, 4106 bp, Zea Mays
attctccattgatcttttcccttcagaaaacagagcgagtccaattcgagacggctctccccacatcaccacagcgcagccgcaaccatggcttccgccgaaaccctagcccgctccccctcacgcgagccctcttccgacctgacccgcgccgactcttccgagccccaccacaacatcgatggctccggcgcgggcgccggagactcatcccgccgccgccgccgctcccgctgggagcagtctaacgacgactccgccgccaacaactccggcggcgagggcgggaccgggggccggaagcgcaagacgcggtgggccgaggaggagccgcgcccggcgatcgcgctcccggacttcatgaaggacttcgccgccgagatggaccccgaggtgcacgccctaaacgcgcgcctcctcgagatctcgcgtctgctgcaatcgggcctcccgctcgacgatcgccccgagggggcgcgctcgccctcccctgagcctgtctacgacaacctcggcatccgcatcaacacccgcgaataccgcgctagggagcgcctcaaccgcgagaggcaggagatcatctcgcagcttatccgccgcaaccccgccttcaagcccccctccgactaccgcccacccaagctccagaagaagctctacatccccatgaaggagtacccaggctacaactttatcggcctcatcattggccctcgtggcaacacgcagaagcgcatggagaaggagactggtgccaagattgtcatcagggggaagggtagtgtcaaggaagggaagctgctccagaagagggacctcaagccagatcccagcgagaacgaagacctccacgtgcttgttgaggcagatacacaggaggcactggatgcagctgctggtatggtggagaagctgctcaccccggtggatgaggtgctcaatgagcacaagcggcagcagctccgggagcttgccgcgcttaatggaacaattagggacgatgaattttgtaggacatgtggtgaggctggtcacaggcagtatgcttgccccaacaagatgaacacatttaagagtgatgttcagtgcaagatctgcggggacggtgggcacccaactattgattgtccggtcaagggcacttctgggaagaagatggatgatgaataccagaacttcctggctgagcttggtggtgggagtgcacctgagtccatgaacaaatctggtggtccgatgttggctcttacaggaagtggtggtagcggtggtgcttctactggaactgggagtaacccgccttggtcggccggtggtggtgccgcttccactgggctcaatggtatcaagaaagattatgacgagacaaatctttatattggatacctgccacctacaatggacgatgcaggtttagtcagtctgttttcgcagtttggggagattgtcatggctaaggtgatcaaggatcgaaacactggacagagcaaaggatatggatttgtcaagtattcagatgtgtcacaggccaatgcagcgattgctgcaatgaatggtcaccatcttgaagggcgagttattgcggttagagttgcaggaaagccgccacagacagcaccagcagtgtcagcacccccatcatatcctcctccggatcctacttcaggtggctattcctcccagtcctacatgggggcaccaccacctcctcctccagggagttatgctccagttccttgggggcagccgccaccatatgcttcatatcctccgccaccaccaggctctggtgtctacagtcctgcaccccctgcaccaggtcaagctgccccacctccgtatgggatgcaatatccaccaccaccaccacccccagcagctccaatccctccaccaggcactgctccatcaagtgatggagctcagaactatccacctggtgtaacaccaccaagttctggctcatccactcaccctgttgcaacatcagtatatgcatcatctggtgcaccaaatgcaccatcgatataccctccaccaccttatagttattcctcatactaccctccaccatttcagccaccacctccaccaccaccaccaccggctagtgttgatccctctcagagtattgcaactgcaccttggctaacccacagtgtggtggtgccaccaccacccacgagtgttgatccttctcagagtatttcaactgcaccttggttaacccacagcgcagtgccgccaccaccaccacctttgtcctccacaaccgaccagtctactgcttcctatggtgccgatgcagagtatgacaagtttatgtcagagatgaagtgatacgagcgaagctggatgattcttccaatgaagggcaaaaggcttgatctttcttggagcttataccaacctgatttatttcttgttggaagtttcggactcacatcttaaccttgctgtgtgctgttgtgaccgttgcagaggttgcatgcttaagaaggcatcaagtattactggctcagctggcatcagaatatttgctcatcttcttggaactattttaaggaatcttttactaatgcttttgttgtgatgtctattcttgttattatttgagattactctgtgttttcactttaatgctctgttctttgtgacatgtgttaatctcactttattattcatatatattattcttcatcttgatttggtagtgctagcactcctctccatctggagcagaaaagcctgctgctccgtgctgttgtcgtgacagcttggcacaggcagccagagtttttagcacgtgatgaatgaatatcaggacatgctggcgtgcagatctagtctggagtcctatgctcaaggtgcatactgtcacaatgatatttgtgagatgaactgaaggtttggaggttggctcagattagtttttgctaagtaaagtaggatattaccataatcttgtcctagtgaaataatgcgatagtcagtccacaaccagcattaagtacctttatcacgttgcatatatatcagtttgatgtgacctcgtatctagcattagccacctcaatttgcactacaaattttattaagccttcgatttcttgtatgaaaaatgcttgagccaacctggattactggttgcagcaatgaggaatcctaaatcaagtttgtcagctgagtgcacacaattattatggattaatatactttattctgggcttgtttcactgttttcaattcatccaattaatcgtgattaatcgtccaagtcagtttggacaaatcgcgattaattgcccaagtcatctgactaatcgtgattaaacgttcaagtcggtcagctagaatgaccagctagtggtccgacttgaaaacaatggcttgtttttataggagttctagtttgtagctatttaaaaatcatagttaacagaaaatacaatggaataaacagtttgtgtgccactaatttaaaatggggaaggtaatttcacagtaagaaatgatctaggtgttctttgtttttttcttgcttgtttgcaactagtgagaacattttttgttcttacgattaatatgttgcatgcgctctgtttagtttctgctatcttcatatatctggtgaatgcaaattttgaggcattccatgctgacctgtttattcatttaggatatctatttgatttggtggcatccatatgttattgacataatactgttttactgatcatattaccggaaatcctcgaaaacagcataaattattctgcatgcgaagctgcggctaaaatcgggtttggccaactgctttattttctaacaggggtgtattgagaaagaagaaattggaatctgctgatgtttaggaggaagtggatgtctgaaatttgtgacctaaacaagcacaaagaagttacaaaatgagacatgaattttgtaccattgtcactgtgaattgctttgaagtcatcctttggaatcttattttacaaccaaaaaaaatcaaaccttgagcatgagaacaactctcatcctttgcctacatgaaaaacaccaagaatagtgtgaaaagtcatcaacaatcaccaaaacatgtc

SEQ ID NO: 25413 - DNA, 4443 bp, Zea Mays
cctaattctccattgatcttttcccttcagaaaacagagcgagtccaattcgagacggctctccccacatcaccacagcgcagccgcaaccatggcttccgccgaaaccctagcccgctccccctcacgcgagccctcttccgacctgacccgcgccgactcttccgagccccaccacaacatcgatggctccggcgcgggcgccggagactcatcccgccgccgccgccgctcccgctgggagcagtctaacgacgactccgccgccaacaactccggcggcgagggcgggaccgggggccggaagcgcaagacgcggtgggccgaggaggagccgcgcccggcgatcgcgctcccggacttcatgaaggacttcgccgccgagatggaccccgaggtgcacgccctaaacgcgcgcctcctcgagatctcgcgtctgctgcaatcgggcctcccgctcgacgatcgccccgagggggcgcgctcgccctcccctgagcctgtctacgacaacctcggcatccgcatcaacacccgcgaataccgcgctagggagcgcctcaaccgcgagaggcaggagatcatctcgcagcttatccgccgcaaccccgccttcaagcccccctccgactaccgcccacccaagctccagaagaagctctacatccccatgaaggagtacccaggctacaactttatcggcctcatcattggccctcgtggcaacacgcagaagcgcatggagaaggagactggtgccaagattgtcatcagggggaagggtagtgtcaaggaagggaagctgctccagaagagggacctcaagccagatcccagcgagaacgaagacctccacgtgcttgttgaggcagatacacaggaggcactggatgcagctgctggtatggtggagaagctgctcaccccggtggatgaggtgctcaatgagcacaagcggcagcagctccgggagcttgccgcgcttaatggaacaattagggacgatgaattttgtaggacatgtggtgaggctggtcacaggcagtatgcttgccccaacaagatgaacacatttaagagtgatgttcagtgcaagatctgcggggacggtgggcacccaactattgattgtccggtcaagggcacttctgggaagaagatggatgatgaataccagaacttcctggctgagcttggtggtgggagtgcacctgagtccatgaacaaatctggtggtccgatgttggctcttacaggaagtggtggtagcggtggtgcttctactggaactgggagtaacccgccttggtcggccggtggtggtgccgcttccactgggctcaatggtatcaagaaagattatgacgagacaaatctttatattggatacctgccacctacaatggacgatgcaggtttagtcagtctgttttcgcagtttggggagattgtcatggctaaggtgatcaaggatcgaaacactggacagagcaaaggatatggatttgtcaagtattcagatgtgtcacaggccaatgcagcgattgctgcaatgaatggtcaccatcttgaagggcgagttattgcggttagagttgcaggaaagccgccacagacagcaccagcagtgtcagcacccccatcatatcctcctccggatcctacttcaggtggctattcctcccagtcctacatgggggcaccaccacctcctcctccagggagttatgctccagttccttgggggcagccgccaccatatgcttcatatcctccgccaccaccaggctctggtgtctacagtcctgcaccccctgcaccaggtcaagctgccccacctccgtatgggatgcaatatccaccaccaccaccacccccagcagctccaatccctccaccaggcactgctccatcaagtgatggagctcagaactatccacctggtgtaacaccaccaagttctggctcatccactcaccctgttgcaacatcagtatatgcatcatctggtgcaccaaatgcaccatcgatataccctccaccaccttatagttattcctcatactaccctccaccatttcagccaccacctccaccaccaccaccaccggctagtgttgatccctctcagagtattgcaactgcaccttggctaacccacagtgtggtggtgccaccaccacccacgagtgttgatccttctcagagtatttcaactgcaccttggttaacccacagcgcagtgccgccaccaccaccacctttgtcctccacaaccgaccagtctactgcttcctatggtgccgatgcagagtatgacaagtttatgtcagagatgaagtgatacgagcgaagctggatgattcttccaatgaagggcaaaaggtaacttaacatgatctgtctctgttctattaatttcggtaggttcagttgggtatggtttgctattttattgacaaggaaacccatgtttcaattattccgtgtgttttattatttatattctatatactactgtacttatatttgatcattgtgctgatgtaccatatagttatatcttacacgttgtttggttttgacttagggggtgtttgggactgctccagtttccagcttcatagtggagctgtggtttataatataaatttaaatagtttaaagatattttaaatgttaataataaacaaaatgacttatctaaatgtcctttataggttcatagctccaactccatggtttcctggagcactaatgacctgctccaccaactctaccaaattttctggagctgtagcagtccctaacacccctttaatgagtctacactgcaaaagtttcttggagtctatattgtgccatagttatttatttttctttcaatatcttatggttttatggattttcatccttttgctagaggtattgtttttgtattaactattaaagcaaacacatgtattgtctcactgaggacgcttatttatgataatatcttattgttaaaatgaggtcaggactaacatgctcatgcttgtcttagatggtaaggaagtcagtagaactcgaagacaacatttcttttgatagcatatgatattatcagattatttttattgagaatgcctggattttttgggggatctgatatatgatgcactttctcaggcactgcggtttatacagaattgttttttagactatgtgctttatgctcccaccccctctcttttccatacaaaatgcttggtatacttattatacctcaccttttctatgttgtcttgacttcttgacaggcttgatctttcttggagcttataccaacctgatttatttcttgttggaagtttcggactcacatcttaaccttgctgtgtgctgttgtgaccgttgcagaggttgcatgcttaagaaggcatcaagtattactggctcagctggcatcagaatatttgctcatcttcttggaactattttaaggaatcttttactaatgcttttgttgtgatgtctattcttgttattatttgagattactctgtgttttcactttaatgctctgttctttgtgacatgtgttaatctcactttattattcatatatattattcttcatcttgatttggtagtgctagcactcctctccatctggagcagaaaagcctgctgctccgtgctggttggtataacttcaaaaatttaaatgcttgtttggtatcttctgataatctgtcatgcatttctttcttacgtcttcacctaagttgtttggcagttgtcgtgacagcttggcacaggcagccagagtttttagcacgtgatgaatgaatatcaggtataatggaggtgctgtgaattgttctgtgaacccaatgttttcatttggtttctgcacaattttctactgacaaacagtaacgagtttcccatttggtagttgatgtgtgtgcattagggtaaccaagcatgcacgcatgctggaaaaaaatctttgatgaagagcttacatatatattttgcattgctaatgctcttttaacatcattggaatttttgtttgcggttcaagtaggacatgctggcgtgcagatctagtctggagtcctatgctcaaggtgcatactgtcacaatgatatttgtgagatgaactgaaggtttggaggggtgtattgagaaagaagaaattggaatctgctgatgtttaggaggaagtggatgtctgaaatttgtgacctaaacaagcacaaagaagttacaaaatgagacatgaattttgtaccattgtcactgtgaattgctttgaagtcatcctttggaatcttattttacaaccaaaaaaaatcaaaccttgagcatgagaacaactctcatcctttgcctacatgaaaaacaccaagaatagtgtgaaaagtcatcaacaatcaccaaaacatgtc

SEQ ID NO: 25414 - DNA, 4443 bp, Zea Mays
cctaattctccattgatcttttcccttcagaaaacagagcgagtccaattcgagacggctctccccacatcaccacagcgcagccgcaaccatggcttccgccgaaaccctagcccgctccccctcacgcgagccctcttccgacctgacccgcgccgactcttccgagccccaccacaacatcgatggctccggcgcgggcgccggagactcatcccgccgccgccgccgctcccgctgggagcagtctaacgacgactccgccgccaacaactccggcggcgagggcgggaccgggggccggaagcgcaagacgcggtgggccgaggaggagccgcgcccggcgatcgcgctcccggacttcatgaaggacttcgccgccgagatggaccccgaggtgcacgccctaaacgcgcgcctcctcgagatctcgcgtctgctgcaatcgggcctcccgctcgacgatcgccccgagggggcgcgctcgccctcccctgagcctgtctacgacaacctcggcatccgcatcaacacccgcgaataccgcgctagggagcgcctcaaccgcgagaggcaggagatcatctcgcagcttatccgccgcaaccccgccttcaagcccccctccgactaccgcccacccaagctccagaagaagctctacatccccatgaaggagtacccaggctacaactttatcggcctcatcattggccctcgtggcaacacgcagaagcgcatggagaaggagactggtgccaagattgtcatcagggggaagggtagtgtcaaggaagggaagctgctccagaagagggacctcaagccagatcccagcgagaacgaagacctccacgtgcttgttgaggcagatacacaggaggcactggatgcagctgctggtatggtggagaagctgctcaccccggtggatgaggtgctcaatgagcacaagcggcagcagctccgggagcttgccgcgcttaatggaacaattagggacgatgaattttgtaggacatgtggtgaggctggtcacaggcagtatgcttgccccaacaagatgaacacatttaagagtgatgttcagtgcaagatctgcggggacggtgggcacccaactattgattgtccggtcaagggcacttctgggaagaagatggatgatgaataccagaacttcctggctgagcttggtggtgggagtgcacctgagtccatgaacaaatctggtggtccgatgttggctcttacaggaagtggtggtagcggtggtgcttctactggaactgggagtaacccgccttggtcggccggtggtggtgccgcttccactgggctcaatggtatcaagaaagattatgacgagacaaatctttatattggatacctgccacctacaatggacgatgcaggtttagtcagtctgttttcgcagtttggggagattgtcatggctaaggtgatcaaggatcgaaacactggacagagcaaaggatatggatttgtcaagtattcagatgtgtcacaggccaatgcagcgattgctgcaatgaatggtcaccatcttgaagggcgagttattgcggttagagttgcaggaaagccgccacagacagcaccagcagtgtcagcacccccatcatatcctcctccggatcctacttcaggtggctattcctcccagtcctacatgggggcaccaccacctcctcctccagggagttatgctccagttccttgggggcagccgccaccatatgcttcatatcctccgccaccaccaggctctggtgtctacagtcctgcaccccctgcaccaggtcaagctgccccacctccgtatgggatgcaatatccaccaccaccaccacccccagcagctccaatccctccaccaggcactgctccatcaagtgatggagctcagaactatccacctggtgtaacaccaccaagttctggctcatccactcaccctgttgcaacatcagtatatgcatcatctggtgcaccaaatgcaccatcgatataccctccaccaccttatagttattcctcatactaccctccaccatttcagccaccacctccaccaccaccaccaccggctagtgttgatccctctcagagtattgcaactgcaccttggctaacccacagtgtggtggtgccaccaccacccacgagtgttgatccttctcagagtatttcaactgcaccttggttaacccacagcgcagtgccgccaccaccaccacctttgtcctccacaaccgaccagtctactgcttcctatggtgccgatgcagagtatgacaagtttatgtcagagatgaagtgatacgagcgaagctggatgattcttccaatgaagggcaaaaggcttgatctttcttggagcttataccaacctgatttatttcttgttggaagtttcggactcacatcttaaccttgctgtgtgctgttgtgaccgttgcagaggttgcatgcttaagaaggcatcaagtattactggctcagctggcatcagaatatttgctcatcttcttggaactattttaaggaatcttttactaatgcttttgttgtgatgtctattcttgttattatttgagattactctgtgttttcactttaatgctctgttctttgtgacatgtgttaatctcactttattattcatatatattattcttcatcttgatttggtagtgctagcactcctctccatctggagcagaaaagcctgctgctccgtgctggttggtataacttcaaaaatttaaatgcttgtttggtatcttctgataatctgtcatgcatttctttcttacgtcttcacctaagttgtttggcagttgtcgtgacagcttggcacaggcagccagagtttttagcacgtgatgaatgaatatcaggtataatggaggtgctgtgaattgttctgtgaacccaatgttttcatttggtttctgcacaattttctactgacaaacagtaacgagtttcccatttggtagttgatgtgtgtgcattagggtaaccaagcatgcacgcatgctggaaaaaaatctttgatgaagagcttacatatatattttgcattgctaatgctcttttaacatcattggaatttttgtttgcggttcaagtaggacatgctggcgtgcagatctagtctggagtcctatgctcaaggtgcatactgtcacaatgatatttgtgagatgaactgaaggtttggaggttggctcagattagtttttgctaagtaaagtaggatattaccataatcttgtcctagtgaaataatgcgatagtcagtccacaaccagcattaagtacctttatcacgttgcatatatatcagtttgatgtgacctcgtatctagcattagccacctcaatttgcactacaaattttattaagccttcgatttcttgtatgaaaaatgcttgagccaacctggattactggttgcagcaatgaggaatcctaaatcaagtttgtcagctgagtgcacacaattattatggattaatatactttattctgggcttgtttcactgttttcaattcatccaattaatcgtgattaatcgtccaagtcagtttggacaaatcgcgattaattgcccaagtcatctgactaatcgtgattaaacgttcaagtcggtcagctagaatgaccagctagtggtccgacttgaaaacaatggcttgtttttataggagttctagtttgtagctatttaaaaatcatagttaacagaaaatacaatggaataaacagtttgtgtgccactaatttaaaatggggaaggtaatttcacagtaagaaatgatctaggtgttctttgtttttttcttgcttgtttgcaactagtgagaacattttttgttcttacgattaatatgttgcatgcgctctgtttagtttctgctatcttcatatatctggtgaatgcaaattttgaggcattccatgctgacctgtttattcatttaggatatctatttgatttggtggcatccatatgttattgacataatactgttttactgatcatattaccggaaatcctcgaaaacagcataaattattctgcatgcgaagctgcggctaaaatcgggtttggccaactgctttattttctaacaggggtgtattgagaaagaagaaattggaatctgctgatgtttaggaggaagtggatgtctgaaatttgtgacctaaacaagcacaaagaagttacaaaatgagacatgaattttgtaccattgtcactgtgaattgctttgaagtcatcctttggaatcttattttacaaccaaaaaaaatcaaaccttgagcatgagaacaactctcatcctttgcctacatgaaaaacaccaagaatagtgtgaaaagtcatcaacaatcaccaaaacatgtc

SEQ ID NO: 25415 - DNA, 5130 bp, Zea Mays
cgaaacccctaattctccattgatcttttcccttcagaaaacagagcgagtccaattcgagacggctctccccacatcaccacagcgcagccgcaaccatggcttccgccgaaaccctagcccgctccccctcacgcgagccctcttccgacctgacccgcgccgactcttccgagccccaccacaacatcgatggctccggcgcgggcgccggagactcatcccgccgccgccgccgctcccgctgggagcagtctaacgacgactccgccgccaacaactccggcggcgagggcgggaccgggggccggaagcgcaagacgcggtgggccgaggaggagccgcgcccggcgatcgcgctcccggacttcatgaaggacttcgccgccgagatggaccccgaggtgcacgccctaaacgcgcgcctcctcgagatctcgcgtctgctgcaatcgggcctcccgctcgacgatcgccccgagggggcgcgctcgccctcccctgagcctgtctacgacaacctcggcatccgcatcaacacccgcgaataccgcgctagggagcgcctcaaccgcgagaggcaggagatcatctcgcagcttatccgccgcaaccccgccttcaagcccccctccgactaccgcccacccaagctccagaagaagctctacatccccatgaaggagtacccaggctacaactttatcggcctcatcattggccctcgtggcaacacgcagaagcgcatggagaaggagactggtgccaagattgtcatcagggggaagggtagtgtcaaggaagggaagctgctccagaagagggacctcaagccagatcccagcgagaacgaagacctccacgtgcttgttgaggcagatacacaggaggcactggatgcagctgctggtatggtggagaagctgctcaccccggtggatgaggtgctcaatgagcacaagcggcagcagctccgggagcttgccgcgcttaatggaacaattagggacgatgaattttgtaggacatgtggtgaggctggtcacaggcagtatgcttgccccaacaagatgaacacatttaagagtgatgttcagtgcaagatctgcggggacggtgggcacccaactattgattgtccggtcaagggcacttctgggaagaagatggatgatgaataccagaacttcctggctgagcttggtggtgggagtgcacctgagtccatgaacaaatctggtggtccgatgttggctcttacaggaagtggtggtagcggtggtgcttctactggaactgggagtaacccgccttggtcggccggtggtggtgccgcttccactgggctcaatggtatcaagaaagattatgacgagacaaatctttatattggatacctgccacctacaatggacgatgcaggtttagtcagtctgttttcgcagtttggggagattgtcatggctaaggtgatcaaggatcgaaacactggacagagcaaaggatatggatttgtcaagtattcagatgtgtcacaggccaatgcagcgattgctgcaatgaatggtcaccatcttgaagggcgagttattgcggttagagttgcaggaaagccgccacagacagcaccagcagtgtcagcacccccatcatatcctcctccggatcctacttcaggtggctattcctcccagtcctacatgggggcaccaccacctcctcctccagggagttatgctccagttccttgggggcagccgccaccatatgcttcatatcctccgccaccaccaggctctggtgtctacagtcctgcaccccctgcaccaggtcaagctgccccacctccgtatgggatgcaatatccaccaccaccaccacccccagcagctccaatccctccaccaggcactgctccatcaagtgatggagctcagaactatccacctggtgtaacaccaccaagttctggctcatccactcaccctgttgcaacatcagtatatgcatcatctggtgcaccaaatgcaccatcgatataccctccaccaccttatagttattcctcatactaccctccaccatttcagccaccacctccaccaccaccaccaccggctagtgttgatccctctcagagtattgcaactgcaccttggctaacccacagtgtggtggtgccaccaccacccacgagtgttgatccttctcagagtatttcaactgcaccttggttaacccacagcgcagtgccgccaccaccaccacctttgtcctccacaaccgaccagtctactgcttcctatggtgccgatgcagagtatgacaagtttatgtcagagatgaagtgatacgagcgaagctggatgattcttccaatgaagggcaaaaggtaacttaacatgatctgtctctgttctattaatttcggtaggttcagttgggtatggtttgctattttattgacaaggaaacccatgtttcaattattccgtgtgttttattatttatattctatatactactgtacttatatttgatcattgtgctgatgtaccatatagttatatcttacacgttgtttggttttgacttagggggtgtttgggactgctccagtttccagcttcatagtggagctgtggtttataatataaatttaaatagtttaaagatattttaaatgttaataataaacaaaatgacttatctaaatgtcctttataggttcatagctccaactccatggtttcctggagcactaatgacctgctccaccaactctaccaaattttctggagctgtagcagtccctaacacccctttaatgagtctacactgcaaaagtttcttggagtctatattgtgccatagttatttatttttctttcaatatcttatggttttatggattttcatccttttgctagaggtattgtttttgtattaactattaaagcaaacacatgtattgtctcactgaggacgcttatttatgataatatcttattgttaaaatgaggtcaggactaacatgctcatgcttgtcttagatggtaaggaagtcagtagaactcgaagacaacatttcttttgatagcatatgatattatcagattatttttattgagaatgcctggattttttgggggatctgatatatgatgcactttctcaggcactgcggtttatacagaattgttttttagactatgtgctttatgctcccaccccctctcttttccatacaaaatgcttggtatacttattatacctcaccttttctatgttgtcttgacttcttgacaggcttgatctttcttggagcttataccaacctgatttatttcttgttggaagtttcggactcacatcttaaccttgctgtgtgctgttgtgaccgttgcagaggttgcatgcttaagaaggcatcaagtattactggctcagctggcatcagaatatttgctcatcttcttggaactattttaaggaatcttttactaatgcttttgttgtgatgtctattcttgttattatttgagattactctgtgttttcactttaatgctctgttctttgtgacatgtgttaatctcactttattattcatatatattattcttcatcttgatttggtagtgctagcactcctctccatctggagcagaaaagcctgctgctccgtgctggttggtataacttcaaaaatttaaatgcttgtttggtatcttctgataatctgtcatgcatttctttcttacgtcttcacctaagttgtttggcagttgtcgtgacagcttggcacaggcagccagagtttttagcacgtgatgaatgaatatcaggacatgctggcgtgcagatctagtctggagtcctatgctcaaggtgcatactgtcacaatgatatttgtgagatgaactgaaggtttggaggttggctcagattagtttttgctaagtaaagtaggatattaccataatcttgtcctagtgaaataatgcgatagtcagtccacaaccagcattaagtacctttatcacgttgcatatatatcagtttgatgtgacctcgtatctagcattagccacctcaatttgcactacaaattttattaagccttcgatttcttgtatgaaaaatgcttgagccaacctggattactggttgcagcaatgaggaatcctaaatcaagtttgtcagctgagtgcacacaattattatggattaatatactttattctgggcttgtttcactgttttcaattcatccaattaatcgtgattaatcgtccaagtcagtttggacaaatcgcgattaattgcccaagtcatctgactaatcgtgattaaacgttcaagtcggtcagctagaatgaccagctagtggtccgacttgaaaacaatggcttgtttttataggagttctagtttgtagctatttaaaaatcatagttaacagaaaatacaatggaataaacagtttgtgtgccactaatttaaaatggggaaggtaatttcacagtaagaaatgatctaggtgttctttgtttttttcttgcttgtttgcaactagtgagaacattttttgttcttacgattaatatgttgcatgcgctctgtttagtttctgctatcttcatatatctggtgaatgcaaattttgaggcattccatgctgacctgtttattcatttaggatatctatttgatttggtggcatccatatgttattgacataatactgttttactgatcatattaccggaaatcctcgaaaacagcataaattattctgcatgcgaagctgcggctaaaatcgggtttggccaactgctttattttctaacaggggtgtattgagaaagaagaaattggaatctgctgatgtttaggaggaagtggatgtctgaaatttgtgacctaaacaagcacaaagaagttacaaaatgagacatgaattttgtaccattgtcactgtgaattgctttgaagtcatcctttggaatcttattttacaaccaaaaaaaatcaaaccttgagcatgagaacaactctcatcctttgcctacatgaaaaacaccaagaatagtgtgaaaagtcatcaacaatcaccaaaacatgtc

SEQ ID NO: 25416 - DNA, 5143 bp, Zea Mays
cacgcatccccgaaacccctaattctccattgatcttttcccttcagaaaacagagcgagtccaattcgagacggctctccccacatcaccacagcgcagccgcaaccatggcttccgccgaaaccctagcccgctccccctcacgcgagccctcttccgacctgacccgcgccgactcttccgagccccaccacaacatcgatggctccggcgcgggcgccggagactcatcccgccgccgccgccgctcccgctgggagcagtctaacgacgactccgccgccaacaactccggcggcgagggcgggaccgggggccggaagcgcaagacgcggtgggccgaggaggagccgcgcccggcgatcgcgctcccggacttcatgaaggacttcgccgccgagatggaccccgaggtgcacgccctaaacgcgcgcctcctcgagatctcgcgtctgctgcaatcgggcctcccgctcgacgatcgccccgagggggcgcgctcgccctcccctgagcctgtctacgacaacctcggcatccgcatcaacacccgcgaataccgcgctagggagcgcctcaaccgcgagaggcaggagatcatctcgcagcttatccgccgcaaccccgccttcaagcccccctccgactaccgcccacccaagctccagaagaagctctacatccccatgaaggagtacccaggctacaactttatcggcctcatcattggccctcgtggcaacacgcagaagcgcatggagaaggagactggtgccaagattgtcatcagggggaagggtagtgtcaaggaagggaagctgctccagaagagggacctcaagccagatcccagcgagaacgaagacctccacgtgcttgttgaggcagatacacaggaggcactggatgcagctgctggtatggtggagaagctgctcaccccggtggatgaggtgctcaatgagcacaagcggcagcagctccgggagcttgccgcgcttaatggaacaattagggacgatgaattttgtaggacatgtggtgaggctggtcacaggcagtatgcttgccccaacaagatgaacacatttaagagtgatgttcagtgcaagatctgcggggacggtgggcacccaactattgattgtccggtcaagggcacttctgggaagaagatggatgatgaataccagaacttcctggctgagcttggtggtgggagtgcacctgagtccatgaacaaatctggtggtccgatgttggctcttacaggaagtggtggtagcggtggtgcttctactggaactgggagtaacccgccttggtcggccggtggtggtgccgcttccactgggctcaatggtatcaagaaagattatgacgagacaaatctttatattggatacctgccacctacaatggacgatgcaggtttagtcagtctgttttcgcagtttggggagattgtcatggctaaggtgatcaaggatcgaaacactggacagagcaaaggatatggatttgtcaagtattcagatgtgtcacaggccaatgcagcgattgctgcaatgaatggtcaccatcttgaagggcgagttattgcggttagagttgcaggaaagccgccacagacagcaccagcagtgtcagcacccccatcatatcctcctccggatcctacttcaggtggctattcctcccagtcctacatgggggcaccaccacctcctcctccagggagttatgctccagttccttgggggcagccgccaccatatgcttcatatcctccgccaccaccaggctctggtgtctacagtcctgcaccccctgcaccaggtcaagctgccccacctccgtatgggatgcaatatccaccaccaccaccacccccagcagctccaatccctccaccaggcactgctccatcaagtgatggagctcagaactatccacctggtgtaacaccaccaagttctggctcatccactcaccctgttgcaacatcagtatatgcatcatctggtgcaccaaatgcaccatcgatataccctccaccaccttatagttattcctcatactaccctccaccatttcagccaccacctccaccaccaccaccaccggctagtgttgatccctctcagagtattgcaactgcaccttggctaacccacagtgtggtggtgccaccaccacccacgagtgttgatccttctcagagtatttcaactgcaccttggttaacccacagcgcagtgccgccaccaccaccacctttgtcctccacaaccgaccagtctactgcttcctatggtgccgatgcagagtatgacaagtttatgtcagagatgaagtgatacgagcgaagctggatgattcttccaatgaagggcaaaaggtaacttaacatgatctgtctctgttctattaatttcggtaggttcagttgggtatggtttgctattttattgacaaggaaacccatgtttcaattattccgtgtgttttattatttatattctatatactactgtacttatatttgatcattgtgctgatgtaccatatagttatatcttacacgttgtttggttttgacttagggggtgtttgggactgctccagtttccagcttcatagtggagctgtggtttataatataaatttaaatagtttaaagatattttaaatgttaataataaacaaaatgacttatctaaatgtcctttataggttcatagctccaactccatggtttcctggagcactaatgacctgctccaccaactctaccaaattttctggagctgtagcagtccctaacacccctttaatgagtctacactgcaaaagtttcttggagtctatattgtgccatagttatttatttttctttcaatatcttatggttttatggattttcatccttttgctagaggtattgtttttgtattaactattaaagcaaacacatgtattgtctcactgaggacgcttatttatgataatatcttattgttaaaatgaggtcaggactaacatgctcatgcttgtcttagatggtaaggaagtcagtagaactcgaagacaacatttcttttgatagcatatgatattatcagattatttttattgagaatgcctggattttttgggggatctgatatatgatgcactttctcaggcactgcggtttatacagaattgttttttagactatgtgctttatgctcccaccccctctcttttccatacaaaatgcttggtatacttattatacctcaccttttctatgttgtcttgacttcttgacaggcttgatctttcttggagcttataccaacctgatttatttcttgttggaagtttcggactcacatcttaaccttgctgtgtgctgttgtgaccgttgcagaggttgcatgcttaagaaggcatcaagtattactggctcagctggcatcagaatatttgctcatcttcttggaactattttaaggaatcttttactaatgcttttgttgtgatgtctattcttgttattatttgagattactctgtgttttcactttaatgctctgttctttgtgacatgtgttaatctcactttattattcatatatattattcttcatcttgatttggtagtgctagcactcctctccatctggagcagaaaagcctgctgctccgtgctggttggtataacttcaaaaatttaaatgcttgtttggtatcttctgataatctgtcatgcatttctttcttacgtcttcacctaagttgtttggcagttgtcgtgacagcttggcacaggcagccagagtttttagcacgtgatgaatgaatatcagtaggacatgctggcgtgcagatctagtctggagtcctatgctcaaggtgcatactgtcacaatgatatttgtgagatgaactgaaggtttggaggttggctcagattagtttttgctaagtaaagtaggatattaccataatcttgtcctagtgaaataatgcgatagtcagtccacaaccagcattaagtacctttatcacgttgcatatatatcagtttgatgtgacctcgtatctagcattagccacctcaatttgcactacaaattttattaagccttcgatttcttgtatgaaaaatgcttgagccaacctggattactggttgcagcaatgaggaatcctaaatcaagtttgtcagctgagtgcacacaattattatggattaatatactttattctgggcttgtttcactgttttcaattcatccaattaatcgtgattaatcgtccaagtcagtttggacaaatcgcgattaattgcccaagtcatctgactaatcgtgattaaacgttcaagtcggtcagctagaatgaccagctagtggtccgacttgaaaacaatggcttgtttttataggagttctagtttgtagctatttaaaaatcatagttaacagaaaatacaatggaataaacagtttgtgtgccactaatttaaaatggggaaggtaatttcacagtaagaaatgatctaggtgttctttgtttttttcttgcttgtttgcaactagtgagaacattttttgttcttacgattaatatgttgcatgcgctctgtttagtttctgctatcttcatatatctggtgaatgcaaattttgaggcattccatgctgacctgtttattcatttaggatatctatttgatttggtggcatccatatgttattgacataatactgttttactgatcatattaccggaaatcctcgaaaacagcataaattattctgcatgcgaagctgcggctaaaatcgggtttggccaactgctttattttctaacaggggtgtattgagaaagaagaaattggaatctgctgatgtttaggaggaagtggatgtctgaaatttgtgacctaaacaagcacaaagaagttacaaaatgagacatgaattttgtaccattgtcactgtgaattgctttgaagtcatcctttggaatcttattttacaaccaaaaaaaatcaaaccttgagcatgagaacaactctcatcctttgcctacatgaaaaacaccaagaatagtgtgaaaagtcatcaacaatcaccaaaacatgtc

SEQ ID NO: 25417 - DNA, 678 bp, Zea Mays
ctcaaaattttgatacgaaagatatcggcatgccctacgacaaggtaggtgaagacgcggccatgccagtgatcgccatcgaggacgagacgtagcttcccgacacgatagcagatggtggcgaccatggccgggaccctatgcctaagatttcttcttcccgcgtcagctaaaggaagaagggttatatgaagaaggatgccctcaactcgcatcgccgccggcggcctccgcaaagtgtcggtcgcaaaagggaaaaggccactccaatccgtggccgaccaagccaagcgtggtgcctcccaaacccgccggccaccgttccaggcgcggggcgcattctggcgactgcagtcaaagctgctaggcaaagcaaccacactttgctctcgtggccaccacccgccgcctctcaggccgagcttatcagcctcctctgtttgcttgttcagcaacatgttcattatataactccaaaatgcagcggatttgacaggtcgctgcatttcaggtgtttatgatgtttcatgccactgaagaaagggtgaacaagcttcttatgctgtacattgggttggatattgcaatgtgtattttgatgcacacactgggatgacctgattattgcaaagcacaaggccagaagctccggtggttagaacctgggcgcgtgagggg

SEQ ID NO: 25418 - DNA, 849 bp, Zea Mays
cttgtgtgtactatcggtttgttggtagtaagggagtaatattgtgcttatatgtgtatgacatattaatctctgtgactagtattgatgtgataaatgatgtagaattatttttatctcaaaattttgatacgaaagatatcggcatgccctacgacaaggtaggtgaagacgcggccatgccagtgatcgccatcgaggacgagacgtagcttcccgacacgatagcagatggtggcgaccatggccgggaccctatgcctaagatttcttcttcccgcgtcagctaaaggaagaagggttatatgaagaaggatgccctcaactcgcatcgccgccggcggcctccgcaaagtgtcggtcgcaaaagggaaaaggccactccaatccgtggccgaccaagccaagcgtggtgcctcccaaacccgccggccaccgttccaggcgcggggcgcattctggcgactgcagtcaaagctgctaggcaaagcaaccacactttgctctcgtggccaccacccgccgcctctcaggccgagcttatcagcctcctctgtttgcttgttcagcaacatgttcattatataactccaaaatgcagcggatttgacaggtcgctgcatttcaggtgtttatgatgtttcatgccactgaagaaagggtgaacaagcttcttatgctgtacattgggttggatattgcaatgtgtattttgatgcacacactgggatgacctgattattgcaaagcacaaggccagatgtgatgtggcagatcggcaatgcaaatatgtcaatttgttgacataacgccttgttaccttctaacatgactgcattagaatttgtg

SEQ ID NO: 25419 - DNA, 1217 bp, Zea Mays
caatatgttgtgcctgttttgtgcaaggtgcaagaggttcagggagctcgggcagagcaaggtggtgctggcgcgggcgtcgccgcggtgcctggcggtgcgcgccaaggcctggtcggaggaggcgcaccggttcctgcagcgctgcgccgacgcgggcagcctggaagcgtgctacctccttggcatgattcggttctactgcctggggatccgcggctcgggcgcggcgctgatggcggcggcggcggtgggcgggcaccgcgaggcgctctactcgctggccgtggtccagttcaacggcagcggcgggggcaaggacgaccgcgacctccgcgccggagccgcgctgtgcgcgcgcgcggcgtcgctgggccacgtgggcgcgctccgcgagctggggcactgcctccaggacggctacggcgtgcggcggtccgtgctggacgggcggcgcctcctgatccaggcgaacgcgcgcgagctcgcggcggtcgccgcctcgccgccgccgcagctgctcggcaaggcggcgccccacccgactcggcgtcactcgtgcctcctgagcgacttcggggtgccgcgccgcggccggggagccgcacgcggccaaccggttcctggcggactggtggttcgcgtcgcggcgctgggtacggcggcggcggtggcggtgggagtcgagcggctcctcgcccgaggaggacggcgccggcgcgctgcggctgtgctcgcaggcgctgtgcgggcggcccgagacgcggcggcacgagttcaggcggtgctccgtgtgcggcctggtgaactactgctcccgcgcgtgccaggcgctgcactggaagatggcgcacaaggcggagtgcacgcccatggaccggtggctcgacgtggtcggcgtcggcggcggcgcggcgccgcagccccacgctaatgccgacggcgccgcggcggccccggcgccgtgacgcgctggcggtcgtccgtttcttgtcacttgtcagttagcgtccgcaacgtcagtttttactccttttttttttctgtccgtttctcgccctccatttgtcctctgtactacggcacctgtggttatagttggcaattggcatggcatgctgaggtaacattattattggcataaagcgagcgacggagcgagggcaagcacggcatatctagttctagccttctaggtagtgaaaaaaaaattcacc

SEQ ID NO: 25420 - DNA, 3088 bp, Zea Mays
ctcgcttccccagacccctcaccggcgggcgtagctagcgtacgtccatccatccgtccatgctccaccgccaccagcccgccgttccgacaagctccaatcatacgcaccaccggaccaccctcggcaaggagggacaagctcacgcgcctcgcgccctgcccggcccgacctcgagcagatcgacacatgcacgcacgacgtagacgatacacaacagtacgcgggggcgcactgacacacgcccgcactatcatccctgtcccccgtccgtccatctccccactcgtgcgagttgcgaatttgcgatgcgccgcctgagcagaagctccaaagcctcatgatggcagcacgggccagagccagcactcgcagcagctgatccgagctcgtacaggcgcgccaggcagcacatcaatgggtacgccactctgttcttcgatgccagcgagcacttggctgcttcttcttcttctaccttttcctttgggtctcccggtccacgatacctcgaggctagtcttgcccgctggtgccgacgttcgttggggcagctctgtggtccatagaactctgtgttccttggtctctgcgaaagctgtttccttcttcggagtatctctttgcaaatcaagcacattttaaatcttggacaaccccactgcaaatttcggggccacctttttcgcgcattttcgagacgatcatcgttggttcgttgctctggactctggtctgttcaaaggcgagactggggacgaatcttggttcccaaatcccaatggcgctctgtgtgcgtctgtgtgtgtgatggacatggtcacatccaccctcttctgctcgccagttcttgctccactcgccggaccctgcttcttattccttcttttaaagctgcatcgattccatcctttacctcttttgctttcgcctagtttctctttccctttcgatcggtttgatgtgacagtcttgtcatcataggcacaccactccttgaccgcatcagtgaccggtgggactgagcactgactgcagtcgcgttgctctgcgcttcttcctggctggtgtcggcgaacagcaggaggaggaggcgagaagaatcttgggagcttagcttgcaatgccgaggctgtattcggaggaaggagcaggtgctgacgaggctaccgccgctgcgacagtgaggctggccaacaagatccggaagcgccgcgcggtgtcgtcgtcggggggctcggacccggcggcggtggggaggaggctgcggtccaggcggcccgcggtgcggctgccgcggcaccggaccagcgcgggcggggacatgtcggagtcgtcccggagccggcattgccgtggcagcggcaaccgtgtcgccgaagggacgctgccgtccgcgtctgcgaggaggctcgtcgacgcgttctggcagaacatgggcagcggtggtctgcttgacggggacgcggcggcggcgcgccggagcctggtcctgtggagcggcgcctccacgaaggtgtccaagaggtcgagaagtaagagcaaggtcttggaggctgatggtaagggaagtcggcgcaacggccatcctcggtggttttcagcagatctgatgagtaacggtagtgcaatggaggttggtaccttttctcaagacgatgtttcaagatgtcctgaaaagacagtgaacctagatgatctgcagaacagcttgattgcagctaaggagctggtaaaagtacttgcccacatatggggacctggagagctgaatccgtcaagtgcatcactcatttctgctctacgttcagagcttgatgttgcccgttctcatgttagaaagctaatcaaagaacagaaatctgatgcctttgaaattgaggacttaaagttgcaacttacagaagaattggaatcgtggaaggtcaaacaaaaggagaaggttggaaatgctctccgatttgtagtttcagagctagacactgagaagaagtcaaggaaaagagcagagaagacaaataagaagttgagcattgccttagcaaacactgaagcctctttgcaggcagtgacgaaagaacttgaaagggagaggaagtataaaagaagagttgagaagatctgcaacgagcttatcagaggcattgatgaggacaaagctgaggtgcaggcactgaagagggaaactgagaaggcacaagaagagctccagaaagagcgtgaaatgcttcaacttgcagatgagtggcgtgaacaaagggttcagatgaagcttttagaagcacgggttcaatttgaggagaaaaatgcagctgttaatcagctgcgcgatgaactccaagcttatctggatactaagaaagagcaggaaccgttgaatgatccaatggaactgtcccatgcatctgaaattggcaacactgcagctgatttagttcctgacagaaatggtggaaacatcagcgaagacgcctcagaaggcagtgatatacactccattgagctaaacgtcgatggcatcaacaggacctacacctggagctacactccttcctcaaaaggcaggcagaggagcccatcaaggcatgaaccgttttcggatagagggatggatggagtgaactcgtggcgtttagagcaaagttttcgggacatggatgaagaactggagggagactgggcagaagggtgcagcaacggaatgctgaacttggatcatgacgaggagaggtatctggctatcaagaatctgagagagcagatgttggccgggtcggggttcatcctgtcacaaggtagagaaaatgctaaaagagagtattgtggcttgtaagataaactgaacaagaaaaattaaaagtaatgtgccgtatgaatcgctgcttgatgctagatccaactgttcaaggatatatatagtgatggttctctgtggattactttccccttgtaaatatcttgagctcttgaaaggttaggttacagggctggtgtgttcatgttcatgattctgatgtcttgtatgtgtgttaatgtccatttaagtgtctggaaatagtttataaaacgtgattggaaatataacaca

SEQ ID NO: 25421 - DNA, 2530 bp, Zea Mays
tatccctcgcttccccagacccctcaccggcgggcgtagctagcgtacgtccatccatccgtccatgctccaccgccaccagcccgccgttccgacaagctccaatcatacgcaccaccggaccaccctcggcaaggagggacaagctcacgcgcctcgcgccctgcccggcccgacctcgagcagatcgacacatgcacgcacgacgtagacgatacacaacagtacgcgggggcgcactgacacacgcccgcactatcatccctgtcccccgtccgtccatctccccactcgtgcgagttgcgaatttgcgatgcgccgcctgagcagaagctccaaagcctcatgatggcagcacgggccagagccagcactcgcagcagctgatccgagctcgtacaggcgcgccaggcagcacatcaatgggcacaccactccttgaccgcatcagtgaccggtgggactgagcactgactgcagtcgcgttgctctgcgcttcttcctggctggtgtcggcgaacagcaggaggaggaggcgagaagaatcttgggagcttagcttgcaatgccgaggctgtattcggaggaaggagcaggtgctgacgaggctaccgccgctgcgacagtgaggctggccaacaagatccggaagcgccgcgcggtgtcgtcgtcggggggctcggacccggcggcggtggggaggaggctgcggtccaggcggcccgcggtgcggctgccgcggcaccggaccagcgcgggcggggacatgtcggagtcgtcccggagccggcattgccgtggcagcggcaaccgtgtcgccgaagggacgctgccgtccgcgtctgcgaggaggctcgtcgacgcgttctggcagaacatgggcagcggtggtctgcttgacggggacgcggcggcggcgcgccggagcctggtcctgtggagcggcgcctccacgaaggtgtccaagaggtcgagaagtaagagcaaggtcttggaggctgatggtaagggaagtcggcgcaacggccatcctcggtggttttcagcagatctgatgagtaacggtagtgcaatggaggttggtaccttttctcaagacgatgtttcaagatgtcctgaaaagacagtgaacctagatgatctgcagaacagcttgattgcagctaaggagctggtaaaagtacttgcccacatatggggacctggagagctgaatccgtcaagtgcatcactcatttctgctctacgttcagagcttgatgttgcccgttctcatgttagaaagctaatcaaagaacagaaatctgatgcctttgaaattgaggacttaaagttgcaacttacagaagaattggaatcgtggaaggtcaaacaaaaggagaaggttggaaatgctctccgatttgtagtttcagagctagacactgagaagaagtcaaggaaaagagcagagaagacaaataagaagttgagcattgccttagcaaacactgaagcctctttgcaggcagtgacgaaagaacttgaaagggagaggaagtataaaagaagagttgagaagatctgcaacgagcttatcagaggcattgatgaggacaaagctgaggtgcaggcactgaagagggaaactgagaaggcacaagaagagctccagaaagagcgtgaaatgcttcaacttgcagatgagtggcgtgaacaaagggttcagatgaagcttttagaagcacgggttcaatttgaggagaaaaatgcagctgttaatcagctgcgcgatgaactccaagcttatctggatactaagaaagagcaggaaccgttgaatgatccaatggaactgtcccatgcatctgaaattggcaacactgcagctgatttagttcctgacagaaatggtggaaacatcagcgaagacgcctcagaaggcagtgatatacactccattgagctaaacgtcgatggcatcaacaggacctacacctggagctacactccttcctcaaaaggcaggcagaggagcccatcaaggcatgaaccgttttcggatagagggatggatggagtgaactcgtggcgtttagagcaaagttttcgggacatggatgaagaactggagggagactgggcagaagggtgcagcaacggaatgctgaacttggatcatgacgaggagaggtatctggctatcaagaatctgagagagcagatgttggccgggtcggggttcatcctgtcacaaggtagagaaaatgctaaaagagagtattgtggcttgtaagataaactgaacaagaaaaattaaaagtaatgtgccgtatgaatcgctgcttgatgctagatccaactgttcaaggatatatatagtgatggttctctgtggattactttccccttgtaaatatcttgagctcttgaaaggttaggttacagggctggtgtgttcatgttcatgattctgatgtcttgtatgtgtgttaatgtccatttaagtgtctggaaatagtttataaaacgtgattggaaatataacaca

SEQ ID NO: 25422 - DNA, 1345 bp, Zea Mays
gccgaatcccgcatttatattgggagttggaagctaaagaaaaactgctcctcgttgatccatgttcagaaggatgatgatgcaccaaagttctctttatttcttccttactgtaatttctgatggtctaaatcctaaactgaaaataacagccaggatggcgtgtgagtccggctagaccgaggagtgaccaactctgaatggtcctctgaattcccaagctttgacatctcacacatttgttcttccaagtcggaccacactgctccttttgaaactgcagggatccttccggtacgagatgatgtgggcgcgggcagagccgcagaggggactagcagccgtgttagaaggcacatggaacaggacaatcattagatgactagggtgttgaaatagtggaccaaccgagcaaggatgacttatgagcagcttcaggatctcacccaactgttctaggtgtggagattctggccggcaacaatattgcagccctcttatctatgtctagattacaagttcgagctactggtttatagcatagtaagtacaaatcatctcgtgaactcatacctcttgatgcaaaaatactgaaaacacacctggtttttatgggactgccagcggttgcagatttatgtcaaattgtaaacttgtttgataaatagtagtagaagaaatttcaaagagctatacttgggttctcaaaattatcagaaaactatgcattttagaattattatcatatgtaactatataaatttgcatgctttgcagttttagcatgattattgcatcgcgccatgttttatgaaccaatttacagtgacacagcccttcatttatcgagtgcccataccatgttttgactactgagatatcaagcatatatgaaccacagtgcacttctcagttctttcaagtgcacttataaacttattatgtgtatatgattatattggagatcaggcatataagcgagagaggacatttactttgataactatatgaagtatgtttctgcaatcccattcttttagttattaagctagctaggtttaaaaattgcaagatgattatgagaaattttgtctcgaatgcagtgacccaaaggcgcctggtggtacacctataatgcagcaacgtgctccaaaattttctgcatcaattgggcttcccaacagtgagccaaaccatatatatgcattgcaatcatttcccaagccaccgtatccaagagatggcagtgtcacccaaagaagcagttgttcgtaatatgtgatttaggaattctatgaattatatctacgtatggttagttctatgctgacaatctgtaacatgt

SEQ ID NO: 25423 - DNA, 1435 bp, Zea Mays
aaaaaacagcttcgataaaagcacttgtaactcgtgagaattgtcaacttccattccaagatattctggaattttagatgatacacaatacgacagcatgttataaggtcagatagcaacaatagggatcagtctagcatgcaatattgtacgcctcaatctccttgacccaaaatcgtgaaaaatggttatagcatgccagaaaaaacatatagttttgctttcaatcataatactgataagaagttaagaaccaagagcacttggcacgccctgattgtttctaacctattcatccaaaatccacgactctaaaaaaactcatggtgcctcagaaatggggtggccagacaatagttgcatgaatcctaacttcaacccctccagcacgaatgtgtgatgcacgagttttgtcagatttaataaatgaagttcaacatggagattgactcgatgtctcgtggttacactagtatcttcacattctcattggtgacaaaattgataactagggcaaattggtatgttggatatagccctatacaactaccttgttgcccatattcactaccgcattgatgtcggctgtgacaatttcaagaatacacaattaaagttctctaccagcaaatagctttctactagaaagcagtttgctccctagcaaaactagaatttacaggtaactctcaagctcattgcttaaaaacctcaagaattgggatcaaaggtcatttggtgactaccatacactgctgcggaaaggcaagctccatcggtaacgcgtaacactggtgtggaaaggcaagctccattggcaacaggtacataccactgttgcggaaaggtaagctccattggtgactggtacatgctgctctataggaccatatgagacgctcgatgtggagagtagcaattaggggaggatgtgtaaatgacatttgtgctgtccccgctgactccatggatttttgacaggccagttgcatgttcagtaaggttgtagcccttctcaagcttatcaacttcaaaggggaattcctcaagtgtctacaaaacaaagctgtcaaaaactgaaggaaatatagaagtatgaaacagttaagaaactgtaaataccctatgtgcctgttcaagaatttcaagcatttcttggatacgctgccttctcataagtacttcatcagtttccctcatcaattcattgagcaggttctctctgcacaatatatcattgtttcagaacaattataatcagaacagagatgtccataagaaaatatacaaccaaatgttgacttatgcacctatatagtttgcgaattaggaagttgtgcagatcccgctttgtatggttcacctgccaaaaaaacaatgctgtcaaacaacagtgtcctgattagacagtaattttgagtactgacagtatata

SEQ ID NO: 25424 - DNA, 1036 bp, Zea Mays
tctgttttcaactcaagcaaattaaagggatgatgaaatgtttcaacttgaatctaagttattgccatttggagcgaagatcttagactttaaagacgactgtctcaggatgttcctcaaggcaccaatattgacctcagattgtgaaatttatggacagaagtttaattgttctattgattcatttatttcagaccatgagctgctgatagaaattgataaaataaatatggaaccaaagaaagtacagatcattcctgatgacatgtctgtagatatactgattgagaggatggagtcctccagtttgttctccaaccttgatatggctaattcagcaatgccaacaccagtctataatcaatgctttgagacgatcattggtgaatgatgctaatagttcgaggcattgttttgagtacttaaacaaaaaggagatgattgttgctcacttagatcgtggggatcgtccaacaaatattgcttcaactatactttgtaagaccaaggaactggccaacgaattggagccgcagattcggcaacatcttctaacgcttgtggatgctgttgaagatattatcattcgagagctgcggtctcgttaggaccacgctgtcgacaggaatagctttgggggataatagacagcctctactggctcgtggatcaatgtttcactttcacattttgtacagaagcgactctatcaccgttacgcatctacggctgatttttttagtgtctggcgcgttgccagaaaagagaatcttgttcaactttattaagtttgaaccgtagcaaatttgaccagtcatgcctgattcctatacttgccttcatccttttttggcggcatgtattattacgagaatacactcgtttccattgcaaaaatgtactggggcaatgttaggtcaagatgcacatcatacgtgatccgcatgtcaggctgcagtgcccgtcatctgcaaatgtagtgcgcattgtcatgggataaacgtctggttcttgcaaaacatggagcgaattgtca

SEQ ID NO: 25425 - DNA, 1455 bp, Zea Mays
aaatataagctccgagattgtagcttatgcatacctggaacaactgagaaaggatgtagccatggcagagcaggggaatcagaaggtatctggtgagattagtgtcactgcagagacaacattcaatgatatgattcaattggatgttggtattgaaatgctggagtctttgatttcgaatcttggtccaaaggctttgaaccattttgatgaaagttctgttctggggctgtcagactcaactgattcatgcagaaatcgaagcattgctgacaaggactacatatatgagttggaacttgatcaccaaatagaaaaaagtacgatggaacttgaaattttacaacatctacaaagggatgatgaaatgtttcaacttgaatctaagttattgccatttggagcgaagatcttagactttaaagacgactgtctcaggatgttcctcaaggcaccaatattgacctcagattgtgaaatttatggacagaagtttaattgttctattgattcatttatttcagaccatgagctgctgatagaaattgataaaataaatatggaaccaaagaaagtacagatcattcctgatgacatgtctgtagatatactgattgagaggatggagtcctccagagatacagtttgttctccaaccttgatatggctaattcagcaatgccaacaccagtctataatcaatgctttgagacgatcattggtgaatgatgctaatagttcgaggcattgttttgagtacttaaacaaaaaggagatgattgttgctcacttagatcgtggtattgatgtctccatcaagatgtcttcagattggcctctttgttcctatggcctgaagctaatttcgatccgcaatgcaggggatcgtccaacaaatattgcttcaactatactttgtaagaccaaggaactggccaacgaattggagccgcagattcggcaacatcttctaacgcttgtggatgctgttgaagatattatcattcgagagctgcggtctcgttaggaccacgctgtcgacaggaatagctttgggggataatagacagcctctactggctcgtggatcaatgtttcactttcacattttgtacagaagcgactctatcaccgttacgcatctacggctgatttttttagtgtctggcgcgttgccagaaaagagaatcttgttcaactttattaagtttgaaccgtagcaaatttgaccagtcatgcctgattcctatacttgccttcatccttttttggcggcatgtattattacgagaatacactcgtttccattgcaaaaatgtactggggcaatgttaggtcaagatgcacatcatacgtgatccgcatgtcaggctgcagtgcccgtcatctgcaaatgtagtgcgcattgtcatgggataaacgtctggttcttgcaaaacatggagcgaattgtca

SEQ ID NO: 25426 - DNA, 1312 bp, Zea Mays
atcaaatataagctccgagattgtagcttatgcatacctggaacaactgagaaaggatgtagccatggcagagcaggggaatcagaaggtatctggtgagattagtgtcactgcagagacaacattcaatgatatgattcaattggatgttggtattgaaatgctggagtctttgatttcgaatcttggtccaaaggctttgaaccattttgatgaaagttctgttctggggctgtcagactcaactgattcatgcagaaatcgaagcattgctgacaaggactacatatatgagggatgatgaaatgtttcaacttgaatctaagttattgccatttggagcgaagatcttagactttaaagacgactgtctcaggatgttcctcaaggcaccaatattgacctcagattgtgaaatttatggacagaagtttaattgttctattgattcatttatttcagaccatgagctgctgatagaaattgataaaataaatatggaaccaaagaaagtacagatcattcctgatgacatgtctgtagatatactgattgagaggatggagtcctccagagatacagtttgttctccaaccttgatatggctaattcagcaatgccaacaccagtctataatcaatgctttgagacgatcattggtgaatgatgctaatagttcgaggcattgttttgagtacttaaacaaaaaggagatgattgttgctcacttagatcgtggggatcgtccaacaaatattgcttcaactatactttgtaagaccaaggaactggccaacgaattggagccgcagattcggcaacatcttctaacgcttgtggatgctgttgaagatattatcattcgagagctgcggtctcgttaggaccacgctgtcgacaggaatagctttgggggataatagacagcctctactggctcgtggatcaatgtttcactttcacattttgtacagaagcgactctatcaccgttacgcatctacggctgatttttttagtgtctggcgcgttgccagaaaagagaatcttgttcaactttattaagtttgaaccgtagcaaatttgaccagtcatgcctgattcctatacttgccttcatccttttttggcggcatgtattattacgagaatacactcgtttccattgcaaaaatgtactggggcaatgttaggtcaagatgcacatcatacgtgatccgcatgtcaggctgcagtgcccgtcatctgcaaatgtagtgcgcattgtcatgggataaacgtctggttcttgcaaaacatggagcgaattgtca

SEQ ID NO: 25427 - DNA, 1906 bp, Zea Mays
ctgtctcacgttagtcacgtgctcgctttccttctcccctccgtttcgaaaaccaaatctctctgtctactaggcgggagagtgagacggccatggcggaggcgcaagccctagtaccggcgcaaggtcccgacgaggcgcccctcgatgcgtccgccattcatagccgggtggagcagctctcattgaaaaggctggaggtggagccggaggcggaggtggcggaggatgaggtggcactaggtttggactccacgcacaaggcggctcaggatgcgatggatgagtgggactcggccactgctgcggtttcaattgatgatttggatgcatacctggaacaactgagaaaggatgtagccatggcagagcaggggaatcagaaggtatctggtgagattagtgtcactgcagagacaacattcaatgatatgattcaattggatgttggtattgaaatgctggagtctttgatttcgaatcttggtccaaaggctttgaaccattttgatgaaagttctgttctggggctgtcagactcaactgattcatgcagaaatcgaagcattgctgacaaggactacatatatgagttggaacttgatcaccaaatagaaaaaagtacgatggaacttgaaattttacaacatctacaaagattgtactgttcaatgtccaatgtccttcaaactatatctttgcatggttgatctgttttcaactcaagcaaattaaaggtttgtgtcatcttctactcttcgtcataattgcttactgttattaccattagtcagcaagtgttgtctatttccattaaatcaatgtcttcttttttccggtactgttgtgagcaatcatagcaggtatcctatgttagcagttatgagtttactatgctatggatcgatggatttctttctgacatccctaaacctctatatccagggatgatgaaatgtttcaacttgaatctaagttattgccatttggagcgaagatcttagactttaaagacgactgtctcaggatgttcctcaaggcaccaatattgacctcagattgtgaaatttatggacagaagtttaattgttctattgattcatttatttcagaccatgagctgctgatagaaattgataaaataaatatggaaccaaagaaagtacagatcattcctgatgacatgtctgtagatatactgattgagaggatggagtcctccagagatacagtttgttctccaaccttgatatggctaattcagcaatgccaacaccagtctataatcaatgctttgagacgatcattggtgaatgatgctaatagttcgaggggatcgtccaacaaatattgcttcaactatactttgtaagaccaaggaactggccaacgaattggagccgcagattcggcaacatcttctaacgcttgtggatgctgttgaagatattatcattcgagagctgcggtctcgttaggaccacgctgtcgacaggaatagctttgggggataatagacagcctctactggctcgtggatcaatgtttcactttcacattttgtacagaagcgactctatcaccgttacgcatctacggctgatttttttagtgtctggcgcgttgccagaaaagagaatcttgttcaactttattaagtttgaaccgtagcaaatttgaccagtcatgcctgattcctatacttgccttcatccttttttggcggcatgtattattacgagaatacactcgtttccattgcaaaaatgtactggggcaatgttaggtcaagatgcacatcatacgtgatccgcatgtcaggctgcagtgcccgtcatctgcaaatgtagtgcgcattgtcatgggataaacgtctggttcttgcaaaacatggagcgaattgtca

SEQ ID NO: 25428 - DNA, 1268 bp, Zea Mays
cgaaaaagagaaaaatggaagcttccaaggctttcgaactgacaagcaaaacggcgctcactctctcgtcaacgcctttgtcttctttctcggcttctcgcttccttctccttttcttcctctcctccccactctcaattccttcctcgttcggttgttccttcccacttcctctctctcgcgcgcctgtactacttttgaagccgcaaggagaagctcgattccaccttgcagatccaatggcgcaacctgaaattcctgcatttggggattgggaaaccactggaaacacaccttacacacaaaagttcgaggatgcacggaagaacaagaaaacaggaattcttgcacaaccaaatgatccaaggagggatctggaacctcctcgcaagtcgcctttgcacccaacggtctacaaaactaatcctcaagaccaaggtccaaggaacccaccacatcgaccaagacctgaacttgacaaccaacgacactctgaccggcctactcaccgtgagtctgcaccacgaagacattcaaatcttcagagagaacaagggagtaatgctgggacaccaagaagcccctacagaacagctgctgggtctgcttcaccaatgcagccaaacaaccaatcaaagccaaagcacaggtcaactggaatgcagactccagagaggagggcatcttcagaggggcttggccagcatacacctggaaggagcaggatgaagccgggtggctatgagcctgaagaagtggctgtaccaccctttggcgaatgggatgatgcaaatgcagcatcaggtgaaaagtacactggtatcttcaacagggtgagggatgataggttgtcacctacctcttctgctaggcaaccgtctactactcgtagtgaagagaataaggtgcaacagaaatgttcttgctgcatactttgagaaaataaggacaggatctcgaagagttctagacaacttcctatgctgctcctgtgatgagatccctatcttgtaactcttcctgtgctagttgtcatgtttgttattgttggtgtgattatgtatctgtagatggattgtttcatttgagctcttcaattattacaaggaacatatatatgatacctagaattgtaaagtatggagtgagcaatttctttgcaacaataaaaggtttatcgaatgggctctggaattccatagttagttaatgtggatatcagcaagacaccaacaatgtgctttcagttcttgaaaaagcaaggccat

SEQ ID NO: 25429 - DNA, 1101 bp, Zea Mays
gccctgccttagctgtgcgcgcttttcctgtagtctttaatcgtcagaataggcgtgtccgtccgtaatcgagtgaaggatccgttttcgtgcggtggcgtgtgctttaatcggaagaaggcggtgccttaagcttggttcctcagttccagcttcaacgcaacgacagatagatgaaaaatggaagcatgatctgtatcgggaagatgatgaaccagcttcaaaatcaacagatccgaaggatttgcgattgaagcttcagaggcgaagttttcaacaagattttaccagcacaagaagttctggtgtgcgtgatctacgtgagaagctatctggtataatgaacccacagccatcaaatgctgacccaccaaagccaaagccaaagccagtatcggaggttgttaacatctcaaggcgtcaaattgctgatgaaatgcatgcacgccaaaataagaaaccaccaaagcagacttcatcgaagaagacatctcagccaaaggctgaaagtccactcgacagtttcctgagttcccttgggcttgagaagtactcaattaccttccaggcagaagaggttgacatggcagccctaaggcatatgacggacagtgatctaaaagctttgggcattccaatgggtcctcggaagaagattatccttgccttggaatcgagagcataagggaatgacaagggagtacagtgtaggaaggtgggggatatgctaggcatgctcgtgtgcaagttcgacaaaaactttgtatccacatatcttggaaagggtacaacaacaatgattttatgggtctcttgtaacgcataccctgtcctgttgagcatgttcagcgaagtttaggattgctagaaggcaggccacggcgtctattgctgtaacttgtttccgtgttaattaagtggtgcggtatacatgttgaggcagttgggttcgtcttggaatgctatatcctataactacttgggtgtttggttcgaagaatgagatattacatcatcttctcacttttcactatttgtttggtttgtggaatggaatgagtttatccatcactccttactaactcattccttagttagtac

SEQ ID NO: 25430 - DNA, 965 bp, Zea Mays
atttgccctgccctgccttagctgcaacgacagatagatgaaaaatggaagcatgatctgtatcgggaagatgatgaaccagcttcaaaatcaacagatccgaaggatttgcgattgaagcttcagaggcgaagttttcaacaagattttaccagcacaagaagttctggtgtgcgtgatctacgtgagaagctatctggtataatgaacccacagccatcaaatgctgacccaccaaagccaaagccaaagccagtatcggaggttgttaacatctcaaggcgtcaaattgctgatgaaatgcatgcacgccaaaataagaaaccaccaaagcagacttcatcgaagaagacatctcagccaaaggctgaaagtccactcgacagtttcctgagttcccttgggcttgagaagtactcaattaccttccaggcagaagaggttgacatggcagccctaaggcatatgacggacagtgatctaaaagctttgggcattccaatgggtcctcggaagaagattatccttgccttggaatcgagagcataagggaatgacaagggagtacagtgtaggaaggtgggggatatgctaggcatgctcgtgtgcaagttcgacaaaaactttgtatccacatatcttggaaagggtacaacaacaatgattttatgggtctcttgtaacgcataccctgtcctgttgagcatgttcagcgaagtttaggattgctagaaggcaggccacggcgtctattgctgtaacttgtttccgtgttaattaagtggtgcggtatacatgttgaggcagttgggttcgtcttggaatgctatatcctataactacttgggtgtttggttcgaagaatgagatattacatcatcttctcacttttcactatttgtttggtttgtggaatggaatgagtttatccatcactccttactaactcattccttagttagtac

SEQ ID NO: 25431 - DNA, 1105 bp, Zea Mays
attttttccatttccctttaattccaactttcctctcaaacggagagatgtactcggatcagatctccaccgggcgcaagcgctccatccatgaccgccttgacggcgacctccctgccggcacgggcgccggcggccgtgtccgtcacacggtgtccaagaggcaacgacagatagatgaaaaatggaagcatgatctgtatcgggaagatgatgaaccagcttcaaaatcaacagatccgaaggatttgcgattgaagcttcagaggcgaagttttcaacaagattttaccagcacaagaagttctggtgtgcgtgatctacgtgagaagctatctggtataatgaacccacagccatcaaatgctgacccaccaaagccaaagccaaagccagtatcggaggttgttaacatctcaaggcgtcaaattgctgatgaaatgcatgcacgccaaaataagaaaccaccaaagcagacttcatcgaagaagacatctcagccaaaggctgaaagtccactcgacagtttcctgagttcccttgggcttgagaagtactcaattaccttccaggcagaagaggttgacatggcagccctaaggcatatgacggacagtgatctaaaagctttgggcattccaatgggtcctcggaagaagattatccttgccttggaatcgagagcataagggaatgacaagggagtacagtgtaggaaggtgggggatatgctaggcatgctcgtgtgcaagttcgacaaaaactttgtatccacatatcttggaaagggtacaacaacaatgattttatgggtctcttgtaacgcataccctgtcctgttgagcatgttcagcgaagtttaggattgctagaaggcaggccacggcgtctattgctgtaacttgtttccgtgttaattaagtggtgcggtatacatgttgaggcagttgggttcgtcttggaatgctatatcctataactacttgggtgtttggttcgaagaatgagatattacatcatcttctcacttttcactatttgtttggtttgtggaatggaatgagtttatccatcactccttactaactcattccttagttagtac

SEQ ID NO: 25432 - DNA, 1141 bp, Zea Mays
ttgaactgggccaataggacacgtttggggaaccaaaactttctctatttgtagttgcaaaatttctagaaaagctttcctctcaaacggagagatgtactcggatcagatctccaccgggcgcaagcgctccatccatgaccgccttgacggcgacctccctgccggcacgggcgccggcggccgtgtccgtcacacggtgtccaaggcaacgacagatagatgaaaaatggaagcatgatctgtatcgggaagatgatgaaccagcttcaaatccgaaggatttgcgattgaagcttcagaggcgaagttttcaacaagattttaccagcacaagaagttctggtgtgcgtgatctacgtgagaagctatctggtataatgaacccacagccatcaaatgctgacccaccaaagccaaagccaaagccagtatcggaggttgttaacatctcaaggcgtcaaattgctgatgaaatgcatgcacgccaaaataagaaaccaccaaagcagacttcatcgaagaagacatctcagccaaaggctgaaagtccactcgacagtttcctgagttcccttgggcttgagaagtactcaattaccttccaggcagaagaggttgacatggcagccctaaggcatatgacggacagtgatctaaaagctttgggcattccaatgggtcctcggaagaagattatccttgccttggaatcgagagcataagggaatgacaagggagtacagtgtaggaaggtgggggatatgctaggcatgctcgtgtgcaagttcgacaaaaactttgtatccacatatcttggaaagggtacaacaacaatgattttatgggtctcttgtaacgcataccctgtcctgttgagcatgttcagcgaagtttaggattgctagaaggcaggccacggcgtctattgctgtaacttgtttccgtgttaattaagtggtgcggtatacatgttgaggcagttgggttcgtcttggaatgctatatcctataactacttgggtgtttggttcgaagaatgagatattacatcatcttctcacttttcactatttgtttggtttgtggaatggaatgagtttatccatcactccttactaactcattccttagttagtac

SEQ ID NO: 25433 - DNA, 1205 bp, Zea Mays
cgagaagcgcctggacggaagaactcacgagatgaaaaaatggcgcatgggctacgagagacttgaactgggccaataggacacgtttggggaaccaaaactttctctatttgtagttgcaaaatttctagaaaagctttcctctcaaacggagagatgtactcggatcagatctccaccgggcgcaagcgctccatccatgaccgccttgacggcgacctccctgccggcacgggcgccggcggccgtgtccgtcacacggtgtccaagaggcaacgacagatagatgaaaaatggaagcatgatctgtatcgggaagatgatgaaccagcttcaaatccgaaggatttgcgattgaagcttcagaggcgaagttttcaacaagattttaccagcacaagaagttctggtgtgcgtgatctacgtgagaagctatctggtataatgaacccacagccatcaaatgctgacccaccaaagccaaagccaaagccagtatcggaggttgttaacatctcaaggcgtcaaattgctgatgaaatgcatgcacgccaaaataagaaaccaccaaagcagacttcatcgaagaagacatctcagccaaaggctgaaagtccactcgacagtttcctgagttcccttgggcttgagaagtactcaattaccttccaggcagaagaggttgacatggcagccctaaggcatatgacggacagtgatctaaaagctttgggcattccaatgggtcctcggaagaagattatccttgccttggaatcgagagcataagggaatgacaagggagtacagtgtaggaaggtgggggatatgctaggcatgctcgtgtgcaagttcgacaaaaactttgtatccacatatcttggaaagggtacaacaacaatgattttatgggtctcttgtaacgcataccctgtcctgttgagcatgttcagcgaagtttaggattgctagaaggcaggccacggcgtctattgctgtaacttgtttccgtgttaattaagtggtgcggtatacatgttgaggcagttgggttcgtcttggaatgctatatcctataactacttgggtgtttggttcgaagaatgagatattacatcatcttctcacttttcactatttgtttggtttgtggaatggaatgagtttatccatcactccttactaactcattccttagttagtac

SEQ ID NO: 25434 - DNA, 532 bp, Zea Mays
atttgggaatcaaggagaggctttagcaagaatcaacttagatacttttgcagaagtagcttactaaagtgagtccttactttcaatattttagtggcagattaaatattaatagactctgtttgcatctggtctaattttaccatctcatcaatacaacatcatttttattcatgaggttcacatcctgacttaggttgcagggcagcgatcaagtctccactctccggggatataacggcgatccgaatcgatttactcagctgaggatctctaaccacacgacatatgtagcacttaacccttccatatgtcaaccgttcccacggatcctccactacatgaacaggtccacgccacccgagagcacaccaccccttttaggcgatcctttgccaggagggtacgtgccactctcgccatctctccactcccagtgcgcgattgtcttttcatgtatggaatagtcgggttcaagcttaccctgtcccatatccagggcatgtggctagttaagatagtccttgatcat

SEQ ID NO: 25435 - DNA, 296 bp, Zea Mays
acaccaatatttttgcagcggaaatcttattaccaaattttacatgttacatcaagttttataatgtacatgatcggagtgattacaaaaaatgattcaaaggaataactttaaactgttataaattgtttataagtttgaaatatatgctagcttaagtgaccatcctcaataagaagataaagacgaggtatacttatataagaaggccgagcccaccggcacttaacaccatcaacagcagcacaaaactataacctgaaaaacaacagggaataaaaccctgagtatggaat

SEQ ID NO: 25436 - DNA, 4373 bp, Zea Mays
ggaaattgtaccaaaaatcgtagaaaaatccaaaaatcatgggacatgttttatgggatgtgtaaaatcaggagctctctggtgaagttagttttaggctttttagagctgtcagtatattttagtattttaaaagtgctcttggaaggacaattggaatttgagaaattagaattgggcactaaaaattatggatttttttggagaagttttttattaggatatgagtacttggtaaaaatttggggatgtttggaatcaatttgttcagaaagtcttgtagggccccaaaatagagtggttaatccctaatcaagtgtgggttaatcatttggaaaaggagataagtttacctagtaagagttgttctttggatgaaggaaccaaaggaagattaatacttaagtaagttcgatttggccacttttagcaactgttgggggtgtagaaccatgtgtatactttgtcatgtgctttagttgtagtgtttctattccccacctttccttgtgagagtttgcatttcatatcattacataagcatacatgtatttgtaattgaattgtagaacacctagaagaagtggtgtttgaaggagtcaactccagtggttgctgatcaagtggaggagccatctaactgtgtattggataaagggatctaaagcctcttcactgcaacaaaggtcactcgaagaaaacttatcaagttttgtaagctacagtggaaccaacccatggaagatgaaaccacataggaatcggaggagtatctagaagggcgtgttcttgagtttctagtgccctgtcaacctaaggtttgtgtagttcatttctgatataaaccaatagggacacacccttgccttataggagtaatggggaaaggaactggtgacgcgtttcttttttccattatctaacctagagttttaaatttcgggaagagatttctttttaggagaaaggttgtaacacccctggtgttacgtgaactaaaactctgacatgtcatcataagcatttgcattaacttgcttgttacatgtagaatgcattcactagatcaataattttacaataatgtgatgttgtgtgcagagtggaggacctagttaaggacctaagctaaacaggagtaggtcatcccttgagcaagtaacaaattgacttggagttttgaagtgcgaaagggaaatcctagagtctatagcaaatttgttttcaaagatagatcaagtggaagaaatacttggaccgaaggattaacttctaaatcctaaggcttgaaaaccttgattggaattgagtgtaagcaaacaactcctaaatcaaggatactttggatctgagttctataagccaaagttagatttgagattaaagagaaactttgctttaggaggatggataagtttgcttttgatatgtggattagaagtgttgaagtacttagggtggttgagtatctctaacccctaaactggagcccaaaagtggatttggagatctagccacattttgcaagaggtaaaaataccaagttggtaggatttccaaagttgcacaattttgttatttggagatttccaagttgtgtgaagaaaattggagtaaatcacaaaagttcagttttgagctcaaattggaattgctgaaaatagtagcaactaggcaattttggtcctttataacttatgatatataaacattttgaagatggtcattataacaaagttatagagctacatgaggagtataagttcggttgagtcacctagctctaaagcgatttggaacttagagaaaaactggtccaaagtagagctaacagactttctggatttcagacttggtagaattcaaagtctgaatttcagcaattggagcaaactttgagctattgtagtttggaatccaagaggttttggttaatgactactatatcaaaattgtagcataagtataggagagcaacttttattaagtgtgacagccctggaactatatacaactaggataaaaggtgatccaaagtggggttgtcagactttttgagttttcagattgggaacagtgaactgaaactgagatttcagtatatgtagctatttttggagctcaattgtgcctaatccatgaggttttgggctgtagagtatgtagaggaattcaagaccacctaatggtgaacaactttattaaaggatgatggacatgatcccacataaaaagtgaagtaacagctactcaaaggatggactgtcaggtggctagtgacttagtgtattcagaatttaaagtctgaaatcagtagtgatgcaaagtttagagccctattgtgaccaacccttgtggttttggactatgaactatgtggcaacgttggagcccatagtacagagaatatgttttataaataggtttggacttggttctgcataaaagtgggagtaaaacacctctaaacttgctctatcagccaaaaggtatgcagatttagttgactgtttctaagtaatttagtgtgtttttacccacatttggagctctatggtaattaatatatggagtatgagccctatttcatgtagaaaagttaaataccatttgaaggagagtaagtcttatgcaaagtgttagccttgctgctgtgtaaaatttggagataatggtactgcaatcctctatgtcaggtttggcatggagctgtgtcagttagctgaaatcagtgtttcagtatttttgttaaactttggagcactataaccattgatctgtgtggttataagccaaggaccctatagcaaagtgataggggactagatagtgaacaagtttgtttaggaatgcttgagctgtccttgtttggaatagggagaaaaaggtgttcaaactgcctttatcagacatgtgaagtgcaggtctgatgcagtaatttgagttttggttcagtgtctttctatggattttggagcttgtttgtgattgatccaaggggtttaagcctaaggtccctgtagaggaatggtagagggtcatttggtcgacaagttttgttaaacttgatctgcctattgctatgtaaaactgggagtaagttgtgtccgaaagttccctgtcaagatgaggttgtgatgtgcagtaactgaaaattggaggtttcagtgatcttttcctgtgtttggggcatcataacttttgatccctgcatttttggccttggactgctgcaacaaactaatagagctatagttggagaataatcttggttaaaagggatgggtgtgttgtcgaggggatttgggtgatagaggggcttaaacagggaggtatgcagagggagcagcatgactgatggagtaaattcagagttgtatttagtaaactgaagaagctttatccctccctgttgtgcccatctgatgctatggatcgtgatatggatggatataaggatgtatggtctaactcaggttctagagtttttttcccacgaaatatccacttttggactgatttggggatagtggagagagtaattcagttaactgaaccttgaatcagatttggcggtgaagaaaagatctcctctccctgctggtttctctagtgtgctcgagttgagatgtggttgggctggtcaacaaaggttctagagacctcacacgctactggactaaatatcaagtccctgaatcaatttgagtctatccccaagtagagaaaatatctgttttgtttgctagctgcaaaactggacaaaactgatatttgggttgtgttgtgctgagccaaccgggtattgtgcataggagccaggtgtattgaccctgcagtgctggccccctgttagtttttcatcacagcgaggtaggcaagtccattggatctgtccttagctccactcctatacttaagtgctggtctctgctaattccgagctctagccaaaaacctctacaaagatgttggagacctggtgttcatgctgatgttaactctccccagcccctcccaagttggcactgtccaaagcttgcacgccgtgacctaccagtagtgaccatgccggtcagtttggccatctcgccgtggccaggacaactcagcaaagtacacgatcatgctatgtttgttctgtgatcaccttgtcatggccaggtgatgaggagtactctaggtgtttcggaggctggagggcgtttccagttctgggggaggattagttaggcttgtgtataagctttggagggttcctaccttcctgttattgtaaaaggttatgcactttgagtatatcaggacttgtaataaatgtaactcttcctatgtaataaccttcagttttagaaataaaaataatgttttgt

SEQ ID NO: 25437 - DNA, 1520 bp, Zea Mays
aagaagtggtgtttgaaggagtcaactccagtggttgctgatcaagtggaggagccatctaactgtgtattggataaagggatctaaagcctcttcactgcaacaaaggtgatgaggagtactcaaggtgtttcggaggctggagggtgtttacagttctgggggaggattagttaggcttgtgtataagctttggagggttcctaccttcctgctattgtaaaaggttatgcactttgagtatatcaggacttgtaataaatgtaactcttcctatgtaataaccttcagttttaaaaataaaaagaatgttttgtaaagtcttccgctcttatctccgaagtgtgtgtatcgaatgtgattactgtaatatgcatgtatggtgggagatccttgggatgatgagttcaaattgttgaactcgtgatagccttgttaagttaactggtacacgtgcatagccatctgaggccatcaaggccaggattggtgcacgtgggcccgataactagggagggctgccacagattggtattggagcgatcccccattatcatggatattaaagtaatcctttgatagacttcaaaaggattttgagtccaaattattttagaaaaaaacttaagaatgaataagcaagtcctaatagtcgaagtgcaaatagtacatggttgagttaaggactataaggtggcttagtttaggatgctaaccacgaacccacaactataatgtaattttctgtaggtacactaactaaaaccctaggaaagtgcgactagtattcatgacggagtgtaggtatgccactgccatagagcatgaaagccactatatgttggcaagaattgtgaggacgaataggtcgagcatgcatcatgacatacaattttaagttaagcccctatatagtagcttagtacatgtttcatccatcatattcatgctacctatctttgcttttctatactaccttttcatattcgtgaagccttggaacttagttcatttggtggacctgtagtttataaggtacagttgccaaagaatttgtcaacagtgcacaacatgttctacgtgtcccagttaaagaaatgttttcgagtcctcaagcatgttattgagattgcagatgttaaccttggaccagatttaacctacttggaatatcacataaaggtgttggatctaaaggatcgggtcatgaagcgccccagatcctttggggctcaaatgtgatacaattactaagcccaggaggctagtaaacacatttatacatcagatagttctagatctgcttaaacgagacaaacctataaaggtggcgaacaactttaagagttggtccacaactcgggacatatcatcagagttgggctgaagcagactgatatatgcagcaaagcaaatcagcggtccaacagccacaggcaaagttgggaacaggcgtaactcttacccgatcatgatctccttctctgaaaaacaacaaataagcaagggtgtttactaac

SEQ ID NO: 25438 - DNA, 781 bp, Zea Mays
gcaaatccaccggtagctgttgaagtgttgatcaccgtcaccgcttgcggttcatcttcatcctccatttgtccgtcatgagcaattcgtctgaaggttgtatcagtttatcttgcctcaggagctttgttaattaagaatttgacatcattggcatatggcgtcccagaagagttgtcttctgatcactttctcccaggagattgtagatggggtgcctctgtttgtttcatcaaactgccttcctgtaaaagctttgaaatatgaacctgctggttattcgttccatgctgcggcaatgaagctgcttggtcttgcggagcatgaagatatagaaactgatgatcacagcgtttcatcggatgacaaaagccaagattttaatactgcttctgatacctttagcagcaaagggaagaagaagtcatctggcagtcaacagcaggaccactatgctttgcttgggttggggcacttgaggttcttggccactgaagatcaaattcggaaaagttaccgtgagatggctctcaaacatcatccagataagcaggctgccctgattcttgcagagacaacagaggaggcaaaacaagcaaaaaaggatgagatagaaagccatttcaagtccatccaagaggcctatgaagttctcatagaccctacaaagaggaggatttatgactctacagatgagtttgatgatgatgtcccaacagactgtgccccacaagacttcttcaaagtttttggcccagcctttcatgagaaatggacgctg

SEQ ID NO: 25439 - DNA, 907 bp, Zea Mays
cagccgcagtccaccgaccccgccgccggtcgccctccatctcctcgccgccggtcgccctccatctcctcgccgctgcctctcggccctggaaaggagatgaaaattcagtatgctcagtagaagaactggcgacactaagctcaactgtactcctatgtgggttgttgccagacaagcaaggcactgcacctgccacagaatcaatcaggtcaaattattgttgtatcagtttatcttgcctcaggagctttgttaattaagaatttgacatcattggcatatggcgtcccagaagagttgtcttctgatcactttctcccaggagattgtagatggggtgcctctgtttgtttcatcaaactgccttcctgtaaaagctttgaaatatgaacctgctggttattcgttccatgctgcggcaatgaagctgcttggtcttgcggagcatgaagatatagaaactgatgatcacagcgtttcatcggatgacaaaagccaagattttaatactgcttctgatacctttagcagcaaagggaagaagaagtcatctggcagtcaacagcaggaccactatgctttgcttgggttggggcacttgaggttcttggccactgaagatcaaattcggaaaagttaccgtgagatggctctcaaacatcatccagataagcaggctgccctgattcttgcagagacaacagaggaggcaaaacaagcaaaaaaggatgagatagaaagccatttcaagtccatccaagaggcctatgaagttctcatagaccctacaaagaggaggatttatgactctacagatgagtttgatgatgatgtcccaacagactgtgccccacaagacttcttcaaagtttttggcccagcctttcatgagaaatggacgctg

SEQ ID NO: 25440 - DNA, 977 bp, Zea Mays
ccccgggtactcattccctcttcaatacaaaaccagccgcagttctccattttcgagcgcagaagcgagagatatccggagcagccgcagtccaccgaccccgccgccggtcgccctccatctcctcgccgccggtcgccctccatctcctcgccgctgcctctcggccctggaaaggagatgaaaattcagtatgctcagtagaagaactggcgacactaagctcaactgtactcctatgtgggttgttgccagacaagcaaggcactgcacctgccacagaatcaatcaggttgtatcagtttatcttgcctcaggagctttgttaattaagaatttgacatcattggcatatggcgtcccagaagagttgtcttctgatcactttctcccaggagattgtagatggggtgcctctgtttgtttcatcaaactgccttcctgtaaaagctttgaaatatgaacctgctggttattcgttccatgctgcggcaatgaagctgcttggtcttgcggagcatgaagatatagaaactgatgatcacagcgtttcatcggatgacaaaagccaagattttaatactgcttctgatacctttagcagcaaagggaagaagaagtcatctggcagtcaacagcaggaccactatgctttgcttgggttggggcacttgaggttcttggccactgaagatcaaattcggaaaagttaccgtgagatggctctcaaacatcatccagataagcaggctgccctgattcttgcagagacaacagaggaggcaaaacaagcaaaaaaggatgagatagaaagccatttcaagtccatccaagaggcctatgaagttctcatagaccctacaaagaggaggatttatgactctacagatgagtttgatgatgatgtcccaacagactgtgccccacaagacttcttcaaagtttttggcccagcctttcatgagaaatggacgctg

SEQ ID NO: 25441 - DNA, 930 bp, Zea Mays
cttgacgcgggcgcccggagccatctccaccgtcagtggcgagatcggacggcctgctggaggtgttgggcccatccgtccccgggtactcattccctcttcaatacaaaaccagccgcagttctccattttcgagcgcagaagcgagagatatccggagcagccgcagtccaccgaccccgccgccggtcgccctccatctcctcgccgccggtcgccctccatctcctcgccgctgcctctcggttgtatcagtttatcttgcctcaggagctttgttaattaagaatttgacatcattggcatatggcgtcccagaagagttgtcttctgatcactttctcccaggagattgtagatggggtgcctctgtttgtttcatcaaactgccttcctgtaaaagctttgaaatatgaacctgctggttattcgttccatgctgcggcaatgaagctgcttggtcttgcggagcatgaagatatagaaactgatgatcacagcgtttcatcggatgacaaaagccaagattttaatactgcttctgatacctttagcagcaaagggaagaagaagtcatctggcagtcaacagcaggaccactatgctttgcttgggttggggcacttgaggttcttggccactgaagatcaaattcggaaaagttaccgtgagatggctctcaaacatcatccagataagcaggctgccctgattcttgcagagacaacagaggaggcaaaacaagcaaaaaaggatgagatagaaagccatttcaagtccatccaagaggcctatgaagttctcatagaccctacaaagaggaggatttatgactctacagatgagtttgatgatgatgtcccaacagactgtgccccacaagacttcttcaaagtttttggcccagcctttcatgagaaatggacgctg

SEQ ID NO: 25442 - DNA, 1330 bp, Zea Mays
tcatttctaaattagttctcttacaccttttcaaattttagcctcgatctcgagctgatatttacgtttatatttaaattttcgagtaaaaaagaaaatatccagccgttcctcccgccgttctctctcctccgatttttataccccgtcgttctcatccgctcgcgcagcaagaagaaaaatctggccgccgctcattaggtggattttttccacgtaacgtccatgtactatgtgcttatcccccatcatgatagcctccaggagttgacacccacagccacgtgagttgtccttccggtgttgccaggtctcggaagacacgctgtcttcatcttccatggagctggttgtgagctccgcgtacggctccggccatcactcctctggttgtgtctctccagcatcacgactccatcccttcatgctcgtatctggagctcgctcggcctacagctcgcttgtaccccggccgccgtgttgttcctgttcgtcttcagcgccggtcgagcatcgccgcttgggaatggcgcacggccatcccgtctcgacctcctccagctcctccatcccttgttccttggcgctcgccaagggcctctccttcatcttttgtcgcgtctcaactcccatggccgcctctacgcacgagctcgccggacgccgcagcatatgctccctgctcggcctccccggcgtgctgctccctcgccttggcgcccctgcgagctccttctccctcgcccggtttccagctcgagcctcgccggatgccgacgctgcttctctgacctcgtctcgacactcaatcgctgcagcacgccatatcgccaattttcctcgtcatttctcggctacaacctcgtcagcttctgcgagtcgtgcgcgtcttgtgttcgggtcgagcccaaggattttaaggaaaaagaagctctagtgcttcggccggtgaaatgaataaaatggtggtagtcatggtccttgcaaaatccgagatcgacttagttgcggtacgataattaatcatgtgatgtggaagacaaccccagtcgaccccaggataatgcagagattggacatctccgcaagacgacgtcgtcagtcgggccaacctgaagatggataatctaacgagtgccaagacaaaggatggtcgtcaagtgatcgacgtctaacaaacactaacgtagtgtttatcccaggcaagccccagtgcatgcaaccccttccttgtgtttttaaaagatttttatacacttaagtctagtgaaatgtgcattaagtatataggaattgcttggaaactatttgatgcattgcctaccttgat

SEQ ID NO: 25443 - DNA, 108 bp, Zea Mays
ctagatgcaactagagtctattaatatttaatccggcgttaaaatattgaaagtaaggactcactttagtaagctatttctgcaaaagtatctaagttgattcttgct

SEQ ID NO: 25444 - DNA, 912 bp, Zea Mays
ctgagatccaacggccgtaggagcccgataccccttcgcccgcgcgttttcttaaagagacccccggttttctagaatttaaacccgccgtccctggtttctcacagttaggtcctcggaccttttatttaattcaaaataggtatttagggtatatttttaacccctaaacttgtaaaattcataactttgtcatatgaactccaaattaggtgcttcaaattgcaaaatgctcatgatgtttttgtctatctatttaaacaatgtttccctgttgtttccatgtaccaattaatgattaatcattaggataggattaaggttattggaaccctatttgagataattagaagttggtagactttaataaaagttggagtacttaagtttagggacttaaacacctaggtttaggaacttaaaaccatgtaatgatttaatcccaccactgacttaaacctgattagtggataatgaatcactttgtatagtcctctaccccagacctagggaacaccagagtgcctatcccttttctactatgaacttgtgatctctctctgctgcatatgtttggtatgttgctttttgtttgttattttcccaagtacatagtgtgaatgattactttacgtagacaacgagcagtctgtgtttcccgaggaggttgcagaggaagtccctgatcagcagtttggtgaaggcaagtgtcctctgtcccattatgtcctattcatttataacttactatcccgcattacttacttgaaacctaaggatttactagctttacactatactttatccttgataaccttatgggctgttatggttagcactctgctattgccttaacttaatcaatgaacatgatgtgactatttatgatactgttatcctgatgatgttgat

SEQ ID NO: 25445 - DNA, 1789 bp, Zea Mays
gaccatgcaaaaacatctttgttattgaacaaaaaccttatcaaggttttttcctgctcttcggatagttgagagcctaacagcaccctctgctctgctatgtcctcacataagagcatgggcttcggctgatctgctgaagctgctttctcccttctgaatttgtactgttcacaagcttcagctccatctatattatggattgcttttgagtcagtccagttaccttcggcccttcttgcagcttcctgacttccatggatagcaatgggtccctgatccgaaggtatcttcatgcaaagataagcagggtgaaggattgcttcgaaggcattaagagtacctcgaccaataattgcattgtaaggatattccatgtcaacaatgtcaaacacaacttgctcagttctagtgttgttgatgaatccgaaggtgactgacatggtgatcttgcccagtgctacaatctgtcttcctccgaagccacagagaggatgtgtagcatcatgaatcttatcttctggctcttgcatttgtctgaaggctttagcaaatatgatatcagctgcactgcctgtgtcaaccaagacattgtggaccagaaatcctttgataacacaagagataaccatggcatcgttgtgtgggtaatctttgagctgaaggtcctcttgggagaaggtaatagaaatgtgagaccatcttgacttgatgaagggtccttgcaccccaacatgctgtacccttctctgtgcttccttcttctgtttcttgttagctggctctgaagacgagccacctgtgatcgggagcaccagcttcgggtccgaagcaactccagcttggttgttgaatgaagccatcagctcaaaaagtggaagtgagttcaccggaggtgggcgccaatgttggggacttgttctcaaatgctatgaattaagaacaaggcaacataaaaaatgttaaatggtattgtccttcgtccatgaagcattattcctttggggataatgagccttggacgaaggttgataagagtcttattacgaaattgaaccttcgcaataacttttaataaatattgtaagataatgcaaagtaaaagatataaaaatgtatgaataattcacagatgtattatatcatattcacttaatatattgaatcattaaatacaatgatacctatgccttgacaaaggttgtattccgagagatgcgattgcaaaaatcagaatgcgtgaacagtaacggagtactgttcactatttataggcacaggacgcagcctgtgaggaattacaagtatgccccttataagaacttacaacattgactcagatctttatggactaaaaggtcattctatctttaagtcggtttgtaatgccgaagctctacgaagaggtaccttcggctatcttgtacgaacagcttcatccgaggatcacttctttctataagaccttcggcgacgaagcatagacccaacacttcccttttctcatccttcctcattcttttctttctcatttctataggagaaaagtgcttattttatttgtaattatagcttaataggttaaaccctaagggagtataaattgttgcatcatgttgaaccctagatttcacttttgcttggtgcataattcttggaaagtctaatttgaatttgtggcttatttggatttaaatcaaatagagaaaataaaaagataagagaaaacaaatttcagaataaaaagaaaaggaaagaagcccaaccccgccgccccctcagcctttcg

SEQ ID NO: 25446 - DNA, 3958 bp, Zea Mays
aaatcagaatggttctatgttaaggttgatgatgataaagaaaagcttgtgcaaagtccactggaactgaccttcggagaaactcgcccccagtgccacatgctaccagagggtccaactcaaaaagcaatgtttgaattcaaaataattgcagagaatattagtacaagggacctggtccaggaattcttggccttcaaggtttttcctagtgtaaaagagtgggaaatgccgaagctgaagggggagaagaaaaaaggtgaacttgtacgtttgccttactacttcaaatttaaaaaatattttaaaactccttgtcaagagtggctggatacggttgaagtgatgtgcaacgagatacttggtaattattcaaaaaaggaagaccaattgatgaccgcagccttcggcacccgtccgaaacgaaggttaaatcaagtattggacgccttgggtttcgaatacccagactacgaagacctgaacaaaggtgccggaggacaaaaaaggaaaaggggaactgaagccttagatgaaggtgacaaagagccagtaaagaagaaaatttcgaagaaaaagaaaccttcttctccgaagcaacaaatatccgaagcagaagaaacccccgcatcaccttctgctgctgttgttgaaaaaattctgaaggtaatgactgaatccttacctgcgaagctaagtccgctgggtcctcaactgactaagttttttcagaaggacaaggagcctgagaaattgaggaagacaatcaagggaaagaaacaaagaatcattaccgtgacagaggtaattgataaaacgccgccaagagcttcggcccaaaaaacacaagcagcagcagagggagcagatattgaaattacaccttcggaggccgcggccgccgaagttacctcagctgaagatttgaatttagagagcacaattgaacatattgaccagatgctgctagacatggctgcagaggaagctgccactgctgccgaagaaggtgtgaccgcagcgtcaaggaaaggaaaagaaattgctgatgaagcttcggaaaacgaagcctttgcgttcaaaaacttagttggagaacatctaacaaaagctgaaatagaagagcttaaagagtatgcccaatcctgtggatacaaacctggggctctcctcttcggaggcgttgatgatgagaaattagagtgtattcgggaccaaacaggggccaaagtcatcagcactctgtccagaagtattggattcccgaagctagaagcagatatcagccgctaccgacgacaacatgtcgttggtagtttgttttactccaattttaaggtaaatgatttgtcccttaacttttattgcttctaataaaaacatgtctgacgaaggttgtgtttgtgtagagtatgctattgagcaaagccttgcaaatgcagcaagatcttgaagataaaaagcatgaagttataattggaaatttggaaaacaaaataaaggagcaatcagatgcttttgagaaaaagaactttgaactccaggcagccgaaggtttactggcggaagctgaagcaaaaatatcagaactgaacacaaagcttctccgccagtctcagcagttcgaacaagaaaaacaagatctcaatgcaaaacttgaagccgaagctcagcaaaattcggatttgagaaaactactgacaaatcttcaagaaaaatgcctggaatttagcaacaagtgcatacaacgactaagaaagatttttcactcagttggagctagcagcgaaaagtttaccccctcagctgaagatctaccaaaaactttcgaacacattgagggggagattgaagagctcgacgaagtcatagctgggcatggcgacttctgtgcctgggtggcttctcgagggactgctgcagccttcctgaaggctggctgtgatcatgggagaattgtcaacaggccaaatttcactttgtcaccatcaatcctggatgacatccctgatctcgcccgaagcatctcgaatcgatttgtgaaaatgatatggacaaaaggtggtcgagagaaagctggagacgaagctcgtagccaccttgatccagtaagaaatcataccttgtgtttacctttttctgtaaacttgattttgacttccgacgtccttattcgtgtaggatgatgaagccgaaattgatgaccaaaaataatgccgaagccgaagctcataatgccgaagccgaagctccttggagatttagatagtagactgcaaacagcacttgaaaaacttttgagataacttttgtgaatgtaaacaaaacttgtttttaatgtatgctgttcataccttgtaatatatccttaacctttcactgatgtatgagaaatgctttgatgtggacgaaattttcttttttgagccgaaggcgaaaaaaacaccttcccttcttttcgtacgcaacgaagcatagaaaacaacattttccttttttccgaagctctccttcatgaaaaacaacattttctcttctttgtgcacgaagctcttttttccctttcttttttcccttgccgaagcaaccattttatgcgatgaagatgattttcctacatatgcctagatgaatgtttatgaatgcaaatgctatgatgtaatgtgatgtgcaaatgaatggccaaacagatatccgaagccatattcatagtcgttattttcttaaaaacaatgacaccttagctctgcattcccttaggaacgactttggagcttctttgcctttacttttggcggaatcagcgttgacttttcgctgtaagctctgcattcccttaggaacgtctttggagcttcttcgcctttacttttggcggaatcagcgttgacctttcgctgtaagctctgcattcccttaggaacgtctttggagcttcttcgtttttacttttttgggcactcgatggtgcactctcagcttttacatttacattctttgggggattttgcttttataagactaaaaaaggaaattacatgtgctggcctcattaaaaacctttctccccctttggaaaggaaaagggtgccatgaaaggaaaaataaaaaatatgaaaaattacatcgaattatacataatatcgccgaagctcatccgcattccaagatctaggaatgtcattgccgtccatatctttcaatctgtatgaaccgggccttgacgaagatactactaagaaaggcccgtcccatttcaactgcaatttgcccactgtttccgggttggctaccctccgaagcaccaaatgccctggctcaatattttttagccgaacctttctatcccgccatttgactgtttcagcttgatatttattaatattctccacggcttgcagtctgatcccttctaaagcatctttttctatagaataagcagcttcggaatctgattctgccgaagctactatccttattgatccgacttttagcttcttctggagttattgcttcgtcaccgaataacaacttgaatggagtgaagcctgtagatcttgatgttgtcgtgttgtggctccacaccactttggttagctgatctggccattttcctctaggttgattgaagattaacttcattattcctgtcattataatgccgttggctctttcaacgagtccatttgactccgggtgcctgactgatgcaaaatgtatcttcgtaccaatttggtcacagaaatccctgaaagcttcggagtcaaactgtgttccgttgtccacagtgatagcctttggcaccccgaaacgacaaacaatattctgccagaaaaacttttggacggtagccgaagttattgtggctaaaggcttcgcctcaatccatttaaaaaaatattccacagctaccacaacatatctgaggttcccttgggccggtggtaacggacctaac

SEQ ID NO: 25447 - DNA, 6919 bp, Zea Mays
gggacactgcagaggcggctatgcaggatgcagcatgacgtgcactctcccagtactgttctttgttcgatggggtggccgacggtcttaaccttcggtactacccccgccgccctactggcagcaccgagagtgtggttgtctcacctgttggtgaggctaaccctaggttgagcagcacagtcaacctagtcgcagtgcttaacactgagctggaccactctctggacgagctaagcagggctcgaacggagattgcggagttgcgtgctgagctggcagagcgccatcaccaggagggtggttcccccgcttctgttgggactcagcacccataccgctcaccgccacgtggtcaccacacttatggttcccctgtctgtaagaccaggatagatctggatccttagatcgttagcgtcggagtttgtaataattcttaagtcagatgtctcagtcttaggtagtcagtttagtttgcttatcagttgcttccatttagtttagtttgcttatcagttgctttcatgcttgttatgatgaacttgtgctggattcgaatctttgtaatgactgttgccaacctgtgggtttcccctgcagtttggcctagctagtaatgttaataaagtcagttgcttagttgggaaaccatttacttctactttccttcttatctgagaagcggtgttgaatcataatgaggatcagtgaagctctttgttcactcagtgtcatgaagaattatgtattctcttttcttatgctgaagggttgtaagatcaatgctgatgtgtgaatgtcttccacagatgtctgacaacaggcgccgatgcaacaggcgtgctcagcaagagcagcatgaccagcaggaggaacaatagaggcagcctcccccaccacccccgatgtcagtagaacagatgttcttgatgcagactcaggcagtgcaggccattgggcagactctggcagccatgcagcaggctcaacagcaaccccaaccccaattgcaagtgcagatgccccagatgccacgggataagcgtgacgagttcatgagagggcaccctcctaccttcgcccattctgctgaccccatggatgcagaagactggctgcgcgcagtggaaagggaactgcgcaccgcccaatgtgacgacagggagaaggttctgtatggtccccgtcagctaaggggagcagcccagtcctggtgggagtcctacctcgccacacatgctgaccccgaagccatcacctgggaagaattcagcgagagtttccacaggtaccatgtgccagagggactgatgatcgtgaagaaggaggagtttctggctctgaagcagggacccctgtctgttagtgaatacagggataagtttctgcagctatcccgttatgcacctgaagatgtcaacactgatgctaaaaggcagtacaggttcatgaggggtttggtggatcccctgcattaccagctgatgaatcacaccttccccaccttccagcacctgatcgatagggcagttatgactgagaagaagcgtaaggatatggaagatcggaagcgcaagatgagtggaccccagaccggaagcatcagccgtccccgtttctcaggcagttcatctcagcaaggcaggcctagccacccacaaggataccagaatcagaatcagcgtccgcatcagcagcagttttcagaggcagtacccacagcagcagcagcagtatcgtcagcacagccagcagggaggtaatcagtatcagaagcagaacaaccaggcacctcgccttcctgccccagcagcaaatcagagcaaccaagaagccccagcacaaggaggaggcagaggatgtttccactgtggagatcaaggccactgggcgatgcagtgcccaaagaagatggctcagcagcagaccaaccccaatgctccaacaaggcaaggtgtactgcagccggcagcaggcaatcgtaaccaagcgtacaaccgtggaaaggtgaaccacttggaggccgaagcaatccaggatgcaccagatgtggcagtaggtatgttctcagtcgaatctcatcccgcaaaagtgctatttgatactggtgcaactcattcatttgtcactgcaacacgggtagaattgcataacatctcagtagaggcaatgatgccgcccatgaggattaattcggttggtggcaaagtgcaaacagataaaatatgctcaaatataatggtggaaataagggggataggattccccagtgacttaatagtaatagacacccctgggatagatgttattctagggatgaattggttaatgaagtatgaagcaaatgttagttgtgacaagaggaccgtaacattgaagtccccgtcaggagaagaggtagtggccgagctaaggatgcctaaatcagcggagggagtctgtcaccagatttcagttgatagtaaggagcctaacccgctcgaggctatcaaggttgtgtcggactttccggatgtgtttcccgaggagctaacgggcatgccacccgagagaaaagacgaatttgccatagagcttatccctggtaccgcccccatttccaaaagagcctaccgagtgtctggaccagaattggtagaactcaagaagcagatagatgagatgttagagaagggttacatcaggccaagcacctcgccttgggccgctccagtgttgtttgtagagaagaaagatggtaccaaaaggatgtgcatagactacagagccttgaatgaagtcaccgtcaagaacaagtaccccctgccaaggacagaagatttgttcgaccagctcagaggtgccagcgtattctctaagatacacctgaggtcaggttaccatcaactcagaatccgaccctcggacataccgaagacagcattcatcaccaagtatggattatatgagttcacagttatgtcctttggtttgacaaatgcgtcagccttctttatgtacctgatgaacagtgtgttcatggattatctggacaagtttgtggtagtgttcatcgatgacattctcatatactctcaaagtgaggaagatcatgtagagcatttgaagatggtattgcaaaggcttcgagagcatcagttgtatgccaagctgggcaaatgcgaattctggattcatgaagtcttatttctgggtcacatcataaatcaagatgagttagcagtggatccaaagaaagtagcagatatcctgaactggaaagcaccgaaggatgttcgtgggatcaagagcttcattggaatggctggatattatatgcgtttcattgaaggcttctcaagattgctaggccaatgacagcgttgctagcgaagaaagttgagtttaaatggactcaaaagtgtcaggaagcatttgaagaactgaagaatagattgactacagctcttgtgttagtcctgcctgatgttcacaagtcattctcagtgtattgcgacgcttcgtacaccggattgggatgtgtgctaatgcaagaaggaagagtggtagcatactcatctcaacagctgaagatccatgagaaaaattattccacacatgacctggagttggcagcagtggttcatgccttaaagacctggagacattacctgtatgggcagaagtgcgacatctacacagatcataaaagtctaaagtacatattcacccagtcagagttaaacatgaggcagcgaagatggttggaattgatcaaagactatgagttggagatacattaccatccaggcaaagccaatgttgttgcagatgctctgagcaggaagagtcaagtcaatatgttggccacgtacccgatgccgtatgagttagccaaagagttcgacagactgagcctcggtttcctgaacagtacgcaaggagtaacggtggaattagagctcaccctagagcgggagatcaaagaagggcagaaggatgatgaaaacatcaacaagattcggcaactgatcttagaaggaagaggcaaagactttcgagaggatgaagagggactgagggagtaatatggttcaaggaccgattgtgtgttcccgacctcaaacctattcgggaactgatcctcagggaagctcatgagacagcctactccatacaccctggaagtgagaagatgtatcaggatttaaaaaagaggttttggtggtatggcatgaaaagagagatcgcagaatatgtcgccatctgtgatagctgtcagaggaccaaagcagagcatcagaggcccgccggattgttgcagcctttgcggattcctcagtggaagtgggatgagaacgggatggattttatagttggcctacctcgtacccgggccggttatgattccatctgggtggttgtggaccgcttaacaaaggtggcccatttcatacctgtgaagacaacatacaccggagcaacgttagccgagttatacatgtcacggatagtctgccttcatggtgtgccgaagaagatagtgtcagatcgaggaacgcagttcacctctcatttttggcagcagctacaagaagctttgggcacacatttgaacttcagctcagcttatcacccacagacagacggtcagactgaaagaactaatcagatcctataagatatgttgagagcctgtgcgttgcaagacaagtcaggatgggacaaaaggttaccttatgcagaattctcctacaacaatagttaccaggccagcttgaagatgtcaccgtttcaggcactctatggacggagttgtaggactccgctgcattgggaccagcctggagagagacaggtgtttggccccgacatcttgcttgaagccgaagagaatatcaaaatggttcgggagaatctgaagatagcacaatcaaggcagcgaagctatgcggacagaaggagaagagaactgagttttgaagtgggggactacgtctatctgaaggtgtcacctatcaggggagtcagaaggttcggagttaaaggcaagttagcaccccggtacgtcggaccatatcagatccaagccaagcgtggagaagtggcctaccagctcaacctaccagagagcttgtcagcagtgcacaacgtgttccacgtgtcgcaattgaagaagtgtctgcgagtaccagaagaacagttgccagtggagggtttggaagtccaggaagatctgacatacatagagaagccaacgcagattctggagtttgcagacagagtcacccggaggaacaccatcagaatgtgcaaagtcagatggggtcaccactccgaggaagaagcaacctgggaacgagaagatgacctgaaggccaaataccctgaactctttgctgaccaaccttgaatctcggggcgagattcttttaagggggataggtttgtaacaccctgaatttgggggtataaaatttctttgctcatattcacaaattcaggtgttacttcctgttggggacttgttctcaaatgctatgaattaagaacaaggcaacataaaaaatgttaaatggtattgtccttcgtccatgaagcattattcctttggggataatgagccttggacgaaggttgataagagtcttattacgaaattgaaccttcgcaataacttttaataaatattgtaagataatgcaaagtaaaagatataaaaatgtatgaataattcacagatgtattatatcatattcacttaatatattgaatcattaaatacaatgatacctatgccttgacaaaggttgtattccgagagatgcgattgcaaaaatcagaatgcgtgaacagtaacggagtactgttcactatttataggcacaggacgcagcctgtgaggaattacaagtatgccccttataagaacttacaacattgactcagacctttatggactaaaaggtcattctatctttaagtcggtttgtaatgccgaagctctacgaagaggtaccttcggctatcttgtacgaacagcttcatccgaggatcacttctttctataagaccttcggcgacgaagcatagacccaacagtagcccctttcgcggtgctagatcgtttttcgtaacgagcttgatccgtgaaaaaagtttcttaagcttcggagcgccaaaggtctcaaaaaacaccttctctgagctcgttgtcgagaaacgattcgatttccctgcgcgcagcggccccaccttgcagagttactgttcggtcactgcggtccaccgtacagcgagtgcgagcgggtgtccgcctggtgtaaaactcctggcgcttcgccttcttacctgcggcactatataaacagacgagtaggtgtgaagttaccacagcatttactgctatttgcactgttttgctgccaaaatttttaaccatcgccgaagcttgcttgtgagaattgaacgaagctccatcttgaagcctgcttcggagaaaaaagtattaaagtttcgcaagttcatagttagatggccagagtccgttctaccgctagggttgagcgtgagggggacgaaactgaagcttcggagactgtccctatctccgaagccatgcaacgatccgggttagtgacttcggagaagattcctggtgatgatgcgggacaagctgtcgctgaagcagaaggagaagatgctggggagactgaccccgaagatgattatcaccttgccacgccaagcaaacccagtcacttggacttcgggaaatctactatttcaaaggctgatctgtctaagatggtgaaatcaggctattttactgaaaatcaaaagaagctattacgcttcgggggagaagagactaccccgaagccggagaaagatgaaattgttatttttaagagcttcctaaaggctggattaagat

SEQ ID NO: 25448 - DNA, 3361 bp, Zea Mays
gtttgtggtagtgttcatcgatgacattctcatatactctcaaagtgaggaagatcatgtagagcatttgaagatggtattgcaaaggcttcgagagcatcagttgtatgccaagctgggcaaatgcgaattctggtttcatgaagtcttatttctgggtcacatcataaatcaagatgagttagcagtggatccaaagaaagtagcagatatcctgaactggaaagcaccgaaggatgttcgtgggatcaagagcttcattggaatggctggatattataggcgtttcattgaaggcttctcaaagattgctaggccaatgacagcgttgctagcgaagaaagttgagtttaaatggactcaaaagtgtcaggaagcatttgaagaactgaagaatagattgactacagctcttgtgttagtcctgcctgatgttcacaagtcattctcagtgtattgcgacgcttcgtacaccggattgggatgtgtgctaatgcaagaaggaagagtggtagcatactcatctcaacagctgaagatccatgagaaaaattatcccacacatgacctggagttggcagcagtggttcatgccttaaagacctggagacattacctgtatgggcagaagtgcgacatctacacagatcataaaagtctaaagtacatattcacccagtcagagttaaacatgaggcagcgaagatggttggaattgatcaaagactatgagttggagatacattaccatccaggcaaagccaatgttgtttgcagatgctctgagcaggaagagtcaagtcaatatgttggccacgtacccgatgccgtatgagttagccaaagagttcgacagactgagcctcggtttcctgaacagtacacaaggagtaacggtggaattagagctcaccctagagcgggagatcaaagaagggcagaaggatgatgaaaacatcaacaagattcggcaactgatcttagaaggaagaggcaaagactttcgagaggatgaatagggagtagagatggcaatgggtaaatacccaccgggtattactaccccatacccatacccacgacacaaaaataaccccaccgggttacccatatacactggtgggtatggatttacccccatacccatacccatgtgggtatgggtcacccatcgggtcacccgtacccacaaaaattaaaagtctatcaaaatattatactatacaaatgtcaagtatatccatataaataccattacaaaattttctagcatcatttaaccatccattcaacacataaaagataattggataaagtagtaacactaggacagtactacatagcacattacatgttccattacatggtcattaaattgtcgttaagccttttatgacattatggtctaaaaggttgttaaatagtaaaaaagatggatgactaaagaccaagttcatgcttgggctaagtttatattgggtattttatacccacgggttaacgggtatgagtgaaggcggaatgttctaatacccgtttacccattgggtgaagatttttgcccaataacagacccacaggtagaatatttagcccacatacataccctaatggagtaaatacccatcgggtatcgggtcgcgggtacccgttgccatctctaagagggagtaatatggttcaaggaccgattgtgagttcccgacctcaaacctattcgggaactgatcctcagggaagctcatgagacagcctactccatacaccctggaagtgagaagatgtatcaggattttaaaaagaggttttggtggtatggcatgaaaagagagatcgcagaatatgtcgccatctgtgatagctgtcagaggaccaaagcagagcatcagaggcccgccggattgttgcagcctttgcggattcctcagtggaagtgggatgagatcgggatggattttatagttggcctacctcgtacccgggccggttatgattccatctgggtggttgtggaccgcttaacaaaggtggcccatttcatacctgtgaagacaacatagaccggagcaacgttagccgagttatacatgtcacggatagtctgccttcatggtgtgccgaagaagatagtgtcagatcgaggaacgcagttcacctctcatttttggcagcagctacaagaagctttgggcacacatttgaacttcagctcagcttatcacccacagacagacggtcagactgaaagaactaatcagatcctagaagatatgttgagagcatgtgcgttgcaagacaagtcaggatgggacaaaaggttaccttatgcagaattctcctacaacaatagttaccaggccagcttgaagatgtcaccgtttcaggcactctatggacggagttgtaggactccgctgcattgggaccagcctggagagagacaggtgtttggccccgacatcttgcttgaagccgaagagaatatcaaaatggttcgggagaatctgaagatagcacaatcaaggcagcgaagctatgcggacagaaggagaagagaactgagttttgaagtgggggactacgtctatctgaaggtgtcacctatcaggggagtcagaaggttcggagttaaaggcaagttagcaccccggtacgttggaccatatcagatccaagccaagcgtggagaagtggcctaccagctcaacctaccagagagcttgtcagcagtgcacaacgtgttccacgtgtcgcaattgaagaagtgtctgcgagtaccagaagaacagttgccagtggagggtttggaagtccaggaagatctgacatacatagagaagccaacgcagattctggagtttgcagacagagtcacccggaggaacaccatcagaatgtgcaaagtcagatgaggtcaccactccgaggaagaagcaacctgggaacgagaagatgacctgaaggccaaataccctgaactctttgctgaccaaccttgaatctcggggcgagattcttttaagggggataggtttgtaacaccctgaatttgggggtataaaatttctttgctcatattcacaaattcaggtgttacttcccttttctcatccttcctcattcttttctttctcatttctataggagaaaagtgcttattttatttgtaattatagtttaataggttaaaccctaagggagtatgaattgttgcatcatgttgaaccctagatttcacttttgcttggtgcataattctttgaaagtctaatttgaatttgtggcttatttggatttgaatcaaatagagaaaataaaaagaaaagagaaaacaaatttcagaataaaaagaaaaggaaag

SEQ ID NO: 25449 - DNA, 302 bp, Zea Mays
ccgtgcacaagaaagtataataccattagtgtgttgtttggttcacatatttgtaacgtaatggataaccgataacgttaaaccatgtttgtttaagtccaatcgtaataagatgtcaaattaaaaactgatatcgacctattcaaatttattactattggtactcgaatatgaatcattatcattatcatttatgttacatttcgtgaaccaacgtcgcctaaatgttaagcaaaagtagaagtgcatcaagccaactcgaaccttacattaccatccctccgtcaattgtaagcacctgc

SEQ ID NO: 25450 - DNA, 723 bp, Zea Mays
gccgaatcacgcaagttcgtagcccgaatttccaacacccaagccgtgctccgtcgaccgtcacctcgagtcaaaaaccgccgccggcgtcacgaggatggctgctcctaccgatgaggctgccggctcagggacgccgggatctaccgattcgttcctcgccgactggagggaacggatcattctgccggccgtcgcggctggtgtgcttggagccgcgttcgggctgctgtcgcggcaccgggcgcgccttggcgccgcccgcgccgctgtcacctacgccgcgaacctcgccatcgttgctggatgctacggaggtgaggtctctgttccatgaacatcccattgatgggttgcaaagtttggctttgggatgaacggagactggttctgccgttctaaattaggctttacacactgtgggtagaatttcgtcttataatttgatgattcctggtgtgggtgaggttttgctgttgtacttcattttttctgttacataaattttgcttgctaaagttatgatcggattgaatgtatcaactggcatttacaggcttgctggctgctggacgtatttctgggtactatggcatagctagatttgtgaaagttaaattggttggtgttcgtttactcaaaatgaccaaagaagtcatgcaattgctggtgacttgtttttcaggcatagctagatctatgaggtagttattgtttttcagg

SEQ ID NO: 25451 - DNA, 2471 bp, Zea Mays
atgtaacctatgtctagaaaaaaagaacaacatactcaacactaagaaagaattgcgcaggatgaactcgtaatcgaccatcacctggctgatggtgggcgtcggatgtactcgcgtgtgtccgattggtggtctcgtgtgtggcctcccttctgcctttttaattccaggaaggcacgtcatttggggaggtggatggagggcgaggtgtgggggcgagcagtggcggaggacgcacaaaatttgaggtgtggcgaattttgtacatgattacgtgtacaaatctgtctatatgtatgtatactttctagtttacaataaatagtttaaatgaaatgacaatttaaagtattttgtaacaaacaaatataattggaagcagaattgagaggacagaattgaaaaacatctgtcctaagtattgagagggcagaattgaaaaacaagctcatggattcagaaactaccacgacatatcttaccaacacgcagaaagaattggaagcagctcttgtggagaaagagagccatatcaaccaaatgaaagagaacgcaattgcttcaaacccagatcagacgacaactataaaggaactcctgcagcagaaagaagctgagcctgatcttgacaaatccaaaaattccagtgatcccattcctgctacagtagaagataattcggacaatactataatatcagagagcacccacaatgatgagagcattgtagtgggagcaaacaccgaaaatgcaacttctgaaaccgtggtaggcaaatctgaaaactccaacgattccatgcctgctccagaaaaaaaattcaagcaacactaatgcatcagatagcagccaccagaatgagaacattatagtggaagcaaaagaagataatgcaacttctgaccttgtggtactcgacaaatctgaaagcaccaatggttctgtacctgttactgcagaagaataaaattcctacaacaccactgcatgggagagcaaccaacaagataacagttcctaacaagaaaagttcttaacgttaacaaccaacatagaagatgtccagtttcaacagaacaaaggtgatgccaatgagcaaccagatgatgcttcatagggaagccattcagatagatctgagcttcagcgggggaaccaaaaactgattggcaaccaggaagaatggcgagaatcacggagcagatgggtaggacatcgttgatggcggccgcgcacctcctccccacgccctcaacacgcgcgccatcgatttcgtggggcaggagcgcgtttatggtagccgcgattaagggtatccgatcgagcgcgctcggatccgcgaggataaaaggaacggctgggggatcctcgcgaggacggaaagagcggctgggggatcctcgcggatggaaggagcggctgcggcgcggctgcgggatgcgcgcatggggctgcgagatgcgctcggatgaacttgtctgcgggatttgggaaatcttgtccgcgggatccaaatctgagcacttgtgccatgcgagtggttggacagaggaaatcttgtacccgtgcgcggatttgggaagcaacttcccttgcgcgggcgtggcggctgccatcggcggcgggtgctgcgggcgcggggaggaggaagcgggtggatcgcgcggcgtatgcagggagggtgcgggatgcgcggttggggcagctgcggcatgcgggcttggcagaacgtgcgccatgcaagtggttggacgccaacactactaacataattagtagtagagattactaattgtttggtttgtgcaaactcacggagtcagtgaggtcattatggccggatgaagtaccaagtcaatcgagcacttgtatctccatatttcttgcattgatgacggtaagataccagtgcgttcctcggatgtttatcggaataaacacctacaaaacaattataaagcagaactaatatagaacccttttgtttattctttttagcctaatgctaaaaaccgacaacttggaactcccaataagaaacatgatacatgacacctatgcacttttcttatagtttgcgtcctgtccctataataagtcagatagtatgacacctcttgcattgatgaagtaccattctttttaaattgtttcctatttttctctttgaagtaaatgcccctctcagaaagctgcctagttctggcagtataaatagtctagaagaaagccatttccttcaggcttcattggatttatctgacaatgcttcattagagaggcgaatgtcttcaggaagtaatgtcatattatctgaggaccatgactccaagtgcttttgagtcagcacttcgtcaaaaggatggagagcttgcttcttacatgtctcgcttgatcaagggagcatggaggctgtaacacaaacaaaagggactacttttcaaggatcaaaactatattgcggaaacgag

SEQ ID NO: 25452 - DNA, 1054 bp, Zea Mays
aatcgagatcagttgtgggggcaaacttaacattaaattggtatgaactgggatctaaaagattttgggctcgggatctaaaatatatatgtgcaactccagactactatagggtacatatttgaaattgaaacgttcgggatgatactggagtgatagatgtagtagttggattgcacaaagaaaatgaaaataccagttcaaaaacaataattagtagtagaaacaggctaaggaaaattgtacactccttgcttgtttaattaatcatttactacagttagcaaattatgaaaccaaatgatgatttctgcctagtaatggttatgacaaattctggataggaaataatccacttacgaagtgttgaagaaagccgtgttcctgaaccagaagtgaagtttgtaaacttcaacctcatttttttgttaatgctagctagagaggcgttcaacttgattttagaaaggaactaatggtttcagaaatcataactgaactgctgacctggggagttccttcagcgagggcatcttgtcaggctctccataggtcgcacatgtgctggagtagatgagagtcctcacattgtgtgcagccatggcttctagcactgctagagtgtttgcagtgatgttgcgtcgcgagggcggaggaggcgggggcagaggcacggacatcgcaacggctctgtacactatctggttcagtattcaaagataccagttagctatatattaccttgaactcagtacactaaaatcatgtttacaaagtcaaacgatattctaacagaactattaaatagctacaaatttttagttagcaacatgaactaactaattgtatgaacaggaaggtacgtccagttgtaaggtctactctgtctagtttagtactatgagtagcattaggcactgaaattagctggagcatgagcaaagagcaggcaacaaagttaaagatatccgtactactaaatagtctagcaaatttggtttgacagacttgaattgtacaaaactaacatatttaaacgcacaaagagaagatg

SEQ ID NO: 25453 - DNA, 2058 bp, Zea Mays
gtcttgtcagagcctcctcgtcgtgggcgtaaaagccgccgcctccaacccttgtaaaagtttcttggatagtccgtagccgcttgccctgttcgcatcttcgcgcgtggcgcacaccgctccagctctccttcgacgggcacggccgagccgccttcgtcttggccgcagcggtgcgcgctctccatggcgtcctaattagcctagccgcaacgccgcgcccgtgcctgcgaagtagggtgtaaagttttgtatatgatgccaggcatggatgaaccccttcttggcaatggtcttaagaccagcgggaaaagagagagcctggtagtggccgaggtcagaaaacagatgtaccttgctgggccactcatcgctgcatggatcctacagaacattgtccagatgatatctatcatgtttgtcggtcaccttggtgagcttgccctctccagtgcctccatcgccacctcctttgcaggcgttactggcttcagcttattgtctggcatggcgagcagcttggacacactgtgtgggcaatcgttcggggcaaagcagtactatcttcttggcatctacaagcagagggcaatccttgtgctcactctagtcagccttgtggttgcgattatctggtcatacactggacagatccttctactctttggtcaggatccagagattgcagctggggcagggagctatatccggtggatgattcctgcgctatttgtgtatggtccactacagtgccatgtccggtttctgcaaacgcagaacatagtcctcccagtgatgctgagctcaggtgccacagcactgaaccatctgctggtgtgctggctgctggtgtacaagattgcctgtagaaacacctggagagggttctcaaaggaggcttttcatgacataaccagcttcttgaggcttggtattccatctgcgctgatggtttgcttggagtggtggtcatttgagctcctggtacttctttctggacttctccccaatccaaagcttgagacatcggttttgtccatttccttaaacacaggctctttagcgtttatgatcccttttgggcttagcgcagccataagcacccgtgtttcaaatgaacttggtgctgggcgaccccatgctgcccatctggctacccgtgtggtcatggtgctggccatcgtggttggcgtattaatcggactagctatgattttggtgcgcaatatctgggggtatgcatacagtaatgagaaggaggtggtcaaatacatctccaaaatgatgccgatcctagccgtgtcattcttgttcgattgcgtgcagtgtgttctttcaggtgttgctaggggctgtggatggcaaaagattggggcttgtgttaatcttggtgcatactaccttataggaattccagctgccttctgtttcgcctttatgtaccatctaggtggaatgggactttggttgggaataatctgcgcactcgtcatacagatgctattgcttctcacaattaccttgtgcagcaactgggagaaagaagctttgaaggcaaaggacagagtatttagtacatccgtaccagctgacatgatgacatgatatttctgaagatatttttttgaaggaaatgcccatgaaactttgccaaggaacatactaagaattggttgttcagattcaaggcctttctccatgccatcagaatgatgcttgggtctagtaatagctcctgagcagtctgttttttacttttggtcaatactcaatacatggaagatgtttggtttgaagaaccacgccatcctagatgaggtggtatattataagttgatataacggctccatactagttattgaggaatgagacgatgattatctcatgtaataataatgcttttccccctctagttattgatgtaagacaattgaggcaaatgaacaaaatgtcacatttgattaaataagttgcattgtctatttgtgcagttgtttgggaaataattaaattgtaattttatagtttttaaggagctaagattcagtatattaaga

SEQ ID NO: 25454 - DNA, 2080 bp, Zea Mays
gtcttgtcagagcctcctcgtcgtgggcgtaaaagccgccgcctccaacccttgtaaaagtttcttggatagtccgtagccgcttgccctgttcgcatcttcgcgcgtggcgcacaccgctccagctctccttcgacgggcacggccgagccgccttcgtcttggccgcagcggtgcgcgctctccatggcgtcctaattagcctagccgcaacgccgcgcccgtgcctgcgaccagcgggaaaagagagagcctggtagtggccgaggtcagaaaacagatgtaccttgctgggccactcatcgctgcatggatcctacagaacattgtccagatgatatctatcatgtttgtcggtcaccttggtgagcttgccctctccagtgcctccatcgccacctcctttgcaggcgttactggcttcagcttattgtctggcatggcgagcagcttggacacactgtgtgggcaatcgttcggggcaaagcagtactatcttcttggcatctacaagcagagggcaatccttgtgctcactctagtcagccttgtggttgcgattatctggtcatacactggacagatccttctactctttggtcaggatccagagattgcagctggggcagggagctatatccggtggatgattcctgcgctatttgtgtatggtccactacagtgccatgtccggtttctgcaaacgcagaacatagtcctcccagtgatgctgagctcaggtgccacagcactgaaccatctgctggtgtgctggctgctggtgtacaagattggtatgggcaacaagggtgctgccttggccaatgccatctcatactttaccaatgtatcaatcctggcaatttacgtcaggcttgcaccagcctgtagaaacacctggagagggttctcaaaggaggcttttcatgacataaccagcttcttgaggcttggtattccatctgcgctgatggtttgcttggagtggtggtcatttgagctcctggtacttctttctggacttctccccaatccaaagcttgagacatcggttttgtccatttccttaaacacaggctctttagcgtttatgatcccttttgggcttagcgcagccataagcacccgtgtttcaaatgaacttggtgctgggcgaccccatgctgcccatctggctacccgtgtggtcatggtgctggccatcgtggttggcgtattaatcggactagctatgattttggtgcgcaatatctgggggtatgcatacagtaatgagaaggaggtggtcaaatacatctccaaaatgatgccgatcctagccgtgtcattcttgttcgattgcgtgcagtgtgttctttcaggtgttgctaggggctgtggatggcaaaagattggggcttgtgttaatcttggtgcatactaccttataggaattccagctgccttctgtttcgcctttatgtaccatctaggtggaatgggactttggttgggaataatctgcgcactcgtcatacagatgctattgcttctcacaattaccttgtgcagcaactgggagaaagaagctttgaaggcaaaggacagagtatttagtacatccgtaccagctgacatgatgacatgatatttctgaagatatttttttgaaggaaatgcccatgaaactttgccaaggaacatactaagaattggttgttcagattcaaggcctttctccatgccatcagaatgatgcttgggtctagtaatagctcctgagcagtctgttttttacttttggtcaatactcaatacatggaagatgtttggtttgaagaaccacgccatcctagatgaggtggtatattataagttgatataacggctccatactagttattgaggaatgagacgatgattatctcatgtaataataatgcttttccccctctagttattgatgtaagacaattgaggcaaatgaacaaaatgtcacatttgattaaataagttgcattgtctatttgtgcagttgtttgggaaataattaaattgtaattttatagtttttaaggagctaagattcagtatattaaga

SEQ ID NO: 25455 - DNA, 832 bp, Zea Mays
gtcttgtcagagcctcctcgtcgtgggcgtaaaagccgccgcctccaacccttgtaaaagtttcttggatagtccgtagccgcttgccctgttcgcatcttcgcgcgtggcgcacaccgctccagctctccttcgacgggcacggccgagccgccttcgtcttggccgcagcggtgcgcgctctccatggcgtcctaattagcctagccgcaacgccgcgcccgtgcctgcgggactttggttgggaataatctgcgcactcgtcatacagatgctattgcttctcacaattaccttgtgcagcaactgggagaaagaagctttgaaggcaaaggacagagtatttagtacatccgtaccagctgacatgatgacatgatatttctgaagatatttttttgaaggaaatgcccatgaaactttgccaaggaacatactaagaattggttgttcagattcaaggcctttctccatgccatcagaatgatgcttgggtctagtaatagctcctgagcagtctgttttttacttttggtcaatactcaatacatggaagatgtttggtttgaagaaccacgccatcctagatgaggtggtatattataagttgatataacggctccatactagttattgaggaatgagacgatgattatctcatgtaataataatgcttttccccctctagttattgatgtaagacaattgaggcaaatgaacaaaatgtcacatttgattaaataagttgcattgtctatttgtgcagttgtttgggaaataattaaattgtaattttatagtttttaaggagctaagattcagtatattaaga

SEQ ID NO: 25456 - DNA, 1909 bp, Zea Mays
cgagaacaatatcagttcgccaactattcgtcgggctacggggagtccgggaaaggcgcgctgcagtttcagctgatcaaccagcggcaggacttctcgttcgcgctgttcactggcggactctcgaatcctaagcttatcgcagtatcgaacgccattgctttcgcgaacccaaaggctccagtctacccacgcctggcgcaagggaaatcctggaacgagatgactgtgacgtggacaagtggctacgagagcgacgaggcgtacccgtttgtggagtggggaatgaaatggagccccccggtgcgcagcgcagctggcaccgtcacttttgaccgtgaaagcgtctgtggagagcctgcccggtctgtcggctggagagatcctgggttcatacacacagccttcctcacagacttgtggccgaacaaagagtactactacaagatcggccatatgctgccagatgggagcgttgtttggggcaagctatcttccttcaaagcgcctccgtttcctggccagaagtcactgcagcgcgtcgtcatcttcggagatatggggaaggccgagagggacgggagcaacgagtacagcaactaccagcccggatcactcaacaccaccgacacccttgtcaaggacctggacaacattgacatggtgttccacatcggtgacatcacctacgccaacgggtacatctcgcagtgggatcagttcacgcagcaagtggaggagatcacctcgcgggtcccttacatggttgccagcgggaaccatgagcgggactggcccaacagcgggtccttcttcaacggcaccgactctggaggggagtgtggcgtggtcgctgagaccatgtactacacacccacagagaaccgagcaaactactggtactcggcagactacggcatgttccggttctgcgtggcggacagcgagcacgactggcgggaaggcacggagcagtacgagttcatcgagagctgcctcgccacggtcgaccggaagaagcagccgtggctggtgttcatcgcgcaccgcgtcctcggctactcctccggcttcttctacggcgtcgacggctcgttcgcggagcccatgtcccggcagagcctccagaagctctggcagaagtaccgggtggacctggcgttctacggccacgtccacaactacgagaggacatgcccggtctacgaggaacaatgcatgagctcggagaaatcccactactcgggcaccatgaacggcaccatccacgtcgtggtcgggggcggcggcagccacctcagcaacttcaccgcccaggtcccgccgtggagcgtgtacagggagatggactacggcttcgtcaagctcacggcgttcaactactcgtccctcctctacgagtacaagcgctccagcgacggccaggtgtacgacagcttcacgatgcacagggagtacagggacttgctggcgtgcgtcaaggacagctgccctccgacttcgccagcgacgtgacatgcattgcagccgcgcgtgaggagcagaggggggacaggggtcgcttctgtgacagtgggttaggttccacttcggcgtgtaactgtaactgtttaattaggtggtcgagcgagacccacattataaatcctacactcaataaagagcatgttgaccctgattagttggcttacaggtaaggagctaagagcagccctgtcacatcagcaatttggtgatatggcaataaaattaacgaggaagaggaggaaatggtttccagcatggtctacacttgtaactaagacacaaaaaaccattattttagcattggggaccagcacctagtttccatctctggagtccacatgccagacttatcacacccagatttaggggtccaaacacgggc

SEQ ID NO: 25457 - DNA, 216 bp, Zea Mays
cgggtgtctaaaatcgcctcgcgtatggacaatttctcgtcgacgctcctcctccgccgcggtatcgcccctcgtcgtggccagcatcgtctcggtcgccgtcttcgacgagcaagccatagaggatccacgggtttagcaggtggagaccgttgagcaggagctcgttgaaggcaagttgtgcccttgatcacttcctttttacccagtcatgtt

SEQ ID NO: 25458 - DNA, 1624 bp, Zea Mays
gccccgtggcggcgcggtcgcagtcgcagtcgcagggacctgcctcccccgagcccgcgcaatcggcgccggctcccgccgcgaggcccctgacgctggacttcaccaagtcggtgtccggttacagcagggactccgggttcagcgtgtccggcgcgagctcgtcgttcctgtcgtcggtgacgaccggggacgggagcgtgtcgaacgggcgcgcgggaggctcgtcgttcctcatgttcccaccggcgcccggcgcggccagctgcgcgaagccgccgcccgccggtgcggcgcagaagcgcaagtgccacgaccacgcgcactcggagaacgtcgccggcggcaagtacggggctaacggcgggcgctgccactgctcgaagcgcaggtctgtatctcttctcttgccttggtggtgccttggtggcttgtttctctgctgctgaatgaatcggatcgagctccaacctgactggtatgcgcaggaagcaccgtgtgaagcgcacgatccgcgtgccggcgatcagccccaaagtggcggacatccccgccgacgagtactcgtggcgcaagtacggccagaaacccatcaaggggtcgccctacccacgcacggtgcgcggctgccccgcccggaagcatgtggagcgcgaccccgccgacccgtcgatgctgatcgtcacctacgagggcgagcaccgccacagccccgcctccggccaggacccgccgccgccgtcgctcgcgccgctgccggagctgcccagccattgatttggcttcctgcctgctctgtcctgtcaattactagtagctgttgtcataagttataaaatcaaaatcgccagttcagttttagcagctccgttttccgatttttttctcttctgtcgttcgcgttagcagctttgtgaaaggattaggaaagtgttagcatcagacttggagaagggaaaagaaaacaaaaggtaatgctcttgttattagtattatttttttgtatacagcaaacaaaagcatccgcagagaaagttgtggatggtgtagtcggtcggaattttgaccgggcttggggtgttccagagccggattgaatattgaattctgagctccgccagatttgggcgatgcgggcggggtggggctgagaggagtcaaaagccggtgggtcccagtggttgaacaacgggctttggtcccggtggggagcgcgagtggggacacacacagacggaggacgtgatcgcgtgcttggacgaggtcaagaaacgcggcaggtgtggggcccgcgactccggggcgcgcgccgctgcctctggcgtcgttgacccgtgtcagcctgggcgccgttgtctttgttggcttgccattgcccatttgcgcggtggttgggtcagtgggtgtgcggcggggctacgtccacacggcggtgggtgtcgccttcggggccaaaatgctagtagtcgcgtcttggctggcgtggttgaatggcgcggggccagcctgccttttgactgcttgattggatggatggtaggacatctacacattagagccttttgatcaagtttctatgtacaagaaatatctaagaaactatattatataataaggtgttttt

SEQ ID NO: 25459 - DNA, 1228 bp, Zea Mays
ctaggatagccaattcattgaaaatacatccagggaccaggggtgcatggcgcacatccgaggatcaaaatagggattgcaatttctaaagtgggggatcattttacctgtgccctactgttgtcgctggctgcttctgcccacctgcacggtgcccctgttggccgttgacgtgcagcacccggtggccagtgcttcacgccggcagcatccaccgaaacagacaaagacagttcacagagaacaggcattagaacagacaacaggcatcagaacggacaacaagcaaggcattagatagagcactcccaacaggcaaggcatcagaacagacaaagtattagaacagacaaagtattagaatagacaaggcattagaacagacaaggcattagaaccgtgcaccatcctcgaatgtggacgcatacgatacaaacataaggaggagtagagataggatgacaactaagcgattatgcttcagttttgcataacaaatttatggctcaaatatatttctcaaacacacagtatacgtgtataatctagacaaagggacctagaagttaccttgatctaaagggaacctttgacattatccacaacttcaggaccatcaatgtgtcacagtagcgtacatgagttttgaatccaatggccttcttaagtgacctgctagatacctgtcctaaaaaggaataaggtgaggtaactggtaaattttagaacaatttggtaagtacaggattcgccaacctgtggtacaacatgcacaaaacgggaggtacgatgaaccacaagcaaatgaaaaaacctcttgatgcctctagttcacagtctgaataactggaaacaaccttgaggatcacacaacctttctttagatgggataattttgctgatggatgcagcagaatgtcgttgttggtttaaggacatagaaaggggttaggatcacacaaccttgaggatcacacaaccttgattggatggtggatgagtcttgtgggtcgcaacataagtgactggtgtgacattctcatgagaaatgcaaacagtgtgtcacctaaacaagtagcaattgtgctttatatcatttgtgcactttaaattttagatactatacaatctaattaaattagtaccaaagaatactatataatttatgtaacaaattacattcctggtattttaagaaactccatgtgtaactaaacataccaaaatt

SEQ ID NO: 25460 - DNA, 1230 bp, Zea Mays
acatctagagcggaacaggcccaaagcccgcagctcgggctaaaaccctaacgacctggcctcgccaagacgccaacacaccggaacccccaaaatggcaccggcgccggaaccgaccgcagcggccgccggccgcaagcgcaagaaaccgcacgggccctccaaaatcatcgcgaagaaatccgcggatcccaaacgggcatacgcgaagaagaagaaagagaagcataagcaaaaggagaagaagtcgcggctaaaacccgccgagccggaccaaatcgccgccaccatcggagatggcgtcgcaggggcaacggtcctactgtcggcattgatgcagccgtcgcggcagctcgagtttctcctccgtagcttcgagcgcgcctctaagatgcgcctctctcctctcgaactcgattcctactcagagggctgcatggtgcagcttgcggagggagcagcccaggacgtcgagagcttcggtgatcatgtaaaaggggtgttcggctcttcgtggaaggaagagctctgtgagggaaatcacatcgatggtgagatcgccgtgggcagcccaacacttctggttatcagctcatctgctttgcgatctttagacctactgaggggtttgaagatgtttactaaagaatgccgaccagtaaagctctttgccaaacacttgaaagtggaggagcaggtggcgatgcttaatgctcgagtaaatattgcctgtggtacaccgagcaggatcaaaaaactaattgacatggaagctttgtccttgtcacgcttgaaactagtggtacttgacatgcagaaggatgcaaagtccttcaccttgtttacattaccacaagtcagcaatgagttctgggacctgtacaaaggttacctagatccaaagatccgagaagggaacatgaagatatgtttttatggtgccgtgtccgagagagacatcaccaaaacattttcactagctgagtaaatgcctggacggagggcccaacatggctctgtattgcctgagcaataccttagctcaacccaataagagaccaacagacaaaaaaaaaaaaaatcctaaccctaactcatgttcggcactgttctacgcgaggaattgccctctgccaaacgaatcgcgcccaccaccagcctctgagctctgtcgaccgtgctccaagctctgaccctccgcatctggatccgaccagagctccactatgc

SEQ ID NO: 25461 - DNA, 1047 bp, Zea Mays
acatctagagcggaacaggcccaaagcccgcagctcgggctaaaaccctaacgacctggcctcgccaagacgccaacacaccggaacccccaaaatggcaccggcgccggaaccgaccgcagcggccgccggccgcaagcgcaagaaaccgcacgggccctccaaaatcatcgcgaagaaatccgcggatcccaaacgggcatacgcgaagaagaagaaagagaagcataagcaaaaggagaagaagtcgcggctaaaacccgccgagccggaccaaatcgccgccaccatcggagatggcgtcgcaggggcaacggtcctactgtcggcattgatgcagccgtcgcggcagctcgagtttctcctccgtagcttcgagcgcgcctctaagatgcgcctctctcctctcgaactcgattcctactcagagggctgcatggtgcagcttgcggagggagcagcccaggacgtcgagagcttcggtgatcatgtaaaaggggtgttcggctcttcgtggaaggaagagctctgtgagggaaatcacatcgatggtgagatcgccgtgggcagcccaacacttctggttatcagctcatctgctttgcgatctttagacctactgaggggtttgaagatgtttactaaagaatgccgaccagtaaagctctttgccaaacacttgaaagtggaggagcaggtggcgatgcttaatgctcgagtaaatattgcctgtggtacaccgagcaggatcaaaaaactaattgacatggaagctttgtccttgtcacgcttgaaactagtggtacttgacatgcagaaggatgcaaagtccttcaccttgtttacattaccacaagtcagcaatgagttctgggacctgtacaaaggttacctagatccaaagatccgagaagggaacatgaagatatgtttttatggtgccgtgtccgagagagacatcaccaaaacattttcactacacatacaagttgaacaaaggaacactatatatttgagaatagacaatgaactccatgaagatcaaac

SEQ ID NO: 25462 - DNA, 1135 bp, Zea Mays
gttactttctacgttctaaattatatgaatttttttatcttatcttcacctaatcttcacgatacaccttttcacatctagagcggaacaggcccaaagcccgcagctcgggctaaaaccctaacgacctggcctcgccaagacgccaacacaccggaacccccaaaatggcaccggcgccggaaccgaccgcagcggccgccggccgcaagcgcaagaaaccgcacgggccctccaaaatcatcgcgaagaaatccgcggatcccaaacgggcatacgcgaagaagaagaaagagaagcataagcaaaaggagaagaagtcgcggctaaaacccgccgagccggaccaaatcgccgccaccatcggagatggcgtcgcaggggcaacggtcctactgtcggcattgatgcagccgtcgcggcagctcgagtttctcctccgtagcttcgagcgcgcctctaagatgcgcctctctcctctcgaactcgattcctactcagagggctgcatggtgcagcttgcggagggagcagcccaggacgtcgagagcttcggtgatcatgtaaaaggggtgttcggctcttcgtggaaggaagagctctgtgagggaaatcacatcgatggtgagatcgccgtgggcagcccaacacttctggttatcagctcatctgctttgcgatctttagacctactgaggggtttgaagatgtttactaaagaatgccgaccagtaaagctctttgccaaacacttgaaagtggaggagcaggtggcgatgcttaatgctcgagtaaatattgcctgtggtacaccgagcaggatcaaaaaactaattgacatggaagctttgtccttgtcacgcttgaaactagtggtacttgacatgcagaaggatgcaaagtccttcaccttgtttacattaccacaagtcagcaatgagttctgggacctgtacaaaggttacctagatccaaagatccgagaagggaacatgaagatatgtttttatggtgccgtgtccgagagagacatcaccaaaacattttcactagctgagtaaatgcctcacatacaagttgaacaaaggaacactatatatttgagaatagacaatgaactccatgaagatcaaac

SEQ ID NO: 25463 - DNA, 1241 bp, Zea Mays
acatctagagcggaacaggcccaaagcccgcagctcgggctaaaaccctaacgacctggcctcgccaagacgccaacacaccggaacccccaaaatggcaccggcgccggaaccgaccgcagcggccgccggccgcaagcgcaagaaaccgcacgggccctccaaaatcatcgcgaagaaatccgcggatcccaaacgggcatacgcgaagaagaagaaagagaagcataagcaaaaggagaagaagtcgcggctaaaacccgccgagccggaccaaatcgccgccaccatcggagatggcgtcgcaggggcaacggtcctactgtcggcattgatgcagccgtcgcggcagctcgagtttctcctccgtagcttcgagcgcgcctctaagatgcgcctctctcctctcgaactcgattcctactcagagggctgcatggtgcagcttgcggagggagcagcccaggacgtcgagagcttcggtgatcatgtaaaaggggtgttcggctcttcgtggaaggaagagctctgtgagggaaatcacatcgatggtgagatcgccgtgggcagcccaacacttctggttatcagctcatctgctttgcgatctttagacctactgaggggtttgaagatgtttactaaagaatgccgaccagtaaagctctttgccaaacacttgaaagtggaggagcaggatcaaaaaactaattgacatggaagctttgtccttgtcacgcttgaaactagtggtacttgacatgcagaaggatgcaaagtccttcaccttgtttacattaccacaagtcagcaatgagttctgggacctgtacaaaggttacctagatccaaagatccgagaagggaacatgaagatatgtttttatggtgccgtgtccgagagagacatcaccaaaacattttcactagctgagtaaatgcctgtatgagttcattgtattctgcagattaatttaacctttttggagctgatttttgatgatgctgaaaaatgagaaattttcggtgcattcttttactgaactgtttatatattcatctgtcaactgagtgtcctatttgcggtaatgcaattttcttctatatagagcaaaactaagcgtccaacgtgtccacgtcgccgttttgattttcagccgtccgatcgtgtaaaaacgcccacaatcatgaggacggacatggggcttagtttgcatggttggctcagaaatgtagtacat

SEQ ID NO: 25464 - DNA, 1268 bp, Zea Mays
acatctagagcggaacaggcccaaagcccgcagctcgggctaaaaccctaacgacctggcctcgccaagacgccaacacaccggaacccccaaaatggcaccggcgccggaaccgaccgcagcggccgccggccgcaagcgcaagaaaccgcacgggccctccaaaatcatcgcgaagaaatccgcggatcccaaacgggcatacgcgaagaagaagaaagagaagcataagcaaaaggagaagaagtcgcggctaaaacccgccgagccggaccaaatcgccgccaccatcggagatggcgtcgcaggggcaacggtcctactgtcggcattgatgcagccgtcgcggcagctcgagtttctcctccgtagcttcgagcgcgcctctaagatgcgcctctctcctctcgaactcgattcctactcagagggctgcatggtgcagcttgcggagggagcagcccaggacgtcgagagcttcggtgatcatgtaaaaggggtgttcggctcttcgtggaaggaagagctctgtgagggaaatcacatcgatggtgagatcgccgtgggcagcccaacacttctggttatcagctcatctgctttgcgatctttagacctactgagaatgccgaccagtaaagctctttgccaaacacttgaaagtggaggagcaggtggcgatgcttaatgctcgagtaaatattgcctgtggtacaccgagcaggatcaaaaaactaattgacatggaagctttgtccttgtcacgcttgaaactagtggtacttgacatgcagaaggatgcaaagtccttcaccttgtttacattaccacaagtcagcaatgagttctgggacctgtacaaaggttacctagatccaaagatccgagaagggaacatgaagatatgtttttatggtgccgtgtccgagagagacatcaccaaaacattttcactagctgagtaaatgcctgtatgagttcattgtattctgcagattaatttaacctttttggagctgatttttgatgatgctgaaaaatgagaaattttcggtgcattcttttactgaactgtttatatattcatctgtcaactgagtgtcctatttgcggtaatgcaattttcttctatatagagcaaaactaagcgtccaacgtgtccacgtcgccgttttgattttcagccgtccgatcgtgtaaaaacgcccacaatcatgaggacggacatggggcttagtttgcatggttggctcagaaatgtagtacat

SEQ ID NO: 25465 - DNA, 1274 bp, Zea Mays
acatctagagcggaacaggcccaaagcccgcagctcgggctaaaaccctaacgacctggcctcgccaagacgccaacacaccggaacccccaaaatggcaccggcgccggaaccgaccgcagcggccgccggccgcaagcgcaagaaaccgcacgggccctccaaaatcatcgcgaagaaatccgcggatcccaaacgggcatacgcgaagaagaagaaagagaagcataagcaaaaggagaagaagtcgcggctaaaacccgccgagccggaccaaatcgccgccaccatcggagatggcgtcgcaggggcaacggtcctactgtcggcattgatgcagccgtcgcggcagctcgagtttctcctccgtagcttcgagcgcgcctctaagatgcgcctctctcctctcgaactcgattcctactcagcttgcggagggagcagcccaggacgtcgagagcttcggtgatcatgtaaaaggggtgttcggctcttcgtggaaggaagagctctgtgagggaaatcacatcgatggtgagatcgccgtgggcagcccaacacttctggttatcagctcatctgctttgcgatctttagacctactgaggggtttgaagatgtttactaaagaatgccgaccagtaaagctctttgccaaacacttgaaagtggaggagcaggtggcgatgcttaatgctcgagtaaatattgcctgtggtacaccgagcaggatcaaaaaactaattgacatggaagctttgtccttgtcacgcttgaaactagtggtacttgacatgcagaaggatgcaaagtccttcaccttgtttacattaccacaagtcagcaatgagttctgggacctgtacaaaggttacctagatccaaagatccgagaagggaacatgaagatatgtttttatggtgccgtgtccgagagagacatcaccaaaacattttcactagctgagtaaatgcctgtatgagttcattgtattctgcagattaatttaacctttttggagctgatttttgatgatgctgaaaaatgagaaattttcggtgcattcttttactgaactgtttatatattcatctgtcaactgagtgtcctatttgcggtaatgcaattttcttctatatagagcaaaactaagcgtccaacgtgtccacgtcgccgttttgattttcagccgtccgatcgtgtaaaaacgcccacaatcatgaggacggacatggggcttagtttgcatggttggctcagaaatgtagtacat

SEQ ID NO: 25466 - DNA, 806 bp, Zea Mays
acatctagagcggaacaggcccaaagcccgcagctcgggctaaaaccctaacgacctggcctcgccaagacgccaacacaccggaacccccaaaatggcaccggcgccggaaccgaccgcagcggccgccggccgcaagcgcaagaaaccgcacgggccctccaaaatcatcgcgaagaaatccgcggatcccaaacgggcatacgcgaagaagaagaaagagaagcataagcaaaaggagaagaagtcgcggctaaaacccgccgagccggaccaaatcgccgccaccatcggagatggcgtcgcaggggcaacggtcctactgtcggcattgatgcagccgtcgcggcagctcgagtttctcctccgtagcttcgagcgcgcctctaagatgcgcctctctcctctcgaactcgattcctactcagagggctgcatggtgcagcttgcggagggagcagcccaggacgtcgagagcttcggtgatcatgtaaaaggggtgttcggctcttcgtggaaggaagagctctgtgagggaaatcacatcgatggtgagatcgccgtgggcagcccaacacttctggttatcagctcatctgctttgcgatctttagacctactgaggggtttgaagatgtttactaaagaatgccgaccagtaaagctctttgccaaacacttgaaagtggaggagcaggtggcgatgcttaatgctcgagtaaatattgcctgtggtacaccgagcaggttggcagcaaccctgacctctagcttgcctatgcaatatcctagtgaggagagctctt

SEQ ID NO: 25467 - DNA, 820 bp, Zea Mays
acatctagagcggaacaggcccaaagcccgcagctcgggctaaaaccctaacgacctggcctcgccaagacgccaacacaccggaacccccaaaatggcaccggcgccggaaccgaccgcagcggccgccggccgcaagcgcaagaaaccgcacgggccctccaaaatcatcgcgaagaaatccgcggatcccaaacgggcatacgcgaagaagaagaaagagaagcataagcaaaaggagaagaagtcgcggctaaaacccgccgagccggaccaaatcgccgccaccatcggagatggcgtcgcaggggcaacggtcctactgtcggcattgatgcagccgtcgcggcagctcgagtttctcctccgtagcttcgagcgcgcctctaagatgcgcctctctcctctcgaactcgattcctactcagagggctgcatggtgcagcttgcggagggagcagcccaggacgtcgagagcttcggtgatcatgtaaaaggggtgttcggctcttcgtggaaggaagagctctgtgagggaaatcacatcgatggtgagatcgccgtgggcagcccaacacttctggttatcagctcatctgctttgcgatctttagacctactgaggggtttgaagatgtttactaaagaatgccgaccagtaaagctctttgccaaacacttgaaagtggaggagcaggtggcgatgcttaatgctcgagtaaatattgcctgtggtacaccgagcaggagatctatgtttcattttattaagaaagagtacccaaaatttcaacaccattcacgcaggacacaatccatc

SEQ ID NO: 25468 - DNA, 400 bp, Zea Mays
  misc_feature (400)..(400): n is a, c, g, or t
gaaggtttggctcagttccgggaagctgcaatgtccaaggatgatacggaattgctaagggtcatggccaactacggggaggatgtagttgaagctctgggatatgaagtggatcggctggagtctgagatccaaaagcttgtgcctgggattaaacatgttgacatcgaggcacacaatcccgaaggacttgctcttagagcagaagttttgtagattacctgtgtacattgcatttgattaacactgttgctggtcgctgccagtttgatttgggtccaccaccattcgataagattgtcttccattggcaatgtaagaatcagatggctgttgttgcgtagcgaggcggtttttttatttggaagaagacgtggtcgcgcctgacatggaaggcttn

SEQ ID NO: 25469 - DNA, 462 bp, Zea Mays
  misc_feature (462)..(462): n is a, c, g, or t
gctgaaattatttcaatggagttgttctggtacaaaattatttggaaaggactggacgtgggagttgggcaaaacagttccgggaagctgcaatgtccaaggatgatacggaattgctaagggtcatggccaactacggggaggatgtagttgaagctctgggatatgaagtggatcggctggagtctgagatccaaaagcttgtgcctgggattaaacatgttgacatcgaggcacacaatcccgaaggacttgctcttagagcagaagttttgtagattacctgtgtacattgcatttgattaacactgttgctggtcgctgccagtttgatttgggtccaccaccattcgataagattgtcttccattggcaatgtaagaatcagatggctgttgttgcgtagcgaggcggtttttttatttggaagaagacgtggtcgcgcctgacatggaaggcttn

SEQ ID NO: 25470 - DNA, 1560 bp, Zea Mays
  misc_feature (1560)..(1560): n is a, c, g, or t
ggcggcagcagcaccggtgacgccggcacgcctaaatgcgtcgtcccctcgcctctgcggccctccgcctccgcttcttctcttccacctcccctgcccgccttctctcgccctgcccattccttctatcccgccgtgacgacgacggcggccgcgaggcctcctcgtcgccgctgcccccgctcccgccttctggctcggctttctccccacgcccgctcctcttctctgcatcagctgccgcgggcctcttcagcctccatggcgggtggtggaggcaggctcttcctcctgcagcgtcgcggcccctcggctccgtctctgacgcagctcccgtccggctcaccatctcccgcagttattctctgcgtgtggccaagggcaagaagaaagcacattttgacgatgaacacagccatcgagcggttaacatggcactatggtgcaacttcctcgttttctccctaaagtttggagtgtggatttcaacttcaagtcatgttatgctagctgagcttgtgcattctgttgcagactttgctaaccaggctcttcttgcttatggtttgagcagctcaagacgtgctccagatgctctacacccctatggttattctaaggaaagatttgtatggtctctcatatctgcagttggaatattttgcttgggttccggtgctacaattgtgcatggagttcaaaatttatggaattctcatgctgttaggaaaggtgcagaagcagagggaatgagtatctgggactatatctggcgtggtcatgatccaacttccgttgctgttatgactgaagatggtgctgctgttacaggccttgctattgctgcagcatctttggtagctgttcaaatgacaggaaatgctatgtatgatccaattggctcaatcattgttggcaatttactggggatggttgctatttttctcattcagaggaataggcatgctttaattggccgggccattgatgatcatgacatgcaacgagtccttgaatttctgaagtctgatccggttgtagatgctctttatgattgcaaaagtgaggtgattgggccaggtttttttagattcaaggctgaaattgatttcaatggagttgttctggtacaaaattatttggaaaggactggacgtgggagttgggcaaaacagttccgggaagctgcaatgtccaaggatgatacggaattgctaagggtcatggccaactacggggaggatgtagttgaagctctgggatatgaagtggatcggctggagtctgagatccaaaagcttgtgcctgggattaaacatgttgacatcgaggcacacaatcccgaaggacttgctcttagagcagaagttttgtagattacctgtgtacattgcatttgattaacactgttgctggtcgctgccagtttgatttgggtccaccaccattcgataagattgtcttccattggcaatgtaagaatcagatggctgttgttgcgtagcgaggcggtttttttatttggaagaagacgtggtcgcgcctgacatggaaggcttn

SEQ ID NO: 25471 - DNA, 1614 bp, Zea Mays
  misc_feature (1614)..(1614): n is a, c, g, or t
gtgccccaccggcggcagcagcaccggtgacgccggcacgcctaaatgcgtcgtcccctcgcctctgcggccctccgcctccgcttcttctcttccacctcccctgcccgccttctctcgccctgcccattccttctatcccgccgtgacgacgacggcggccgcgaggcctcctcgtcgccgctgcccccgctcccgccttctggctcggctttctccccacgcccgctcctcttctctgcatcagctgccgcgggcctcttcagcctccatggcgggtggtggaggcaggctcttcctcctgcagcgtcgcggcccctcggctccgtctctgacgcagctcccgtccggctcaccatctcccgcagttattctctgcgtgtggccaagggcaagaagaaagcacattttgacgatgaacacagccatcgagcggttaacatggcactatggtgcaacttcctcgttttctccctaaagtttggagtgtggatttcaacttcaagtcatgttatgctagctgagcttgtgcattctgttgcagactttgctaaccaggctcttcttgcttatggtttgagcagctcaagacgtgctccagatgctctacacccctatggttattctaaggaaagatttgtatggtctctcatatctgcagttggaatattttgcttgggttccggtgctacaattgtgcatggagttcaaaatttatggaattctcatcctccagagaatattcactgggctgcattagtgattggtgggtccttcctaattgaaggtgcttcactgcttgttgctataaaggctgttaggaaaggtgcagaagcagagggaatgagtatctgggactatatctggcgtggtcatgatccaacttccgttgctgttatgactgaagatggtgctgctgttacaggccttgctattgctgcagcatctttggtagctgttcaaatgacaggaaatgctatgtatgatccaattggctcaatcattgttggcaatttactggggatggttgctatttttctcattcagaggaataggcatgctttaattggccgggccattgatgatcatgacatgcaacgagtccttgaatttctgaagtctgatccggttgtagatgctctttatgattgcaaaagtgagatttcaatggagttgttctggtacaaaattatttggaaaggactggacgtgggagttgggcaaaacagttccgggaagctgcaatgtccaaggatgatacggaattgctaagggtcatggccaactacggggaggatgtagttgaagctctgggatatgaagtggatcggctggagtctgagatccaaaagcttgtgcctgggattaaacatgttgacatcgaggcacacaatcccgaaggacttgctcttagagcagaagttttgtagattacctgtgtacattgcatttgattaacactgttgctggtcgctgccagtttgatttgggtccaccaccattcgataagattgtcttccattggcaatgtaagaatcagatggctgttgttgcgtagcgaggcggtttttttatttggaagaagacgtggtcgcgcctgacatggaaggcttn

SEQ ID NO: 25472 - DNA, 1882 bp, Zea Mays
  misc_feature (1882)..(1882): n is a, c, g, or t
gtttaatcccctactagtctcggagagtcgctccgaggaatgggagtcgtgccccaccggcggcagcagcaccggtgacgccggcacgcctaaatgcgtcgtcccctcgcctctgcggccctccgcctccgcttcttctcttccacctcccctgcccgccttctctcgccctgcccattccttctatcccgccgtgacgacgacggcggccgcgaggcctcctcgtcgccgctgcccccgctcccgccttctggctcggctttctccccacgcccgctcctcttctctgcatcagctgccgcgggcctcttcagcctccatggcgggtggtggaggcaggctcttcctcctgcagcgtcgcggcccctcggctccgtctctgacgcagctcccgtccggctcaccatctcccgcagttattctctgcgtgtggccaagggcaagaagaaagcacattttgacgatgaacacagccatcgagcggttaacatggcactatggtgcaacttcctcgttttctccctaaagtttggagtgtggatttcaacttcaagtcatgttatgctagctgagcttgtgcattctgttgcagactttgctaaccaggctcttcttgcttatggtttgagcagctcaagacgtgctccagatgctctacacccctatggttattctaaggaaagatttgtatggtctctcatatctgcagttggaatattttgcttgggttccggtgctacaattgtgcatggagttcaaaatttatggaattctcatcctccagagaatattcactgggctgcattagtgattggtgggtccttcctaattgaaggtgcttcactgcttgttgctataaaggctgttaggaaaggtgcagaagcagagggaatgagtatctgggactatatctggcgtggtcatgatccaacttccgttgctgttatgactgaagatggtgctgctgttacaggccttgctattgctgcagcatctttggtagctgttcaaatgacaggaaatgctatgtatgatccaattggctcaatcattgttggcaatttactggggatggttgctatttttctcattcagaggaataggcatgctttaattggccgggccattgatgatcatgacatgcaacgagtccttgaatttctgaagtctgatccggttgtagatgctctttatgattgcaaaagtgaggtgattgggccaggtttttttagattcaaggctgaaattgatttcaatggagttgttctggtacaaaattatttggaaaggactggacgtgggagttgggcaaaacagaatgatgtcaaggaagcatattacgtcctagtttcatcttgttataaaagggcagacctggtgcagttgtgagagctatctcatggagccggtcacggacttgaagtagcctccgtgcatttgcgagaagaaggctttcctcaggtcatgaattcgaagcagctttacttgtagaggaagttccgggaagctgcaatgtccaaggatgatacggaattgctaagggtcatggccaactacggggaggatgtagttgaagctctgggatatgaagtggatcggctggagtctgagatccaaaagcttgtgcctgggattaaacatgttgacatcgaggcacacaatcccgaaggacttgctcttagagcagaagttttgtagattacctgtgtacattgcatttgattaacactgttgctggtcgctgccagtttgatttgggtccaccaccattcgataagattgtcttccattggcaatgtaagaatcagatggctgttgttgcgtagcgaggcggtttttttatttggaagaagacgtggtcgcgcctgacatggaaggcttn

SEQ ID NO: 25473 - DNA, 1513 bp, Zea Mays
  misc_feature (1513)..(1513): n is a, c, g, or t
gtttaatcccctactagtctcggagagtcgctccgaggaatgggagtcgtgccccaccggcggcagcagcaccggtgacgccggcacgcctaaatgcgtcgtcccctcgcctctgcggccctccgcctccgcttcttctcttccacctcccctgcccgccttctctcgccctgcccattccttctatcccgccgtgacgacgacggcggccgcgaggcctcctcgtcgccgctgcccccgctcccgccttctggctcggctttctccccacgcccgctcctcttctctgcatcagctgccgcgggcctcttcagcctccatggcgggtggtggaggcaggctcttcctcctgcagcgtcgcggcccctcggctccgtctctgacgcagctcccgtccggctcaccatctcccgcagttattctctgcgtgtggccaagggcaagaagaaagcacattttgacgatgaacacagctatggttattctaaggaaagatttgtatggtctctcatatctgcagttggaatattttgcttgggttccggtgctacaattgtgcatggagttcaaaatttatggaattctcatcctccagagaatattcactgggctgcattagtgattggtgggtccttcctaattgaaggtgcttcactgcttgttgctataaaggctgttaggaaaggtgcagaagcagagggaatgagtatctgggactatatctggcgtggtcatgatccaacttccgttgctgttatgactgaagatggtgctgctgttacaggccttgctattgctgcagcatctttggtagctgttcaaatgacaggaaatgctatgtatgatccaattggctcaatcattgttggcaatttactggggatggttgctatttttctcattcagaggaataggcatgctttaattggccgggccattgatgatcatgacatgcaacgagtccttgaatttctgaagtctgatccggttgtagatgctctttatgattgcaaaagtgaggtgattgggccaggtttttttagattcaaggctgaaattgatttcaatggagttgttctggtacaaaattatttggaaaggactggacgtgggagttgggcaaaacagttccgggaagctgcaatgtccaaggatgatacggaattgctaagggtcatggccaactacggggaggatgtagttgaagctctgggatatgaagtggatcggctggagtctgagatccaaaagcttgtgcctgggattaaacatgttgacatcgaggcacacaatcccgaaggacttgctcttagagcagaagttttgtagattacctgtgtacattgcatttgattaacactgttgctggtcgctgccagtttgatttgggtccaccaccattcgataagattgtcttccattggcaatgtaagaatcagatggctgttgttgcgtagcgaggcggtttttttatttggaagaagacgtggtcgcgcctgacatggaaggcttn

SEQ ID NO: 25474 - DNA, 1893 bp, Zea Mays
  misc_feature (1893)..(1893): n is a, c, g, or t
gtttaatcccctactagtctcggagagtcgctccgaggaatgggagtcgtgccccaccggcggcagcagcaccggtgacgccggcacgcctaaatgcgtcgtcccctcgcctctgcggccctccgcctccgcttcttctcttccacctcccctgcccgccttctctcgccctgcccattccttctatcccgccgtgacgacgacggcggccgcgaggcctcctcgtcgccgctgcccccgctcccgccttctggctcggctttctccccacgcccgctcctcttctctgcatcagctgccgcgggcctcttcagcctccatggcgggtggtggaggcaggctcttcctcctgcagcgtcgcggcccctcggctccgtctctgacgcagctcccgtccggctcaccatctcccgcagttattctctgcgtgtggccaagggcaagaagaaagcacattttgacgatgaacacagccatcgagcggttaacatggcactatggtgcaacttcctcgttttctccctaaagtttggagtgtggatttcaacttcaagtcatgttatgctagctgagcttgtgcattctgttgcagactttgctaaccaggctcttcttgcttatggtttgagcagctcaagacgtgctccagatgctctacacccctatggttattctaaggaaagatttgtatggtctctcatatctgcagttggaatattttgcttgggttccggtgctacaattgtgcatggagttcaaaatttatggaattctcatcctccagagaatattcactgggctgcattagtgattggtgggtccttcctaattgaaggtgcttcactgcttgttgctataaaggctgttaggaaaggtgcagaagcagagggaatgagtatctgggactatatctggcgtggtcatgatccaacttccgttgctgttatgactgaagatggtgctgctgttacaggccttgctattgctgcagcatctttggtagctgttcaaatgacaggaaatgctatgtatgatccaattggctcaatcattgttggcaatttactggggatggttgctatttttctcattcagaggaataggcatgctttaattggccgggccattgatgatcatgacatgcaacgagtccttgaatttctgaagtctgatccggttgtagatgctctttatgattgcaaaagtgaggtgattgggccaggtttttttagattcaaggctgaaattgatttcaatggagttgttctggtacaaaattatttggaaaggactggacgtgggagttgggcaaaacagaatgatgtcaaggaagcatattacgtcctagtttcatcttgttataaaagggcagacctggtgcagttgtgagagctatctcatggagccggtcacggacttgaagtagcctccgtgcatttgcgagaagaaggctttcctcaggtcatgaattcgaagcagctttacttgtagaggaaggtttggctcagttccgggaagctgcaatgtccaaggatgatacggaattgctaagggtcatggccaactacggggaggatgtagttgaagctctgggatatgaagtggatcggctggagtctgagatccaaaagcttgtgcctgggattaaacatgttgacatcgaggcacacaatcccgaaggacttgctcttagagcagaagttttgtagattacctgtgtacattgcatttgattaacactgttgctggtcgctgccagtttgatttgggtccaccaccattcgataagattgtcttccattggcaatgtaagaatcagatggctgttgttgcgtagcgaggcggtttttttatttggaagaagacgtggtcgcgcctgacatggaaggcttn

SEQ ID NO: 25475 - DNA, 1789 bp, Zea Mays
  misc_feature (1789)..(1789): n is a, c, g, or t
cacatggtagtttaatcccctactagtctcggagagtcgctccgaggaatgggagtcgtgccccaccggcggcagcagcaccggtgacgccggcacgcctaaatgcgtcgtcccctcgcctctgcggccctccgcctccgcttcttctcttccacctcccctgcccgccttctctcgccctgcccattccttctatcccgccgtgacgacgacggcggccgcgaggcctcctcgtcgccgctgcccccgctcccgccttctggctcggctttctccccacgcccgctcctcttctctgcatcagctgccgcgggcctcttcagcctccatggcgggtggtggaggcaggctcttcctcctgcagcgtcgcggcccctcggctccgtctctgacgcagctcccgtccggctcaccatctcccgcagttattctctgcgtgtggccaagggcaagaagaaagcacattttgacgatgaacacagccatcgagcggttaacatggcactatggtgcaacttcctcgttttctccctaaagtttggagtgtggatttcaacttcaagtcatgttatgctagctgagcttgtgcattctgttgcagactttgctaaccaggctcttcttgcttatggtttgagcagctcaagacgtgctccagatgctctacacccctatggttattctaaggaaagatttgtatggtctctcatatctgcagttggaatattttgcttgggttccggtgctacaattgtgcatggagttcaaaatttatggaattctcatcctccagagaatattcactgggctgcattagtgattggtgggtccttcctaattgaaggtgcttcactgcttgttgctataaaggctgttaggaaaggtgcagaagcagagggaatgagtatctgggactatatctggcgtggtcatgatccaacttccgttgctgttatgactgaagatggtgctgctgttacaggccttgctattgctgcagcatctttggtagctgttcaaatgacaggaaatgctatgtatgatccaattggctcaatcattgttggcaatttactggggatggttgctatttttctcattcagaggaataggcatgctttaattggccgggccattgatgatcatgacatgcaacgagtccttgaatttctgaagtctgatccggttgtagatgctctttatgattgcaaaagtgaggtgattgggccaggtttttttagattcaaggctgaaattgatttcaatggagttgttctggtacaaaattatttggaaaggactggacgtgggagttgggcaaaacagttgtgagagctatctcatggagccggtcacggacttgaagtagcctccgtgcatttgcgagaagaaggctttcctcagttccgggaagctgcaatgtccaaggatgatacggaattgctaagggtcatggccaactacggggaggatgtagttgaagctctgggatatgaagtggatcggctggagtctgagatccaaaagcttgtgcctgggattaaacatgttgacatcgaggcacacaatcccgaaggacttgctcttagagcagaagttttgtagattacctgtgtacattgcatttgattaacactgttgctggtcgctgccagtttgatttgggtccaccaccattcgataagattgtcttccattggcaatgtaagaatcagatggctgttgttgcgtagcgaggcggtttttttatttggaagaagacgtggtcgcgcctgacatggaaggcttn

SEQ ID NO: 25476 - DNA, 464 bp, Zea Mays
gaggaatgggagtcgtgccccaccggcggcagcagcaccggtgacgccggcacgcctaaatgcgtcgtcccctcgcctctgcggccctccgcctccgcttcttctcttccacctcccctgcccgccttctctcgccctgcccattccttctatcccgccgtgacgacgacggcggccgcgaggcctcctcgtcgccgctgcccccgctcccgccttctggctcggctttctccccacgcccgctcctcttctctgcatcagctgccgcgggcctcttcagcctccatggcgggtggtggaggcaggctcttcctcctgcagcgtcgcggcccctcggctccgtctctgacgcagctcccgtccggctcaccatctcccgcagttattctctgcgtgtggccaagggcaagaagaaagcacattttgacgatgaacacagatgtcagaacattgcgtatccagca

SEQ ID NO: 25477 - DNA, 1473 bp, Zea Mays
attggtatcgatcctgccaagtgccgtagcccgcagccacccagagcctcttatcggcgttcccttcgttctactccgatcccctctccaagcggcacatctacatccttccagcgcaccaaatgctttggattgcgttgcttagcactaaagactagatgcccttatgcgattatatatgctcaaaagcctgtggtgatagctcaagccacatgaatgtattagatcaggtgaaagggcaagagtttcgatcagtgggcaggccgcaggcgcaaacaaacagttgacagggtagactcaaggcaatagtgaggaagtggccgatctgttgaggccgatggaggcagatagcatggtggccatgggctgcggaggtttctactggcagtcgcctccgcgcttcctccttgaacccctcgacctagccgacatcgtcgacagcatgtacgtgccgacgaacgaggctgatgagcccgtatccgggctctgctcatcgaaccggccggcggaggattactccagttcggccgagggcgccaactcctgttccgcggcggtggttccgtcgccgccgccgcctccgggcgtgacgacgacgacgacgaggaacatggacatggagaggacccgccgcaggaagctcaacgagaggctctacgcgctccggagcgtcgtgcccaacatcaccaagatggacaaggcgtccatagtcagggacgccatcgcccacatcgagcatctgcaggagcaggagcgccgactgctcgccgagatatccgttctccagtcttctgacgacggcaccgccgccgccgccgccgtcaagacggaggacgctgccgccactgggggtgctgcgtacgacgtcgacagcgtcccctggaggaagaagccgagggcggtgccactgccgtccgtgtatttcaccgacaacccgacgagctccatctcgtcatctccgccagtccgaatcctggagcaggtgcaggtctcgcaggcaggggagagggtggcggtggtgagcctctggtgcagcaggggcagggacgccgtgggcaagatttgcctcgcactggagccgctgcgcctccgggtcgtcacggccaccatcaccgcgcgcggcgacactgtcttccacacactgttcgtggagacaggagaaacaggtggcgctcggctaaaggaggcgatactggctgctctcgctcggctcaacgtcctcgctaacgctgaccaagtcgtccatgagttactgggatgattgatgcggtggcatcttggacagcaacacctggtgttgttgtcgttgtcagcactctcgactgtccgattcaataatgatgtacctcaggaatgtttgaatatgatatcattgccatttcttggcctgaagtacaataggagtcacattatatttacatatattacctccattcacaaatatataatactacttattttttctaaaacttt

SEQ ID NO: 25478 - DNA, 1473 bp, Zea Mays
attggtatcgatcctgccaagtgccgtagcccgcagccacccagagcctcttatcggcgttcccttcgttctactccgatcccctctccaagcggcacatctacatccttccagcgcaccaaatgctttggattgcgttgcttagcactaaagactagatgcccttatgcgattatatatgctcaaaagcctgtggtgatagctcaagccacatgaatgtattagatcaggtgaaagggcaagagtttcgatcagtgggcaggccgcaggcgcaaacaaacagttgacagggtagactcaaggcaatagtgaggaagtggccgatctgttgaggccgatggaggcagatagcatggtggccatgggctgcggaggtttctactggcagtcgcctccgcgcttcctccttgaacccctcgacctagccgacatcgtcgacagcagcatgtacgtgccgacgaacgaggctgatgagcccgtatccgggctctgctcatcgaaccggccggcggaggattactccagttcggccgagggcgccaactcctgttccgcggcggtggttccgtcgccgccgccgcctccgggcgtgacgacgacgacgacgaggaacatggacatggagaggacccgccgcaggaagctcaacgagaggctctacgcgctccggagcgtcgtgcccaacatcaccaagatggacaaggcgtccatagtcagggacgccatcgcccacatcgagcatctgcaggagcaggagcgccgactgctcgccgagatatccgttctccagtcttctgacgacggcaccgccgccgccgccgccgtcaagacggaggacgctgccgccactgggggtgctgcgtacgacgtcgacagcgtcccctggaggaagaagccgagggcggtgccactgccgtccgtgtatttcaccgacaacccgacgagctccatctcgtcatctccgccagtccgaatcctggaggtgcaggtctcgcaggcaggggagagggtggcggtggtgagcctctggtgcagcaggggcagggacgccgtgggcaagatttgcctcgcactggagccgctgcgcctccgggtcgtcacggccaccatcaccgcgcgcggcgacactgtcttccacacactgttcgtggagacaggagaaacaggtggcgctcggctaaaggaggcgatactggctgctctcgctcggctcaacgtcctcgctaacgctgaccaagtcgtccatgagttactgggatgattgatgcggtggcatcttggacagcaacacctggtgttgttgtcgttgtcagcactctcgactgtccgattcaataatgatgtacctcaggaatgtttgaatatgatatcattgccatttcttggcctgaagtacaataggagtcacattatatttacatatattacctccattcacaaatatataatactacttattttttctaaaacttt

SEQ ID NO: 25479 - DNA, 1470 bp, Zea Mays
attggtatcgatcctgccaagtgccgtagcccgcagccacccagagcctcttatcggcgttcccttcgttctactccgatcccctctccaagcggcacatctacatccttccagcgcaccaaatgctttggattgcgttgcttagcactaaagactagatgcccttatgcgattatatatgctcaaaagcctgtggtgatagctcaagccacatgaatgtattagatcaggtgaaagggcaagagtttcgatcagtgggcaggccgcaggcgcaaacaaacagttgacagggtagactcaaggcaatagtgaggaagtggccgatctgttgaggccgatggaggcagatagcatggtggccatgggctgcggaggtttctactggcagtcgcctccgcgcttcctccttgaacccctcgacctagccgacatcgtcgacagcatgtacgtgccgacgaacgaggctgatgagcccgtatccgggctctgctcatcgaaccggccggcggaggattactccagttcggccgagggcgccaactcctgttccgcggcggtggttccgtcgccgccgccgcctccgggcgtgacgacgacgacgacgaggaacatggacatggagaggacccgccgcaggaagctcaacgagaggctctacgcgctccggagcgtcgtgcccaacatcaccaagatggacaaggcgtccatagtcagggacgccatcgcccacatcgagcatctgcaggagcaggagcgccgactgctcgccgagatatccgttctccagtcttctgacgacggcaccgccgccgccgccgccgtcaagacggaggacgctgccgccactgggggtgctgcgtacgacgtcgacagcgtcccctggaggaagaagccgagggcggtgccactgccgtccgtgtatttcaccgacaacccgacgagctccatctcgtcatctccgccagtccgaatcctggaggtgcaggtctcgcaggcaggggagagggtggcggtggtgagcctctggtgcagcaggggcagggacgccgtgggcaagatttgcctcgcactggagccgctgcgcctccgggtcgtcacggccaccatcaccgcgcgcggcgacactgtcttccacacactgttcgtggagacaggagaaacaggtggcgctcggctaaaggaggcgatactggctgctctcgctcggctcaacgtcctcgctaacgctgaccaagtcgtccatgagttactgggatgattgatgcggtggcatcttggacagcaacacctggtgttgttgtcgttgtcagcactctcgactgtccgattcaataatgatgtacctcaggaatgtttgaatatgatatcattgccatttcttggcctgaagtacaataggagtcacattatatttacatatattacctccattcacaaatatataatactacttattttttctaaaacttt

SEQ ID NO: 25480 - DNA, 1520 bp, Zea Mays
attggtatcgatcctgccaagtgccgtagcccgcagccacccagagcctcttatcggcgttcccttcgttctactccgatcccctctccaagcggcacatctacatccttccagcgcaccaaatgctttggattgcgttgcttagcactaaagactagatgcccttatgcgattatatatgctcaaaagcctgtggtgatagctcaagccacatgaatgtattagatcaggtgaaagggcaagagtttcgatcagtgggcaggccgcaggcgcaaacaaacagttgacagggtagactcaaggcaatagtgaggaagtggccgatctgttgaggccgatggaggcagatagcatggtggccatgggctgcggaggtttctactggcagtcgcctccgcgcttcctccttgaacccctcgacctagccgacatcgtcgacagtggtctgacgaatgaataatggtttcttggtgcgtgcgcgcgggcagcagcatgtacgtgccgacgaacgaggctgatgagcccgtatccgggctctgctcatcgaaccggccggcggaggattactccagttcggccgagggcgccaactcctgttccgcggcggtggttccgtcgccgccgccgcctccgggcgtgacgacgacgacgacgaggaacatggacatggagaggacccgccgcaggaagctcaacgagaggctctacgcgctccggagcgtcgtgcccaacatcaccaagatggacaaggcgtccatagtcagggacgccatcgcccacatcgagcatctgcaggagcaggagcgccgactgctcgccgagatatccgttctccagtcttctgacgacggcaccgccgccgccgccgccgtcaagacggaggacgctgccgccactgggggtgctgcgtacgacgtcgacagcgtcccctggaggaagaagccgagggcggtgccactgccgtccgtgtatttcaccgacaacccgacgagctccatctcgtcatctccgccagtccgaatcctggaggtgcaggtctcgcaggcaggggagagggtggcggtggtgagcctctggtgcagcaggggcagggacgccgtgggcaagatttgcctcgcactggagccgctgcgcctccgggtcgtcacggccaccatcaccgcgcgcggcgacactgtcttccacacactgttcgtggagacaggagaaacaggtggcgctcggctaaaggaggcgatactggctgctctcgctcggctcaacgtcctcgctaacgctgaccaagtcgtccatgagttactgggatgattgatgcggtggcatcttggacagcaacacctggtgttgttgtcgttgtcagcactctcgactgtccgattcaataatgatgtacctcaggaatgtttgaatatgatatcattgccatttcttggcctgaagtacaataggagtcacattatatttacatatattacctccattcacaaatatataatactacttattttttctaaaacttt

SEQ ID NO: 25481 - DNA, 1531 bp, Zea Mays
attggtatcgatcctgccaagtgccgtagcccgcagccacccagagcctcttatcggcgttcccttcgttctactccgatcccctctccaagcggcacatctacatccttccagcgcaccaaatgctttggattgcgttgcttagcactaaagactagatgcccttatgcgattatatatgctcaaaagcctgtggtgatagctcaagccacatgaatgtattagatcaggtgaaagggcaagagtttcgatcagtgggcaggccgcaggcgcaaacaaacagttgacagggtagactcaaggcaatagtgaggaagtggccgatctgttgaggccgatggaggcagatagcatggtggccatgggctgcggaggtttctactggcagtcgcctccgcgcttcctccttgaacccctcgacctagccgacatcgtcgacagcagcatgtacgtgccgacgaacgaggctgatgagcccgtatccgggctctgctcatcgaaccggccggcggaggattactccagttcggccgagggcgccaactcctgttccgcggcggtggttccgtcgccgccgccgcctccgggcgtgacgacgacgacgacgaggaacatggacatggagaggacccgccgcaggaagctcaacgagaggctctacgcgctccggagcgtcgtgcccaacatcaccaagatggacaaggcgtccatagtcagggacgccatcgcccacatcgagcatctgcaggagcaggagcgccgactgctcgccgagatatccgttctccagtcttctgacgacggcaccgccgccgccgccgccgtcaagacggaggacgctgccgccactgggggtgctgcgtacgacgtcgacagcgtcccctggaggaagaagccgagggcggtgccactgccgtccgtgtatttcaccgacaacccgacgagctccatctcgtcatctccgccagtccgaatcctggaggtgcaggtctcgcaggcaggggagagggtggcggtggtgagcctctggtgcagcaggggcagggacgccgtgggcaagatttgcctcgcactggagccgctgcgcctccgggtcgtcacggccaccatcaccgcgcgcggcgacactgtcttccacacactgttcgtggagctattaaactgattattaaaaatcaataaataataaaatatgatcttgaaactgaaagccgcactatttggggtcggtctggatcccttaaactcgtcgatagttcgatctttagatgaaaacttcggttggttaattcaattaatgttttaatgaaaacttaggtgactgcagtttaaacgactgcatctgtcatcctgtgttgtttggatacatggaactagtagtagtaaagtaaaattcggtccaccttttggtacaccgtaaggatgaaccaggatcaaaattctgtgaactaaactgattgtatggccgtcagacgttctgtgtttttgcactacttggtctgacgagaggatggacggccaaggactgggg

SEQ ID NO: 25482 - DNA, 2337 bp, Zea Mays
gtccaaccatttgtggcggctgccgcaacaggctcaacgctcacgcgcacacacaatccatagccgcctcccacatctcactctcgttccgagcttccggccatggcggtgacctccggcgcccccaacgacaacggccgtattggtactgagtactgacccatcgagccgtcccgaagggacgctggcgccgctgcgactgacgatgagcaccgcgtggatctggaagttaggcacaaggacgccggcactagggactcgccagcaccgatagcggcagctgcgcctgcgtcccaatcccgagtggctggaaagcttggcccctcagatccaaagcacctcatctatgcgggatccaaattaaagcatattaaagctgcacctgctgcaccagacaagaatcgccgaccacctttgtctccaccagcacctgccgtcaatcgtggtcgtggatctgtgcgcacacctttgggattaaaaaaatgtctaccgaaagtggcagtcaatccccattatctcaagcatcacaagcaccgatgtctccatctcatgaacctgaatcgtctcgtcctgagtcagataatgactcgatgccaatttaaatagatgacaatgacaacattgaagtagaagaggaagaatacgacgctgaagctggttctaagagaaagctcacctcaactgtttggaaagagttcaagagagtgaagttcaatggcacagtccgggcaaagtgcaactattgcttcaagcaactttctgcgtcaagtaataatgggacaaaacatcttcatgttcatttaaaaagttgtgtgcaaaggaagattaagttgaacgggaagacattggcacaagcttctttgagatttggtagaacggatggtggaacagtttcaatagagaattacacatttgatcaagaaatagctagaaatgaacttgctgcgatgatagttctgcatgaataccccttaagcatggttgatcatgtgggtttccgaagatttgttggtgctcttcaaccacttttcaagatcggaaccagaaacatgataagatctgatattatgaagcattatgaggtggagaagaaaaaagccattgaatacatggctggaatccagtccagggtagcggtcaccacagatttgtggacgtctgacaaccaaaaaagaggttacatggccataacagctcactttattgatgaatcctggactcttagaaatattataatgaggtttatctatgttcctgctcctcatactgctgacgtcattggtgaagaattgtatgagtcattggttgaatggaatcttgatgagaaaatatcttctgtgactcttgacaactgcacaactaatgatgcgtgaatgtgaagatagagttgctaatgtgaagaacttgctagctgatttgatgaatgagtaccatataactgagaatattgagaacaatgagtcatcaacaccatcagttggaaacagtgatgacttcttatctgacattagtgcccgtattgcaagtagaaggccaacaagcatggggctcaaatctgagctagaccggtacttggatgaagaaatggtgaacatgcaaaccaaaaacttcaatgttttagattggtagaaggtagctggaactcggtttcctattttaagaaggattgcaagagacatatatgttatccctgttacaactgttgcttcagaagctgctttcagcactagtggtagagtacttagtgagcatcgcagtaggcttacttcaaagatgttggaggctctcatgtgctctcaagattggcttaggaacaaatacaaagttgatgagaaaactaaacaacctgccaccttttggtcctgtctccaagacatgcaagagggcctccaggaacttgcactttgacattttcatttcaaggatttaggtggcgttaatcttttggctgttgacatgtagtgaacaagtcaagtacaagtagcaattgacaagatcacaagaaccttttggctctcatgaacacttgatatggatcttttggttctcatgtttttactcaatggtgaacttgtaatgaacttgtaacagatgtgcttttgggagcggtttgcacatctgttgatgcgcacctatgttgtaagcacattgtatgtgttaatttggaaatttggatgtttaatgtggtgaactagtggcgccatgctaggggtggtggacactaactggatattaatctagctgtgaacatctgatgtctgatgtgatcaatggtgttatgatttgtgaaacacttaacattgaccactctatcagtcttattgttgatgtttctta

SEQ ID NO: 25483 - DNA, 2305 bp, Zea Mays
taacgctgtccaaccatttgtggcggctgccgcaacaggctcaacgctcacgcgcacacacaatccatagccgcctcccacatctcactctcgttccgagcttccggccatggcggtgacctccggcgcccccaacgacaacggccgggacgctggcgccgctgcgactgacgatgagcaccgcgtggatctggaagttaggcacaaggacgccggcactagggactcgccagcaccgatagcggcagctgcgcctgcgtcccaatcccgagtggctggaaagcttggcccctcagatccaaagcacctcatctatgcgggatccaaattaaagcatattaaagctgcacctgctgcaccagacaagaatcgccgaccacctttgtctccaccagcacctgccgtcaatcgtggtcgtggatctgtgcgcacacctttgggattaaaaaaatgtctaccgaaagtggcagtcaatccccattatctcaagcatcacaagcaccgatgtctccatctcatgaacctgaatcgtctcgtcctgagtcagataatgactcgatgccaatttaaatagatgacaatgacaacattgaagtagaagaggaagaatacgacgctgaagctggttctaagagaaagctcacctcaactgtttggaaagagttcaagagagtgaagttcaatggcacagtccgggcaaagtgcaactattgcttcaagcaactttctgcgtcaagtaataatgggacaaaacatcttcatgttcatttaaaaagttgtgtgcaaaggaagattaagttgaacgggaagacattggcacaagcttctttgagatttggtagaacggatggtggaacagtttcaatagagaattacacatttgatcaagaaatagctagaaatgaacttgctgcgatgatagttctgcatgaataccccttaagcatggttgatcatgtgggtttccgaagatttgttggtgctcttcaaccacttttcaagatcggaaccagaaacatgataagatctgatattatgaagcattatgaggtggagaagaaaaaagccattgaatacatggctggaatccagtccagggtagcggtcaccacagatttgtggacgtctgacaaccaaaaaagaggttacatggccataacagctcactttattgatgaatcctggactcttagaaatattataatgaggtttatctatgttcctgctcctcatactgctgacgtcattggtgaagaattgtatgagtcattggttgaatggaatcttgatgagaaaatatcttctgtgactcttgacaactgcacaactaatgatgcgtgaatgtgaagatagagttgctaatgtgaagaacttgctagctgatttgatgaatgagtaccatataactgagaatattgagaacaatgagtcatcaacaccatcagttggaaacagtgatgacttcttatctgacattagtgcccgtattgcaagtagaaggccaacaagcatggggctcaaatctgagctagaccggtacttggatgaagaaatggtgaacatgcaaaccaaaaacttcaatgttttagattggtagaaggtagctggaactcggtttcctattttaagaaggattgcaagagacatatatgttatccctgttacaactgttgcttcagaagctgctttcagcactagtggtagagtacttagtgagcatcgcagtaggcttacttcaaagatgttggaggctctcatgtgctctcaagattggcttaggaacaaatacaaagttgatgagaaaactaaacaacctgccaccttttggtcctgtctccaagacatgcaagagggcctccaggaacttgcactttgacattttcatttcaaggatttaggtggcgttaatcttttggctgttgacatgtagtgaacaagtcaagtacaagtagcaattgacaagatcacaagaaccttttggctctcatgaacacttgatatggatcttttggttctcatgtttttactcaatggtgaacttgtaatgaacttgtaacagatgtgcttttgggagcggtttgcacatctgttgatgcgcacctatgttgtaagcacattgtatgtgttaatttggaaatttggatgtttaatgtggtgaactagtggcgccatgctaggggtggtggacactaactggatattaatctagctgtgaacatctgatgtctgatgtgatcaatggtgttatgatttgtgaaacacttaacattgaccactctatcagtcttattgttgatgtttctta

SEQ ID NO: 25484 - DNA, 2303 bp, Zea Mays
ctagttgccttctctggtagtccagtctaacgctgtccaaccatttgtggcggctgccgcaacaggctcaacgctcacgcgcacacacaatccatagccgcctcccacatctcactctcgttccgagcttccggccatggcggtgacctccggcgcccccaacgacaacggccggtgatgcttctcctcctcctcctcctcctttgtccataactgtttttttgcagttgcgcatcagtgcacttagatctaactcccagaagtattggtactgagtactgacccatcgagccgtcccgaagggacgctggcgccgctgcgactgacgatgagcaccgcgtggatctggaagttaggcacaaggacgccggcactagggactcgccagcaccgatagcggcagctgcgcctgcgtcccaatcccgagtggctggaaagcttggcccctcagatccaaagcacctcatctatgcgggatccaaattaaagcatattaaagctgcacctgctgcaccagacaagaatcgccgaccacctttgtctccaccagcacctgccgtcaatcgtggtcgtggatctgtgcgcacacctttgggattaaaaaaatgtctaccgaaagtggcagtcaatccccattatctcaagcatcacaagcaccgatgtctccatctcatgaacctgaatcgtctcgtcctgagtcagataatgactcgatgccaatttaaatagatgacaatgacaacattgaagtagaagaggaagaatacgacgctgaagctggttctaagagaaagctcacctcaactgtttggaaagagttcaagagagtgaagttcaatggcacagtccgggcaaagtgcaactattgcttcaagcaactttctgcgtcaagtaataatgggacaaaacatcttcatgttcatttaaaaagttgtgtgcaaaggaagattaagttgaacgggaagacattggcacaagcttctttgagatttggtagaacggatggtggaacagtttcaatagagaattacacatttgatcaagaaatagctagaaatgaacttgctgcgatgatagttctgcatgaataccccttaagcatggttgatcatgtgggtttccgaagatttgttggtgctcttcaaccacttttcaagatcggaaccagaaacatgataagatctgatattatgaagcattatgaggtggagaagaaaaaagccattgaatacatggctggaatccagtccagggtagcggtcaccacagatttgtggacgtctgacaaccaaaaaagaggttacatggccataacagctcactttattgatgaatcctggactcttagaaatattataatgaggtttatctatgttcctgctcctcatactgctgacgtcattggtgaagaattgtatgagtcattggttgaatggaatcttgatgagaaaatatcttctgtgactcttgacaactgcacaactaatgatgcgaaggccaacaagcatggggctcaaatctgagctagaccggtacttggatgaagaaatggtgaacatgcaaaccaaaaacttcaatgttttagattggtagaaggtagctggaactcggtttcctattttaagaaggattgcaagagacatatatgttatccctgttacaactgttgcttcagaagctgctttcagcactagtggtagagtacttagtgagcatcgcagtaggcttacttcaaagatgttggaggctctcatgtgctctcaagattggcttaggaacaaatacaaagttgatgagaaaactaaacaacctgccaccttttggtcctgtctccaagacatgcaagagggcctccagaggaacttgcactttgacattttcatttcaaggatttaggtggcgttaatcttttggctgttgacatgtagtgaacaagtcaagtacaagtagcaattgacaagatcacaagaaccttttggctctcatgaacacttgatatggatcttttggttctcatgtttttactcaatggtgaacttgtaatgaacttgtaacagatgtgcttttgggagcggtttgcacatctgttgatgcgcacctatgttgtaagcacattgtatgtgttaatttggaaatttggatgtttaatgtggtgaactagtggcgccatgctaggggtggtggacactaactggatattaatctagctgtgaacatctgatgtctgatgtgatcaatggtgttatgatttgtgaaacacttaacattgaccactctatcagtcttattgttgatgtttctta

SEQ ID NO: 25485 - DNA, 2228 bp, Zea Mays
cctagagtccagttgcctagttgccttctctggtagtccagtctaacgctgtccaaccatttgtggcggctgccgcaacaggctcaacgctcacgcgcacacacaatccatagccgcctcccacatctcactctcgttccgagcttccggccatggcggtgacctccggcgcccccaacgacaacggccgtattggtactgagtactgacccatcgagccgtcccgaagggacgctggcgccgctgcgactgacgatgagcaccgcgtggatctggaagttaggcacaaggacgccggcactagggactcgccagcaccgatagcggcagctgcgcctgcgtcccaatcccgagtggctggaaagcttggcccctcagatccaaagcacctcatctatgcgggatccaaattaaagcatattaaagctgcacctgctgcaccagacaagaatcgccgaccacctttgtctccaccagcacctgccgtcaatcgtggtcgtggatctgtgcgcacacctttgggattaaaaaaatgtctaccgaaagtggcagtcaatccccattatctcaagcatcacaagcaccgatgtctccatctcatgaacctgaatcgtctcgtcctgagtcagataatgactcgatgccaatttaaatagatgacaatgacaacattgaagtagaagaggaagaatacgacgctgaagctggttctaagagaaagctcacctcaactgtttggaaagagttcaagagagtgaagttcaatggcacagtccgggcaaagtgcaactattgcttcaagcaactttctgcgtcaagtaataatgggacaaaacatcttcatgttcatttaaaaagttgtgtgcaaaggaagattaagttgaacgggaagacattggcacaagcttctttgagatttggtagaacggatggtggaacagtttcaatagagaattacacatttgatcaagaaatagctagaaatgaacttgctgcgatgatagttctgcatgaataccccttaagcatggttgatcatgtgggtttccgaagatttgttggtgctcttcaaccacttttcaagatcggaaccagaaacatgataagatctgatattatgaagcattatgaggtggagaagaaaaaagccattgaatacatggctggaatccagtccagggtagcggtcaccacagatttgtggacgtctgacaaccaaaaaagaggttacatggccataacagctcactttattgatgaatcctggactcttagaaatattataatgaggtttatctatgttcctgctcctcatactgctgacgtcattggtgaagaattgtatgagtcattggttgaatggaatcttgatgagaaaatatcttctgtgactcttgacaactgcacaactaatgatgcgaaggccaacaagcatggggctcaaatctgagctagaccggtacttggatgaagaaatggtgaacatgcaaaccaaaaacttcaatgttttagattggtagaaggtagctggaactcggtttcctattttaagaaggattgcaagagacatatatgttatccctgttacaactgttgcttcagaagctgctttcagcactagtggtagagtacttagtgagcatcgcagtaggcttacttcaaagatgttggaggctctcatgtgctctcaagattggcttaggaacaaatacaaagttgatgagaaaactaaacaacctgccaccttttggtcctgtctccaagacatgcaagagggcctccaggaacttgcactttgacattttcatttcaaggatttaggtggcgttaatcttttggctgttgacatgtagtgaacaagtcaagtacaagtagcaattgacaagatcacaagaaccttttggctctcatgaacacttgatatggatcttttggttctcatgtttttactcaatggtgaacttgtaatgaacttgtaacagatgtgcttttgggagcggtttgcacatctgttgatgcgcacctatgttgtaagcacattgtatgtgttaatttggaaatttggatgtttaatgtggtgaactagtggcgccatgctaggggtggtggacactaactggatattaatctagctgtgaacatctgatgtctgatgtgatcaatggtgttatgatttgtgaaacacttaacattgaccactctatcagtcttattgttgatgtttctta

SEQ ID NO: 25486 - DNA, 2212 bp, Zea Mays
gtaaccctagagtccagttgcctagttgccttctctggtagtccagtctaacgctgtccaaccatttgtggcggctgccgcaacaggctcaacgctcacgcgcacacacaatccatagccgcctcccacatctcactctcgttccgagcttccggccatggcggtgacctccggcgcccccaacgacaacggccgggacgctggcgccgctgcgactgacgatgagcaccgcgtggatctggaagttaggcacaaggacgccggcactagggactcgccagcaccgatagcggcagctgcgcctgcgtcccaatcccgagtggctggaaagcttggcccctcagatccaaagcacctcatctatgcgggatccaaattaaagcatattaaagctgcacctgctgcaccagacaagaatcgccgaccacctttgtctccaccagcacctgccgtcaatcgtggtcgtggatctgtgcgcacacctttgggattaaaaaaatgtctaccgaaagtggcagtcaatccccattatctcaagcatcacaagcaccgatgtctccatctcatgaacctgaatcgtctcgtcctgagtcagataatgactcgatgccaatttaaatagatgacaatgacaacattgaagtagaagaggaagaatacgacgctgaagctggttctaagagaaagctcacctcaactgtttggaaagagttcaagagagtgaagttcaatggcacagtccgggcaaagtgcaactattgcttcaagcaactttctgcgtcaagtaataatgggacaaaacatcttcatgttcatttaaaaagttgtgtgcaaaggaagattaagttgaacgggaagacattggcacaagcttctttgagatttggtagaacggatggtggaacagtttcaatagagaattacacatttgatcaagaaatagctagaaatgaacttgctgcgatgatagttctgcatgaataccccttaagcatggttgatcatgtgggtttccgaagatttgttggtgctcttcaaccacttttcaagatcggaaccagaaacatgataagatctgatattatgaagcattatgaggtggagaagaaaaaagccattgaatacatggctggaatccagtccagggtagcggtcaccacagatttgtggacgtctgacaaccaaaaaagaggttacatggccataacagctcactttattgatgaatcctggactcttagaaatattataatgaggtttatctatgttcctgctcctcatactgctgacgtcattggtgaagaattgtatgagtcattggttgaatggaatcttgatgagaaaatatcttctgtgactcttgacaactgcacaactaatgatgcgtgcccgtattgcaagtagaaggccaacaagcatggggctcaaatctgagctagaccggtacttggatgaagaaatggtgaacatgcaaaccaaaaacttcaatgttttagattggtagaaggtagctggaactcggtttcctattttaagaaggattgcaagagacatatatgttatccctgttacaactgttgcttcagaagctgctttcagcactagtggtagagtacttagtgagcatcgcagtaggcttacttcaaagatgttggaggctctcatgtgctctcaagattggcttaggaacaaatacaaagttgatgagaaaactaaacaacctgccaccttttggtcctgtctccaagacatgcaagagggcctccaggaacttgcactttgacattttcatttcaaggatttaggtggcgttaatcttttggctgttgacatgtagtgaacaagtcaagtacaagtagcaattgacaagatcacaagaaccttttggctctcatgaacacttgatatggatcttttggttctcatgtttttactcaatggtgaacttgtaatgaacttgtaacagatgtgcttttgggagcggtttgcacatctgttgatgcgcacctatgttgtaagcacattgtatgtgttaatttggaaatttggatgtttaatgtggtgaactagtggcgccatgctaggggtggtggacactaactggatattaatctagctgtgaacatctgatgtctgatgtgatcaatggtgttatgatttgtgaaacacttaacattgaccactctatcagtcttattgttgatgtttctta

SEQ ID NO: 25487 - DNA, 3072 bp, Zea Mays
gtaaccctagagtccagttgcctagttgccttctctggtagtccagtctaacgctgtccaaccatttgtggcggctgccgcaacaggctcaacgctcacgcgcacacacaatccatagccgcctcccacatctcactctcgttccgagcttccggccatggcggtgacctccggcgcccccaacgacaacggccgtattggtactgagtactgacccatcgagccgtcccgaagggacgctggcgccgctgcgactgacgatgagcaccgcgtggatctggaagttaggcacaaggacgccggcactagggactcgccagcaccgatagcggcagctgcgcctgcgtcccaatcccgagtggctggaaagcttggcccctcagatccaaagcacctcatctatgcgggatccaaattaaagcatattaaagctgcacctgctgcaccagacaagaatcgccgaccacctttgtctccaccagcacctgccgtcaatcgtggtcgtggatctgtgcgcacacctttgggattaaaaaaatgtctaccgaaagtggcagtcaatccccattatctcaagcatcacaagcaccgatgtctccatctcatgaacctgaatcgtctcgtcctgagtcagataatgactcgatgccaatttaaatagatgacaatgacaacattgaagtagaagaggaagaatacgacgctgaagctggttctaagagaaagctcacctcaactgtttggaaagagttcaagagagtgaagttcaatggcacagtccgggcaaagtgcaactattgcttcaagcaactttctgcgtcaagtaataatgggacaaaacatcttcatgttcatttaaaaagttgtgtgcaaaggaagattaagttgaacgggaagacattggcacaagcttctttgagatttggtagaacggatggtggaacagtttcaatagagaattacacatttgatcaagaaatagctagaaatgaacttgctgcgatgatagttctgcatgaataccccttaagcatggttgatcatgtgggtttccgaagatttgttggtgctcttcaaccacttttcaagatcggaaccagaaacatgataagatctgatattatgaagcattatgaggtggagaagaaaaaagccattgaatacatggctggaatccagtccagggtagcggtcaccacagatttgtggacgtctgacaaccaaaaaagaggttacatggccataacagctcactttattgatgaatcctggactcttagaaatattataatgaggtttatctatgttcctgctcctcatactgctgacgtcattggtgaagaattgtatgagtcattggttgaatggaatcttgatgagaaaatatcttctgtgactcttgacaactgcacaactaatgatgcggtaatctcttctcttgtgaggaatattggaaagcacaaacttatgaatgatggaaaattgctacatatgcgatgttctgcccatatccttaatttgatagtaaaggatggtttagaagtacttaaagatgcaattgagaacatccgtgatagtgttgcttattggacagccactccaaaaaggtttgaaaagtttgaggaaatagctaaatttgttaaagttgatatcaagacaaagataggatttgactgtaggactagatggaattcaactttcaccatgcttgccactgcagtgccttacaaggctattttcataagagcaagtcgtgtagataggcagtacacgtgtttgcccactgaggatgagtggaaatttgctaaggatgttgtggagaggcttagattgtttaatgacattactacactattttttggaactgattatgtcactgctaacgtctacttcactagaattgctaagattagaaatcagattaggttgtggtcatcatgtggcaatccgttggtagaagaaatgttagtgaatatggtagccaaatttgacaagtactggactgacattcaagggctcatgggcattgcaactattcttgaccctcgattcaaaactgcagtcctattgatatgttatgaggacttacttgttgtgtccggtagtgaatgtgaagatagagttgctaatgtgaagaacttgctagctgatttgatgaatgagtaccatataactgagaatattgagaacaatgagtcatcaacaccatcagttggaaacagtgatgacttcttatctgacattagtgcccgtattgcaagtagaaggccaacaagcatggggctcaaatctgagctagaccggtacttggatgaagaaatggtgaacatgcaaaccaaaaacttcaatgttttagattggtagaaggtagctggaactcggtttcctattttaagaaggattgcaagagacatatatgttatccctgttacaactgttgcttcagaagctgctttcagcactagtggtagagtacttagtgagcatcgcagtaggcttacttcaaagatgttggaggctctcatgtgctctcaagattggcttaggaacaaatacaaagttgatgagaaaactaaacaacctgccaccttttggtcctgtctccaagacatgcaagagggcctccaggaacttgcactttgacattttcatttcaaggatttaggtggcgttaatcttttggctgttgacatgtagtgaacaagtcaagtacaagtagcaattgacaagatcacaagaaccttttggctctcatgaacacttgatatggatcttttggttctcatgtttttactcaatggtgaacttgtaatgaacttgtaacagatgtgcttttgggagcggtttgcacatctgttgatgcgcacctatgttgtaagcacattgtatgtgttaatttggaaatttggatgtttaatgtggtgaactagtggcgccatgctaggggtggtggacactaactggatattaatctagctgtgaacatctgatgtctgatgtgatcaatggtgttatgatttgtgaaacacttaacattgaccactctatcagtcttattgttgatgtttctta

SEQ ID NO: 25488 - DNA, 2319 bp, Zea Mays
gtaaccctagagtccagttgcctagttgccttctctggtagtccagtctaacgctgtccaaccatttgtggcggctgccgcaacaggctcaacgctcacgcgcacacacaatccatagccgcctcccacatctcactctcgttccgagcttccggccatggcggtgacctccggcgcccccaacgacaacggccggtgatgcttctcctcctcctcctcctcctttgtccataactgtttttttgcagttgcgcatcagtgcacttagatctaactcccagaagtattggtactgagtactgacccatcgagccgtcccgaagggacgctggcgccgctgcgactgacgatgagcaccgcgtggatctggaagttaggcacaaggacgccggcactagggactcgccagcaccgatagcggcagctgcgcctgcgtcccaatcccgagtggctggaaagcttggcccctcagatccaaagcacctcatctatgcgggatccaaattaaagcatattaaagctgcacctgctgcaccagacaagaatcgccgaccacctttgtctccaccagcacctgccgtcaatcgtggtcgtggatctgtgcgcacacctttgggattaaaaaaatgtctaccgaaagtggcagtcaatccccattatctcaagcatcacaagcaccgatgtctccatctcatgaacctgaatcgtctcgtcctgagtcagataatgactcgatgccaatttaaatagatgacaatgacaacattgaagtagaagaggaagaatacgacgctgaagctggttctaagagaaagctcacctcaactgtttggaaagagttcaagagagtgaagttcaatggcacagtccgggcaaagtgcaactattgcttcaagcaactttctgcgtcaagtaataatgggacaaaacatcttcatgttcatttaaaaagttgtgtgcaaaggaagattaagttgaacgggaagacattggcacaagcttctttgagatttggtagaacggatggtggaacagtttcaatagagaattacacatttgatcaagaaatagctagaaatgaacttgctgcgatgatagttctgcatgaataccccttaagcatggttgatcatgtgggtttccgaagatttgttggtgctcttcaaccacttttcaagatcggaaccagaaacatgataagatctgatattatgaagcattatgaggtggagaagaaaaaagccattgaatacatggctggaatccagtccagggtagcggtcaccacagatttgtggacgtctgacaaccaaaaaagaggttacatggccataacagctcactttattgatgaatcctggactcttagaaatattataatgaggtttatctatgttcctgctcctcatactgctgacgtcattggtgaagaattgtatgagtcattggttgaatggaatcttgatgagaaaatatcttctgtgactcttgacaactgcacaactaatgatgcggccaacaagcatggggctcaaatctgagctagaccggtacttggatgaagaaatggtgaacatgcaaaccaaaaacttcaatgttttagattggtagaaggtagctggaactcggtttcctattttaagaaggattgcaagagacatatatgttatccctgttacaactgttgcttcagaagctgctttcagcactagtggtagagtacttagtgagcatcgcagtaggcttacttcaaagatgttggaggctctcatgtgctctcaagattggcttaggaacaaatacaaagttgatgagaaaactaaacaacctgccaccttttggtcctgtctccaagacatgcaagagggcctccaggaacttgcactttgacattttcatttcaaggatttaggtggcgttaatcttttggctgttgacatgtagtgaacaagtcaagtacaagtagcaattgacaagatcacaagaaccttttggctctcatgaacacttgatatggatcttttggttctcatgtttttactcaatggtgaacttgtaatgaacttgtaacagatgtgcttttgggagcggtttgcacatctgttgatgcgcacctatgttgtaagcacattgtatgtgttaatttggaaatttggatgtttaatgtggtgaactagtggcgccatgctaggggtggtggacactaactggatattaatctagctgtgaacatctgatgtctgatgtgatcaatggtgttatgatttgtgaaacacttaacattgaccactctatcagtcttattgttgatgtttctta

SEQ ID NO: 25489 - DNA, 3034 bp, Zea Mays
agtaaccctagagtccagttgcctagttgccttctctggtagtccagtctaacgctgtccaaccatttgtggcggctgccgcaacaggctcaacgctcacgcgcacacacaatccatagccgcctcccacatctcactctcgttccgagcttccggccatggcggtgacctccggcgcccccaacgacaacggccgggacgctggcgccgctgcgactgacgatgagcaccgcgtggatctggaagttaggcacaaggacgccggcactagggactcgccagcaccgatagcggcagctgcgcctgcgtcccaatcccgagtggctggaaagcttggcccctcagatccaaagcacctcatctatgcgggatccaaattaaagcatattaaagctgcacctgctgcaccagacaagaatcgccgaccacctttgtctccaccagcacctgccgtcaatcgtggtcgtggatctgtgcgcacacctttgggattaaaaaaatgtctaccgaaagtggcagtcaatccccattatctcaagcatcacaagcaccgatgtctccatctcatgaacctgaatcgtctcgtcctgagtcagataatgactcgatgccaatttaaatagatgacaatgacaacattgaagtagaagaggaagaatacgacgctgaagctggttctaagagaaagctcacctcaactgtttggaaagagttcaagagagtgaagttcaatggcacagtccgggcaaagtgcaactattgcttcaagcaactttctgcgtcaagtaataatgggacaaaacatcttcatgttcatttaaaaagttgtgtgcaaaggaagattaagttgaacgggaagacattggcacaagcttctttgagatttggtagaacggatggtggaacagtttcaatagagaattacacatttgatcaagaaatagctagaaatgaacttgctgcgatgatagttctgcatgaataccccttaagcatggttgatcatgtgggtttccgaagatttgttggtgctcttcaaccacttttcaagatcggaaccagaaacatgataagatctgatattatgaagcattatgaggtggagaagaaaaaagccattgaatacatggctggaatccagtccagggtagcggtcaccacagatttgtggacgtctgacaaccaaaaaagaggttacatggccataacagctcactttattgatgaatcctggactcttagaaatattataatgaggtttatctatgttcctgctcctcatactgctgacgtcattggtgaagaattgtatgagtcattggttgaatggaatcttgatgagaaaatatcttctgtgactcttgacaactgcacaactaatgatgcggtaatctcttctcttgtgaggaatattggaaagcacaaacttatgaatgatggaaaattgctacatatgcgatgttctgcccatatccttaatttgatagtaaaggatggtttagaagtacttaaagatgcaattgagaacatccgtgatagtgttgcttattggacagccactccaaaaaggtttgaaaagtttgaggaaatagctaaatttgttaaagttgatatcaagacaaagataggatttgactgtaggactagatggaattcaactttcaccatgcttgccactgcagtgccttacaaggctattttcataagagcaagtcgtgtagataggcagtacacgtgtttgcccactgaggatgagtggaaatttgctaaggatgttgtggagaggcttagattgtttaatgacattactacactattttttggaactgattatgtcactgctaacgtctacttcactagaattgctaagattagaaatcagattaggttgtggtcatcatgtggcaatccgttggtagaagaaatgttagtgaatatggtagccaaatttgacaagtactggactgacattcaagggctcatgggcattgcaactattcttgaccctcgattcaaaactgcagtcctattgatatgttatgaggacttacttgttgtgtccggtagtgaatgtgaagatagagttgctaatgtgaagaacttgctagctgatttgatgaatgagtaccatataactgagaatattgagaacaatgagtcatcaacaccatcagttggaaacagtgatgacttcttatctgacattagtgcccgtattgcaagtagaaggccaacaagcatggggctcaaatctgagctagaccggtacttggatgaagaaatggtgaacatgcaaaccaaaaacttcaatgttttagattggtagaaggtagctggaactcggtttcctattttaagaaggattgcaagagacatatatgttatccctgttacaactgttgcttcagaagctgctttcagcactagtggtagagtacttagtgagcatcgcagtaggcttacttcaaagatgttggaggctctcatgtgctctcaagattggcttaggaacaaatacaaagttgatgagaaaactaaacaacctgccaccttttggtcctgtctccaagacatgcaagagggcctccaggaacttgcactttgacattttcatttcaaggatttaggtggcgttaatcttttggctgttgacatgtagtgaacaagtcaagtacaagtagcaattgacaagatcacaagaaccttttggctctcatgaacacttgatatggatcttttggttctcatgtttttactcaatggtgaacttgtaatgaacttgtaacagatgtgcttttgggagcggtttgcacatctgttgatgcgcacctatgttgtaagcacattgtatgtgttaatttggaaatttggatgtttaatgtggtgaactagtggcgccatgctaggggtggtggacactaactggatattaatctagctgtgaacatctgatgtctgatgtgatcaatggtgttatgatttgtgaaacacttaacattgaccactctatcagtcttattgttgatgtttctta

SEQ ID NO: 25490 - DNA, 3035 bp, Zea Mays
agtaaccctagagtccagttgcctagttgccttctctggtagtccagtctaacgctgtccaaccatttgtggcggctgccgcaacaggctcaacgctcacgcgcacacacaatccatagccgcctcccacatctcactctcgttccgagcttccggccatggcggtgacctccggcgcccccaacgacaacggccgggacgctggcgccgctgcgactgacgatgagcaccgcgtggatctggaagttaggcacaaggacgccggcactagggactcgccagcaccgatagcggcagctgcgcctgcgtcccaatcccgagtggctggaaagcttggcccctcagatccaaagcacctcatctatgcgggatccaaattaaagcatattaaagctgcacctgctgcaccagacaagaatcgccgaccacctttgtctccaccagcacctgccgtcaatcgtggtcgtggatctgtgcgcacacctttgggattaaaaaaatgtctaccgaaagtggcagtcaatccccattatctcaagcatcacaagcaccgatgtctccatctcatgaacctgaatcgtctcgtcctgagtcagataatgactcgatgccaatttaaatagatgacaatgacaacattgaagtagaagaggaagaatacgacgctgaagctggttctaagagaaagctcacctcaactgtttggaaagagttcaagagagtgaagttcaatggcacagtccgggcaaagtgcaactattgcttcaagcaactttctgcgtcaagtaataatgggacaaaacatcttcatgttcatttaaaaagttgtgtgcaaaggaagattaagttgaacgggaagacattggcacaagcttctttgagatttggtagaacggatggtggaacagtttcaatagagaattacacatttgatcaagaaatagctagaaatgaacttgctgcgatgatagttctgcatgaataccccttaagcatggttgatcatgtgggtttccgaagatttgttggtgctcttcaaccacttttcaagatcggaaccagaaacatgataagatctgatattatgaagcattatgaggtggagaagaaaaaagccattgaatacatggctggaatccagtccagggtagcggtcaccacagatttgtggacgtctgacaaccaaaaaagaggttacatggccataacagctcactttattgatgaatcctggactcttagaaatattataatgaggtttatctatgttcctgctcctcatactgctgacgtcattggtgaagaattgtatgagtcattggttgaatggaatcttgatgagaaaatatcttctgtgactcttgacaactgcacaactaatgatgcggtaatctcttctcttgtgaggaatattggaaagcacaaacttatgaatgatggaaaattgctacatatgcgatgttctgcccatatccttaatttgatagtaaaggatggtttagaagtacttaaagatgcaattgagaacatccgtgatagtgttgcttattggacagccactccaaaaaggtttgaaaagtttgaggaaatagctaaatttgttaaagttgatatcaagacaaagataggatttgactgtaggactagatggaattcaactttcaccatgcttgccactgcagtgccttacaaggctattttcataagagcaagtcgtgtagataggcagtacacgtgtttgcccactgaggatgagtggaaatttgctaaggatgttgtggagaggcttagattgtttaatgacattactacactattttttggaactgattatgtcactgctaacgtctacttcactagaattgctaagattagaaatcagattaggttgtggtcatcatgtggcaatccgttggtagaagaaatgttagtgaatatggtagccaaatttgacaagtactggactgacattcaagggctcatgggcattgcaactattcttgaccctcgattcaaaactgcagtcctattgatatgttatgaggacttacttgttgtgtccggtagtgaatgtgaagatagagttgctaatgtgaagaacttgctagctgatttgatgaatgagtaccatataactgagaatattgagaacaatgagtcatcaacaccatcagttggaaacagtgatgacttcttatctgacattagtgcccgtattgcaagtagaaggccaacaagcatggggctcaaatctgagctagaccggtacttggatgaagaaatggtgaacatgcaaaccaaaaacttcaatgttttagattggtagaaggtagctggaactcggtttcctattttaagaaggattgcaagagacatatatgttatccctgttacaactgttgcttcagaagctgctttcagcactagtggtagagtacttagtgagcatcgcagtaggcttacttcaaagatgttggaggctctcatgtgctctcaagattggcttaggaacaaatacaaagttgatgagaaaactaaacaacctgccaccttttggtcctgtctccaagacatgcaagagggcctccagggaacttgcactttgacattttcatttcaaggatttaggtggcgttaatcttttggctgttgacatgtagtgaacaagtcaagtacaagtagcaattgacaagatcacaagaaccttttggctctcatgaacacttgatatggatcttttggttctcatgtttttactcaatggtgaacttgtaatgaacttgtaacagatgtgcttttgggagcggtttgcacatctgttgatgcgcacctatgttgtaagcacattgtatgtgttaatttggaaatttggatgtttaatgtggtgaactagtggcgccatgctaggggtggtggacactaactggatattaatctagctgtgaacatctgatgtctgatgtgatcaatggtgttatgatttgtgaaacacttaacattgaccactctatcagtcttattgttgatgtttctta

SEQ ID NO: 25491 - DNA, 2980 bp, Zea Mays
agtaaccctagagtccagttgcctagttgccttctctggtagtccagtctaacgctgtccaaccatttgtggcggctgccgcaacaggctcaacgctcacgcgcacacacaatccatagccgcctcccacatctcactctcgttccgagcttccggccatggcggtgacctccggcgcccccaacgacaacggccggcacaaggacgccggcactagggactcgccagcaccgatagcggcagctgcgcctgcgtcccaatcccgagtggctggaaagcttggcccctcagatccaaagcacctcatctatgcgggatccaaattaaagcatattaaagctgcacctgctgcaccagacaagaatcgccgaccacctttgtctccaccagcacctgccgtcaatcgtggtcgtggatctgtgcgcacacctttgggattaaaaaaatgtctaccgaaagtggcagtcaatccccattatctcaagcatcacaagcaccgatgtctccatctcatgaacctgaatcgtctcgtcctgagtcagataatgactcgatgccaatttaaatagatgacaatgacaacattgaagtagaagaggaagaatacgacgctgaagctggttctaagagaaagctcacctcaactgtttggaaagagttcaagagagtgaagttcaatggcacagtccgggcaaagtgcaactattgcttcaagcaactttctgcgtcaagtaataatgggacaaaacatcttcatgttcatttaaaaagttgtgtgcaaaggaagattaagttgaacgggaagacattggcacaagcttctttgagatttggtagaacggatggtggaacagtttcaatagagaattacacatttgatcaagaaatagctagaaatgaacttgctgcgatgatagttctgcatgaataccccttaagcatggttgatcatgtgggtttccgaagatttgttggtgctcttcaaccacttttcaagatcggaaccagaaacatgataagatctgatattatgaagcattatgaggtggagaagaaaaaagccattgaatacatggctggaatccagtccagggtagcggtcaccacagatttgtggacgtctgacaaccaaaaaagaggttacatggccataacagctcactttattgatgaatcctggactcttagaaatattataatgaggtttatctatgttcctgctcctcatactgctgacgtcattggtgaagaattgtatgagtcattggttgaatggaatcttgatgagaaaatatcttctgtgactcttgacaactgcacaactaatgatgcggtaatctcttctcttgtgaggaatattggaaagcacaaacttatgaatgatggaaaattgctacatatgcgatgttctgcccatatccttaatttgatagtaaaggatggtttagaagtacttaaagatgcaattgagaacatccgtgatagtgttgcttattggacagccactccaaaaaggtttgaaaagtttgaggaaatagctaaatttgttaaagttgatatcaagacaaagataggatttgactgtaggactagatggaattcaactttcaccatgcttgccactgcagtgccttacaaggctattttcataagagcaagtcgtgtagataggcagtacacgtgtttgcccactgaggatgagtggaaatttgctaaggatgttgtggagaggcttagattgtttaatgacattactacactattttttggaactgattatgtcactgctaacgtctacttcactagaattgctaagattagaaatcagattaggttgtggtcatcatgtggcaatccgttggtagaagaaatgttagtgaatatggtagccaaatttgacaagtactggactgacattcaagggctcatgggcattgcaactattcttgaccctcgattcaaaactgcagtcctattgatatgttatgaggacttacttgttgtgtccggtagtgaatgtgaagatagagttgctaatgtgaagaacttgctagctgatttgatgaatgagtaccatataactgagaatattgagaacaatgagtcatcaacaccatcagttggaaacagtgatgacttcttatctgacattagtgcccgtattgcaagtagaaggccaacaagcatggggctcaaatctgagctagaccggtacttggatgaagaaatggtgaacatgcaaaccaaaaacttcaatgttttagattggtagaaggtagctggaactcggtttcctattttaagaaggattgcaagagacatatatgttatccctgttacaactgttgcttcagaagctgctttcagcactagtggtagagtacttagtgagcatcgcagtaggcttacttcaaagatgttggaggctctcatgtgctctcaagattggcttaggaacaaatacaaagttgatgagaaaactaaacaacctgccaccttttggtcctgtctccaagacatgcaagagggcctccaggaacttgcactttgacattttcatttcaaggatttaggtggcgttaatcttttggctgttgacatgtagtgaacaagtcaagtacaagtagcaattgacaagatcacaagaaccttttggctctcatgaacacttgatatggatcttttggttctcatgtttttactcaatggtgaacttgtaatgaacttgtaacagatgtgcttttgggagcggtttgcacatctgttgatgcgcacctatgttgtaagcacattgtatgtgttaatttggaaatttggatgtttaatgtggtgaactagtggcgccatgctaggggtggtggacactaactggatattaatctagctgtgaacatctgatgtctgatgtgatcaatggtgttatgatttgtgaaacacttaacattgaccactctatcagtcttattgttgatgtttctta

SEQ ID NO: 25492 - DNA, 4553 bp, Zea Mays
ccagcggcggcggccgaacctccccttgaaaccctccgacgaccggatcgactccgctccgctcaaatggagccgctgcctatccctcatcctccagcaccgcctcctgctctcacgtccgccctcgcccacctacgctcccttctctccgccgcatcctctgccctcgccgctctaccctctcctctccaaccgcacccgatcactcccatcgcttgtatcccttcacctcagtctaccaccacaaaacctccactcccgccgccggtcaccgctatcaacctcccgctcccagctgccccagctccctactccgactgccctgccgtcgtccgtttaaggccttccccaacctccacggccatctccctccccgccttcctcgctgccgtatgcgcagatttctcctcttccactaccggcccgagcccctcccatccgccccgcatcctgccatcggagctaagcctcctgcgccgggagttggactcctgggctacgggaggccaccacctcccggggtcgtactcctacgctgtagcccgggtaggggcctcgttctgctcggatgtgatgccacggtgggaggccgagctgcggcagtgggtgcttgagaactcaccgaggtacggggtcaaggtcaatgtcacggatgcggaccatatcttggtgctattatgtctcttgttgaaggcgatggcactggaggccaggtacttgctggaggggatgcagaatgtcgacaacgaggggctaggctttgatcccagggccatgaggtttgagtgccctaggctggtcgagggcgtctcgtggttaggcgcacagcttggggttctgtatggtgaaagcaatgggaaactatttatgcttgcatctgtgaaggaggctgtgctacagatggcatattgcttggctctctgtgcaggagatggtgctgcaagtgtaggagggagtgatgctggagatgttgtggcaggccctgtttttctttctcaggttgctgcttccattgtggcattgcatgagaggttctacttggagaagaccaaggcgttgcaagctcaacgcccgtcaaaatatcagctattacttgagtattcacaagcactggaacgagggattttggagcgatcaaacagaccaaactacagggctgttctggagtatgatgggattctgtcacggcgagtagagaacaaggaatctgctagagccaagacaaaggaggaacttttagctgaagaacgtgattacaaacggagaagaacatcttaccgtggcaagaaagtgaatagaaaccctacagagatactaagagacataattgatgaacatatggaggaaatcagacaggcaggtggcattggttgtcttgtggaagctcctgctgatattgcttggaatgagctgaagggcaactctcacagcggtgcatatcatggaagttatgattttgcaagcagctcttctcatgataagacagctttggcttctcggtcatctaactgtgacaactcatgtgctgaatctttgggaagattttcatcaaggagcagtgacacaagagattcatacaataactcagggtgcgaaactcatagaaaccattaccagtatatatctgagaaggaaatgggtggaatatagggtcagaaggtgaagtagatcaaatttactcttacccgcaagagaattacacacccaatggctataagtttaagaaggatgtctcaaaccaccgtgatgaatcaaatgattgtacatggccaatacagtcacaaagatcccctgtgacagaatattctcacttgccaggagaagggtgctttgatagaagtagagctagtcagaactcagaagtgacataaatcattatctataactcaagattaattcagtgatagatatgatccccaaagcgcatattctgatggagatcatccgacaaccatgcttggtgatgctactaaaggaaagcatgagatataccatgatgaagtacattgacatgcacattatgaaaggaagcgtgattataatcactgcagggcaatacagattattgttgcttcatatccagttctactttttttatttgtgcaattttaccctcatgtgttggcctgctttgtcactcggcgtgtatcaccacatgtccacaccctcgcacacactctggatgttgaagcgtagatatttggactggaccggactggcagctggaccggtgaaagactgaattagaaacgcttgcttcacttaaaagactgttcgtgcaattgaaccctagagcgtctccaatagttttttttcttctaaatttcgctctaaactatcatttagagtcatttgtataaaaaccactttttatatcttctcaatatccaatagcctttctataggttgtttgccctctagagagtcatttacattttctatatttggctagcgagaaacccggaatagaatatgactataattgatagccatttagataaattgttgaagggtattttttttaaaatctctatttatatagattaagaagaatatagagagccttttggagttgctcaagcttgtttgagagcaaagggattggagattagtcccttcatggcttattcggttattggtgaattgagtgggattggagtggattaaatcctctcctatacaaatttaaatatgaggagatttaatcctctcaatccatctcaaaccgaacatgcccttagggttgatttggtgaccagggaaattgagatttatggtggagaaattcacttgctagtcaattttgaataagaagggtattccttctccatgaaaccacttttatttccctggtcatcaaactagctctcaatctccaatcctcttgcttccaaatatgtcctaatagcttatttgggagcaagaataccggaggggttaaatccttttgctattcaaaatttagtccctcaaatccttttgctattcaagttaggaaatccaaatttccttcgaaattgaagtggaatgggtgggaaattagtttatttttctctcaatcctttataattttaagtgaattagagtttctaaactagccttaaaaacctgtcacgtcccaggaaaaaaatggtggcagttgactgcatagaagcggccctacagtctgctttgattggcgacacatgcttagactatccgcaaccgttccccctaaatttttctccctaaatgttactatgcagccacgtcagcaagattctctgccctatattcactcgtcccgcaaccgttccccctaaattttcccctatatatccctctactcattaaatatacatttccatataactaacataaccaactttattttgtatttattttatatgttttcatacgtccggcattgtgcgctcgttttataaaaatgaaaaaaatatttttatttgtttgttttcaataacggaaaatatgtaatacaacatttcagtttaaaattaatttcgtaatggaaaactttacttctcaatagtactccgtcataacaattttacaaatatttgtacgcaatatgatttaaccacgcttatggttcaatcatactcgttcagtcgtacacagcaagccatgcttgtcttcgaccgaaagccacgtttcacttatgttgtaagccaaggctggcttccgatgtaagccattgcttctccctgaagccaaatttctctcgtctatatatatgcaatgtttctcttcaaatatgtacttacatataccacttgttccacaagtaagccgttgctccaaatatctcccagtcgtagggaacatgattccgattcaagtgatagtgacgacgaaacacttctgcttgtcaatcttcttaccctcaacattgaggctagacgccttcatcgacgatggtccggattatctcgtcgcgtcattcgcagggatcattttgctggagaaaaccttatccaccatcactacttcgggcccaacccggtgtatccatcgcatgtgtttcgtagaaggtacgcacatcatgtaattctaataggttatgatatttccatagtatttaccacgatcctatgttattttctttaggtttcgcatgagtaggcctctgtttctccgcattttgcaaggacttcaacagtaggatacttactttacacaaagggttgacgcaacatgcatgccaggactcggtcccctacaaaaagtatgtgcggcaatgcgcatacttgcatatgggttaccttctgatgcggtagacgagtacgttcaaatcggggagtctacagctagggaaagtcttcatcatttttgtcgcgcaatcatagcatattttagtgcctggtatctacggactcctaatgaagctgacataacatgtatcatgcacagtagcgagtcaaggggttttcctggaatgttgagttccatagattgcatgcattgggagtggcagaactgtcctatatcctggcatggtcagttttgtggtagaaatggtagagcgtccatgatactagaggtggtagcaa

SEQ ID NO: 25493 - DNA, 4597 bp, Zea Mays
cgtaccagcggcggcggccgaacctccccttgaaaccctccgacgaccggatcgactccgctccgctcaaatggagccgctgcctatccctcatcctccagcaccgcctcctgctctcacgtccgccctcgcccacctacgctcccttctctccgccgcatcctctgccctcgccgctctaccctctcctctccaaccgcacccgatcactcccatcgcttgtatcccttcacctcagtctaccaccacaaaacctccactcccgccgccggtcaccgctatcaacctcccgctcccagctgccccagctccctactccgactgccctgccgtcgtccgtttaaggccttccccaacctccacggccatctccctccccgccttcctcgctgccgtatgcgcagatttctcctcttccactaccggcccgagcccctcccatccgccccgcatcctgccatcggagctaagcctcctgcgccgggagttggactcctgggctacgggaggccaccacctcccggggtcgtactcctacgctgtagcccgggtaggggcctcgttctgctcggatgtgatgccacggtgggaggccgagctgcggcagtgggtgcttgagaactcaccgaggagatggtgctgcaagtgtaggagggagtgatgctggagatgttgtggcaggccctgtttttctttctcaggttgctgcttccattgtggcattgcatgagaggttctacttggagaagaccaaggcgttgcaagctcaacgcccgtcaaaatatcagctattacttgagtattcacaagcactggaacgagggattttggagcgatcaaacagaccaaactacagggctgttctggagtatgatgggattctgtcacggcgagtagagaacaaggaatctgctagagccaagacaaaggaggaacttttagctgaagaacgtgattacaaacggagaagaacatcttaccgtggcaagaaagtgaatagaaaccctacagagatactaagagacataattgatgaacatatggaggaaatcagacaggcaggtggcattggttgtcttgtggaagctcctgctgatattgcttggaatgagctgaagggcaactctcacagcggtgcatatcatggaagttatgattttgcaagcagctcttctcatgataagacagctttggcttctcggtcatctaactgtgacaactcatgtgctgaatctttgggaagattttcatcaaggagcagtgacacaagagattcatacaataactcagggtgcgaaactcatagaaaccattaccagtatatatctgagaaggaaatgggtggaatatagggtcagaaggtgaagtagatcaaatttactcttacccgcaagagaattacacacccaatggctataagtttaagaaggatgtctcaaaccaccgtgatgaatcaaatgattgtacatggccaatacagtcacaaagatcccctgtgacagaatattctcacttgccaggagaagggtgctttgatagaagtagagctagtcagaactcagaagtgacataaatcattatctataactcaagattaattcagtgatagatatgatccccaaagcgcatattctgatggagatcatccgacaaccatgcttggtgatgctactaaaggaaagcatgagatataccatgatgaagtacattgacatgcacattatgaaaggaagcgtgattataatcactgcagggcaatacagattattgttgcttcatatccagtagctaaataataagggctctgtggtattagccttccgccgtatccttttacgtatccttattcagctttatgatgtccttgcattcggagttaatacctgttacagttggatctgttaggttaatttttttttcttgctataccaattcatttacaatgatccaggttcttgctgtgctgatattttagccatttcaccgttaatgttttggaaacactttcagctagcattcaagtttttttaaaaataatttattcttgatttttactcagtacgaactgacagaaatttcagcggtctgttcgcttcaatcgatcacattgagttcttttttctgcagttctactttttttatttgtgcaattttaccctcatgtgttggcctgctttgtcactcggcgtgtatcaccacatgtccacaccctcgcacacactctggatgttgaagcgtagatatttggactggaccggactggcagctggaccggtgaaagactgaattagaaacgcttgcttcacttaaaagactgttcgtgcaattgaaccctagagcgtctccaatagttttttttcttctaaatttcgctctaaactatcatttagagtcatttgtataaaaaccactttttatatcttctcaatatccaatagcctttctataggttgtttgccctctagagagtcatttacattttctatatttggctagcgagaaacccggaatagaatatgactataattgatagccatttagataaattgttgaagggtattttttttaaaatctctatttatatagattaagaagaatatagagagccttttggagttgctcaagcttgtttgagagcaaagggattggagattagtcccttcatggcttattcggttattggtgaattgagtgggattggagtggattaaatcctctcctatacaaatttaaatatgaggagatttaatcctctcaatccatctcaaaccgaacatgcccttagggttgatttggtgaccagggaaattgagatttatggtggagaaattcacttgctagtcaattttgaataagaagggtattccttctccatgaaaccacttttatttccctggtcatcaaactagctctcaatctccaatcctcttgcttccaaatatgtcctaatagcttatttgggagcaagaataccggaggggttaaatccttttgctattcaaaatttagtccctcaaatccttttgctattcaagttaggaaatccaaatttccttcgaaattgaagtggaatgggtgggaaattagtttatttttctctcaatcctttataattttaagtgaattagagtttctaaactagccttaaaaacctgtcacgtcccaggaaaaaaatggtggcagttgactgcatagaagcggccctacagtctgctttgattggcgacacatgcttagactatccgcaaccgttccccctaaatttttctccctaaatgttactatgcagccacgtcagcaagattctctgccctatattcactcgtcccgcaaccgttccccctaaattttcccctatatatccctctactcattaaatatacatttccatataactaacataaccaactttattttgtatttattttatatgttttcatacgtccggcattgtgcgctcgttttataaaaatgaaaaaaatatttttatttgtttgttttcaataacggaaaatatgtaatacaacatttcagtttaaaattaatttcgtaatggaaaactttacttctcaatagtactccgtcataacaattttacaaatatttgtacgcaatatgatttaaccacgcttatggttcaatcatactcgttcagtcgtacacagcaagccatgcttgtcttcgaccgaaagccacgtttcacttatgttgtaagccaaggctggcttccgatgtaagccattgcttctccctgaagccaaatttctctcgtctatatatatgcaatgtttctcttcaaatatgtacttacatataccacttgttccacaagtaagccgttgctccaaatatctcccagtcgtagggaacatgattccgattcaagtgatagtgacgacgaaacacttctgcttgtcaatcttcttaccctcaacattgaggctagacgccttcatcgacgatggtccggattatctcgtcgcgtcattcgcagggatcattttgctggagaaaaccttatccaccatcactacttcgggcccaacccggtgtatccatcgcatgtgtttcgtagaaggtacgcacatcatgtaattctaataggttatgatatttccatagtatttaccacgatcctatgttattttctttaggtttcgcatgagtaggcctctgtttctccgcattttgcaaggacttcaacagtaggatacttactttacacaaagggttgacgcaacatgcatgccaggactcggtcccctacaaaaagtatgtgcggcaatgcgcatacttgcatatgggttaccttctgatgcggtagacgagtacgttcaaatcggggagtctacagctagggaaagtcttcatcatttttgtcgcgcaatcatagcatattttagtgcctggtatctacggactcctaatgaagctgacataacatgtatcatgcacagtagcgagtcaaggggttttcctggaatgttgagttccatagattgcatgcattgggagtggcagaactgtcctatatcctggcatggtcagttttgtggtagaaatggtagagcgtccatgatactagaggtggtagcaa

SEQ ID NO: 25494 - DNA, 4864 bp, Zea Mays
cgaccccgtaccagcggcggcggccgaacctccccttgaaaccctccgacgaccggatcgactccgctccgctcaaatggagccgctgcctatccctcatcctccagcaccgcctcctgctctcacgtccgccctcgcccacctacgctcccttctctccgccgcatcctctgccctcgccgctctaccctctcctctccaaccgcacccgatcactcccatcgcttgtatcccttcacctcagtctaccaccacaaaacctccactcccgccgccggtcaccgctatcaacctcccgctcccagctgccccagctccctactccgactgccctgccgtcgtccgtttaaggccttccccaacctccacggccatctccctccccgccttcctcgctgccgtatgcgcagatttctcctcttccactaccggcccgagcccctcccatccgccccgcatcctgccatcggagctaagcctcctgcgccgggagttggactcctgggctacgggaggccaccacctcccggggtcgtactcctacgctgtagcccgggtaggggcctcgttctgctcggatgtgatgccacggtgggaggccgagctgcggcagtgggtgcttgagaactcaccgaggtacggggtcaaggtcaatgtcacggatgcggaccatatcttggtgctattatgtctcttgttgaaggcgatggcactggaggccaggtacttgctggaggggatgcagaatgtcgacaacgaggggctaggctttgatcccagggccatgaggtttgagtgccctaggctggtcgagggcgtctcgtggttaggcgcacagcttggggttctgtatggtgaaagcaatgggaaactatttatgcttgcatctgtgaaggaggctgtgctacagatggcatattgcttggctctctgtgcaggagatggtgctgcaagtgtaggagggagtgatgctggagatgttgtggcaggccctgtttttctttctcaggttgctgcttccattgtggcattgcatgagaggttctacttggagaagaccaaggcgttgcaagctcaacgcccgtcaaaatatcagctattacttgagtattcacaagcactggaacgagggattttggagcgatcaaacagaccaaactacagggctgttctggagtatgatgggattctgtcacggcgagtagagaacaaggaatctgctagagccaagacaaaggaggaacttttagctgaagaacgtgattacaaacggagaagaacatcttaccgtggcaagaaagtgaatagaaaccctacagagacaggcaggtggcattggttgtcttgtggaagctcctgctgatattgcttggaatgagctgaagggcaactctcacagcggtgcatatcatggaagttatgattttgcaagcagctcttctcatgataagacagctttggcttctcggtcatctaactgtgacaactcatgtgctgaatctttgggaagattttcatcaaggagcagtgacacaagagattcatacaataactcagggtgcgaaactcatagaaaccattaccagtatatatctgagaaggaaatgggtggaatatagggtcagaaggtgaagtagatcaaatttactcttacccgcaagagaattacacacccaatggctataagtttaagaaggatgtctcaaaccaccgtgatgaatcaaatgattgtacatggccaatacagtcacaaagatcccctgtgacagaatattctcacttgccaggagaagggtgctttgatagaagtagagctagtcagaactcagaagtgacataaatcattatctataactcaagattaattcagtgatagatatgatccccaaagcgcatattctgatggagatcatccgacaaccatgcttggtgatgctactaaaggaaagcatgagatataccatgatgaagtacattgacatgcacattatgaaaggaagcgtgattataatcactgcagggcaatacagattattgttgcttcatatccagtagctaaataataagggctctgtggtattagccttccgccgtatccttttacgtatccttattcagctttatgatgtccttgcattcggagttaatacctgttacagttggatctgttaggttaatttttttttcttgctataccaattcatttacaatgatccaggttcttgctgtgctgatattttagccatttcaccgttaatgttttggaaacactttcagctagcattcaagtttttttaaaaataatttattcttgatttttactcagtacgaactgacagaaatttcagcggtctgttcgcttcaatcgatcacattgagttcttttttctgcagttctactttttttatttgtgcaattttaccctcatgtgttggcctgctttgtcactcggcgtgtatcaccacatgtccacaccctcgcacacactctggatgttgaagcgtagatatttggactggaccggactggcagctggaccggtgaaagactgaattagaaacgcttgcttcacttaaaagactgttcgtgcaattgaaccctagagcgtctccaatagttttttttcttctaaatttcgctctaaactatcatttagagtcatttgtataaaaaccactttttatatcttctcaatatccaatagcctttctataggttgtttgccctctagagagtcatttacattttctatatttggctagcgagaaacccggaatagaatatgactataattgatagccatttagataaattgttgaagggtattttttttaaaatctctatttatatagattaagaagaatatagagagccttttggagttgctcaagcttgtttgagagcaaagggattggagattagtcccttcatggcttattcggttattggtgaattgagtgggattggagtggattaaatcctctcctatacaaatttaaatatgaggagatttaatcctctcaatccatctcaaaccgaacatgcccttagggttgatttggtgaccagggaaattgagatttatggtggagaaattcacttgctagtcaattttgaataagaagggtattccttctccatgaaaccacttttatttccctggtcatcaaactagctctcaatctccaatcctcttgcttccaaatatgtcctaatagcttatttgggagcaagaataccggaggggttaaatccttttgctattcaaaatttagtccctcaaatccttttgctattcaagttaggaaatccaaatttccttcgaaattgaagtggaatgggtgggaaattagtttatttttctctcaatcctttataattttaagtgaattagagtttctaaactagccttaaaaacctgtcacgtcccaggaaaaaaatggtggcagttgactgcatagaagcggccctacagtctgctttgattggcgacacatgcttagactatccgcaaccgttccccctaaatttttctccctaaatgttactatgcagccacgtcagcaagattctctgccctatattcactcgtcccgcaaccgttccccctaaattttcccctatatatccctctactcattaaatatacatttccatataactaacataaccaactttattttgtatttattttatatgttttcatacgtccggcattgtgcgctcgttttataaaaatgaaaaaaatatttttatttgtttgttttcaataacggaaaatatgtaatacaacatttcagtttaaaattaatttcgtaatggaaaactttacttctcaatagtactccgtcataacaattttacaaatatttgtacgcaatatgatttaaccacgcttatggttcaatcatactcgttcagtcgtacacagcaagccatgcttgtcttcgaccgaaagccacgtttcacttatgttgtaagccaaggctggcttccgatgtaagccattgcttctccctgaagccaaatttctctcgtctatatatatgcaatgtttctcttcaaatatgtacttacatataccacttgttccacaagtaagccgttgctccaaatatctcccagtcgtagggaacatgattccgattcaagtgatagtgacgacgaaacacttctgcttgtcaatcttcttaccctcaacattgaggctagacgccttcatcgacgatggtccggattatctcgtcgcgtcattcgcagggatcattttgctggagaaaaccttatccaccatcactacttcgggcccaacccggtgtatccatcgcatgtgtttcgtagaaggtacgcacatcatgtaattctaataggttatgatatttccatagtatttaccacgatcctatgttattttctttaggtttcgcatgagtaggcctctgtttctccgcattttgcaaggacttcaacagtaggatacttactttacacaaagggttgacgcaacatgcatgccaggactcggtcccctacaaaaagtatgtgcggcaatgcgcatacttgcatatgggttaccttctgatgcggtagacgagtacgttcaaatcggggagtctacagctagggaaagtcttcatcatttttgtcgcgcaatcatagcatattttagtgcctggtatctacggactcctaatgaagctgacataacatgtatcatgcacagtagcgagtcaaggggttttcctggaatgttgagttccatagattgcatgcattgggagtggcagaactgtcctatatcctggcatggtcagttttgtggtagaaatggtagagcgtccatgatactagaggtggtagcaa

SEQ ID NO: 25495 - DNA, 2947 bp, Zea Mays
aggcaataaaaaaagggccgcaggctcttctccgaccccgtaccagcggcggcggccgaacctccccttgaaaccctccgacgaccggatcgactccgctccgctcaaatggagccgctgcctatccctcatcctccagcaccgcctcctgctctcacgtccgccctcgcccacctacgctcccttctctccgccgcatcctctgccctcgccgctctaccctctcctctccaaccgcacccgatcactcccatcgcttgtatcccttcacctcagtctaccaccacaaaacctccactcccgccgccggtcaccgctatcaacctcccgctcccagctgccccagctccctactccgactgccctgccgtcgtccgtttaaggccttccccaacctccacggccatctccctccccgccttcctcgctgccgtatgcgcagatttctcctcttccactaccggcccgagcccctcccatccgccccgcatcctgccatcggagctaagcctcctgcgccgggagttggactcctgggctacgggaggccaccacctcccggggtcgtactcctacgctgtagcccgggtaggggcctcgttctgctcggatgtgatgccacggtgggaggccgagctgcggcagtgggtgcttgagaactcaccgaggtacggggtcaaggtcaatgtcacggatgcggaccatatcttggtgctattatgtctcttgttgaaggcgatggcactggaggccaggtacttgctggaggggatgcagaatgtcgacaacgaggggctaggctttgatcccagggccatgaggtttgagtgccctaggctggtcgagggcgtctcgtggttaggcgcacagcttggggttctgtatggtgaaagcaatgggaaactatttatgcttgcatctgtgaaggaggctgtgctacagatggcatattgcttggctctctgtgcaggagatggtgctgcaagtgtaggagggagtgatgctggagatgttgtggcaggccctgtttttctttctcaggttgctgcttccattgtggcattgcatgagaggttctacttggagaagaccaaggcgttgcaagctcaacgcccgtcaaaatatcagctattacttgagtattcacaagcactggaacgagggattttggagcgatcaaacagaccaaactacagggctgttctggagtatgatgggattctgtcacggcgagtagagaacaaggaatctgctagagccaagacaaaggaggaacttttagctgaagaacgtgattacaaacggagaagaacatcttaccgtggcaagaaagtgaatagaaaccctacagagatactaagagacataattgatgaacatatggaggaaatcagacaggcaggtggcattggttgtcttgtggaagctcctgctgatattgcttggaatgagctgaagggcaactctcacagcggtgcatatcatggaagttatgattttgcaagcagctcttctcatgataagacagctttggcttctcggtcatctaactgtgacaactcatgtgctgaatctttgggaagattttcatcaaggagcagtgacacaagagattcatacaataactcagggtgcgaaactcatagaaaccattaccagtatatatctgagaaggaaatgggtggaatatagggtcagaaggtgaagtagatcaaatttactcttacccgcaagagaattacacacccaatggctataagtttaagaaggatgtctcaaaccaccgtgatgaatcaaatgattgtacatggccaatacagtcacaaagatcccctgtgacagaatattctcacttgccaggagaagggtgctttgatagaagtagagctagtcagaactcagaagtgacataaatcattatctataactcaagattaattcagtgatagatatgatccccaaagcgcatattctgatggagatcatccgacaaccatgcttggtgatgctactaaaggaaagcatgagatataccatgatgaagtacattgacatgcacattatgaaaggaagcgtgattataatcactgcagggcaatacagattattgttgcttcatatccaggcatgtttgttaaattatgttgaggtttccagtttttatcacctgcttttactcagctatttgatgtcatcttgcagtagctaaataataagggctctgtggtattagccttccgcctgacgacgaaacacttctgcttgtcaatcttcttaccctcaacattgaggctagacgccttcatcgacgatggtccggattatctcgtcgcgtcattcgcagggatcattttgctggagaaaaccttatccaccatcactacttcgggcccaacccggtgtatccatcgcatgtgtttcgtagaaggtacgcacatcatgtaattctaataggttatgatatttccatagtatttaccacgatcctatgttattttctttaggtttcgcatgagtaggcctctgtttctccgcattttgcaaggacttcaacagtaggatacttactttacacaaagggttgacgcaacatgcatgccaggactcggtcccctacaaaaagtatgtgcggcaatgcgcatacttgcatatgggttaccttctgatgcggtagacgagtacgttcaaatcggggagtctacagctagggaaagtcttcatcatttttgtcgcgcaatcatagcatattttagtgcctggtatctacggactcctaatgaagctgacataacatgtatcatgcacagtagcgagtcaaggggttttcctggaatgttgagttccatagattgcatgcattgggagtggcagaactgtcctatatcctggcatggtcagttttgtggtagaaatggtagagcgtccatgatactagaggtggtagcaa

SEQ ID NO: 25496 - DNA, 1546 bp, Zea Mays
ccgttatgcgcatagactctgtttatggatctatcttgctgtttctaaaatccgtttattctagctctgcaacttgattgtgtatgcgagtcctgttgatgcgctcaagtttcttaaggatcaccaaagagatactgattttgcgttagtggaagtcaacatgaaagagatgcatggttttcagttccttgacatgtccaggaagttgcacaaaagccttcaagtgatcatgatgtcagctgatacgacatggcccacgatgaagagaagtgtcgagcttggtgcacgtttcttgattaaaaagcctcttgatgcaaatacgatgaataacctgtggcagcatcttgacctaaaatttcaacggaccgacaagatcaaggccttattcccaggttggagctactgtgacatgttttctttttccttttgaaaaacgcggtggcacttgttgaactccgtagacaacagcaaaaggtgtacatcgacttcagttaccgtttgaatcaaatgttttttttgtcaaatcaccattagtattgtagtccaaaaaaaacgcatattactcgctaccttgcatgtgaatacatataggtattgaagggaaaacggggaatgcatttgaggaagggaccaacaagcagaagggaactcacctgatgtggactccattcctgcagaggaagtttttgcaagctgttgaactacttggggaagacgcatctccgaagaagatacagttgctcatgaatgtgaactccgttagtcgcaaacagatctctgctcatcttcagaaacaccgaaagaaggtcgagaaagaactacgtaattcaaatgcaaacaactccagccatggcattggcggcgcctcgaattcacggccttcgaggatttttgaaataagccatggcagattccagtacaatcgtcccgacgtccaaccagaacatagatctgatgaatccgtatccgtggagcagacagaaaccatcgaggaaacacaaagcaacaggttgtatgaagcgatgcgaagagccttgcagcttgggagtgttttcgaggaaccacagttgcccaatgatcctcctgctggtaaagatgcaagagaagttgaagaagtcgaaatgacgatgagggatggtaattatcgagatgctggcacagatgcatttggtgataagaatgaggcatctggaactcacagttcagatggtaataacgcgaaggtcaagagcaaggatgattctgctgacaagctggtttcttgtcacgatgagctgcgaccagttgtgacgcttgtgacctattcagactcggaagatggtgaaacgctctaggttaactgagcaacggattgcgtaggtggaggtacttgtaaactgccagcagaaatgatgccagcatgaatggatgcccatgaatagacagtttttgtatcttcttaataactaagttcagtacatcaagcgtatacaaagtcttgcctaacttttggcttctattgaagacacaaacccacttcaaggaaaagaaaagaaaaacaccaaac

SEQ ID NO: 25497 - DNA, 682 bp, Zea Mays
actcaatcatccctcgcataataagcatctaaacataagctttatataactaatagcaacgaatttagagtcaatcacacatcacacctatcgatgggcaagataatcatcgaccacattctaatcaatctaccaatcaaaataacaaatagggatagcgaagtagcttaccaaaactaaatctgtcttaaagccacgagatcgacgacgctatccggtccatgcataacaccgaacacctgacaagtggtgcacgtcgtcgcttccctttggtcttccggtgcgaacgcaaggtgcgacaaagctgctgaaacgacgatgatgctggcgatgcggacgttgatgcctcggatgtggacacgaccgccacaccccgcatgaggacaaacgaagctagagcgacaacggcgcagtgaattcgacgctaagcaccggagctcgacgatgtcacgacgcagcaggaaatagtgacgccacgatggccagggaggcaaggtccgagcataggggcgagctcggggcggccgacgatgtaagctctgggaggtgcgatggcgcgacagccagggccatagcgtgcgcgaccatcgaaaagacagggagccatggagctgctgaagcttatgcagccagcggctttcagaaaaatcagagtgacgatggagataaggccaagcgatag

SEQ ID NO: 25498 - DNA, 297 bp, Zea Mays
accagttttccaaggaaaggaatgcatcaattgtttagcacacaactcctatcacctaatgcattagacaaggtgataaagttttttaaaacaacaaggaaatggataatgcacctgggcttgcctgacataacacttggttagtgtttgttagacgacgatcacttgacgaccatcctttgtcttggcactcgttcaggcgatccatccttaagtttattcattagcatcaccttgcgaagaagcccgcgcttaacagcatattgtggtcgactcagctctggtcctccacatcac

SEQ ID NO: 25499 - DNA, 2072 bp, Zea Mays
attcagattacattatacatgatcgaagtgattataaagtaaatccaaagtatttcactttgaatgatgtatacctttcataagtttgaaatacatgctaccttaagtgaccatccttaataagaagtatagaagagctacttaaacctataagaaggtcgtgcccaccgtctcttagcaccatccacagcagcacaaatatagtacctgcaacaacatgggttcgaaaaccctgagtacgaagtgtacttttgccagtcttacccgcctaaggaaaaagactctcaaggatatgctggcttttggaatcaagttaaagcttatcaagattcaaagactctttttgcagaaaagcttactatgagtggatccttaagaattcattttacttgtcaagttaagtagttacttgcatctagatttctttctattcgagatcaagcacttggcctatactagccatcctttatcatctcttcagttcacttgtcgttatgtgtagagctgtcacacccggttttggaaggtaaaccgaatgcaaaccatgtacgtgccaggatcagaactcacgtacacagtgattacataattggacatcatcacacaatgctcgaattaaataacgaaaaggtacttaattacatccagatgtctgagacatccatagagtctattacataaccattgtctttagcataaatatcaaagtgtggagaaacaaaacgtagatgataagcctacacaggcagctgactgggggtttgccactaagataaactaaaactcgtcgtattcctggaactcctcgaagtcctccatgttgccagcatcacctcctaagcactgagtacaatggggacaacctggggtgggggtgatgtgtaaagcaagggtgagtacacatcaacgtactcagcaaatgtcccatttggctaaagtggactagctgtatgtggggttgaggttaagtagttgcttttagttggtcaagtatttattattgttagtagagccaagttttagtaataaacccagttattacccaaaagtactccctcaaaagtggaaataccagagatcatatttgtaacaccattgctaaccatcatcataaaagtatccaaagttcttctaatcaaagtggatcccaaggctgctcttaactgtgagctcggctgatataccagtttctaacactgcagaggttgcacactttacccacgagtcgtgatccctttctagcctgggttgtacagacctgatcttcactaccaaggtgaatggccagggatacactatgtagcctttacagagactcccatggtgcatagctgctcgttaggttttgccagtcgtacaaacgctgtacacctccccaaggtgggtgactaacaaaactaaatcgaatgaacctctgcaccccaaccttggcagagcgagcactacaccctggcccccattgacggccctccggcaaagccaactacacccccaggttcatctaattaatcagctaagggtgtcccattccaccctcatggttgcactgttatcctaggtggtcactcgacgaacaggaccttacggagaggtactcaggaaaaaggcctgagcctcctagagtatcaaaagatcatcaacataatcaggataacaatattgtttcataaatgttcacatcatgttcattggttaaagttgaggcaatagcaaaatgctaaccatgataacccaaaaaggtaaacaaggataaggtaactacaagctagtcaataatgtaatgcgggacaatgaatcataaggtatgtaggacataataggttagaggacacttgccttcaccaggttgttgctcgggaaggtctccaacaacacacttaggaacctcggactgctcgttgtctaaataaagcgaacatgcactcaatacatttggaaagtacaaatgaacaacacaccaaacatgtacaaacataggaatacatcttaaaaagacacaatactacataagggataacgagatcaaagtataacataaacataaactaacttcatttggaaatagattatta

SEQ ID NO: 25500 - DNA, 923 bp, Zea Mays
atctcttttccgttcgccaattcgaaatcgaatccgttccccaattcgaaatcgaatggggtcggtcttgtcgtgcgtgcgtggctgcgcgagcgacttgactgcacccgacccccctcctctcagtgcccacacactgcgcgccgccgccgggtcctcctagtgtttcgccgcgatgtcgctccggccgagcgagcgggagcagatgcgaaagggcaactacaagcagacggtggacgcggaggagagccgccaccgccgcgagggccagatgatggacatgcgcaaggccaagtgcgaggaaagtctccagaagaagcgccgcgatgggtttcccgcctccgccgccggtatgccgccgatggtccactccaccgcgctccagcagaagtccccccaatcgaagaggtgatcagcacaggagtggtgccgcgattcattgagtttcttacacgtgaggaccatccccaactccagtttgaggctgcatgggcactcaccaacattgcatcaggcacatcagagaacactaaggtggtcgttgagagtggtgctgtgcccatctttgtcaagctactcaactccctcaagcgaggatgttcgtgaataggcatgcactaaattacaagagatgtgtcttattatgacccggggcagatccagaatttttctatgacccaagccaaatctaccaaattttcttctttttattttatcttaactattttgtaccatattaaatagagacttatatagagttacatggatcaagccctgggccacagatcgggtggcctggggtgtagatccgccactgattatgactatggatgagacttttgtgatgtaattgatgagactatagatttaaatattgttatgtgattgtgtgtgagatgttttatgtgaaaatatgttgtgct

SEQ ID NO: 25501 - DNA, 963 bp, Zea Mays
atctcttttccgttcgccaattcgaaatcgaatccgttccccaattcgaaatcgaatggggtcggtcttgtcgtgcgtgcgtggctgcgcgagcgacttgactgcacccgacccccctcctctcagtgcccacacactgcgcgccgccgccgggtcctcctagtgtttcgccgcgatgtcgctccggccgagcgagcgggagcagatgcgaaagggcaactacaagcagacggtggacgcggaggagagccgccaccgccgcgagggccagatgatggacatgcgcaaggccaagtgcgaggaaagtctccagaagaagcgccgcgatgggtttcccgcctccgccgccggtatgccgccgatggtccactccaccgcgctccagcagaagcttgaggccaccacacagttcaggaagctgctttctatagtccccccaatcgaagaggtgatcagcacaggagtggtgccgcgattcattgagtttcttacacgtgaggaccatccccaactccagtttgaggctgcatgggcactcaccaacattgcatcaggcacatcagagaacactaaggtggtcgttgagagtggtgctgtgcccatctttgtcaagctactcaactccctcaagcgaggatgttcgtgaataggcatgcactaaattacaagagatgtgtcttattatgacccggggcagatccagaatttttctatgacccaagccaaatctaccaaattttcttctttttattttatcttaactattttgtaccatattaaatagagacttatatagagttacatggatcaagccctgggccacagatcgggtggcctggggtgtagatccgccactgattatgactatggatgagacttttgtgatgtaattgatgagactatagatttaaatattgttatgtgattgtgtgtgagatgttttatgtgaaaatatgttgtgct

SEQ ID NO: 25502 - DNA, 1171 bp, Zea Mays
atcaacaagaaacatgtttgtaaaattaccatcagacccacatttcatagacccaactggacccataattcatagacacagtggtaattataacaagaagacaacatcgtaagtgacaaaaatctaattgtctcatctcttttccgttcgccaattcgaaatcgaatccgttccccaattcgaaatcgaatggggtcggtcttgtcgtgcgtgcgtggctgcgcgagcgacttgactgcacccgacccccctcctctcagtgcccacacactgcgcgccgccgccgggtcctcctagtgtttcgccgcgatgtcgctccggccgagcgagcgggagcagatgcgaaagggcaactacaagcagacggtggacgcggaggagagccgccaccgccgcgagggccagatgatggacatgcgcaaggccaagtgcgaggaaagtctccagaagaagcgccgcgatgggtttcccgcctccgccgccgggtatgggtgacgtggtggcactccatttgctgggttcggatctgactttcttggtgacgggatggctttccggcgatggcgcatgctgtccactccaacgacccctccgtgcagcttgaggccaccacacagttcaggaagctgctttctatagtccccccaatcgaagaggtgatcagcacaggagtggtgccgcgattcattgagtttcttacacgtgaggaccatccccaactccagtttgaggctgcatgggcactcaccaacattgcatcaggcacatcagagaacactaaggtggtcgttgagagtggtgctgtgcccatctttgtcaagctactcaactccctcaagcgaggatgttcgtgaataggcatgcactaaattacaagagatgtgtcttattatgacccggggcagatccagaatttttctatgacccaagccaaatctaccaaattttcttctttttattttatcttaactattttgtaccatattaaatagagacttatatagagttacatggatcaagccctgggccacagatcgggtggcctggggtgtagatccgccactgattatgactatggatgagacttttgtgatgtaattgatgagactatagatttaaatattgttatgtgattgtgtgtgagatgttttatgtgaaaatatgttgtgct

SEQ ID NO: 25503 - DNA, 3009 bp, Zea Mays
taagtatcccgttgatatttcagagacatacaagagggttaaagcaatagttacagtggcagttgaaccaaaatttgcagctaataggataacacataagaaaataaatattatagagcaaacttaaaactacactaaggtagtaaatcagatatggcagaactagattaagatttcataagataacaataatattgaaggatatgatggcctcctcaccttcccctccttcccccctccccttcccagcgccaccccccccccccacccatcgccggcagccatctctgcgccagctacaacccctcccaccaaccccatgtcgttccttactccaaagccaacgtccacctcaaaggcatcgggacaagttcttctggaccgccccacctgctctcttggtcgaagcatggccctccagtggagagattcttatgtcatcctgctcttgtgcgggagaggatctgccattgttcagcccctcattcaaggacgttcttctggcgggtacagcctcggccattgcatcgatgaactccggcggctctgcccgcctggatgtcccaatcgtgaccttgcatgcctctgctcagaagattaggccgtcgaaggtcttggcgagccttggcgacgcgactcacaagagtcctgtatcaagacgtgtgcgccagagatctcttccgcttccgctggtgcttcctaagcgttaggggagcctcatcgaccgtgacggcttcactcaggtggagggacgacgtgcgaggaagtagaggcgacaccttgatcaacgtctcgccaagctaattccggagtgctttaaaggtcgttgtttcaactgtctctccactgatcatcgccccgccctctgcaaattcaatgtctgttgcctcagtgcctcatctacaatgcgactgggcactgctctccttcctgcccacgctctcgtctagctcggcaacgagctgccccgctccgtcctggtatggccagacggtcacgtcctgctaatccccttgtgccgccttccgacagggggcctgatcgggaagtggcgtgcttgctcctcttctgcggctgtggatatgaaggttgctgaggcaccagtgggagtcttggtggaccaaggatttctaaacgaatcatcaattggtcttctaagttcatccagaatgcagaggatctcgagcaagctctggtgatcaatgtcatgatgggtaatcctgttgatgcggaggccccaatcctgtcatgttttgcccggcgcttggacattgaagttgttaccatgtcgttgcgacgcctgggacctactaccgtcctcctctgcttgcccagtgtggaggcgtcgactcgcgcctttggcgacggcaagccggttccctttctgcatgagctagctgatatggtttgtgcgggcatctctaggacctcttttgctggtgtcccccatgatgatgcaactctgccagtgcaaacttctcagttagatgatccttcggttgtttctcccaccttggagtcctttgaagttgaactatctcctctcactacagatgatctgcctttgactccatcacccagtgatgttgagaatttgtgccagttcagctgtgtggaaaacgaagttgacaaagattttttgcctaagtccacacacttacaaacgctaccagtggggattcctgagcccacacacccggacctaatagtgtacacaagacgaagatttcacaagaaaaaggcaattgggggaaacgaagatggagggattgttcctgataccgctcttgcgacagtggaagcttcaggagggcacagcttgaaggtcattgatggttgtacagacatggttgacatacatcatcaggctaaaactattaacatcgctcaggaagatcttgaaacatcccagagatcagatgcaacctccttagctactgcccaaactgagtttttctccaagctcgctaagaaggtagctggcattctctctaatcctgcagaactctccacgcaaaggtgtaagcaggctcctgctgccacccctcatcacagtcgtcgcaatgcaagagttggggtggaatttgacaagcaagaactctatctacggtccacaaagatggccatgaaggctctgaaagtaattggtgaagccgaaggagtgactcagcaagcaaaagaagattatacggaagtgtttagtgaaaaccttcctatggctcatgttgaggcactggctaccttgtttggttggacagtgccggaggaactgaaaatggggctgagtagtgcagttgtttcagcttgctaagtactacctccattctcaaatatttgttgcttgctagttcatggctggagctggcccctcttaagtcacagctccatcgcttgctaggtgctgctggcattgcccctactgccgctgctccaccagcccaaactgagacctgactggagacatcattcctgttgcagtgccaatgctgcatcctgtagcaccaggtggctggcaactccattcagacgactgcctgcctctgctgctccatgttgtacatcaggccacgacggtggctggtggcaagaaggcagaagcaacggcggccgaaaggaaagcagccgcgacagcggctggaaactggctgtaatgaaggccaaaagagaagggtgagattaggattctctaaccctaacctgcagataccatgttactaaccttgggatcaaggtcttagtgccctgtccatagggattgcagtatatatactgccttagcaataggatgggactaatgggtcttaacatactccaagtacaaaacatactccaagtgcaaaattgtattaaatttagttttgaagcagactggctgactggcaacaaaagtatagtattgcaagaaatagtacttagtacaagtgtccttttctcaaactgcttctcgaacgcatagtttgtgacaaaaaaataccactaaaatgtagttttgaaaaaaaaatgatttat

SEQ ID NO: 25504 - DNA, 1387 bp, Zea Mays
cacatttccacttattgcagcaactcatgctgcaaggataggagtgcaatgtaacagaaataaggctgtaccattaagtgcacgaaaagctagtggtgctaactcggaaggaatagcgcctttcttgcagctgccacatttcacagaagcaaccgtgaaaaagattgctcgcaagaaaatccgtgcattccaagaactttgtgacatgcctgtggaagatcgtgctgcattgctcacacaagttgctgggctttctgaagaacaagctcgggatgtagagtttgtactggagatgattccttctattgaagtagacatgaaatgtgagactgaaggtgaagagggcattcaagagggtgatgtcgtgaccatgtatgcttgggtctcgctacaacggcgcaatggactgactgctgctcttcctcattgtcccaacttcctgttccacaaggaagaaaacttctggctgcttctagccaacgtggcatctaatgatgtctggttgtcacagaaagtcagcttcatggatgaggccacggccataactgcagcatcaaaagctatacaagagacccaggaagcactaggtgcaagtgcaaaggaaataggaaatgcagttagggaggcagttgacagggtgaagaaaggcagtaggctggtaatgggcaagttccaagccccagcagagggtactcacaacctcacctcttttgtttgtgcgacgcttggataggctgtgacacgaagaccagcttcaagctcaaggtcctgaagcgcagccgtgctggaacaagaggccatgtgcctgaagaagggccagtggctgctgcagaggatggtattgaggaggaagaggaggaagaggaagaggagtatgatgactatgagagcgagtacagtgatgacgaggaggacgcgaagaacaagggggaagggaaggggaaggttgtgaacggatcggcccatcaaggggctgaatctgatattgattcaggcagcgatgagtaattctatactgtgttatgttgagaaaggaacgtagaggttgacaccatctgtttttttttttaaaattgaacgtatcccctccattttatagatggtcatagttactcagttttgtttactaataagttgagattgattggttacaaaagagccgagcaaaactagcttactatctcgagttgacctgaagactgcatggtcattctccaaagtgcaagcgtttcacccatgcctatcacctgtgtggtgtatgttcctcacatttattccgaatggcactgctgatttcttaaatttctggatcacctaattattattgttagacccatcatccaaaatattgttttacactgtagactacatagtttgtagaatggag

SEQ ID NO: 25505 - DNA, 1406 bp, Zea Mays
ttgttttaccaaggaatccccatggttttggatggctccggcctgcactcagtgttattgagctttctcaaaatattatccaggctgtaccattaagtgcacgaaaagctagtggtgctaactcggaaggaatagcgcctttcttgcagctgccacatttcacagaagcaaccgtgaaaaagattgctcgcaagaaaatccgtgcattccaagaactttgtgacatgcctgtggaagatcgtgctgcattgctcacacaagttgctgggctttctgaagaacaagctcgggatgtagagtttgtactggagatgattccttctattgaagtagacatgaaatgtgagactgaaggtgaagagggcattcaagagggtgatgtcgtgaccatgtatgcttgggtctcgctacaacggcgcaatggactgactgctgctcttcctcattgtcccaacttcctgttccacaaggaagaaaacttctggctgcttctagccaacgtggcatctaatgatgtctggttgtcacagaaagtcagcttcatggatgaggccacggccataactgcagcatcaaaagctatacaagagacccaggaagcactaggtgcaagtgcaaaggaaataggaaatgcagttagggaggcagttgacagggtgaagaaaggcagtaggctggtaatgggcaagttccaagccccagcagagggtactcacaacctcacctcttttgtttgtgcgacgcttggataggctgtgacacgaagaccagcttcaagctcaaggtcctgaagcgcagccgtgctggaacaagaggccatgtgcctgaagaagggccagtggctgctgcagaggatggtattgaggaggaagaggaggaagaggaagaggagtatgatgactatgagagcgagtacagtgatgacgaggaggacgcgaagaacaagggggaagggaaggggaaggttgtgaacggatcggcccatcaaggggctgaatctgatattgattcaggcagcgatgagtaattctatactgtgttatgttgagaaaggaacgtagaggttgacaccatctgtttttttttttaaaattgaacgtatcccctccattttatagatggtcatagttactcagttttgtttactaataagttgagattgattggttacaaaagagccgagcaaaactagcttactatctcgagttgacctgaagactgcatggtcattctccaaagtgcaagcgtttcacccatgcctatcacctgtgtggtgtatgttcctcacatttattccgaatggcactgctgatttcttaaatttctggatcacctaattattattgttagacccatcatccaaaatattgttttacactgtagactacatagtttgtagaatggag

SEQ ID NO: 25506 - DNA, 2655 bp, Zea Mays
ctaccgcctacaggctacagcccaccgcggcaccgctgaagacaccccaaaacctatcccaatcggccgcgcctccgtccgtggctccgcctgccggcgacccctcagatccgcgcgccccgtaccacctcccgccgcctcactgccagatccggccctggctccgcaaaatcctgcgacatcgcagacgagccgggcgggagagcggaggtaggtcacagcagccatggcggccgcagaggagaacagctcgctgttcctgatttttatactcaccatgatcgcgctgcccctcgtgccctacacgatcctgcgcttgtgtcgcgctgcctccgagaaggcgaagaccatccactgccgctgctcgggttgccaccgctccggcaagtaccgcaagtcgatctacaagaggatatccaacttctccacgtgcagtaacctaaccatccttctgctctggattgttatgatattcctggtttactacataaagcttgttagccgtgaggtccaagtttttgagcctttcagtattcttggactggaagctggggcatctgaatctgatatcaagaaatcatataggagactttctattcagtaccatcctgataaaaatcctgatccagaggctcataaatacttcattgaatatatatccaaggcatatcaagcattaactgatcctatatctcgtgagaattatgagaaatatggtcaccctgatgggcggcaggggctgcaaatgggcattgctttgcccaagtttttactaaatattgatggtgcatctggtgggataatgcttcttggaatagtcggattttgtatattattgcctttgatgatagctgttatttatttgtcaagatcatcaaaatatactggaaactatgtcatgcatcaaactttgtccacttactactactttatgaagccatctcttgctccaagcaaagttatagatgtcttcatcaaggctgcagaatatatggagatgccagttcgacgcagtgatgatgaacccctgcaaaaattgtttgtagctgttagaagcgagttaaatctggacttaaagaacattaagacagaacaagcaaagttctggaagcagcatccatcactagtaaagatggaactgctgattcaggcgcatctcacttgtgagtcattcgctttgacgccagcacttcttaaagattacagacacatgcttgaacttgcacctcgtcttctggaagaactcgttaagttttaccaaggaatccccatggttttggatggctccggcctgcactcagtgttattgagctttctcaaaatattatccaggctgtaccattaagtgcacgaaaagctagtggtgctaactcggaaggaatagcgcctttcttgcagctgccacatttcacagaagcaaccgtgaaaaagattgctcgcaagaaaatccgtgcattccaagaactttgtgacatgcctgtggaagatcgtgctgcattgctcacacaagttgctgggctttctgaagaacaagctcgggatgtagagtttgtactggagatgattccttctattgaagtagacatgaaatgtgagactgaaggtgaagagggcattcaagagggtgatgtcgtgaccatgtatgcttgggtctcgctacaacggcgcaatggactgactgctgctcttcctcattgtcccaacttcctgttccacaaggaagaaaacttctggctgcttctagccaacgtggcatctaatgatgtctggttgtcacagaaagtcagcttcatggatgaggccacggccataactgcagcatcaaaagctatacaagagacccaggaagcactaggtgcaagtgcaaaggaaataggaaatgcagttagggaggcagttgacagggtgaagaaaggcagtaggctggtaatgggcaagttccaagccccagcagagggtactcacaacctcacctcttttgtttgtgcgacgcttggataggctgtgacacgaagaccagcttcaagctcaaggtcctgaagcgcagccgtgctggaacaagaggccatgtgcctgaagaagggccagtggctgctgcagaggatggtattgaggaggaagaggaggaagaggaagaggagtatgatgactatgagagcgagtacagtgatgacgaggaggacgcgaagaacaagggggaagggaaggggaaggttgtgaacggatcggcccatcaaggggctgaatctgatattgattcaggcagcgatgagtaattctatactgtgttatgttgagaaaggaacgtagaggttgacaccatctgtttttttttttaaaattgaacgtatcccctccattttatagatggtcatagttactcagttttgtttactaataagttgagattgattggttacaaaagagccgagcaaaactagcttactatctcgagttgacctgaagactgcatggtcattctccaaagtgcaagcgtttcacccatgcctatcacctgtgtggtgtatgttcctcacatttattccgaatggcactgctgatttcttaaatttctggatcacctaattattattgttagacccatcatccaaaatattgttttacactgtagactacatagtttgtagaatggag

SEQ ID NO: 25507 - DNA, 2384 bp, Zea Mays
ctaccgcctacaggctacagcccaccgcggcaccgctgaagacaccccaaaacctatcccaatcggccgcgcctccgtccgtggctccgcctgccggcgacccctcagatccgcgcgccccgtaccacctcccgccgcctcactgccagatccggccctggctccgcaaaatcctgcgacatcgcagacgagccgggcgggagagcggagatatccaacttctccacgtgcagtaacctaaccatccttctgctctggattgttatgatattcctggtttactacataaagcttgttagccgtgaggtccaagtttttgagcctttcagtattcttggactggaagctggggcatctgaatctgatatcaagaaatcatataggagactttctattcagtaccatcctgataaaaatcctgatccagaggctcataaatacttcattgaatatatatccaaggcatatcaagcattaactgatcctatatctcgtgagaattatgagaaatatggtcaccctgatgggcggcaggggctgcaaatgggcattgctttgcccaagtttttactaaatattgatggtgcatctgatcatcaaaatatactggaaactatgtcatgcatcaaactttgtccacttactactactttatgaagccatctcttgctccaagcaaagttatagatgtcttcatcaaggctgcagaatatatggagatgccagttcgacgcagtgatgatgaacccctgcaaaaattgtttgtagctgttagaagcgagttaaatctggacttaaagaacattaagacagaacaagcaaagttctggaagcagcatccatcactagtaaagatggaactgctgattcaggcgcatctcacttgtgagtcattcgctttgacgccagcacttcttaaagattacagacacatgcttgaacttgcacctcgtcttctggaagaactcgttaagattgcagttttaccaaggaatccccatggttttggatggctccggcctgcactcagtgttattgagctttctcaaaatattatccaggctgtaccattaagtgcacgaaaagctagtggtgctaactcggaaggaatagcgcctttcttgcagctgccacatttcacagaagcaaccgtgaaaaagattgctcgcaagaaaatccgtgcattccaagaactttgtgacatgcctgtggaagatcgtgctgcattgctcacacaagttgctgggctttctgaagaacaagctcgggatgtagagtttgtactggagatgattccttctattgaagtagacatgaaatgtgagactgaaggtgaagagggcattcaagagggtgatgtcgtgaccatgtatgcttgggtctcgctacaacggcgcaatggactgactgctgctcttcctcattgtcccaacttcctgttccacaaggaagaaaacttctggctgcttctagccaacgtggcatctaatgatgtctggttgtcacagaaagtcagcttcatggatgaggccacggccataactgcagcatcaaaagctatacaagagacccaggaagcactaggtgcaagtgcaaaggaaataggaaatgcagttagggaggcagttgacagggtgaagaaaggcagtaggctggtaatgggcaagttccaagccccagcagagggtactcacaacctcacctcttttgtttgtgcgacgcttggataggctgtgacacgaagaccagcttcaagctcaaggtcctgaagcgcagccgtgctggaacaagaggccatgtgcctgaagaagggccagtggctgctgcagaggatggtattgaggaggaagaggaggaagaggaagaggagtatgatgactatgagagcgagtacagtgatgacgaggaggacgcgaagaacaagggggaagggaaggggaaggttgtgaacggatcggcccatcaaggggctgaatctgatattgattcaggcagcgatgagtaattctatactgtgttatgttgagaaaggaacgtagaggttgacaccatctgtttttttttttaaaattgaacgtatcccctccattttatagatggtcatagttactcagttttgtttactaataagttgagattgattggttacaaaagagccgagcaaaactagcttactatctcgagttgacctgaagactgcatggtcattctccaaagtgcaagcgtttcacccatgcctatcacctgtgtggtgtatgttcctcacatttattccgaatggcactgctgatttcttaaatttctggatcacctaattattattgttagacccatcatccaaaatattgttttacactgtagactacatagtttgtagaatggag

SEQ ID NO: 25508 - DNA, 2661 bp, Zea Mays
ctaccgcctacaggctacagcccaccgcggcaccgctgaagacaccccaaaacctatcccaatcggccgcgcctccgtccgtggctccgcctgccggcgacccctcagatccgcgcgccccgtaccacctcccgccgcctcactgccagatccggccctggctccgcaaaatcctgcgacatcgcagacgagccgggcgggagagcggaggtaggtcacagcagccatggcggccgcagaggagaacagctcgctgttcctgatttttatactcaccatgatcgcgctgcccctcgtgccctacacgatcctgcgcttgtgtcgcgctgcctccgagaaggcgaagaccatccactgccgctgctcgggttgccaccgctccggcaagtaccgcaagtcgatctacaagaggatatccaacttctccacgtgcagtaacctaaccatccttctgctctggattgttatgatattcctggtttactacataaagcttgttagccgtgaggtccaagtttttgagcctttcagtattcttggactggaagctggggcatctgaatctgatatcaagaaatcatataggagactttctattcagtaccatcctgataaaaatcctgatccagaggctcataaatacttcattgaatatatatccaaggcatatcaagcattaactgatcctatatctcgtgagaattatgagaaatatggtcaccctgatgggcggcaggggctgcaaatgggcattgctttgcccaagtttttactaaatattgatggtgcatctggtgggataatgcttcttggaatagtcggattttgtatattattgcctttgatgatagctgttatttatttgtcaagatcatcaaaatatactggaaactatgtcatgcatcaaactttgtccacttactactactttatgaagccatctcttgctccaagcaaagttatagatgtcttcatcaaggctgcagaatatatggagatgccagttcgacgcagtgatgatgaacccctgcaaaaattgtttgtagctgttagaagcgagttaaatctggacttaaagaacattaagacagaacaagcaaagttctggaagcagcatccatcactagtaaagatggaactgctgattcaggcgcatctcacttgtgagtcattcgctttgacgccagcacttcttaaagattacagacacatgcttgaacttgcacctcgtcttctggaagaactcgttaaggtacttttttaccaaggaatccccatggttttggatggctccggcctgcactcagtgttattgagctttctcaaaatattatccaggctgtaccattaagtgcacgaaaagctagtggtgctaactcggaaggaatagcgcctttcttgcagctgccacatttcacagaagcaaccgtgaaaaagattgctcgcaagaaaatccgtgcattccaagaactttgtgacatgcctgtggaagatcgtgctgcattgctcacacaagttgctgggctttctgaagaacaagctcgggatgtagagtttgtactggagatgattccttctattgaagtagacatgaaatgtgagactgaaggtgaagagggcattcaagagggtgatgtcgtgaccatgtatgcttgggtctcgctacaacggcgcaatggactgactgctgctcttcctcattgtcccaacttcctgttccacaaggaagaaaacttctggctgcttctagccaacgtggcatctaatgatgtctggttgtcacagaaagtcagcttcatggatgaggccacggccataactgcagcatcaaaagctatacaagagacccaggaagcactaggtgcaagtgcaaaggaaataggaaatgcagttagggaggcagttgacagggtgaagaaaggcagtaggctggtaatgggcaagttccaagccccagcagagggtactcacaacctcacctcttttgtttgtgcgacgcttggataggctgtgacacgaagaccagcttcaagctcaaggtcctgaagcgcagccgtgctggaacaagaggccatgtgcctgaagaagggccagtggctgctgcagaggatggtattgaggaggaagaggaggaagaggaagaggagtatgatgactatgagagcgagtacagtgatgacgaggaggacgcgaagaacaagggggaagggaaggggaaggttgtgaacggatcggcccatcaaggggctgaatctgatattgattcaggcagcgatgagtaattctatactgtgttatgttgagaaaggaacgtagaggttgacaccatctgtttttttttttaaaattgaacgtatcccctccattttatagatggtcatagttactcagttttgtttactaataagttgagattgattggttacaaaagagccgagcaaaactagcttactatctcgagttgacctgaagactgcatggtcattctccaaagtgcaagcgtttcacccatgcctatcacctgtgtggtgtatgttcctcacatttattccgaatggcactgctgatttcttaaatttctggatcacctaattattattgttagacccatcatccaaaatattgttttacactgtagactacatagtttgtagaatggag

SEQ ID NO: 25509 - DNA, 2532 bp, Zea Mays
ctaccgcctacaggctacagcccaccgcggcaccgctgaagacaccccaaaacctatcccaatcggccgcgcctccgtccgtggctccgcctgccggcgacccctcagatccgcgcgccccgtaccacctcccgccgcctcactgccagatccggccctggctccgcaaaatcctgcgacatcgcagacgagccgggcgggagagcggaggcgaagaccatccactgccgctgctcgggttgccaccgctccggcaagtaccgcaagtcgatctacaagaggatatccaacttctccacgtgcagtaacctaaccatccttctgctctggattgttatgatattcctggtttactacataaagcttgttagccgtgaggtccaagtttttgagcctttcagtattcttggactggaagctggggcatctgaatctgatatcaagaaatcatataggagactttctattcagtaccatcctgataaaaatcctgatccagaggctcataaatacttcattgaatatatatccaaggcatatcaagcattaactgatcctatatctcgtgagaattatgagaaatatggtcaccctgatgggcggcaggggctgcaaatgggcattgctttgcccaagtttttactaaatattgatggtgcatctggtgggataatgcttcttggaatagtcggattttgtatattattgcctttgatgatagctgttatttatttgtcaagatcatcaaaatatactggaaactatgtcatgcatcaaactttgtccacttactactactttatgaagccatctcttgctccaagcaaagttatagatgtcttcatcaaggctgcagaatatatggagatgccagttcgacgcagtgatgatgaacccctgcaaaaattgtttgtagctgttagaagcgagttaaatctggacttaaagaacattaagacagaacaagcaaagttctggaagcagcatccatcactagtaaagatggaactgctgattcaggcgcatctcacttgtgagtcattcgctttgacgccagcacttcttaaagattacagacacatgcttgaacttgcacctcgtcttctggaagaactcgttaagattgcagttttaccaaggaatccccatggttttggatggctccggcctgcactcagtgttattgagctttctcaaaatattatccaggctgtaccattaagtgcacgaaaagctagtggtgctaactcggaaggaatagcgcctttcttgcagctgccacatttcacagaagcaaccgtgaaaaagattgctcgcaagaaaatccgtgcattccaagaactttgtgacatgcctgtggaagatcgtgctgcattgctcacacaagttgctgggctttctgaagaacaagctcgggatgtagagtttgtactggagatgattccttctattgaagtagacatgaaatgtgagactgaaggtgaagagggcattcaagagggtgatgtcgtgaccatgtatgcttgggtctcgctacaacggcgcaatggactgactgctgctcttcctcattgtcccaacttcctgttccacaaggaagaaaacttctggctgcttctagccaacgtggcatctaatgatgtctggttgtcacagaaagtcagcttcatggatgaggccacggccataactgcagcatcaaaagctatacaagagacccaggaagcactaggtgcaagtgcaaaggaaataggaaatgcagttagggaggcagttgacagggtgaagaaaggcagtaggctggtaatgggcaagttccaagccccagcagagggtactcacaacctcacctcttttgtttgtgcgacgcttggataggctgtgacacgaagaccagcttcaagctcaaggtcctgaagcgcagccgtgctggaacaagaggccatgtgcctgaagaagggccagtggctgctgcagaggatggtattgaggaggaagaggaggaagaggaagaggagtatgatgactatgagagcgagtacagtgatgacgaggaggacgcgaagaacaagggggaagggaaggggaaggttgtgaacggatcggcccatcaaggggctgaatctgatattgattcaggcagcgatgagtaattctatactgtgttatgttgagaaaggaacgtagaggttgacaccatctgtttttttttttaaaattgaacgtatcccctccattttatagatggtcatagttactcagttttgtttactaataagttgagattgattggttacaaaagagccgagcaaaactagcttactatctcgagttgacctgaagactgcatggtcattctccaaagtgcaagcgtttcacccatgcctatcacctgtgtggtgtatgttcctcacatttattccgaatggcactgctgatttcttaaatttctggatcacctaattattattgttagacccatcatccaaaatattgttttacactgtagactacatagtttgtagaatggag

SEQ ID NO: 25510 - DNA, 1819 bp, Zea Mays
gcggaatgtcgagcatgcttctctccggctgctcaggatctttgcttcagttagcacttcttcatcgactagatggctattcagtgcatgcagatagtgatccagaggctgttcttcttcgccttggatatgtgaagcctgaagttatcagctggacgccaaggataattgttttccataattttcttagttcagaggagtgtgattacctaatggcaattgctagaccaagactccaaatatccactgtagtggatgttgcaacaggaaagggtgtaaaaagtgatgttcggacgagttctggtatgtttgtgaattctgaagaaagaaaatctccagtcgttcaggctatagagaagcgaatatctgtgttctctcaaatacctaaagaaaatggggagctcattcaagtattgaggtatgaagctagtcagtattatagaccacatcatgattacttctctgacactgtaagttgaccatctctaagtttaaccttaagcgcggagggcagcgtgttgctacaatgcttatgtatttgacagatggcgttgtaggtggtgaaactcactttccgcaggttagctgatattttacaagttaataaactgttatcatatcatatactgtacataccatgccatttgtgtcagcttgtttctgtcccaggcaggagatggagagtgcagctgtggaggaaacgtggtcaaaggattgtgtgttaagccaaacaaaggggacgctgttctcttctggagcatgggattggatggtaacacagacccaaacagtatccacagcgggtgccctgttctgaaaggagagaaatggtccgcgacgaaatggatgaggcagaagatgactttctgattagagctggtttggtgggtacagggagagttggtcccactccaggggtaacacctgcaagatgtctcattatagcaatgcatacagcaacacatggatttcgcagggtcagacctgtgcaatcgctgttaacgcttcgtcgttcaatcacagggttggcgaggtctttgatactgcccttcgattgccctttccactctcgactgtttggattccagagcatagacgttttccggcgcttgggttcgacagctaacacctgggattcctcacatgggctagtttggaacccgatttctattttctcaatgaaatttagtttattttctcttgagaaaatataaatcacttaaaaatagagtttctgaaaatagaagaaaattggaaaaaaaatccactcctactgggatttgcaaacttaacatcgtcatcgcaggcttcacaaaatcatcatccactggatggagtcttggcatcccatctcattccacaaattttcattaacccctcacaaggtatcgaggtcagagccaagctcggacgaggcgaaagtcttcccgaggatggttgagtccttcctgacgtgtgccacagttaacagagtggtcgtctgcggggttcgcggtggtgcaggtagccgaggcctagctcgagcaaggtggaggcggtgcccgagggcaagctcagcgtcgggcgaggcggagatggtgcccaagggcaagcccagcgttgggcgaggcggagttttgcgcctgaggcccggtctgctcttccgtcgtgtttgatgttccatccaggtatggcaggcggcgtgtacgcatagtggcgcatgcgtaatcatgatgttgcgcctgaacgcgactgctgtcttgttgttgttgttgtgctcatgtgtcactgtgtagggtaggtatgcacattaaatgcgagtgttcctcgctggccttca

SEQ ID NO: 25511 - DNA, 1711 bp, Zea Mays
ggcggaatgtcgagcatgcttctctccggctgctcaggatctttgcttcagttagcacttcttcatcgactagatggctattcagtgcatgcagatagtgatccagaggctgttcttcttcgccttggatatgtgaagcctgaagttatcagctggacgccaaggataattgttttccataattttcttagttcagaggagtgtgattacctaatggcaattgctagaccaagactccaaatatccactgtagtggatgttgcaacaggaaagggtgtaaaaagtgatgttcggacgagttctggtatgtttgtgaattctgaagaaagaaaatctccagtcgttcaggctatagagaagcgaatatctgtgttctctcaaatacctaaagaaaatggggagctcattcaagtattgaggtatgaagctagtcagtattatagaccacatcatgattacttctctgacacttttaaccttaagcgcggagggcagcgtgttgctacaatgcttatgtatttgacagatggcgttgtaggtggtgaaactcactttccgcaggcaggagatggagagtgcagctgtggaggaaacgtggtcaaaggattgtgtgttaagccaaacaaaggggacgctgttctcttctggagcatgggattggatggtaacacagacccaaacagtatccacagcgggtgccctgttctgaaaggagagaaatggtccgcgacgaaatggatgaggcagaagatgactttctgattagagctggtttggtgggtacagggagagttggtcccactccaggggtaacacctgcaagatgtctcattatagcaatgcatacagcaacacatggatttcgcagggtcagacctgtgcaatcgctgttaacgcttcgtcgttcaatcacagggttggcgaggtctttgatactgcccttcgattgccctttccactctcgactgtttggattccagagcatagacgttttccggcgcttgggttcgacagctaacacctgggattcctcacatgggctagtttggaacccgatttctattttctcaatgaaatttagtttattttctcttgagaaaatataaatcacttaaaaatagagtttctgaaaatagaagaaaattggaaaaaaaatccactcctactgggatttgcaaacttaacatcgtcatcgcaggcttcacaaaatcatcatccactggatggagtcttggcatcccatctcattccacaaattttcattaacccctcacaaggtatcgaggtcagagccaagctcggacgaggcgaaagtcttcccgaggatggttgagtccttcctgacgtgtgccacagttaacagagtggtcgtctgcggggttcgcggtggtgcaggtagccgaggcctagctcgagcaaggtggaggcggtgcccgagggcaagctcagcgtcgggcgaggcggagatggtgcccaagggcaagcccagcgttgggcgaggcggagttttgcgcctgaggcccggtctgctcttccgtcgtgtttgatgttccatccaggtatggcaggcggcgtgtacgcatagtggcgcatgcgtaatcatgatgttgcgcctgaacgcgactgctgtcttgttgttgttgttgtgctcatgtgtcactgtgtagggtaggtatgcacattaaatgcgagtgttcctcgctggccttca

SEQ ID NO: 25512 - DNA, 1809 bp, Zea Mays
cccctcggtttgcattctcttgtctcagcttggcttcttgctggatcgagtctgagcgtggctcgggctagttgggggaggcggcggaatgtcgagcatgcttctctccggctgctcaggatctttgcttcagttagcacttcttcatcgactagatggctattcagtgcatgcagatagtgatccagaggctgttcttcttcgccttggatatgtgaagcctgaagttatcagctggacgccaaggataattgttttccataattttcttagttcagaggagtgtgattacctaatggcaattgctagaccaagactccaaatatccactgtagtggatgttgcaacaggaaagggtgtaaaaagtgatgttcggacgagttctggtatgtttgtgaattctgaagaaagaaaatctccagtcgttcaggctatagagaagcgaatatctgtgttctctcaaatacctaaagaaaatggggagctcattcaagtattgaggtatgaagctagtcagtattatagaccacatcatgattacttctctgacacttttaaccttaagcgcggagggcagcgtgttgctacaatgcttatgtatttgacagatggcgttgtaggtggtgaaactcactttccgcagcttgtttctgtcccaggcaggagatggagagtgcagctgtggaggaaacgtggtcaaaggattgtgtgttaagccaaacaaaggggacgctgttctcttctggagcatgggattggatggtaacacagacccaaacagtatccacagcgggtgccctgttctgaaaggagagaaatggtccgcgacgaaatggatgaggcagaagatgactttctgattagagctggtttggtgggtacagggagagttggtcccactccaggggtaacacctgcaagatgtctcattatagcaatgcatacagcaacacatggatttcgcagggtcagacctgtgcaatcgctgttaacgcttcgtcgttcaatcacagggttggcgaggtctttgatactgcccttcgattgccctttccactctcgactgtttggattccagagcatagacgttttccggcgcttgggttcgacagctaacacctgggattcctcacatgggctagtttggaacccgatttctattttctcaatgaaatttagtttattttctcttgagaaaatataaatcacttaaaaatagagtttctgaaaatagaagaaaattggaaaaaaaatccactcctactgggatttgcaaacttaacatcgtcatcgcaggcttcacaaaatcatcatccactggatggagtcttggcatcccatctcattccacaaattttcattaacccctcacaaggtatcgaggtcagagccaagctcggacgaggcgaaagtcttcccgaggatggttgagtccttcctgacgtgtgccacagttaacagagtggtcgtctgcggggttcgcggtggtgcaggtagccgaggcctagctcgagcaaggtggaggcggtgcccgagggcaagctcagcgtcgggcgaggcggagatggtgcccaagggcaagcccagcgttgggcgaggcggagttttgcgcctgaggcccggtctgctcttccgtcgtgtttgatgttccatccaggtatggcaggcggcgtgtacgcatagtggcgcatgcgtaatcatgatgttgcgcctgaacgcgactgctgtcttgttgttgttgttgtgctcatgtgtcactgtgtagggtaggtatgcacattaaatgcgagtgttcctcgctggccttca

SEQ ID NO: 25513 - DNA, 2075 bp, Zea Mays
agcacagccagttgactcaagcgccatacctctgctccatagtgggcacccgtgtgtcacgggcacgacgagattcggcggggatggcgcggtggcgggcgcggcgcctgctgcctctggccaccttcgtcacactcggcatgatccttgttgcattttgcttccttttccctgaacataggatctttgcttcagttagcacttcttcatcgactagatggctattcagtgcatgcagatagtgatccagaggctgttcttcttcgccttggatatgtgaagcctgaagttatcagctggacgccaaggataattgttttccataattttcttagttcagaggagtgtgattacctaatggcaattgctagaccaagactccaaatatccactgtagtggatgttgcaacaggaaagggtgtaaaaagtgatgttcggacgagttctggtatgtttgtgaattctgaagaaagaaaatctccagtcgttcagctagtcttcgagctggaacaagggatgagccttgcaaaaggcttcgatgggtggcctctcccactggatcagcatgtgccacatgccctgatggagttgggcgtacccatgttgcattagtggcagaggcgatggagcagctggcggagtcccgtggaacgacttcaagacctcggcgtggaagacattgtgaatgtgtgcatgccttcaggcaactataagaggctatagagaagcgaatatctgtgttctctcaaatacctaaagaaaatggggagctcattcaagtattgaggtatgaagctagtcagtattatagaccacatcatgattacttctctgacacttttaaccttaagcgcggagggcagcgtgttgctacaatgcttatgtatttgacagatggcgttgtaggtggtgaaactcactttccgcaggagatggagagtgcagctgtggaggaaacgtggtcaaaggattgtgtgttaagccaaacaaaggggacgctgttctcttctggagcatgggattggatggtaacacagacccaaacagtatccacagcgggtgccctgttctgaaaggagagaaatggtccgcgacgaaatggatgaggcagaagatgactttctgattagagctggtttggtgggtacagggagagttggtcccactccaggggtaacacctgcaagatgtctcattatagcaatgcatacagcaacacatggatttcgcagggtcagacctgtgcaatcgctgttaacgcttcgtcgttcaatcacagggttggcgaggtctttgatactgcccttcgattgccctttccactctcgactgtttggattccagagcatagacgttttccggcgcttgggttcgacagctaacacctgggattcctcacatgggctagtttggaacccgatttctattttctcaatgaaatttagtttattttctcttgagaaaatataaatcacttaaaaatagagtttctgaaaatagaagaaaattggaaaaaaaatccactcctactgggatttgcaaacttaacatcgtcatcgcaggcttcacaaaatcatcatccactggatggagtcttggcatcccatctcattccacaaattttcattaacccctcacaaggtatcgaggtcagagccaagctcggacgaggcgaaagtcttcccgaggatggttgagtccttcctgacgtgtgccacagttaacagagtggtcgtctgcggggttcgcggtggtgcaggtagccgaggcctagctcgagcaaggtggaggcggtgcccgagggcaagctcagcgtcgggcgaggcggagatggtgcccaagggcaagcccagcgttgggcgaggcggagttttgcgcctgaggcccggtctgctcttccgtcgtgtttgatgttccatccaggtatggcaggcggcgtgtacgcatagtggcgcatgcgtaatcatgatgttgcgcctgaacgcgactgctgtcttgttgttgttgttgtgctcatgtgtcactgtgtagggtaggtatgcacattaaatgcgagtgttcctcgctggccttca

SEQ ID NO: 25514 - DNA, 2099 bp, Zea Mays
agcacagccagttgactcaagcgccatacctctgctccatagtgggcacccgtgtgtcacgggcacgacgagattcggcggggatggcgcggtggcgggcgcggcgcctgctgcctctggccaccttcgtcacactcggcatgatccttgttgcattttgcttccttttccctgaacataggatctttgcttcagttagcacttcttcatcgactagatggctattcagtgcatgcagatagtgatccagaggctgttcttcttcgccttggatatgtgaagcctgaagttatcagctggacgccaaggataattgttttccataattttcttagttcagaggagtgtgattacctaatggcaattgctagaccaagactccaaatatccactgtagtggatgttgcaacaggaaagggtgtaaaaagtgatgttcggacgagttctggtatgtttgtgaattctgaagaaagaaaatctccagtcgttcagctagtcttcgagctggaacaagggatgagccttgcaaaaggcttcgatgggtggcctctcccactggatcagcatgtgccacatgccctgatggagttgggcgtacccatgttgcattagtggcagaggcgatggagcagctggcggagtcccgtggaacgacttcaagacctcggcgtggaagacattgtgaatgtgtgcatgccttcaggcaactataagaggctatagagaagcgaatatctgtgttctctcaaatacctaaagaaaatggggagctcattcaagtattgaggtatgaagctagtcagtattatagaccacatcatgattacttctctgacactgtaagttgaccatctctaagtttaaccttaagcgcggagggcagcgtgttgctacaatgcttatgtatttgacagatggcgttgtaggtggtgaaactcactttccgcaggcaggagatggagagtgcagctgtggaggaaacgtggtcaaaggattgtgtgttaagccaaacaaaggggacgctgttctcttctggagcatgggattggatggtaacacagacccaaacagtatccacagcgggtgccctgttctgaaaggagagaaatggtccgcgacgaaatggatgaggcagaagatgactttctgattagagctggtttggtgggtacagggagagttggtcccactccaggggtaacacctgcaagatgtctcattatagcaatgcatacagcaacacatggatttcgcagggtcagacctgtgcaatcgctgttaacgcttcgtcgttcaatcacagggttggcgaggtctttgatactgcccttcgattgccctttccactctcgactgtttggattccagagcatagacgttttccggcgcttgggttcgacagctaacacctgggattcctcacatgggctagtttggaacccgatttctattttctcaatgaaatttagtttattttctcttgagaaaatataaatcacttaaaaatagagtttctgaaaatagaagaaaattggaaaaaaaatccactcctactgggatttgcaaacttaacatcgtcatcgcaggcttcacaaaatcatcatccactggatggagtcttggcatcccatctcattccacaaattttcattaacccctcacaaggtatcgaggtcagagccaagctcggacgaggcgaaagtcttcccgaggatggttgagtccttcctgacgtgtgccacagttaacagagtggtcgtctgcggggttcgcggtggtgcaggtagccgaggcctagctcgagcaaggtggaggcggtgcccgagggcaagctcagcgtcgggcgaggcggagatggtgcccaagggcaagcccagcgttgggcgaggcggagttttgcgcctgaggcccggtctgctcttccgtcgtgtttgatgttccatccaggtatggcaggcggcgtgtacgcatagtggcgcatgcgtaatcatgatgttgcgcctgaacgcgactgctgtcttgttgttgttgttgtgctcatgtgtcactgtgtagggtaggtatgcacattaaatgcgagtgttcctcgctggccttca

SEQ ID NO: 25515 - DNA, 1776 bp, Zea Mays
ctgagcacagccagttgactcaagcgccatacctctgctccatagtgggcacccgtgtgtcacgggcacgacgagattcggcggggatggcgcggtggcgggcgcggcgcctgctgcctctggccaccttcgtcacactcggcatgatccttggatctttgcttcagttagcacttcttcatcgactagatggctattcaggtgaagcctgaagttatcagctggacgccaaggataattgttttccataattttcttagttcagaggagtgtgattacctaatggcaattgctagaccaagactccaaatatccactgtagtggatgttgcaacaggaaagggtgtaaaaagtgatgttcggacgagttctggtatgtttgtgaattctgaagaaagaaaatctccagtcgttcaggctatagagaagcgaatatctgtgttctctcaaatacctaaagaaaatggggagctcattcaagtattgaggtatgaagctagtcagtattatagaccacatcatgattacttctctgacacttttaaccttaagcgcggagggcagcgtgttgctacaatgcttatgtatttgacagatggcgttgtaggtggtgaaactcactttccgcaggagatggagagtgcagctgtggaggaaacgtggtcaaaggattgtgtgttaagccaaacaaaggggacgctgttctcttctggagcatgggattggatggtaacacagacccaaacagtatccacagcgggtgccctgttctgaaaggagagaaatggtccgcgacgaaatggatgaggcagaagatgactttctgattagagctggtttggtgggtacagggagagttggtcccactccaggggtaacacctgcaagatgtctcattatagcaatgcatacagcaacacatggatttcgcagggtcagacctgtgcaatcgctgttaacgcttcgtcgttcaatcacagggttggcgaggtctttgatactgcccttcgattgccctttccactctcgactgtttggattccagagcatagacgttttccggcgcttgggttcgacagctaacacctgggattcctcacatgggctagtttggaacccgatttctattttctcaatgaaatttagtttattttctcttgagaaaatataaatcacttaaaaatagagtttctgaaaatagaagaaaattggaaaaaaaatccactcctactgggatttgcaaacttaacatcgtcatcgcaggcttcacaaaatcatcatccactggatggagtcttggcatcccatctcattccacaaattttcattaacccctcacaaggtatcgaggtcagagccaagctcggacgaggcgaaagtcttcccgaggatggttgagtccttcctgacgtgtgccacagttaacagagtggtcgtctgcggggttcgcggtggtgcaggtagccgaggcctagctcgagcaaggtggaggcggtgcccgagggcaagctcagcgtcgggcgaggcggagatggtgcccaagggcaagcccagcgttgggcgaggcggagttttgcgcctgaggcccggtctgctcttccgtcgtgtttgatgttccatccaggtatggcaggcggcgtgtacgcatagtggcgcatgcgtaatcatgatgttgcgcctgaacgcgactgctgtcttgttgttgttgttgtgctcatgtgtcactgtgtagggtaggtatgcacattaaatgcgagtgttcctcgctggccttca

SEQ ID NO: 25516 - DNA, 1886 bp, Zea Mays
tttcaaactccacaagtctgttttttgcaaattctgcagcctgctgagcacagccagttgactcaagcgccatacctctgctccatagtgggcacccgtgtgtcacgggcacgacgagattcggcggggatggcgcggtggcgggcgcggcgcctgctgcctctggccaccttcgtcacactcggcatgatccttggatctttgcttcagttagcacttcttcatcgactagatggctattcagtgcatgcagatagtgatccagaggctgttcttcttcgccttggatatgtgaagcctgaagttatcagctggacgccaaggataattgttttccataattttcttagttcagaggagtgtgattacctaatggcaattgctagaccaagactccaaatatccactgtagtggatgttgcaacaggaaagggtgtaaaaagtgatgttcggacgagttctggtatgtttgtgaattctgaagaaagaaaatctccagtcgttcaggctatagagaagcgaatatctgtgttctctcaaatacctaaagaaaatggggagctcattcaagtattgaggtatgaagctagtcagtattatagaccacatcatgattacttctctgacacttttaaccttaagcgcggagggcagcgtgttgctacaatgcttatgtatttgacagatggcgttgtaggtggtgaaactcactttccgcagcttgtttctgtcccaggcaggagatggagagtgcagctgtggaggaaacgtggtcaaaggattgtgtgttaagccaaacaaaggggacgctgttctcttctggagcatgggattggatggtaacacagacccaaacagtatccacagcgggtgccctgttctgaaaggagagaaatggtccgcgacgaaatggatgaggcagaagatgactttctgattagagctggtttggtgggtacagggagagttggtcccactccaggggtaacacctgcaagatgtctcattatagcaatgcatacagcaacacatggatttcgcagggtcagacctgtgcaatcgctgttaacgcttcgtcgttcaatcacagggttggcgaggtctttgatactgcccttcgattgccctttccactctcgactgtttggattccagagcatagacgttttccggcgcttgggttcgacagctaacacctgggattcctcacatgggctagtttggaacccgatttctattttctcaatgaaatttagtttattttctcttgagaaaatataaatcacttaaaaatagagtttctgaaaatagaagaaaattggaaaaaaaatccactcctactgggatttgcaaacttaacatcgtcatcgcaggcttcacaaaatcatcatccactggatggagtcttggcatcccatctcattccacaaattttcattaacccctcacaaggtatcgaggtcagagccaagctcggacgaggcgaaagtcttcccgaggatggttgagtccttcctgacgtgtgccacagttaacagagtggtcgtctgcggggttcgcggtggtgcaggtagccgaggcctagctcgagcaaggtggaggcggtgcccgagggcaagctcagcgtcgggcgaggcggagatggtgcccaagggcaagcccagcgttgggcgaggcggagttttgcgcctgaggcccggtctgctcttccgtcgtgtttgatgttccatccaggtatggcaggcggcgtgtacgcatagtggcgcatgcgtaatcatgatgttgcgcctgaacgcgactgctgtcttgttgttgttgttgtgctcatgtgtcactgtgtagggtaggtatgcacattaaatgcgagtgttcctcgctggccttca

SEQ ID NO: 25517 - DNA, 1894 bp, Zea Mays
gctatttcaaactccacaagtctgttttttgcaaattctgcagcctgctgagcacagccagttgactcaagcgccatacctctgctccatagtgggcacccgtgtgtcacgggcacgacgagattcggcggggatggcgcggtggcgggcgcggcgcctgctgcctctggccaccttcgtcacactcggcatgatccttggatctttgcttcagttagcacttcttcatcgactagatggctattcagtgcatgcagatagtgatccagaggctgttcttcttcgccttggatatgtgaagcctgaagttatcagctggacgccaaggataattgttttccataattttcttagttcagaggagtgtgattacctaatggcaattgctagaccaagactccaaatatccactgtagtggatgttgcaacaggaaagggtgtaaaaagtgatgttcggacgagttctggtatgtttgtgaattctgaagaaagaaaatctccagtcgttcaggctatagagaagcgaatatctgtgttctctcaaatacctaaagaaaatggggagctcattcaagtattgaggtatgaagctagtcagtattatagaccacatcatgattacttctctgacactgtaagttgaccatctctaagtttaaccttaagcgcggagggcagcgtgttgctacaatgcttatgtatttgacagatggcgttgtaggtggtgaaactcactttccgcaggcaggagatggagagtgcagctgtggaggaaacgtggtcaaaggattgtgtgttaagccaaacaaaggggacgctgttctcttctggagcatgggattggatggtaacacagacccaaacagtatccacagcgggtgccctgttctgaaaggagagaaatggtccgcgacgaaatggatgaggcagaagatgactttctgattagagctggtttggtgggtacagggagagttggtcccactccaggggtaacacctgcaagatgtctcattatagcaatgcatacagcaacacatggatttcgcagggtcagacctgtgcaatcgctgttaacgcttcgtcgttcaatcacagggttggcgaggtctttgatactgcccttcgattgccctttccactctcgactgtttggattccagagcatagacgttttccggcgcttgggttcgacagctaacacctgggattcctcacatgggctagtttggaacccgatttctattttctcaatgaaatttagtttattttctcttgagaaaatataaatcacttaaaaatagagtttctgaaaatagaagaaaattggaaaaaaaatccactcctactgggatttgcaaacttaacatcgtcatcgcaggcttcacaaaatcatcatccactggatggagtcttggcatcccatctcattccacaaattttcattaacccctcacaaggtatcgaggtcagagccaagctcggacgaggcgaaagtcttcccgaggatggttgagtccttcctgacgtgtgccacagttaacagagtggtcgtctgcggggttcgcggtggtgcaggtagccgaggcctagctcgagcaaggtggaggcggtgcccgagggcaagctcagcgtcgggcgaggcggagatggtgcccaagggcaagcccagcgttgggcgaggcggagttttgcgcctgaggcccggtctgctcttccgtcgtgtttgatgttccatccaggtatggcaggcggcgtgtacgcatagtggcgcatgcgtaatcatgatgttgcgcctgaacgcgactgctgtcttgttgttgttgttgtgctcatgtgtcactgtgtagggtaggtatgcacattaaatgcgagtgttcctcgctggccttca

SEQ ID NO: 25518 - DNA, 971 bp, Zea Mays
cctctccccacgccactctccctttcatcttcccaccgccgcccctctccctggcatcttcccaccgtcgctcctctccctagcatcttcccaccgccgcacgccctctcttgggtgctgcagctcgccccccccctctgctcaccatctcctccctcgttcccatggcgccctccccttcttggtggctgacgcccctccctccatggagctcgcctctgccatgaccgccctctgcccccttccttgctgttcttattgcagcccctctccatgccaagctcgccctccttctgtgcccagccctagctcgccccagcccctctccctggctgcccttgctctgttttcccccagccctagccgagctcgcccctgccctaagttctcaaggcagcccctctgtttttccatggtcggcaccctccccatcttttgtagattggaagaaaggattcttgtgagtgtgagaagaagcaaatcccagcataacgcatgctaggtgttcgacgaaatgttcgaattgggattgtcgttgatattgtggatctgagtcgcgctttgtattgttccctttactttcaaaaagtgcctttcttgaacggtcaattgaagaaaattctgaccaagaagaatgcatcatcaaactaaatgacattcctgggggtgccaagtcatttgagctagttgcaaggttctgctatggtgtgaaaataaagatttcacctgcaaatgctgtctacctacggtgtgcctcaaagcatctagaaatgactgaagaagtagctgaggaaaacctgattttgtgaatatataattgtgatgcttttgtgaatatataattgtggtgcttttgtgtttatgtgatggatctatgactgtggtatactgattaactgtgtatgtctttatgatttgtgtataaaaatatgtgatttgtggtgcttaattaaatgtatattattattaat

SEQ ID NO: 25519 - DNA, 1186 bp, Zea Mays
gccttggctgcgcctgtcgtcgcgccgtgtcctggagtgtctcccgcgtcaccgctgttgtcctggatcctcgctggcttccgctccctccccgagtcgccctcggcacgcagtgacgacggcggcgcaatcccagactccacgtctgcctcgcgacaccccccactcccgcgtctctccaatcgcctcgcaacctcgcctcctgtcatctgcacatcggccactgactctgcagcttcgacgccgttggcagtggtagcggcagtgtctattgtgagtgaaggttacttgactatacaaatttccgtgcactacatcatttctatagtgctatgctacatgtgctaccaacacaggtcagtaaatccttttcatatattgtgtgtgctgattccatgaattctagttgctccttcagaacaggctatgttgagctcgttggcttctgctcacttcaaactgactgctcaagtgggcactcagactctccccaaagggtctgtatatggtcatgtccggtaagtttagcagatacagacgttcgctgtgcctccaggctccagcaatgaccgcgccgccgaaacgctcgtgacaagctttgtcggtgctagacgcgaagctaggcactaggctaccagagtcgggctggtccaagggagggctgcttgcatcggctggtttccatacgcgaagcagcaaccagccagcgacatcgccaggaagctggtgctggtagttgggctcgatttctactattctgatagacgtgactgtagatttggcgatcttcaatcagagatggcaaatatgaatacatttctggcgctttctgaagctatcaattggcccagtggttcctactctgcaactagcatgcactagcagcaaggacattgttgtttggactagaagaactatcctagcatgcactaccagcaaggacattgttgtttggaccggaagccccatcacatctttgtgtttcagctatacgtacacaccttttcaaatctgtgatgaatgtttcgtattaaaagtactgagttcctcgatgattcttttgacatcggtgataaatcactggaaacaaatcaaaatagaaacatctaatttttttcctaattttgtgtttgagctatatgtacacaactttttaaatctatgatggatgttttctgttaaaagt

SEQ ID NO: 25520 - DNA, 1771 bp, Zea Mays
gccttggctgcgcctgtcgtcgcgccgtgtcctggagtgtctcccgcgtcaccgctgttgtcctggatcctcgctggcttccgctccctccccgagtcgccctcggcacgcagtgacgacggcggcgcaatcccagactccacgtctgcctcgcgacaccccccactcccgcgtctctccaatcgcctcgcaacctcgcctcctgtcatctgcacatcggccactgactctgcagcttcgacgccgttggcagtggtagcggcagtgtctattgtgagtgaaggttacttgactatacaaatttccgtgcactacatcatttctatagtgctatgctacatgtgctaccaacacaggtcagtaaatccttttcatatattgtgtgtgctgattccatgaattctagttgctccttcagaacaggctatgttgagctcgttggcttctgctcacttcaaactgactgctcaagtgggcactcagactctccccaaagggtctgtatatggtcatgtccggtaagtttagcagatacagacgttcgctgtgcctccaggctccagcaatgaccgcgccgccgaaacgctcgtgacaagctttgtcggtgctagacgcgaagctaggcactaggctaccagagtcgggctggtccaagggagggctgcttgcatcggctggtttccatacgcgaagcagcaaccagccagcgacatcgccaggtttgtccaccttcgattcggtcgtctgccccaccatcgtcctcctccaattctgagaatgtgcaagaatcgtcctccttcccatttttagttcgattagtgtgttcccctctatgttttcttgttcgacgaagcctttttttttctcgaaagcgcaggagagctgcgcatcattatattaagtagaggaaaagagggtccaaaatagaccatagtacaaaagacctccccagaggggataagaaaaccaaagagaaaataagagaaaaaacaaaaacaagagcaagacagatcctaaaagacaaaaaccagcccatcagtgaaaaaaccaggcagctaggtgcctctgatggttgcggcaagaaaggagagacccttagctcctgccatttcccacaacaattgcataagatccaagtatatcatacactatttggttaaatagtttgaatgtttgctaccttctcagaaaattacatgcaccacttagcacaacggcgtatttgtagttattttcagttagttgtttggagtaacatctcgtggatcttctcatggttcatttgttgatggtatctccacaaggaagctggtgctggtagttgggctcgatttctactattctgatagacgtgactgtagatttggcgatcttcaatcagagatggcaaatatgaatacatttctggcgctttctgaagctatcaattggcccagtggttcctactctgcaactagcatgcactagcagcaaggacattgttgtttggactagaagaactatcctagcatgcactaccagcaaggacattgttgtttggaccggaagccccatcacatctttgtgtttcagctatacgtacacaccttttcaaatctgtgatgaatgtttcgtattaaaagtactgagttcctcgatgattcttttgacatcggtgataaatcactggaaacaaatcaaaatagaaacatctaatttttttcctaattttgtgtttgagctatatgtacacaactttttaaatctatgatggatgttttctgttaaaagt

SEQ ID NO: 25521 - DNA, 1134 bp, Zea Mays
gcctcgccttggctgcgcctgtcgtcgcgccgtgtcctggagtgtctcccgcgtcaccgctgttgtcctggatcctcgctggcttccgctccctccccgagtcgccctcggcacgcagtgacgacggcggcgcaatcccagactccacgtctgcctcgcgacaccccccactcccgcgtctctccaatcgcctcgcaacctcgcctcctgtcatctgcacatcggccactgactctgcagcttcgacgccgttggcagtggtagcggcagtgtctattgtgagtgaaggttacttgactatacaaatttccgtgcactacatcatttctatagtgctatgctacatgtgctaccaacacaggtcagtaaatccttttcatatattgtgtgtgctgattccatgaattctagttgctccttcagaacaggctatgttgagctcgttggcttctgctcacttcaaactgactgctcaagtgggcactcagactctccccaaagggtctgtatatggtcatgtccggtaagtttagcagatacagacgttcgctgtgcctccaggctccagcaatgaccgcgccgccgaaacgctcgtgacaagctttgtcggtgctagacgcgaagctaggcactaggctaccagagtcgggctggtccaagggagggctgcttgcatcggctggtttccatacgcgaagcagcaaccagccagcgacatcgccagatttggcgatcttcaatcagagatggcaaatatgaatacatttctggcgctttctgaagctatcaattggcccagtggttcctactctgcaactagcatgcactagcagcaaggacattgttgtttggactagaagaactatcctagcatgcactaccagcaaggacattgttgtttggaccggaagccccatcacatctttgtgtttcagctatacgtacacaccttttcaaatctgtgatgaatgtttcgtattaaaagtactgagttcctcgatgattcttttgacatcggtgataaatcactggaaacaaatcaaaatagaaacatctaatttttttcctaattttgtgtttgagctatatgtacacaactttttaaatctatgatggatgttttctgttaaaagt

SEQ ID NO: 25522 - DNA, 1203 bp, Zea Mays
gaaaaccaccgccgcagcctcgccttggctgcgcctgtcgtcgcgccgtgtcctggagtgtctcccgcgtcaccgctgttgtcctggatcctcgctggcttccgctccctccccgagtcgccctcggcacgcagtgacgacggcggcgcaatcccagactccacgtctgcctcgcgacaccccccactcccgcgtctctccaatcgcctcgcaacctcgcctcctgtcatctgcacatcggccactgactctgcagcttcgacgccgttggcagtggtagcggcagtgtctattgtgagtgaaggttacttgactatacaaatttccgtgcactacatcatttctatagtgctatgctacatgtgctaccaacacaggtcagtaaatccttttcatatattgtgtgtgctgattccatgaattctagttgctccttcagaacaggctatgttgagctcgttggcttctgctcacttcaaactgactgctcaagtgggcactcagactctccccaaagggtctgtatatggtcatgtccggtaagtttagcagatacagacgttcgctgtgcctccaggctccagcaatgaccgcgccgccgaaacgctcgtgacaagctttgtcggtgctagacgcgaagctaggcactaggctaccagagtcgggctggtccaagggagggctgcttgcatcggctggtttccatacgcgaagcagcaaccagccagcgacatcgccagctggtgctggtagttgggctcgatttctactattctgatagacgtgactgtagatttggcgatcttcaatcagagatggcaaatatgaatacatttctggcgctttctgaagctatcaattggcccagtggttcctactctgcaactagcatgcactagcagcaaggacattgttgtttggactagaagaactatcctagcatgcactaccagcaaggacattgttgtttggaccggaagccccatcacatctttgtgtttcagctatacgtacacaccttttcaaatctgtgatgaatgtttcgtattaaaagtactgagttcctcgatgattcttttgacatcggtgataaatcactggaaacaaatcaaaatagaaacatctaatttttttcctaattttgtgtttgagctatatgtacacaactttttaaatctatgatggatgttttctgttaaaagt

SEQ ID NO: 25523 - DNA, 982 bp, Zea Mays
gacagcttgctattcattcatctgagaaggtaaggaacgcagtggttagtggtgtaaaagggcttttgtctagttgcagttctacattaaaaagaaccaagatgctacttttggaatgtttatgtgttctggcatgtgatgatgctgcagctgtgtctgaggctgcacaagatgctcttgatcatcttttcaaccaaggccacaatctcgtaacagaaaatgagatttctgatacctttactaggctggttgaaaggctaccacaagtggtacttggaagcgaggagacaaccacactttcacatgctaggatgttgttggctctgaccttttatgctggtccctagtttctgataaatcatcttcaccgttctcctgtcattgctgctcgtttctttgattgtttgggtttatgcataggtcatagctcacagttttctggttccatggacaagctaattgtatcaaagccactatctattgggtatctttattcagttgctgagttgaagagtggcgcctattctaaagatacaactaacatatctctgcatgccacgtcaacatttgcagcctccaaaatatctgttatccatgataatgctttgccaattgcattacttggtacagttgaatatgagttgccccatgtgcctccatggttttttcatgctggtagccagaagctttatggggttcttgctggaataattagacttgttggcctatcaacagtgtcaggatagcatactcatacagtaatattgttgtttgtcgctcttaacaaatttcattcaggaaccgggccatgttgatgttcaaaagagttgtcagaagttcatgacatctggtatttattatatcttcttttgtagtgggctggtgtggtctgcttagcagcagataattttgctattgaaaattaatctattaccataagcttggtgactgaggtagacatttgatttatacttaatctaac

SEQ ID NO: 25524 - DNA, 2143 bp, Zea Mays
ctcctccatgccctcaccaccatgtgcgagctacaccaagctaggtcaatgttgcgctagacaacttcagttacgtgtagctgacacattgttcaatagctcgaacacaaggagtgcatttaaagttgggaagctggccaatttgctcttgtgtttggtttctacagtttctgggaaattagattttgcaccaaatccaatgcaaatgatatttcactatttcttcctacaagagttcaagttgatcgaaagcgtagagctggctcctctcaggaagctgatcgatcccctgacaggggttcaaattgatcgaaagcatagatctggctcctctcaaggagctgatcgatcctctgacaggtcagtactcggtagcctaagactatgattagtggtgctgctgggagttctttgagcattgaacaagccattcttagattgatcgaggctttgatgatagtactaaatgacaaggaaaatcttagtgcacttggtaagcacaagaatgagaatcattctggtggcagtgagtcaattgagcatatattgcagatgcttcgccagttgccaaccaaaaatatatctgataagataagccatgatgagattacaaatgattctatctccaatgtcaataattcctttgctgatagaaaggcactgcatgtgaagcggaccaaaaatggcttgagtaaacaactacttgctattcattcatctgagaaggtaaggaacgcagtggttagtggtgtaaaagggcttttgtctagttgcagttctacattaaaaagaaccaagatgctacttttggaatgtttatgtgttctggcatgtgatgatgctgcagctgtgtctgaggctgcacaagatgctcttgatcatcttttcaaccaaggccacaatctcgtaacagaaaatgagatttctgatacctttactaggctggttgaaaggctaccacaagtggtacttggaagcgaggagacaaccacactttcacatgctaggatgttgttggctctgaccttttatgctggtcatagctcacagttttctggttccatggacaagctaattgtatcaaagccactatctattgggtatctttattcagttgctgagttgaagagtggcgcctattctaaagatacaactaacatatctctgcatgccacgtcaacatttgcagcctccaaaatatctgttatccatgataatgctttgccaattgcattacttggtacagttgaatatgagttgccccatgtgcctccatggttttttcatgctggtagccagaagctttatggggttcttgctggaataattagacttgttggcctatcaacagtgtcaggtaccttgtgaattattttgcttgtcaaatctacgattcatggactgttctattttttcatgctgagtcagtactaaaccaaagatcataacccgttcctaagaggaacccaacaatatgtaactaaaaaaattatcaattccctttatctttatctgttcatgactttgcttattgtttcctactcaagatggtcgtgcatggagctttgttcggcaccaatggcacaatatgttctctacatattacaatatgcagttgatgggttcgattccttaaagctaacagtagtggtcactagcccttgaaaaataaattttggacaaccaaatttcatagcagctttgactattgttgaagttgatctttttactactttagattgtcgttgatgcaaatgttctttgtggtgctttgagatgactaaggatctatatctgtcttaagatttgtcttttccttacaagtgaagagattgcgtggttcaatgaagtaataacctatgatctatgggccaggtctttgatgagtaccttaacttgcaggatagcatactcatacagtaatattgttgtttgtcgctcttaacaaatttcattcaggaaccgggccatgttgatgttcaaaagagttgtcagaagttcatgacatctggtatttattatatcttcttttgtagtgggctggtgtggtctgcttagcagcagataattttgctattgaaaattaatctattaccataagcttggtgactgaggtagacatttgatttatacttaatctaac

SEQ ID NO: 25525 - DNA, 2389 bp, Zea Mays
accaacaaagacctcctcgtccccggcgcctcctcccgatcccaaattctagtgcaggatcgaggaggttgcgatgctatttgtttcgacgtggagctgatataaaaaataggtatactacttgggctcgaccccaacccctgcctcctccatgccctcaccaccatgtgcgagctacaccaagctaggtcaatgttgcgctagacaacttcagttacgtgtagctgacacattgttcaatagctcgaacacaaggagtgcatttaaagttgggaagctggccaatttgctcttgtgtttggtttctacagtttctgggaaattagattttgcaccaaatccaatgcaaatgatatttcactatttcttcctacaagagttcaagttgatcgaaagcgtagagctggctcctctcaggaagctgatcgatcccctgacaggggttcaaattgatcgaaagcatagatctggctcctctcaaggagctgatcgatcctctgacagattgatcgaggctttgatgatagtactaaatgacaaggaaaatcttagtgcacttggtaagcacaagaatgagaatcattctggtggcagtgagtcaattgagcatatattgcagatgcttcgccagttgccaaccaaaaatatatctgataagataagccatgatgagattacaaatgattctatctccaatgtcaataattcctttgctgatagaaaggcactgcatgtgaagcggaccaaaaatggcttgagtaaacaactagtaatgttgataaattgttgtgtgctacattcccacatgtgtgttttccttgtttcttacagtttaaaataaatgagtcacctgttaggaacatgggattttcccctattcctgcgtttttcctatgaaattgaactgatccatttgaaattcatgtatgattcctgtgttccaaacggggccttattcttttaagttgacactcattttttgcagcttgctattcattcatctgagaaggtaaggaacgcagtggttagtggtgtaaaagggcttttgtctagttgcagttctacattaaaaagaaccaagatgctacttttgctgtgtctgaggctgcacaagatgctcttgatcatcttttcaaccaaggccacaatctcgtaacagaaaatgagatttctgatacctttactaggctggttgaaaggctaccacaagtggtacttggaagcgaggagacaaccacactttcacatgctaggatgttgttggctctgaccttttatgctggtcatagctcacagttttctggttccatggacaagctaattgtatcaaagccactatctattgggtatctttattcagttgctgagttgaagagtggcgcctattctaaagatacaactaacatatctctgcatgccacgtcaacatttgcagcctccaaaatatctgttatccatgataatgctttgccaattgcattacttggtacagttgaatatgagttgccccatgtgcctccatggttttttcatgctggtagccagaagctttatggggttcttgctggaataattagacttgttggcctatcaacagtgtcaggtaccttgtgaattattttgcttgtcaaatctacgattcatggactgttctattttttcatgctgagtcagtactaaaccaaagatcataacccgttcctaagaggaacccaacaatatgtaactaaaaaaattatcaattccctttatctttatctgttcatgactttgcttattgtttcctactcaagatggtcgtgcatggagctttgttcggcaccaatggcacaatatgttctctacatattacaatatgcagttgatgggttcgattccttaaagctaacagtagtggtcactagcccttgaaaaataaattttggacaaccaaatttcatagcagctttgactattgttgaagttgatctttttactactttagattgtcgttgatgcaaatgttctttgtggtgctttgagatgactaaggatctatatctgtcttaagatttgtcttttccttacaagtgaagagattgcgtggttcaatgaagtaataacctatgatctatgggccaggtctttgatgagtaccttaacttgcaggatagcatactcatacagtaatattgttgtttgtcgctcttaacaaatttcattcaggaaccgggccatgttgatgttcaaaagagttgtcagaagttcatgacatctggtatttattatatcttcttttgtagtgggctggtgtggtctgcttagcagcagataattttgctattgaaaattaatctattaccataagcttggtgactgaggtagacatttgatttatacttaatctaac

SEQ ID NO: 25526 - DNA, 1802 bp, Zea Mays
caatcggatgctgccgccgagcgtcgccatcgcaagcgctgcctccgcatggagctccctctctcccgaagcaccgcaccacagcgagcgtcgggccgctgttgtcgatgccgctgcctcctcgccttcccgatgccctaatccgaggcgtccccgccgcctactccggccgccgcagagcccacggtaccaacaaagacctcctcgtccccggcgcctcctcccgatcccaaattctagtgcaggatcgaggaggttgcgatgctatttgtttcgacgtggagctgatataaaaaataggtatactacttgggctcgaccccaacccctgcctcctccatgccctcaccaccatgtgcgagctacaccaagctaggtcaatgttgcgctagacaacttcagttacgtgtagctgacacattgttcaatagctcgaacacaaggagtgcatttaaagttgggaagctggccaatttgctcttgtgtttggtttctacagtttctgggaaattagattttgcaccaaatccaatgcaaatgatatttcactatttcttcctacaagagttcaagttgatcgaaagcgtagagctggctcctctcaggaagctgatcgatcccctgacaggggttcaaattgatcgaaagcatagatctggctcctctcaaggagctgatcgatcctctgacaggtcagtactcggtagcctaagactatgattagtggtgctgctgggagttctttgagcattgaacaagccattcttagattgatcgaggctttgatgatagtactaaatgacaaggaaaatcttagtgcacttgcttgctattcattcatctgagaaggtaaggaacgcagtggttagtggtgtaaaagggcttttgtctagttgcagttctacattaaaaagaaccaagatgctacttttggaatgtttatgtgttctggcatgtgatgatgctgcagctgtgtctgaggctgcacaagatgctcttgatcatcttttcaaccaaggccacaatctcgtaacagaaaatgagatttctgatacctttactaggctggttgaaaggctaccacaagtggtacttggaagcgaggagacaaccacactttcacatgctaggatgttgttggctctgaccttttatgctggtccctagtttctgataaatcatcttcaccgttctcctgtcattgctgctcgtttctttgattgtttgggtttatgcataggtcatagctcacagttttctggttccatggacaagctaattgtatcaaagccactatctattgggtatctttattcagttgctgagttgaagagtggcgcctattctaaagatacaactaacatatctctgcatgccacgtcaacatttgcagcctccaaaatatctgttatccatgataatgctttgccaattgcattacttggtacagttgaatatgagttgccccatgtgcctccatggttttttcatgctggtagccagaagctttatggggttcttgctggaataattagacttgttggcctatcaacagtgtcaggatagcatactcatacagtaatattgttgtttgtcgctcttaacaaatttcattcaggaaccgggccatgttgatgttcaaaagagttgtcagaagttcatgacatctggtatttattatatcttcttttgtagtgggctggtgtggtctgcttagcagcagataattttgctattgaaaattaatctattaccataagcttggtgactgaggtagacatttgatttatacttaatctaac

SEQ ID NO: 25527 - DNA, 2559 bp, Zea Mays
caatcggatgctgccgccgagcgtcgccatcgcaagcgctgcctccgcatggagctccctctctcccgaagcaccgcaccacagcgagcgtcggggtctctccgcttccccgttctcctcctcctccacccttcccatacatagctaaaccctaaccctacctgtcgcagccgctgttgtcgatgccgctgcctcctcgccttcccgatgccctaatccgaggcgtccccgccgcctactccggccgccgcagagcccacgcctcctcccgatcccaaattctagtgcaggatcgaggaggttgcgatgctatttgtttcgacgtggagctgatataaaaaataggtatactacttgggctcgaccccaacccctgcctcctccatgccctcaccaccatgtgcgagctacaccaagctaggtcaatgttgcgctagacaacttcagttacgtgtagctgacacattgttcaatagctcgaacacaaggagtgcatttaaagttgggaagctggccaatttgctcttgtgtttggtttctacagtttctgggaaattagattttgcaccaaatccaatgcaaatgatatttcactatttcttcctacaagagttcaagttgatcgaaagcgtagagctggctcctctcaggaagctgatcgatcccctgacaggggttcaaattgatcgaaagcatagatctggctcctctcaaggagctgatcgatcctctgacaggtcagtactcggtagcctaagactatgattagtggtgctgctgggagttctttgagcattgaacaagccattcttagattgatcgaggctttgatgatagtactaaatgacaaggaaaatcttagtgcacttggtaagcacaagaatgagaatcattctggtggcagtgagtcaattgagcatatattgcagatgcttcgccagttgccaaccaaaaatatatctgataagataagccatgatgagattacaaatgattctatctccaatgtcaataattcctttgctgatagaaaggcactgcatgtgaagcggaccaaaaatggcttgagtaaacaactagtaatgttgataaattgttgtgtgctacattcccacatgtgtgttttccttgtttcttacagtttaaaataaatgagtcacctgttaggaacatgggattttcccctattcctgcgtttttcctatgaaattgaactgatccatttgaaattcatgtatgattcctgtgttccaaacggggccttattcttttaagttgacactcattttttgcagcttgctattcattcatctgagaaggtaaggaacgcagtggttagtggtgtaaaagggcttttgtctagttgcagttctacattaaaaagaaccaagatgctacttttggaatgtttatgtgttctggcatgtgatgatgctgcagctgtgtctgaggctgcacaagatgctcttgatcatcttttcaaccaaggccacaatctcgtaacagaaaatgagatttctgatacctttactaggctggttgaaaggctaccacaagtggtacttggaagcgaggagacaaccacactttcacatgctaggatgttgttggctctgaccttttatgctggtccctagtttctgataaatcatcttcaccgttctcctgtcattgctgctcgtttctttgattgtttgggtttatgcataggtcatagctcacagttttctggttccatggacaagctaattgtatcaaagccactatctattgggtatctttattcagttgctgagttgaagagtggcgcctattctaaagatacaactaacatatctctgcatgccacgtcaacatttgcagcctccaaaatatctgttatccatgataatgctttgccaattgcattacttggtacagttgaatatgagttgccccatgtgcctccatggttttttcatgctggtagccagaagctttatggggttcttgctggaataattagacttgttggcctatcaacagtgtcagttgatgggttcgattccttaaagctaacagtagtggtcactagcccttgaaaaataaattttggacaaccaaatttcatagcagctttgactattgttgaagttgatctttttactactttagattgtcgttgatgcaaatgttctttgtggtgctttgagatgactaaggatctatatctgtcttaagatttgtcttttccttacaagtgaagagattgcgtggttcaatgaagtaataacctatgatctatgggccaggtctttgatgagtaccttaacttgcaggatagcatactcatacagtaatattgttgtttgtcgctcttaacaaatttcattcaggaaccgggccatgttgatgttcaaaagagttgtcagaagttcatgacatctggtatttattatatcttcttttgtagtgggctggtgtggtctgcttagcagcagataattttgctattgaaaattaatctattaccataagcttggtgactgaggtagacatttgatttatacttaatctaac

SEQ ID NO: 25528 - DNA, 2142 bp, Zea Mays
ccacaatcggatgctgccgccgagcgtcgccatcgcaagcgctgcctccgcatggagctccctctctcccgaagcaccgcaccacagcgagcgtcgggccgctgttgtcgatgccgctgcctcctcgccttcccgatgccctaatccgaggcgtccccgccgcctactccggccgccgcagagcccacggtaccaacaaagacctcctcgtccccggcgcctcctcccgatcccaaattctagtgcaggatcgaggaggttgcgatgctatttgtttcgacgtggagctgatataaaaaataggtatactacttgggctcgaccccaacccctgcctcctccatgccctcaccaccatgtgcgagctacaccaagctaggtcaatgttgcgctagacaacttcagttacgtgtagctgacacattgttcaatagctcgaacacaaggagtgcatttaaagttgggaagctggccaatttgctcttgagttcaagttgatcgaaagcgtagagctggctcctctcaggaagctgatcgatcccctgacaggggttcaaattgatcgaaagcatagatctggctcctctcaaggagctgatcgatcctctgacagattgatcgaggctttgatgatagtactaaatgacaaggaaaatcttagtgcacttggtaagcacaagaatgagaatcattctggtggcagtgagtcaattgagcatatattgcagatgcttcgccagttgccaaccaaaaatatatctgataagataagccatgatgagattacaaatgattctatctccaatgtcaataattcctttgctgatagaaaggcactgcatgtgaagcggaccaaaaatggcttgagtaaacaactacttgctattcattcatctgagaaggtaaggaacgcagtggttagtggtgtaaaagggcttttgtctagttgcagttctacattaaaaagaaccaagatgctacttttggaatgtttatgtgttctggcatgtgatgatgctgcagctgtgtctgaggctgcacaagatgctcttgatcatcttttcaaccaaggccacaatctcgtaacagaaaatgagatttctgatacctttactaggctggttgaaaggctaccacaagtggtacttggaagcgaggagacaaccacactttcacatgctaggatgttgttggctctgaccttttatgctggtccctagtttctgataaatcatcttcaccgttctcctgtcattgctgctcgtttctttgattgtttgggtttatgcataggtcatagctcacagttttctggttccatggacaagctaattgtatcaaagccactatctattgggtatctttattcagttgctgagttgaagagtggcgcctattctaaagatacaactaacatatctctgcatgccacgtcaacatttgcagcctccaaaatatctgttatccatgataatgctttgccaattgcattacttggtacagttgaatatgagttgccccatgtgcctccatggttttttcatgctggtagccagaagctttatggggttcttgctggaataattagacttgttggcctatcaacagtgtcagttgatgggttcgattccttaaagctaacagtagtggtcactagcccttgaaaaataaattttggacaaccaaatttcatagcagctttgactattgttgaagttgatctttttactactttagattgtcgttgatgcaaatgttctttgtggtgctttgagatgactaaggatctatatctgtcttaagatttgtcttttccttacaagtgaagagattgcgtggttcaatgaagtaataacctatgatctatgggccaggtctttgatgagtaccttaacttgcaggatagcatactcatacagtaatattgttgtttgtcgctcttaacaaatttcattcaggaaccgggccatgttgatgttcaaaagagttgtcagaagttcatgacatctggtatttattatatcttcttttgtagtgggctggtgtggtctgcttagcagcagataattttgctattgaaaattaatctattaccataagcttggtgactgaggtagacatttgatttatacttaatctaac

SEQ ID NO: 25529 - DNA, 627 bp, Zea Mays
cttctctcgatcctttacctcaattggagtctagcttcgaatgtcttgcccctacacttcccatcagagtgccggaaacactgcctgaacatataaaattcgaccatggttatacctctaagagtcctgcaattattaattttcttgagatcatggcagaatttactcctgagcagcaacatgctttctgccagtttgtgaccggtgctcctcggcttccacctgggggtttggctgctctaaatcctaagttgaccattgttaggaagcactcttctgtggcaaataataattcaaatgcaactggagcgacagagtctgcagatgatgatttgcctagtgtcatgacttgcgccaactatcttaaactaccaccatactccaccaaggctatcatgctaaagaaactgctttatgcgatcaacgaaggccaagggtcatttgatctttcgtgaatctcaacactaacataggttaaactcagctctccggagtcccaccgaaggtttggagcccgtacctttgggtgtggatgtctatactctcttttcttcttggttgtatattcttgcggatctttatagtgaataatagtaataaattgttttgcgcttcttactatgctaa

SEQ ID NO: 25530 - DNA, 4486 bp, Zea Mays
gggattgcgtaactgatggcaaagatgaatgagattgtgaagcttgcagatgagttacttccttctctgcctgttgggaccatttctttaccagtgtattctggtgttcacatgaaaggttgttctgtaaagaaatccacttctagtaagcagggtgaacatggttcaacagcaaatgaactatcaggtcgggagaagttattgcgtgatcagcctgaacttctgcagcaatttggcatggacctgttacctaccatgacacaggtgtatggctctagtgtaagtggaccaatacggcacaggtgcttatctgtcattgggaaattaatgtactatagctcagctgagatgatccagtctctccttagcacaacaaacatttccagctttttggctggcattttagcttggaaagatccacaagtgttgatccctgctcttcagatagcagaagttttaatggaaaaacttccagagatttttttgaagatgtttgtgagggaaggcgttgttcatgctgttgagtcacttatatgcccagaattatctggtcaggtgactcctcatgtggattccattacatcttcacataataggcgcaaccgccgtagaaataatgctgtgaacactggaaataacttgcctgatggaccaaaaggttccaattctatgattgccaattcacccccaagcatggctgaagttccaaataatagtcttcgtgctttagttagtaatcatgcaaagtcatttaaggataaatatttcccttccgagcctggctcaagtgacattgcagttaccgatgaccttcttaaactgagggcactttgtgcaaaactgaatacaacagctgacactatcaaaacaaaagctaaaggaaaatcaaaggtagtgtctgacaatagttttgatgtcttgtgcaatattgaggagcaattggatgatataatagctgaaatgttgtctgagcttagcaagggtgatggtgtttcgacatttgagttcatcggaagtggagttgttacggctttgctaacctatctgtcatgtggaacatttgggagggaaaaggtgtctgaggcaaacataccaaatttgcgtcatcaggcagtcagacgatacaaaacatttatatcttttgcacttccaaatgataaagatgggaataaaactcctatggcattcctagtccataaactgcaaagtgccctatcttcgttggaacgtttcccagttgtgctcagccattctggaagggcatcgactttgggaggatcccgcctgacaacaggtttaggatctctgtcgcagcccatcaaattgcgtctttgtcgagcgcctggtgagaagtcacttaaggatttttcgtccaatgttgttcttattgactcattagctagtctggcagctgttgaagattttctttggcctagagtccagcgcactgaaccagtattgaagcctccaatgtcatctgcaaataattctggatctggagcagcaagctccacagcttgtgcgccttcaattccatcagaaactcaatctgtccgtcgcacatcgttaagatcaaagtcatcagctgccaccagtggtgcaattaagaaggattatcaggagggaagcataaacacctcaaagggaaaaggaaaagctgttcttaaattgagtttggatgaacctaaaggcccacatactaggaatgctgcgcgcagaaaagctacttcagagaaagatgttgaactgaagccatcacatggtcacatcacttcagaggatgaagatcttgatgcttctcctgttgagattgatgatgctttaattcttgatgatgatgacgaggatgtcccagatgatgaagatgatgatcatgaggcggttctccgaggttctcttccttcctgtgttcctgagagagtgcatgatgtgaaattaggagatgctgatgattctagtgttgcctcattggcaaatgataaccaggcacagccctcatctggttctagtacaaaaaatacttctagcaggggattggacactgctgaatttagaagtccagccacatttggttcacgaggtgcaatgtcgtttgctgcagctgcaatggctggattaactccagtaggtggtcgtggaattagaggtagccgagatcggaatggccttccattgggtgctcgtgcaactgagcattacaacaaattgatatttacagctgctgggaagcagctgaacaaacatttgactgtatatcaagctgttcaaagacaagtagttcatgccgaggatgatgaagatcgattcggtggatctgatttacctgatgatggtaaccacttctgggatgatataaggggtgatgtgttcactataacgtatcagaaggctgataacacagcggagaaggggtctgttggaggttcagcttcagtgccaaaatcttccaaatcagattcttgcagaactttgtctgaaaaacagtgtacttctcttcttgatagtattttgcaaggagagcttccctgtgatttagagaaatcaaaccaaacctacaatatcttatcactattacatgtgttggagggtttgaatcagttatcacctcgtctgagactgcagtcagcctgtgatgattttgctgaaggaaaagttgctacattaaatgggctatacgatgttggagctaaggtaccctcaaaggagtttatcaacagtaagatgaccccaaaacttgctcggcaaattcaggatgttcttgcactgtgtagtggcagtttaccatcttggtgttatcagctgacgaaagcttgtccttttctgtttcctttcgaaacacgaaggcaatacttctattccacagcttttgggttgtctcgtgcacttcatcgtcttcagcaacaaccgggcaatgataataacactgcttttgaaagagaagtcaggattggtagattgcaacgccagaaagtccgtgtttctcgtaaccgtatcttggattctgcagctaaagttatggagatgttctctaatcaaaaggctgtcctagaagttgaatactttggtgaagttggaactggtcttggtccaactttggagttttatactctcttaagccgtgagctgcaaagggttgacttaggattgtggagatctcattcttcagataattctgggatgcaaattgatgcgaatgctgatgatttaataagaagtaaaaatcatgaatcagaatcacttactgagagcaggaacatagtacaatcacctcttggattatttcctcagccttggccacctactgctgctgcatcagaaggtagcaaattcttcaaagttgtcgagtatttccgcttagttggtcgagtgatggcaaaagcattgcaagatggaaggcttctcgatttgcctttgtcgacagcattttacaaacttttgcttggacaagaacttgatttatatgatatattatcttttgataccgagttcggaaagacattgcaagaattgcaaattctcgttgcacgtaaacaatttttggactcctgctctagtgagagccaaaagatagatctatgtttccgtggtgctcccgttgaagatttatatttggacttcactcttccgggctatcctgaatatgttctcaaggaaggtggagagaatgcagaggtcaacatttgtaacttagaagagtatatttctttggttgtggatgctactgttaagaccggcataatgcggcaagtagaggcatttaaggcaggattcaatcaggtgtttgacatatcatcactgcaaatattttctcctcaagaacttgattatctgatttgtggtcgctgtgaactttgggagccggaaacactgcctgaacatataaaattcgaccatggttatacctctaagagtcctgcaattattaattttcttgagatcatggcagaatttactcctgagcagcaacatgctttctgccagtttgtgaccggtgctcctcggcttccacctgggggtttggctgctctaaatcctaagttgaccattgttaggaagcactcttctgtggcaaataataattcaaatgcaactggagcgacagagtctgcagatgatgatttgcctagtgtcatgacttgcgccaactatcttaaactaccaccatactccaccaaggctatcatgctaaagaaactgctttatgcgatcaacgaaggccaagggtcatttgatctttcgtgaatctcaacactaacataggtattggtccacctagaaatctgcgtcattgttacccagagttagtttctacctcattcatgtatgacataggttaaactcagctctccggagtcccaccgaaggtttggagcccgtacctttgggtgtggatgtctatactctcttttcttcttggttgtatattcttgcggatctttatagtgaataatagtaataaattgttttgcgcttcttactatgctaa

SEQ ID NO: 25531 - DNA, 6053 bp, Zea Mays
gcccccaaatcacgagctcctccctctaacctccggcctcttcctgcgtcaccaccgcgcaggcgcagccatccccatccttcctcaaattcccaaccccacccaagccagatctcaccccctccccgatcgctacacctccgatgttcccgcctctttcgcctatcccttcatagccgcgtcgccaccggcgccgctgcgaggcggccgctgcctttctccgctccctttgtatggaaacgcgcagccgcaagcgggcggaggcctcttcttcttccgcgacctcctcctcccgctcctccaagcgctcgcgacacaaccctaaccctaatcctcccgccggcccctcccccgcccccaaactcgtcccgttgccaccacgcacccgccgctcgaccgctgtcaatcccctccccccgatggattcctcgggcgacaacaactccaatcccgtcccgccgccgcggcgccgcggtcgcccctccaacacagataagggtaaggagcagcagcagccggagccgtctcacagctcccgagtgcgcgaggccgagcgcctgctgggtctaggtttcgagggcattgatgatgatgaagattcagggttcggggctggggccatcccccacagcctgacttccgcgagcaccgcgctccagggtcttcttaggaagcttggtgctggcctggacgatatactgccatcgtcggcactgtcagctgcagctgcagccgcgtcatcgtcatcagcatccgggcagctgagtgggaggttgaagaatattcttgcaggtttgcgtgctgatggggaggatggaaggcaggtcgaggcgttaacacaactctgtgagatgctgtccattggcacagaagagtctcttggggcattctcggtggactcatttgtacctgtcctggtcggtctgctcaatcatgagagcaacccagacatcatgttgctcgcagcacgagccctaactcacctctgtgatgtgctgccgtcttcttgttctgcagttgtgcattatggtgctgtgccttgcttttgtgcccggcttctcaccattgaatacatggacttggcggagcagtcattgcaagctcttaaaaaaatatccctggagcatccaactgcgtgcttgcgagctggtgcactaatggcagtcctatcataccttgactttttctccacaggtgttcagattttgtaatggaagcggttccacttcttactaatctactgaactaccatgattcaaaagtactggagcatgcttctgtctgccttacccgtattgcggaatctttttcaccatttccagaaaaattggatgagttgtgcagtcatggattggttgcacaagctgctagcttagtgtctgttagcaactcagcaggacaggcatccttgagtacatcaacatatacgggtgtgattcgtcttctctcaatatgcgcaagtggatcacctctggcagctaaaacacttctccttcttggaattagtggcatacttaaagatatcctttcaggctctgggttggttgctggcacgactgtgtcccctgctttaacaagaccagctgatcagatgaatgagattgtgaagcttgcagatgagttacttccttctctgcctgttgggaccatttctttaccagtgtattctggtgttcacatgaaaggttgttctgtaaagaaatccacttctagtaagcagggtgaacatggttcaacagcaaatgaactatcaggtcgggagaagttattgcgtgatcagcctgaacttctgcagcaatttggcatggacctgttacctaccatgacacaggtgtatggctctagtgtaagtggaccaatacggcacaggtgcttatctgtcattgggaaattaatgtactatagctcagctgagatgatccagtctctccttagcacaacaaacatttccagctttttggctggcattttagcttggaaagatccacaagtgttgatccctgctcttcagatagcagaagttttaatggaaaaacttccagagatttttttgaagatgtttgtgagggaaggcgttgttcatgctgttgagtcacttatatgcccagaattatctggtcaggtgactcctcatgtggattccattacatcttcacataataggcgcaaccgccgtagaaataatgctgtgaacactggaaataacttgcctgatggaccaaaaggttccaattctatgattgccaattcacccccaagcatggctgaagttccaaataatagtcttcgtgctttagttagtaatcatgcaaagtcatttaaggataaatatttcccttccgagcctggctcaagtgacattgcagttaccgatgaccttcttaaactgagggcactttgtgcaaaactgaatacaacagctgacactatcaaaacaaaagctaaaggaaaatcaaaggtagtgtctgacaatagttttgatgtcttgtgcaatattgaggagcaattggatgatataatagctgaaatgttgtctgagcttagcaagggtgatggtgtttcgacatttgagttcatcggaagtggagttgttacggctttgctaacctatctgtcatgtggaacatttgggagggaaaaggtgtctgaggcaaacataccaaatttgcgtcatcaggcagtcagacgatacaaaacatttatatcttttgcacttccaaatgataaagatgggaataaaactcctatggcattcctagtccataaactgcaaagtgccctatcttcgttggaacgtttcccagttgtgctcagccattctggaagggcatcgactttgggaggatcccgcctgacaacaggtttaggatctctgtcgcagcccatcaaattgcgtctttgtcgagcgcctggtgagaagtcacttaaggatttttcgtccaatgttgttcttattgactcattagctagtctggcagctgttgaagattttctttggcctagagtccagcgcactgaaccagtattgaagcctccaatgtcatctgcaaataattctggatctggagcagcaagctccacagcttgtgcgccttcaattccatcagaaactcaatctgtccgtcgcacatcgttaagatcaaagtcatcagctgccaccagtggtgcaattaagaaggattatcaggagggaagcataaacacctcaaagggaaaaggaaaagctgttcttaaattgagtttggatgaacctaaaggcccacatactaggaatgctgcgcgcagaaaagctacttcagagaaagatgttgaactgaagccatcacatggtcacatcacttcagaggatgaagatcttgatgcttctcctgttgagattgatgatgctttaattcttgatgatgatgacgaggatgtcccagatgatgaagatgatgatcatgaggcggttctccgaggttctcttccttcctgtgttcctgagagagtgcatgatgtgaaattaggagatgctgatgattctagtgttgcctcattggcaaatgataaccaggcacagccctcatctggttctagtacaaaaaatacttctagcaggggattggacactgctgaatttagaagtccagccacatttggttcacgaggtgcaatgtcgtttgctgcagctgcaatggctggattaactccagtaggtggtcgtggaattagaggtagccgagatcggaatggccttccattgggtgctcgtgcaactgagcattacaacaaattgatatttacagctgctgggaagcagctgaacaaacatttgactgtatatcaagctgttcaaagacaagtagttcatgccgaggatgatgaagatcgattcggtggatctgatttacctgatgatggtaaccacttctgggatgatataaggggtgatgtgttcactataacgtatcagaaggctgataacacagcggagaaggggtctgttggaggttcagcttcagtgccaaaatcttccaaatcagattcttgcagaactttgtctgaaaaacagtgtacttctcttcttgatagtattttgcaaggagagcttccctgtgatttagagaaatcaaaccaaacctacaatatcttatcactattacatgtgttggagggtttgaatcagttatcacctcgtctgagactgcagtcagcctgtgatgattttgctgaaggaaaagttgctacattaaatgggctatacgatgttggagctaaggtaccctcaaaggagtttatcaacagtaagatgaccccaaaacttgctcggcaaattcaggatgttcttgcactgtgtagtggcagtttaccatcttggtgttatcagctgacgaaagcttgtccttttctgtttcctttcgaaacacgaaggcaatacttctattccacagcttttgggttgtctcgtgcacttcatcgtcttcagcaacaaccgggcaatgataataacactgcttttgaaagagaagtcaggattggtagattgcaacgccagaaagtccgtgtttctcgtaaccgtatcttggattctgcagctaaagttatggagatgttctctaatcaaaaggctgtcctagaagttgaatactttggtgaagttggaactggtcttggtccaactttggagttttatactctcttaagccgtgagctgcaaagggttgacttaggattgtggagatctcattcttcagataattctgggatgcaaattgatgcgaatgctgatgatttaataagaagtaaaaatcatgaatcagaatcacttactgagagcaggaacatagtacaatcacctcttggattatttcctcagccttggccacctactgctgctgcatcagaaggtagcaaattcttcaaagttgtcgagtatttccgcttagttggtcgagtgatggcaaaagcattgcaagatggaaggcttctcgatttgcctttgtcgacagcattttacaaacttttgcttggacaagaacttgatttatatgatatattatcttttgataccgagttcggaaagacattgcaagaattgcaaattctcgttgcacgtaaacaatttttggactcctgctctagtgagagccaaaagatagatctatgtttccgtggtgctcccgttgaagatttatatttggacttcactcttccgggctatcctgaatatgttctcaaggaaggtggagagaatgcagaggtcaacatttgtaacttagaagagtatatttctttggttgtggatgctactgttaagaccggcataatgcggcaagtagaggcatttaaggcaggattcaatcaggtgtttgacatatcatcactgcaaatattttctcctcaagaacttgattatctgatttgtggtcgctgtgaactttgggagccggaaacactgcctgaacatataaaattcgaccatggttatacctctaagagtcctgcaattattaattttcttgagatcatggcagaatttactcctgagcagcaacatgctttctgccagtttgtgaccggtgctcctcggcttccacctgggggtttggctgctctaaatcctaagttgaccattgttaggaagcactcttctgtggcaaataataattcaaatgcaactggagcgacagagtctgcagatgatgatttgcctagtgtcatgacttgcgccaactatcttaaactaccaccatactccaccaaggctatcatgctaaagaaactgctttatgcgatcaacgaaggccaagggtcatttgatctttcgtgaatctcaacactaacataggtattggtccacctagaaatctgcgtcattgttacccagagttagtttctacctcattcatgtatgacataggttaaactcagctctccggagtcccaccgaaggtttggagcccgtacctttgggtgtggatgtctatactctcttttcttcttggttgtatattcttgcggatctttatagtgaataatagtaataaattgttttgcgcttcttactatgctaa

SEQ ID NO: 25532 - DNA, 6079 bp, Zea Mays
ccggcccccaaatcacgagctcctccctctaacctccggcctcttcctgcgtcaccaccgcgcaggcgcagccatccccatccttcctcaaattcccaaccccacccaagccagatctcaccccctccccgatcgctacacctccgatgttcccgcctctttcgcctatcccttcatagccgcgtcgccaccggcgccgctgcgaggcggccgctgcctttctccgctccctttgtatggaaacgcgcagccgcaagcgggcggaggcctcttcttcttccgcgacctcctcctcccgctcctccaagcgctcgcgacacaaccctaaccctaatcctcccgccggcccctcccccgcccccaaactcgtcccgttgccaccacgcacccgccgctcgaccgctgtcaatcccctccccccgatggattcctcgggcgacaacaactccaatcccgtcccgccgccgcggcgccgcggtcgcccctccaacacagataagggtaaggagcagcagcagccggagccgtctcacagctcccgagtgcgcgaggccgagcgcctgctgggtctaggtttcgagggcattgatgatgatgaagattcagggttcggggctggggccatcccccacagcctgacttccgcgagcaccgcgctccagggtcttcttaggaagcttggtgctggcctggacgatatactgccatcgtcggcactgtcagctgcagctgcagccgcgtcatcgtcatcagcatccgggcagctgagtgggaggttgaagaatattcttgcaggtttgcgtgctgatggggaggatggaaggcaggtcgaggcgttaacacaactctgtgagatgctgtccattggcacagaagagtctcttggggcattctcggtggactcatttgtacctgtcctggtcggtctgctcaatcatgagagcaacccagacatcatgttgctcgcagcacgagccctaactcacctctgtgatgtgctgccgtcttcttgttctgcagttgtgcattatggtgctgtgccttgcttttgtgcccggcttctcaccattgaatacatggacttggcggagcagtcattgcaagctcttaaaaaaatatccctggagcatccaactgcgtgcttgcgagctggtgcactaatggcagtcctatcataccttgactttttctccacaggtgttcaggaaacttccttctgatgcatcagattttgtaatggaagcggttccacttcttactaatctactgaactaccatgattcaaaagtactggagcatgcttctgtctgccttacccgtattgcggaatctttttcaccatttccagaaaaattggatgagttgtgcagtcatggattggttgcacaagctgctagcttagtgtctgttagcaactcagcaggacaggcatccttgagtacatcaacatatacgggtgtgattcgtcttctctcaatatgcgcaagtggatcacctctggcagctaaaacacttctccttcttggaattagtggcatacttaaagatatcctttcaggctctgggttggttgctggcacgactgtgtcccctgctttaacaagaccagctgatcagatgaatgagattgtgaagcttgcagatgagttacttccttctctgcctgttgggaccatttctttaccagtgtattctggtgttcacatgaaaggttgttctgtaaagaaatccacttctagtaagcagggtgaacatggttcaacagcaaatgaactatcaggtcgggagaagttattgcgtgatcagcctgaacttctgcagcaatttggcatggacctgttacctaccatgacacaggtgtatggctctagtgtaagtggaccaatacggcacaggtgcttatctgtcattgggaaattaatgtactatagctcagctgagatgatccagtctctccttagcacaacaaacatttccagctttttggctggcattttagcttggaaagatccacaagtgttgatccctgctcttcagatagcagaagttttaatggaaaaacttccagagatttttttgaagatgtttgtgagggaaggcgttgttcatgctgttgagtcacttatatgcccagaattatctggtcaggtgactcctcatgtggattccattacatcttcacataataggcgcaaccgccgtagaaataatgctgtgaacactggaaataacttgcctgatggaccaaaaggttccaattctatgattgccaattcacccccaagcatggctgaagttccaaataatagtcttcgtgctttagttagtaatcatgcaaagtcatttaaggataaatatttcccttccgagcctggctcaagtgacattgcagttaccgatgaccttcttaaactgagggcactttgtgcaaaactgaatacaacagctgacactatcaaaacaaaagctaaaggaaaatcaaaggtagtgtctgacaatagttttgatgtcttgtgcaatattgaggagcaattggatgatataatagctgaaatgttgtctgagcttagcaagggtgatggtgtttcgacatttgagttcatcggaagtggagttgttacggctttgctaacctatctgtcatgtggaacatttgggagggaaaaggtgtctgaggcaaacataccaaatttgcgtcatcaggcagtcagacgatacaaaacatttatatcttttgcacttccaaatgataaagatgggaataaaactcctatggcattcctagtccataaactgcaaagtgccctatcttcgttggaacgtttcccagttgtgctcagccattctggaagggcatcgactttgggaggatcccgcctgacaacaggtttaggatctctgtcgcagcccatcaaattgcgtctttgtcgagcgcctggtgagaagtcacttaaggatttttcgtccaatgttgttcttattgactcattagctagtctggcagctgttgaagattttctttggcctagagtccagcgcactgaaccagtattgaagcctccaatgtcatctgcaaataattctggatctggagcagcaagctccacagcttgtgcgccttcaattccatcagaaactcaatctgtccgtcgcacatcgttaagatcaaagtcatcagctgccaccagtggtgcaattaagaaggattatcaggagggaagcataaacacctcaaagggaaaaggaaaagctgttcttaaattgagtttggatgaacctaaaggcccacatactaggaatgctgcgcgcagaaaagctacttcagagaaagatgttgaactgaagccatcacatggtcacatcacttcagaggatgaagatcttgatgcttctcctgttgagattgatgatgctttaattcttgatgatgatgacgaggatgtcccagatgatgaagatgatgatcatgaggcggttctccgaggttctcttccttcctgtgttcctgagagagtgcatgatgtgaaattaggagatgctgatgattctagtgttgcctcattggcaaatgataaccaggcacagccctcatctggttctagtacaaaaaatacttctagcaggggattggacactgctgaatttagaagtccagccacatttggttcacgaggtgcaatgtcgtttgctgcagctgcaatggctggattaactccagtaggtggtcgtggaattagaggtagccgagatcggaatggccttccattgggtgctcgtgcaactgagcattacaacaaattgatatttacagctgctgggaagcagctgaacaaacatttgactgtatatcaagctgttcaaagacaagtagttcatgccgaggatgatgaagatcgattcggtggatctgatttacctgatgatggtaaccacttctgggatgatataaggggtgatgtgttcactataacgtatcagaaggctgataacacagcggagaaggggtctgttggaggttcagcttcagtgccaaaatcttccaaatcagattcttgcagaactttgtctgaaaaacagtgtacttctcttcttgatagtattttgcaaggagagcttccctgtgatttagagaaatcaaaccaaacctacaatatcttatcactattacatgtgttggagggtttgaatcagttatcacctcgtctgagactgcagtcagcctgtgatgattttgctgaaggaaaagttgctacattaaatgggctatacgatgttggagctaaggtaccctcaaaggagtttatcaacagtaagatgaccccaaaacttgctcggcaaattcaggatgttcttgcactgtgtagtggcagtttaccatcttggtgttatcagctgacgaaagcttgtccttttctgtttcctttcgaaacacgaaggcaatacttctattccacagcttttgggttgtctcgtgcacttcatcgtcttcagcaacaaccgggcaatgataataacactgcttttgaaagagaagtcaggattggtagattgcaacgccagaaagtccgtgtttctcgtaaccgtatcttggattctgcagctaaagttatggagatgttctctaatcaaaaggctgtcctagaagttgaatactttggtgaagttggaactggtcttggtccaactttggagttttatactctcttaagccgtgagctgcaaagggttgacttaggattgtggagatctcattcttcagataattctgggatgcaaattgatgcgaatgctgatgatttaataagaagtaaaaatcatgaatcagaatcacttactgagagcaggaacatagtacaatcacctcttggattatttcctcagccttggccacctactgctgctgcatcagaaggtagcaaattcttcaaagttgtcgagtatttccgcttagttggtcgagtgatggcaaaagcattgcaagatggaaggcttctcgatttgcctttgtcgacagcattttacaaacttttgcttggacaagaacttgatttatatgatatattatcttttgataccgagttcggaaagacattgcaagaattgcaaattctcgttgcacgtaaacaatttttggactcctgctctagtgagagccaaaagatagatctatgtttccgtggtgctcccgttgaagatttatatttggacttcactcttccgggctatcctgaatatgttctcaaggaaggtggagagaatgcagaggtcaacatttgtaacttagaagagtatatttctttggttgtggatgctactgttaagaccggcataatgcggcaagtagaggcatttaaggcaggattcaatcaggtgtttgacatatcatcactgcaaatattttctcctcaagaacttgattatctgatttgtggtcgctgtgaactttgggagccggaaacactgcctgaacatataaaattcgaccatggttatacctctaagagtcctgcaattattaattttcttgagatcatggcagaatttactcctgagcagcaacatgctttctgccagtttgtgaccggtgctcctcggcttccacctgggggtttggctgctctaaatcctaagttgaccattgttaggaagcactcttctgtggcaaataataattcaaatgcaactggagcgacagagtctgcagatgatgatttgcctagtgtcatgacttgcgccaactatcttaaactaccaccatactccaccaaggctatcatgctaaagaaactgctttatgcgatcaacgaaggccaagggtcatttgatctttcgtgaatctcaacactaacataggtattggtccacctagaaatctgcgtcattgttacccagagttagtttctacctcattcatgtatgacataggttaaactcagctctccggagtcccaccgaaggtttggagcccgtacctttgggtgtggatgtctatactctcttttcttcttggttgtatattcttgcggatctttatagtgaataatagtaataaattgttttgcgcttcttactatgctaa

SEQ ID NO: 25533 - DNA, 6119 bp, Zea Mays
caccctcgcagtgtgaagcacgtataccgcatgaaagccggcccccaaatcacgagctcctccctctaacctccggcctcttcctgcgtcaccaccgcgcaggcgcagccatccccatccttcctcaaattcccaaccccacccaagccagatctcaccccctccccgatcgctacacctccgatgttcccgcctctttcgcctatcccttcatagccgcgtcgccaccggcgccgctgcgaggcggccgctgcctttctccgctccctttgtatggaaacgcgcagccgcaagcgggcggaggcctcttcttcttccgcgacctcctcctcccgctcctccaagcgctcgcgacacaaccctaaccctaatcctcccgccggcccctcccccgcccccaaactcgtcccgttgccaccacgcacccgccgctcgaccgctgtcaatcccctccccccgatggattcctcgggcgacaacaactccaatcccgtcccgccgccgcggcgccgcggtcgcccctccaacacagataagggtaaggagcagcagcagccggagccgtctcacagctcccgagtgcgcgaggccgagcgcctgctgggtctaggtttcgagggcattgatgatgatgaagattcagggttcggggctggggccatcccccacagcctgacttccgcgagcaccgcgctccagggtcttcttaggaagcttggtgctggcctggacgatatactgccatcgtcggcactgtcagctgcagctgcagccgcgtcatcgtcatcagcatccgggcagctgagtgggaggttgaagaatattcttgcaggtttgcgtgctgatggggaggatggaaggcaggtcgaggcgttaacacaactctgtgagatgctgtccattggcacagaagagtctcttggggcattctcggtggactcatttgtacctgtcctggtcggtctgctcaatcatgagagcaacccagacatcatgttgctcgcagcacgagccctaactcacctctgtgatgtgctgccgtcttcttgttctgcagttgtgcattatggtgctgtgccttgcttttgtgcccggcttctcaccattgaatacatggacttggcggagcagtcattgcaagctcttaaaaaaatatccctggagcatccaactgcgtgcttgcgagctggtgcactaatggcagtcctatcataccttgactttttctccacaggtgttcagagagttgcattatctacagctgctaatatgtgtaggaaacttccttctgatgcatcagattttgtaatggaagcggttccacttcttactaatctactgaactaccatgattcaaaagtactggagcatgcttctgtctgccttacccgtattgcggaatctttttcaccatttccagaaaaattggatgagttgtgcagtcatggattggttgcacaagctgctagcttagtgtctgttagcaactcagcaggacaggcatccttgagtacatcaacatatacgtggatcacctctggcagctaaaacacttctccttcttggaattagtggcatacttaaagatatcctttcaggctctgggttggttgctggcacgactgtgtcccctgctttaacaagaccagctgatcagatgaatgagattgtgaagcttgcagatgagttacttccttctctgcctgttgggaccatttctttaccagtgtattctggtgttcacatgaaaggttgttctgtaaagaaatccacttctagtaagcagggtgaacatggttcaacagcaaatgaactatcaggtcgggagaagttattgcgtgatcagcctgaacttctgcagcaatttggcatggacctgttacctaccatgacacaggtgtatggctctagtgtaagtggaccaatacggcacaggtgcttatctgtcattgggaaattaatgtactatagctcagctgagatgatccagtctctccttagcacaacaaacatttccagctttttggctggcattttagcttggaaagatccacaagtgttgatccctgctcttcagatagcagaagttttaatggaaaaacttccagagatttttttgaagatgtttgtgagggaaggcgttgttcatgctgttgagtcacttatatgcccagaattatctggtcaggtgactcctcatgtggattccattacatcttcacataataggcgcaaccgccgtagaaataatgctgtgaacactggaaataacttgcctgatggaccaaaaggttccaattctatgattgccaattcacccccaagcatggctgaagttccaaataatagtcttcgtgctttagttagtaatcatgcaaagtcatttaaggataaatatttcccttccgagcctggctcaagtgacattgcagttaccgatgaccttcttaaactgagggcactttgtgcaaaactgaatacaacagctgacactatcaaaacaaaagctaaaggaaaatcaaaggtagtgtctgacaatagttttgatgtcttgtgcaatattgaggagcaattggatgatataatagctgaaatgttgtctgagcttagcaagggtgatggtgtttcgacatttgagttcatcggaagtggagttgttacggctttgctaacctatctgtcatgtggaacatttgggagggaaaaggtgtctgaggcaaacataccaaatttgcgtcatcaggcagtcagacgatacaaaacatttatatcttttgcacttccaaatgataaagatgggaataaaactcctatggcattcctagtccataaactgcaaagtgccctatcttcgttggaacgtttcccagttgtgctcagccattctggaagggcatcgactttgggaggatcccgcctgacaacaggtttaggatctctgtcgcagcccatcaaattgcgtctttgtcgagcgcctggtgagaagtcacttaaggatttttcgtccaatgttgttcttattgactcattagctagtctggcagctgttgaagattttctttggcctagagtccagcgcactgaaccagtattgaagcctccaatgtcatctgcaaataattctggatctggagcagcaagctccacagcttgtgcgccttcaattccatcagaaactcaatctgtccgtcgcacatcgttaagatcaaagtcatcagctgccaccagtggtgcaattaagaaggattatcaggagggaagcataaacacctcaaagggaaaaggaaaagctgttcttaaattgagtttggatgaacctaaaggcccacatactaggaatgctgcgcgcagaaaagctacttcagagaaagatgttgaactgaagccatcacatggtcacatcacttcagaggatgaagatcttgatgcttctcctgttgagattgatgatgctttaattcttgatgatgatgacgaggatgtcccagatgatgaagatgatgatcatgaggcggttctccgaggttctcttccttcctgtgttcctgagagagtgcatgatgtgaaattaggagatgctgatgattctagtgttgcctcattggcaaatgataaccaggcacagccctcatctggttctagtacaaaaaatacttctagcaggggattggacactgctgaatttagaagtccagccacatttggttcacgaggtgcaatgtcgtttgctgcagctgcaatggctggattaactccagtaggtggtcgtggaattagaggtagccgagatcggaatggccttccattgggtgctcgtgcaactgagcattacaacaaattgatatttacagctgctgggaagcagctgaacaaacatttgactgtatatcaagctgttcaaagacaagtagttcatgccgaggatgatgaagatcgattcggtggatctgatttacctgatgatggtaaccacttctgggatgatataaggggtgatgtgttcactataacgtatcagaaggctgataacacagcggagaaggggtctgttggaggttcagcttcagtgccaaaatcttccaaatcagattcttgcagaactttgtctgaaaaacagtgtacttctcttcttgatagtattttgcaaggagagcttccctgtgatttagagaaatcaaaccaaacctacaatatcttatcactattacatgtgttggagggtttgaatcagttatcacctcgtctgagactgcagtcagcctgtgatgattttgctgaaggaaaagttgctacattaaatgggctatacgatgttggagctaaggtaccctcaaaggagtttatcaacagtaagatgaccccaaaacttgctcggcaaattcaggatgttcttgcactgtgtagtggcagtttaccatcttggtgttatcagctgacgaaagcttgtccttttctgtttcctttcgaaacacgaaggcaatacttctattccacagcttttgggttgtctcgtgcacttcatcgtcttcagcaacaaccgggcaatgataataacactgcttttgaaagagaagtcaggattggtagattgcaacgccagaaagtccgtgtttctcgtaaccgtatcttggattctgcagctaaagttatggagatgttctctaatcaaaaggctgtcctagaagttgaatactttggtgaagttggaactggtcttggtccaactttggagttttatactctcttaagccgtgagctgcaaagggttgacttaggattgtggagatctcattcttcagataattctgggatgcaaattgatgcgaatgctgatgatttaataagaagtaaaaatcatgaatcagaatcacttactgagagcaggaacatagtacaatcacctcttggattatttcctcagccttggccacctactgctgctgcatcagaaggtagcaaattcttcaaagttgtcgagtatttccgcttagttggtcgagtgatggcaaaagcattgcaagatggaaggcttctcgatttgcctttgtcgacagcattttacaaacttttgcttggacaagaacttgatttatatgatatattatcttttgataccgagttcggaaagacattgcaagaattgcaaattctcgttgcacgtaaacaatttttggactcctgctctagtgagagccaaaagatagatctatgtttccgtggtgctcccgttgaagatttatatttggacttcactcttccgggctatcctgaatatgttctcaaggaaggtggagagaatgcagaggtcaacatttgtaacttagaagagtatatttctttggttgtggatgctactgttaagaccggcataatgcggcaagtagaggcatttaaggcaggattcaatcaggtgtttgacatatcatcactgcaaatattttctcctcaagaacttgattatctgatttgtggtcgctgtgaactttgggagccggaaacactgcctgaacatataaaattcgaccatggttatacctctaagagtcctgcaattattaattttcttgagatcatggcagaatttactcctgagcagcaacatgctttctgccagtttgtgaccggtgctcctcggcttccacctgggggtttggctgctctaaatcctaagttgaccattgttaggaagcactcttctgtggcaaataataattcaaatgcaactggagcgacagagtctgcagatgatgatttgcctagtgtcatgacttgcgccaactatcttaaactaccaccatactccaccaaggctatcatgctaaagaaactgctttatgcgatcaacgaaggccaagggtcatttgatctttcgtgaatctcaacactaacataggtattggtccacctagaaatctgcgtcattgttacccagagttagtttctacctcattcatgtatgacataggttaaactcagctctccggagtcccaccgaaggtttggagcccgtacctttgggtgtggatgtctatactctcttttcttcttggttgtatattcttgcggatctttatagtgaataatagtaataaattgttttgcgcttcttactatgctaa

SEQ ID NO: 25534 - DNA, 6036 bp, Zea Mays
caccctcgcagtgtgaagcacgtataccgcatgaaagccggcccccaaatcacgagctcctccctctaacctccggcctcttcctgcgtcaccaccgcgcaggcgcagccatccccatccttcctcaaattcccaaccccacccaagccagatctcaccccctccccgatcgctacacctccgatgttcccgcctctttcgcctatcccttcatagccgcgtcgccaccggcgccgctgcgaggcggccgctgcctttctccgctccctttgtatggaaacgcgcagccgcaagcgggcggaggcctcttcttcttccgcgacctcctcctcccgctcctccaagcgctcgcgacacaaccctaaccctaatcctcccgccggcccctcccccgcccccaaactcgtcccgttgccaccacgcacccgccgctcgaccgctgtcaatcccctccccccgatggattcctcgggcgacaacaactccaatcccgtcccgccgccgcggcgccgcggtcgcccctccaacacagataagggtaaggagcagcagcagccggagccgtctcacagctcccgagtgcgcgaggccgagcgcctgctgggtctaggtttcgagggcattgatgatgatgaagattcagggttcggggctggggccatcccccacagcctgacttccgcgagcaccgcgctccagggtcttcttaggaagcttggtgctggcctggacgatatactgccatcgtcggcactgtcagctgcagctgcagccgcgtcatcgtcatcagcatccgggcagctgagtgggaggttgaagaatattcttgcaggtttgcgtgctgatggggaggatggaaggcaggtcgaggcgttaacacaactctgtgagatgctgtccattggcacagaagagtctcttggggcattctcggtggactcatttgtacctgtcctgttgtgcattatggtgctgtgccttgcttttgtgcccggcttctcaccattgaatacatggacttggcggagcagtcattgcaagctcttaaaaaaatatccctggagcatccaactgcgtgcttgcgagctggtgcactaatggcagtcctatcataccttgactttttctccacaggtgttcagagagttgcattatctacagctgctaatatgtgtaggaaacttccttctgatgcatcagattttgtaatggaagcggttccacttcttactaatctactgaactaccatgattcaaaagtactggagcatgcttctgtctgccttacccgtattgcggaatctttttcaccatttccagaaaaattggatgagttgtgcagtcatggattggttgcacaagctgctagcttagtgtctgttagcaactcagcaggacaggcatccttgagtacatcaacatatacgggtgtgattcgtcttctctcaatatgcgcaagtggatcacctctggcagctaaaacacttctccttcttggaattagtggcatacttaaagatatcctttcaggctctgggttggttgctggcacgactgtgtcccctgctttaacaagaccagctgatcagatgaatgagattgtgaagcttgcagatgagttacttccttctctgcctgttgggaccatttctttaccagtgtattctggtgttcacatgaaaggttgttctgtaaagaaatccacttctagtaagcagggtgaacatggttcaacagcaaatgaactatcaggtcgggagaagttattgcgtgatcagcctgaacttctgcagcaatttggcatggacctgttacctaccatgacacaggtgtatggctctagtgtaagtggaccaatacggcacaggtgcttatctgtcattgggaaattaatgtactatagctcagctgagatgatccagtctctccttagcacaacaaacatttccagctttttggctggcattttagcttggaaagatccacaagtgttgatccctgctcttcagatagcagaagttttaatggaaaaacttccagagatttttttgaagatgtttgtgagggaaggcgttgttcatgctgttgagtcacttatatgcccagaattatctggtcaggtgactcctcatgtggattccattacatcttcacataataggcgcaaccgccgtagaaataatgctgtgaacactggaaataacttgcctgatggaccaaaaggttccaattctatgattgccaattcacccccaagcatggctgaagttccaaataatagtcttcgtgctttagttagtaatcatgcaaagtcatttaaggataaatatttcccttccgagcctggctcaagtgacattgcagttaccgatgaccttcttaaactgagggcactttgtgcaaaactgaatacaacagctgacactatcaaaacaaaagctaaaggaaaatcaaaggtagtgtctgacaatagttttgatgtcttgtgcaatattgaggagcaattggatgatataatagctgaaatgttgtctgagcttagcaagggtgatggtgtttcgacatttgagttcatcggaagtggagttgttacggctttgctaacctatctgtcatgtggaacatttgggagggaaaaggtgtctgaggcaaacataccaaatttgcgtcatcaggcagtcagacgatacaaaacatttatatcttttgcacttccaaatgataaagatgggaataaaactcctatggcattcctagtccataaactgcaaagtgccctatcttcgttggaacgtttcccagttgtgctcagccattctggaagggcatcgactttgggaggatcccgcctgacaacaggtttaggatctctgtcgcagcccatcaaattgcgtctttgtcgagcgcctggtgagaagtcacttaaggatttttcgtccaatgttgttcttattgactcattagctagtctggcagctgttgaagattttctttggcctagagtccagcgcactgaaccagtattgaagcctccaatgtcatctgcaaataattctggatctggagcagcaagctccacagcttgtgcgccttcaattccatcagaaactcaatctgtccgtcgcacatcgttaagatcaaagtcatcagctgccaccagtggtgcaattaagaaggattatcaggagggaagcataaacacctcaaagggaaaaggaaaagctgttcttaaattgagtttggatgaacctaaaggcccacatactaggaatgctgcgcgcagaaaagctacttcagagaaagatgttgaactgaagccatcacatggtcacatcacttcagaggatgaagatcttgatgcttctcctgttgagattgatgatgctttaattcttgatgatgatgacgaggatgtcccagatgatgaagatgatgatcatgaggcggttctccgaggttctcttccttcctgtgttcctgagagagtgcatgatgtgaaattaggagatgctgatgattctagtgttgcctcattggcaaatgataaccaggcacagccctcatctggttctagtacaaaaaatacttctagcaggggattggacactgctgaatttagaagtccagccacatttggttcacgaggtgcaatgtcgtttgctgcagctgcaatggctggattaactccagtaggtggtcgtggaattagaggtagccgagatcggaatggccttccattgggtgctcgtgcaactgagcattacaacaaattgatatttacagctgctgggaagcagctgaacaaacatttgactgtatatcaagctgttcaaagacaagtagttcatgccgaggatgatgaagatcgattcggtggatctgatttacctgatgatggtaaccacttctgggatgatataaggggtgatgtgttcactataacgtatcagaaggctgataacacagcggagaaggggtctgttggaggttcagcttcagtgccaaaatcttccaaatcagattcttgcagaactttgtctgaaaaacagtgtacttctcttcttgatagtattttgcaaggagagcttccctgtgatttagagaaatcaaaccaaacctacaatatcttatcactattacatgtgttggagggtttgaatcagttatcacctcgtctgagactgcagtcagcctgtgatgattttgctgaaggaaaagttgctacattaaatgggctatacgatgttggagctaaggtaccctcaaaggagtttatcaacagtaagatgaccccaaaacttgctcggcaaattcaggatgttcttgcactgtgtagtggcagtttaccatcttggtgttatcagctgacgaaagcttgtccttttctgtttcctttcgaaacacgaaggcaatacttctattccacagcttttgggttgtctcgtgcacttcatcgtcttcagcaacaaccgggcaatgataataacactgcttttgaaagagaagtcaggattggtagattgcaacgccagaaagtccgtgtttctcgtaaccgtatcttggattctgcagctaaagttatggagatgttctctaatcaaaaggctgtcctagaagttgaatactttggtgaagttggaactggtcttggtccaactttggagttttatactctcttaagccgtgagctgcaaagggttgacttaggattgtggagatctcattcttcagataattctgggatgcaaattgatgcgaatgctgatgatttaataagaagtaaaaatcatgaatcagaatcacttactgagagcaggaacatagtacaatcacctcttggattatttcctcagccttggccacctactgctgctgcatcagaaggtagcaaattcttcaaagttgtcgagtatttccgcttagttggtcgagtgatggcaaaagcattgcaagatggaaggcttctcgatttgcctttgtcgacagcattttacaaacttttgcttggacaagaacttgatttatatgatatattatcttttgataccgagttcggaaagacattgcaagaattgcaaattctcgttgcacgtaaacaatttttggactcctgctctagtgagagccaaaagatagatctatgtttccgtggtgctcccgttgaagatttatatttggacttcactcttccgggctatcctgaatatgttctcaaggaaggtggagagaatgcagaggtcaacatttgtaacttagaagagtatatttctttggttgtggatgctactgttaagaccggcataatgcggcaagtagaggcatttaaggtgtttgacatatcatcactgcaaatattttctcctcaagaacttgattatctgatttgtggtcgctgtgaactttgggagccggaaacactgcctgaacatataaaattcgaccatggttatacctctaagagtcctgcaattattaattttcttgagatcatggcagaatttactcctgagcagcaacatgctttctgccagtttgtgaccggtgctcctcggcttccacctgggggtttggctgctctaaatcctaagttgaccattgttaggaagcactcttctgtggcaaataataattcaaatgcaactggagcgacagagtctgcagatgatgatttgcctagtgtcatgacttgcgccaactatcttaaactaccaccatactccaccaaggctatcatgctaaagaaactgctttatgcgatcaacgaaggccaagggtcatttgatctttcgtgaatctcaacactaacataggtattggtccacctagaaatctgcgtcattgttacccagagttagtttctacctcattcatgtatgacataggttaaactcagctctccggagtcccaccgaaggtttggagcccgtacctttgggtgtggatgtctatactctcttttcttcttggttgtatattcttgcggatctttatagtgaataatagtaataaattgttttgcgcttcttactatgctaa

SEQ ID NO: 25535 - DNA, 3479 bp, Zea Mays
atccgcccagtttattccgcccggtgtccacgtccactccctcgtcttcaacattccgcccagtttattccgcatcgatccggagattagggtttccgctcgccgccgatgaaaggcggccgcctgcaccgaccggagccgccgcagacccacctcgccatggcggcggcggccgcggcgcctcccatccccgcccctaaccccaccgatgactgggtggacggctcgtggacggtggactgttcctgcggcgtcacgttcgacgacggcgaggagatggtcagctgcgacgagtgcagcgtgtgggtgcacacgcggtgcgcacgctatgtccgcggcgttcacacatccttctcgtgccacaaatgccggaggtccaagcgcgtgccttcctccgctgacgaggccgaggttgctgagctcctcgccgagctgccaacccaccgcccgcctccgctgtaccgccgctgggccgaggtcccgctcccagcccgcgtccacgtccacgggcttcctggcgggggcgacggcgctcttttccgcggcgccccggccttttccgccgccctgtggcgctgcaccggctacgtccccaagagatttggcttccgctactgcgagttcccctcctgggccgacgataatgatggggctgatgctctttttgcgctggccagagagaagcccagggagatgacggatgatgttttgataagtactgaaccgaagaaggagaagcattatgtccgaagcctgagttgtcgtggcaagaagattgacagcaatcaacaagcaatgactcctctaaccaaggctaagaagagagagcctgatagttggaagaatgagtgtcagcagagtgagggctgtgggatacaagattccatttgcgatgatggtcacgctgaaactaatatggtcagttctgatttgctaactgctaaaaccaagaagaagatggaggaatccttggagccaagtggggagaataataactgtgagcaagttgagatttcgagtaaggatggcaaaaaggtgcccatgaagttggaggtctcatctggagttcaaactacatcatccattgtggaacaagaagtgcactcagggtttgttggggtagaggttacaatgtataagcaacagccagaagaggatcacattgtgtgctcaaggcctgacataacaagttcaggtcccatcaaagtgcaagacatacagggccttccaaagcaaccaaatcaagcttcaaatctgcaggttgttgctggtgtaccagatttacttattggtcagccaaaaccacagactattaaaactgagcctagttctcaggaaaacaaggcagctcactgtgtcgatttagtgagtgatgaccatgaaagcaataagcaaggcctaggggatgctgcagttctttcaatcgtccaaaaagattcatccaatttaaaatatggttcagtatcccatgaacatctgaaatcggaagcacaaaatccgaggcacacagttgctgagaatcctaactcaactttgggttctgcaaaagtttgtacatcgttttctggttctgtctctacaccacctgagttatcacactctctggcatctaaagaaccatcatcagggaatagtgattgttcaaagaaagaggagttgctctcaccaactgtcagcaaacatgatcccgtgaaattttctgaagatagttcccaggaagtgacaagatactctgagaaagttcaactaaaagactcacaaccttctgcaccaaaatcatctcaagctagtagaatacatctgtctacagtcaaacatagattaccggtgtcaaaggagcaatcacagaagatagccctcactggaggcacctcagcaagatcattccatggagaggtgccatcacttcagtctcgtaataaggcagcagcttgtagttcttcccagaaaaaggacaagatctaccagcgcatcattaatgtcacgcaagatagttccaataattcagcaccaaccgagctgcgtgcatctgattcggctgccccattgagtgatgagcagcttgcattattgttgcatcaacaattgaacagctcccccagagtaccgagggtgccacgttgccatcaagcagctggtgcacagatgcttcattcaactggatcatctgttttttctaagcggtattcatcacatggaggaagggatcatgcagcggttataaaaaagagaaacagagaagattcattaaaagatagcgaggacactaagaggacagaaaaaaggcatagagtttctagcacggagcatgctcctgtgaaaaactcgtgcagatcagctgaaaatatagcatcagaacagaaaattcgtggcatatgtccaactggagccaatgctggtttatcaaaggatgatttgatggatactattgtttcacacaatttacctggattgattgatgaaattgtcagtaaagacaggaatataacatatgtggaactctgtgatgctatccatcagcattttagggactcaaggaaatcgaatgggggagattctttgtatcgcagttatgcggatgccatcaaaggttgccttaggaagaggagggagtgggctcacctttttgaccaagcttcaaaagcgaacaggggaaagcaactcattgttacctgacgtaccggacgcagagaacataagaactggacctgatagggattcagaggggagtgctgatttgcatcaggataatctacctaggggcaaacgtaagtgtcggaaacgcaggcgacttgagctcaaaggtaggagagtcagggatacaaggaagagatccagcattgattcttcctcagaagatgctgctgcccccttgtctgattccagtagtgacagaaatagtaatcccagggacgacgagagcaaagaagataattctgttgcccaagaaattggcggttacatagacgctaagggtgcagcttcaagtacataatattcaactggtggtatatgcatatgactagaactgaatcttgtggtgaattttcaagttggtcagtgttcgatggatttctttatccatctacaaatctaggaccaaaaagaaaaatgggtactgcagtccgcatcaccaccagtcctttgaaagagcaggaaatggaggagtttgtctaacaaatctgttatgttcaacaatggtgtatatattattagtcagaatttagccttgcgctattatgatagaattagttgcctggtaaacagtggtaacaatgttgttttgtttatttaatgtatcgatggaccatcttatgtatgagtgaattaagtagacattttcgtgtcgagtatgataaattgttagattgctaggttaaataaatctgttcttgtttttgaccacttgtctattcgataaggcatgtaacctgtaatatgcaatccactagtattcaattgctgtggctcgttttcat

SEQ ID NO: 25536 - DNA, 3495 bp, Zea Mays
atccgcccagtttattccgcccggtgtccacgtccactccctcgtcttcaacattccgcccagtttattccgcatcgatccggagattagggtttccgctcgccgccgatgaaaggcggccgcctgcaccgaccggagccgccgcagacccacctcgccatggcggcggcggccgcggcgcctcccatccccgcccctaaccccaccgatgactgggtggacggctcgtggacggtggactgttcctgcggcgtcacgttcgacgacggcgaggagatggtcagctgcgacgagtgcagcgtgtgggtgcacacgcggtgcgcacgctatgtccgcggcgttcacacatccttctcgtgccacaaatgccggaggtccaagcgcgtgccttcctccgctgacgaggccgaggttgctgagctcctcgccgagctgccaacccaccgcccgcctccgctgtaccgccgctgggccgaggtcccgctcccagcccgcgtccacgtccacgggcttcctggcgggggcgacggcgctcttttccgcggcgccccggccttttccgccgccctgtggcgctgcaccggctacgtccccaagagatttggcttccgctactgcgagttcccctcctgggccgacgataatgatggggctgatgctctttttgcgctggccagagagaagcccagggagatgacggatgatgttttgataagtactgaaccgaagaaggagaagcattatgtccgaagcctgagttgtcgtggcaagaagattgacagcaatcaacaagcaatgactcctctaaccaaggctaagaagagagagcctgatagttggaagaatgagtgtcagcagagtgagggctgtgggatacaagattccatttgcgatgatggtcacgctgaaactaatatggtcagttctgatttgctaactgctaaaaccaagaagaagatggaggaatccttggagccaagtggggagaataataactgtgagcaagttgagatttcgagtaaggatggcaaaaaggtgcccatgaagttggaggtctcatctggagttcaaactacatcatccattgtggaacaagaagtgcactcagggtttgttggggtagaggttacaatgtataagcaacagccagaagaggatcacattgtgtgctcaaggcctgacataacaagttcaggtcccatcaaagtgcaagacatacagggccttccaaagcaaccaaatcaagcttcaaatctgcaggttgttgctggtgtaccagatttacttattggtcagccaaaaccacagactattaaaactgagcctagttctcaggaaaacaaggcagctcactgtgtcgatttagtgagtgatgaccatgaaagcaataagcaaggcctaggggatgctgcagttctttcaatcgtccaaaaagattcatccaatttaaaatatggttcagtatcccatgaacatctgaaatcggaagcacaaaatccgaggcacacagttgctgagaatcctaactcaactttgggttctgcaaaagtttgtacatcgttttctggttctgtctctacaccacctgagttatcacactctctggcatctaaagaaccatcatcagggaatagtgattgttcaaagaaagaggagttgctctcaccaactgtcagcaaacatgatcccgtgaaattttctgaagatagttcccaggaagtgacaagatactctgagaaagttcaactaaaagactcacaaccttctgcaccaaaatcatctcaagctagtagaatacatctgtctacagtcaaacatagattaccggtgtcaaaggagcaatcacagaagatagccctcactggaggcacctcagcaagatcattccatggagaggtgccatcacttcagtctcgtaataaggcagcagcttgtagttcttcccagaaaaaggacaagatctaccagcgcatcattaatgtcacgcaagatagttccaataattcagcaccaaccgagctgcgtgcatctgattcggctgccccattgagtgatgagcagcttgcattattgttgcatcaacaattgaacagctcccccagagtaccgagggtgccacgttgccatcaagcagctggtgcacagatgcttcattcaactggatcatctgttttttctaagcggtattcatcacatggaggaagggatcatgcagcggttataaaaaagagaaacagagaagattcattaaaagatagcgaggacactaagaggacagaaaaaaggcatagagtttctagcacggagcatgctcctgtgaaaaactcgtgcagatcagctgaaaatatagcatcagaacagaaaattcgtggcatatgtccaactggagccaatgctggtttatcaaaggatgatttgatggatactattgtttcacacaatttacctggattgattgatgaaattgtcagtaaagacaggaatataacatatgtggaactctgtgatgctatccatcagcattttagggactcaaggaaatcgaatgggggagattctttgtatcgcagttatgcggatgccatcaaaggttgccttaggaagaggagggagtgggctcacctttttgaccaagcttcaaaatgaattcaaataaaaggcgaacaggggaaagcaactcattgttacctgacgtaccggacgcagagaacataagaactggacctgatagggattcagaggggagtgctgatttgcatcaggataatctacctaggggcaaacgtaagtgtcggaaacgcaggcgacttgagctcaaaggtaggagagtcagggatacaaggaagagatccagcattgattcttcctcagaagatgctgctgcccccttgtctgattccagtagtgacagaaatagtaatcccagggacgacgagagcaaagaagataattctgttgcccaagaaattggcggttacatagacgctaagggtgcagcttcaagtacataatattcaactggtggtatatgcatatgactagaactgaatcttgtggtgaattttcaagttggtcagtgttcgatggatttctttatccatctacaaatctaggaccaaaaagaaaaatgggtactgcagtccgcatcaccaccagtcctttgaaagagcaggaaatggaggagtttgtctaacaaatctgttatgttcaacaatggtgtatatattattagtcagaatttagccttgcgctattatgatagaattagttgcctggtaaacagtggtaacaatgttgttttgtttatttaatgtatcgatggaccatcttatgtatgagtgaattaagtagacattttcgtgtcgagtatgataaattgttagattgctaggttaaataaatctgttcttgtttttgaccacttgtctattcgataaggcatgtaacctgtaatatgcaatccactagtattcaattgctgtggctcgttttcat

SEQ ID NO: 25537 - DNA, 796 bp, Zea Mays
atcggttagcttgtttcggcgtttcgttggatcagcagagcgttaaaccctatccgttggatgtagcactacaggcgtcgagcactggtaatcctgcaaccttcgtcatggcgcatgcggcggcggccgccgccgtgccgttacgtcgtccgctcctcttcctcaaggaggctcgactcctgtccacactcgcgacccccttacctgggctccgccacccgcgcgccctccgacccacaggccccttgccctccgatgccgaggacaccgacgatccagacgccggcgacggcgccgccgtgtccttcaagaagagccgcaacgaactgaagcgggaggcccgccgcgccgtgaagtggggaatggacctcgccaagttctccccacctcagatcaagcgcatcctcagtgccgcgtcgctggagcgcgaggtgttcgacgcgctaatgctcgtgaagaagtttgggccggatgtgcgggaaggaaggaggagacagttcaattacatcggaagtcttttgcgcgatgcacaaccagaattgatggatactctaatacaagcttctaaggatggagatgagaggaagttatataccttacttagtgaaggtaaactgttggtggaagaagaggaagaggaggaagaggacctacctgatggagaagaggagaatcaagagtatatgaaaattgcagatagatggtttgacggcctcctctgcaaagacatttcagttactaatgaagtttactctgtccatagtgttgaatttgatcgtcagttgctctaacattt

SEQ ID NO: 25538 - DNA, 3045 bp, Zea Mays
ggagtacctaatattggattttatctgtatcctaccacaactttcttggaaaaaggtttgttgttgttattgtagatgcattaaaccatttaaatttgttgtagatggaaggtccgccacctcctcccgcgccgtcaatggaaggaaagcctaatctcctcgcccgcagtcctaggaaggtccaccacctcaccacctgccgcgccgcaacgtcaatggaaggcgtggttggtgcaaggagattcttctctgcgacggcaacgccaccagctccttggaggtgttgcggcttctctgcaactacacatattttgacggtgccattttttaagtattctcaactatcgagggaggccagattgacatcatcctaactgaggttgatcgatggtgtggtgttcaccgtgaagagcctacaaggagctcaagatcttgtaaaaggtctgttttcctaggattatagttgttctttccattagcgctgctgctacgaacaggatagggtacctgctgctgaaaagcaatcctcttcccaaaaagtctcgagaagctggagcaggttctaatgcttgtcctagaaaagtgacttccaatggtccttaaagctaatgctcgctttttgaaatcacaagaagaattgagaaggtcagatgatgggtcaactacaattggtgatgcaaaggaagaggttgttgcagcaatcattgttgtcaagtcgtctactctatttcagtctatcatacgtggtaatttgcaatatgcttctctaagtgcactaagaaggctttcacttgatcctggtaatcaaacattcctccaccgagatgtgcaaggcaggctatgaagtgctataccatggagaggttggtagatatttacaagatgtactgccagaggggtttggatagctcaacaaattctgatgatttgagtggttatctagaaaaaatattaagatgtctgtatgaaaaatattttaggattttgatcttctcaacatgttaaagaaggaagaagaaatgcttctagctgtaaaggaaaagaacgtcgaaggagctcgttgaatatggcgagcaattgcttgggatattccgtgaggagcttgcaggctatgaagtgctataccatgcagaggttggcagaaactttgagtcaccacaaataatgactgaaatagtagtgaataaaaaggaagcaaatagctgattgatcaagttgtccattacttggaggaaagattgagagaattcgatgaagagaaaagaagaactaaataagtgccaacagctagaaaaacagagaagatcacttgagtatactattttggaccatgagcgcccctgcgtagctccataagttccaccgccaccaccaggccctcaagaaaactgcaattatccatttgttttggctaaatgaggggcatatgatgatgatgagacacccatggatattgatattaaaattaatcttgatgttgatttggaaaaacagataattgcagcaattgatccaaagctacttcaacattgagcaaattatgattgtactggcctaccgaactgaaactgttcctgcactatggaacttcataaagtggtgccttgcaaaccgaagatggcaacttttttaaagtttgcatcttcattacctgctgatgctcctggttggctccttcccatgtatgtattctgtcccatatagaagtaaggcagtcccccttccttactgtgaaaattctgtcagccaaaaatgttttttgtaacgacttattttatcaatttattgtgtaaaagtgcaacagcttccctcagatgctttgtctttgctccccataccaggcacatgttgaagatcattgataatggggagttctatgaacaagagaaaccccttacttttatatgatttgaagtccttggttctcattttaaagcaggtggaaattctaggaaaatctaaaaggtttttgatgagatctaggaggagaggacagccatggcgctcacgtggcggcctccctcttctcgtagaagggcaagacaaggtccaatcaggaagtcgtcatactctatcaggtctgcgattttgttttcatgtaatcgttctgcactaatattttatctaataatttatgtgtcgatgaaatcgcaacgcacgaacatttaactatctcacttcaatcagggcaactaacaagagaccatgaagttgaacaatgttttggcaagtgttaatttgaaattcatatgattgttcacgtcatatggtatatggatgatactgttttgggcaaaaaccaacagagtccttgtttgcacatgtactattcagtggttattatttatttatttattcacatcacatataaccaattagtgtcattatcttgcgaggaggacatcaaactatcttagagagtagatgttactgtttaatatcaatgcctactggatagaacactgtattttcagttataacatggtttatggaatatgtgagctaacatgcaatatatggcatctgtatcatttcaaaattttcatctgcttctcctgttccttggagcacaatggatatatgtgttgctttacccattgcttgtttgtgagggagagatgctctaaacaggcgttggagctgctaggcgacatgtgtgggagtggtgttcagcctaacatagttgtctacaactgcttcatgggtattgcaattcgtgagatattaagatcaatgataatatgtgttatttcgtttttatgtaatcattgtgcataaatttgttatcaaataatttgtatgccatcacaacacacggacataaacatgtattgcttcaccatcatataatttcctttgtatttaacaacacaccctgttgtcttccatgtattcctttggtacttgtacacatttcaaatccatatccaatagtgattgtttgtgtcatggattttcaaatatagtatgctctatgctgaatcacaatgagtacatgtttgaaccaatatattttgattatgttagtttttcaccatatcttgc

SEQ ID NO: 25539 - DNA, 3715 bp, Zea Mays
ctcattctaaaaacacaagtaaataattgcccattttaagtaattaattaaagggttgcttaaatgcaacttaatatttaaaacatttatttttgttggcatatgctttatcttgtgagtgatgcatttgtagtggttagtaagtgaactatttcattatttatggcactgatatactcgtaattattgtacattttttatatcatggtctggatctttcttaggactctatactgcataatgttgatgaacagactgtttgtattctaaatgggtgtcgagttactcatcaaattctaagattggttccaaacattctgatggaaggtccgccacctcctcccgcgccgtcaatggaaggaaagcctaatctcctcgcccgcagtcctaggaaggtccaccacctcaccacctgccgcgccgcaacgtcaatggaaggtccgccacctcctcccgcgcctcccttccatcgacagcatcccctgccattcatggcgctccccatccatcctcaaaaaattctatttaagaaaccctaattgagcccacccaaaaccatccccatcctcctcggaaacttctgtgacggttacttgcataggcgtggttggtgcaaggagattcttctctgcgacggcaacgccaccagctccttggaggtgttgcggcttctctgcaactacacatattttggttagccttactcaacctttgcatcctgtcttacttgctttctctaactgtagggatttctcgagttaggattgtgtttgcttctgacggtgggcttaactgggtgctatgtgttactgatgtgctattgtagaattagagaactgttgggtgctatgtgttactaatacattgggaattagggaactgttgggtgcttgtgttactgatgtgcttttgtagacggtgccattttttaagtattctcaactatcgagggaggccagattgacatcatcctaactgaggttgatcgatggtgtggtgttcaccgtgaagagcctacaaggagctcaagatcttgtaaaaggtctgttttcctaggattatagttgttctttccattagcgctgctgctacgaacaggatagggtacctgctgctgaaaagcaatcctcttcccaaaaagtctcgagaagctggagcaggttctaatgcttgtcctagaaaagtgacttccaatggtccttaaagctaatgctcgctttttgaaatcacaagaagaattgagaaggtcagatgatgggtcaactacaattggtgatgcaaaggaagaggttgttgcagcaatcattgttgtcaagtcgtctactctatttcagtctatcatacgtggtaatttgcaatatgcttctctaagtgcactaagaaggctttcacttgatcctggtaatcaaacattcctccaccgagatgtgcaagggctatgaagtgctataccatggagaggttggtagatatttacaagatgtactgccagaggggtttggatagctcaacaaattctgatgatttgagtggttatctagaaaaaatattaagatgtctgtatgaaaaatattttaggattttgatcttctcaacatgttaaagaaggaagaagaaatgcttctagctgtaaaggaaagtaaggcaaatagaacgtcgaaggagctcgttgaatatggcgagcaattgcttgggatattccgtgaggagcttgcaggctatgaagtgctataccatgcagaggttggcagaaactttgagtcaccacaaataatgactgaaatagtagtgaataaaaaggaagcaaatagctgattgatcaagttgtccattacttggaggaaagattgagagaattcgatgaagagaaaagaagaactaaataagtgccaacagctagaaaaacagagaagatcacttgagtatactattttggaccatgagcgcccctgcgtagctccataagttccaccgccaccaccaggccctcaagaaaactgcaattatccatttgttttggctaaatgaggggcatatgatgatgatgagacacccatggatattgatattaaaattaatcttgatgttgatttggaaaaacagataattgcagcaattgatccaaagctacttcaacattggtacgaatcctaagcaattgtggatgttcttgcccatgacccaatggggcttcttattcttttatatcctgtttgaccataggttgtctagttcagccctcttcagatgtacattaagcataaatgatcttaatctatctgaatcatcaaatgctaaagtagatgttgtaggatgtatttgtgcttttctttatgtcacattcaatacattctctctagagcaaattatgattgtactggcctaccgaactgaaactgttcctgcactatggaacttcataaagtggtgccttgcaaaccgaagatggcaacttttttaaagtttgcatcttcattacctgctgatgctcctggttggctccttcccatgtatgtattctgtcccatatagaagtaaggcagtcccccttccttactgtgaaaattctgtcagccaaaaatgttttttgtaacgacttattttatcaatttattgtgtaaaagtgcaacagcttccctcagatgctttgtctttgctccccataccaggcacatgttgaagatcattgataatggggagttctatgaacaagagaaaccccttacttttatatgatttgaagtccttggttctcattttaaagcaggtatactaacatgcatgagttactatgaggaatgtggtagctggtaggcgacatgtttccgatggaactcatgcacgcgggtcataggtttcgccgtttcggatccaaccttgtttgctaacatgtttgacaaaacgggttgtttttggttcaaaatagtcgttttctcatttctattatttttattagcaatttatttgatatgtcatggatctaagaagcatcattattttgaggaagtaccatgtgaaaaaaacttctatagattatgttcacgggaaaacccaattgtgtttgtaactatgtaaattgggcatttcgttagataaatttacttttccatgtgttacatatgctggcctctattactacagcttttctatgttctattttaggtggaaattctaggaaaatctaaaaggtttttgatgagatctaggaggagaggacagccatggcgctcacgtggcggcctccctcttctcgtagaagggcaagacaaggtccaatcaggaagtcgtcatactctatcaggcgttggagctgctaggcgacatgtgtgggagtggtgttcagcctaacatagttgtctacaactgcttcatgggtattgcaattcgtgagatattaagatcaatgataatatgtgttatttcgtttttatgtaatcattgtgcataaatttgttatcaaataatttgtatgccatcacaacacacggacataaacatgtattgcttcaccatcatataatttcctttgtatttaacaacacaccctgttgtcttccatgtattcctttggtacttgtacacatttcaaatccatatccaatagtgattgtttgtgtcatggattttcaaatatagtatgctctatgctgaatcacaatgagtacatgtttgaaccaatatattttgattatgttagtttttcaccatatcttgc

SEQ ID NO: 25540 - DNA, 2920 bp, Zea Mays
gtcgtcacggctgcccgttgcgtcctagctccacaccgatgatgacgatgaatactgcgcattctgcaagctcagccgctcggccccatagatggaaggtccgccacctcctcccgcgccgtcaatggaaggaaagcctaatctcctcgcccgcagtcctaggaaggtccaccacctcaccacctgccgcgccgcaacgtcaatggaaggcgtggttggtgcaaggagattcttctctgcgacggcaacgccaccagctccttggaggtgttgcggcttctctgcaactacacatattttggttagccttactcaacctttgcatcctgtcttacttgctttctctaactgtagggatttctcgagttaggattgtgtttgcttctgacggtgggcttaactgggtgctatgtgttactgatgtgctattgtagaattagagaactgttgggtgctatgtgttactaatacattgggaattagggaactgttgggtgcttgtgttactgatgtgcttttgtagacggtgccattttttaagtattctcaactatcgagggaggccagattgacatcatcctaactgaggttgatcgatggtgtggtgttcaccgtgaagagcctacaaggagctcaagatcttgtaaaaggtctgttttcctaggattatagttgttctttccattagcgctgctgctacgaacaggatagggtacctgctgctgaaaagcaatcctcttcccaaaaagtctcgagaagctggagcaggttctaatgcttgtcctagaaaagtgacttccaatggtccttaaagctaatgctcgctttttgaaatcacaagaagaattgagaaggtcagatgatgggtcaactacaattggtgatgcaaaggaagaggttgttgcagcaatcattgttgtcaagtcgtctactctatttcagtctatcatacgtggtaatttgcaatatgcttctctaagtgcactaagaaggctttcacttgatcctggtaatcaaacattcctccaccgagatgtgcaaggcaggctatgaagtgctataccatggagaggttggtagatatttacaagatgtactgccagaggggtttggatagctcaacaaattctgatgatttgagtggttatctagaaaaaatattaagatgtctgtatgaaaaatattttaggattttgatcttctcaacatgttaaagaaggaagaagaaatgcttctagctgtaaaggaaaagaacgtcgaaggagctcgttgaatatggcgagcaattgcttgggatattccgtgaggagcttgcaggctatgaagtgctataccatgcagaggttggcagaaactttgagtcaccacaaataatgactgaaatagtagtgaataaaaaggaagcaaatagctgattgatcaagttgtccattacttggaggaaagattgagagaattcgatgaagagaaaagaagaactaaataagtgccaacagctagaaaaacagagaagatcacttgagtatactattttggaccatgagcgcccctgcgtagctccataagttccaccgccaccaccaggccctcaagaaaactgcaattatccatttgttttggctaaatgaggggcatatgatgatgatgagacacccatggatattgatattaaaattaatcttgatgttgatttggaaaaacagataattgcagcaattgatccaaagctacttcaacattggtacgaatcctaagcaattgtggatgttcttgcccatgacccaatggggcttcttattcttttatatcctgtttgaccataggttgtctagttcagccctcttcagatgtacattaagcataaatgatcttaatctatctgaatcatcaaatgctaaagtagatgttgtaggatgtatttgtgcttttctttatgtcacattcaatacattctctctagagcaaattatgattgtactggcctaccgaactgaaactgttcctgcactatggaacttcataaagtggtgccttgcaaaccgaagatggcaacttttttaaagtttgcatcttcattacctgctgatgctcctggttggctccttcccatgtatgtattctgtcccatatagaagtaaggcagtcccccttccttactgtgaaaattctgtcagccaaaaatgttttttgtaacgacttattttatcaatttattgtgtaaaagtgcaacagcttccctcagatgctttgtctttgctccccataccaggcacatgttgaagatcattgataatggggagttctatgaacaagagaaaccccttacttttatatgatttgaagtccttggttctcattttaaagcaggtggaaattctaggaaaatctaaaaggtttttgatgagatctaggaggagaggacagccatggcgctcacgtggcggcctccctcttctcgtagaagggcaagacaaggtccaatcaggaagtcgtcatactctatcaggcgttggagctgctaggcgacatgtgtgggagtggtgttcagcctaacatagttgtctacaactgcttcatgggtattgcaattcgtgagatattaagatcaatgataatatgtgttatttcgtttttatgtaatcattgtgcataaatttgttatcaaataatttgtatgccatcacaacacacggacataaacatgtattgcttcaccatcatataatttcctttgtatttaacaacacaccctgttgtcttccatgtattcctttggtacttgtacacatttcaaatccatatccaatagtgattgtttgtgtcatggattttcaaatatagtatgctctatgctgaatcacaatgagtacatgtttgaaccaatatattttgattatgttagtttttcaccatatcttgc

SEQ ID NO: 25541 - DNA, 3526 bp, Zea Mays
cgcatccaccactatgtcgcgtgcctcctctcatccaccaccgttgccccctcctcgtcgtcacggctgcccgttgcgtcctagctccacaccgatgatgacgatgaatactgcgcattctgcaagctcagccgctcggccccatagatggaaggtccgccacctcctcccgcgccgtcaatggaaggaaagcctaatctcctcgcccgcagtcctaggaaggtccaccacctcaccacctgccgcgccgcaacgtcaatggaaggcgtggttggtgcaaggagattcttctctgcgacggcaacgccaccagctccttggaggtgttgcggcttctctgcaactacacatattttggttagccttactcaacctttgcatcctgtcttacttgctttctctaactgtagggatttctcgagttaggattgtgtttgcttctgacggtgggcttaactgggtgctatgtgttactgatgtgctattgtagaattagagaactgttgggtgctatgtgttactaatacattgggaattagggaactgttgggtgcttgtgttactgatgtgcttttgtagacggtgccattttttaagtattctcaactatcgagggaggccagattgacatcatcctaactgaggttgatcgatggtgtggtgttcaccgtgaagagcctacaaggagctcaagatcttgtaaaaggtctgttttcctaggattatagttgttctttccattagcgctgctgctacgaacaggatagggtacctgctgctgaaaagcaatcctcttcccaaaaagtctcgagaagctggagcaggttctaatgcttgtcctagaaaagtgacttccaatggtccttaaagctaatgctcgctttttgaaatcacaagaagaattgagaaggtcagatgatgggtcaactacaattggtgatgcaaaggaagaggttgttgcagcaatcattgttgtcaagtcgtctactctatttcagtctatcatacgtggtaatttgcaatatgcttctctaagtgcactaagaaggctttcacttgatcctggtaatcaaacattcctccaccgagatgtgcaaggcaggctatgaagtgctataccatggagaggttggtagatatttacaagatgtactgccagaggggtttggatagctcaacaaattctgatgatttgagtggttatctagaaaaaatattaagatgtctgtatgaaaaatattttaggattttgatcttctcaacatgttaaagaaggaagaagaaatgcttctagctgtaaaggaaaagaacgtcgaaggagctcgttgaatatggcgagcaattgcttgggatattccgtgaggagcttgcaggctatgaagtgctataccatgcagaggttggcagaaactttgagtcaccacaaataatgactgaaatagtgaataaaaaggaagcaaatagctgattgatcaagttgtccattacttggaggaaagattgagagaattcgatgaagagaaaagaagaactaaataagtgccaacagctagaaaaacagagaagatcacttgagtatactattttggaccatgagcgcccctgcgtagctccataagttccaccgccaccaccaggccctcaagaaaactgcaattatccatttgttttggctaaatgaggggcatatgatgatgatgagacacccatggatattgatattaaaattaatcttgatgttgatttggaaaaacagataattgcagcaattgatccaaagctacttcaacattggtacgaatcctaagcaattgtggatgttcttgcccatgacccaatggggcttcttattcttttatatcctgtttgaccataggttgtctagttcagccctcttcagatgtacattaagcataaatgatcttaatctatctgaatcatcaaatgctaaagtagatgttgtaggatgtatttgtgcttttctttatgtcacattcaatacattctctctagagcaaattatgattgtactggcctaccgaactgaaactgttcctgcactatggaacttcataaagtggtgccttgcaaaccgaagatggcaacttttttaaagtttgcatcttcattacctgctgatgctcctggttggctccttcccatgtatgtattctgtcccatatagaagtaaggcagtcccccttccttactgtgaaaattctgtcagccaaaaatgttttttgtaacgacttattttatcaatttattgtgtaaaagtgcaacagcttccctcagatgctttgtctttgctccccataccaggcacatgttgaagatcattgataatggggagttctatgaacaagagaaaccccttacttttatatgatttgaagtccttggttctcattttaaagcaggtggaaattctaggaaaatctaaaaggtttttgatgagatctaggaggagaggacagccatggcgctcacgtggcggcctccctcttctcgtagaagggcaagacaaggtccaatcaggaagtcgtcatactctatcaggtctgcgattttgttttcatgtaatcgttctgcactaatattttatctaataatttatgtgtcgatgaaatcgcaacgcacgaacatttaactatctcacttcaatcagggcaactaacaagagaccatgaagttgaacaatgttttggcaagtgttaatttgaaattcatatgattgttcacgtcatatggtatatggatgatactgttttgggcaaaaaccaacagagtccttgtttgcacatgtactattcagtggttattatttatttatttattcacatcacatataaccaattagtgtcattatcttgcgaggaggacatcaaactatcttagagagtagatgttactgtttaatatcaatgcctactggatagaacactgtattttcagttataacatggtttatggaatatgtgagctaacatgcaatatatggcatctgtatcatttcaaaattttcatctgcttctcctgttccttggagcacaatggatatatgtgttgctttacccattgcttgtttgtgagggagagatgctctaaacaggcgttggagctgctaggcgacatgtgtgggagtggtgttcagcctaacatagttgtctacaactgcttcatgggtattgcaattcgtgagatattaagatcaatgataatatgtgttatttcgtttttatgtaatcattgtgcataaatttgttatcaaataatttgtatgccatcacaacacacggacataaacatgtattgcttcaccatcatataatttcctttgtatttaacaacacaccctgttgtcttccatgtattcctttggtacttgtacacatttcaaatccatatccaatagtgattgtttgtgtcatggattttcaaatatagtatgctctatgctgaatcacaatgagtacatgtttgaaccaatatattttgattatgttagtttttcaccatatcttgc

SEQ ID NO: 25542 - DNA, 2038 bp, Zea Mays
ctacaccaccgaccaccgtctgcgcttcgcccccaccccacggccgaccatcgccatccgcatccaccactatgtcgcgtgcctcctctcatccaccaccgttgccccctcctcgtcgtcacggctgcccgttgcgtcctagctccacaccgatgatgacgatgaatactgcgcattctgcaagctcagccgctcggccccatagatggaaggtccgccacctcctcccgcgccgtcaatggaaggaaagcctaatctcctcgcccgcagtcctaggaaggtccaccacctcaccacctgccgcgccgcaacgtcaatggaaggcgtggttggtgcaaggagattcttctctgcgacggcaacgccaccagctccttggaggtgttgcggcttctctgcaactacacatattttgacggtgccattttttaagtattctcaactatcgagggaggccagattgacatcatcctaactgaggttgatcgatggtgtggtgttcaccgtgaagagcctacaaggagctcaagatcttgtaaaaggtctgttttcctaggattatagttgttctttccattagcgctgctgctacgaacaggatagggtacctgctgctgaaaagcaatcctcttcccaaaaagtctcgagaagctggagcaggttctaatgcttgtcctagaaaagtgacttccaatggtccttaaagctaatgctcgctttttgaaatcacaagaagaattgagaaggtcagatgatgggtcaactacaattggtgatgcaaaggaagaggttgttgcagcaatcattgttgtcaagtcgtctactctatttcagtctatcatacgtggtaatttgcaatatgcttctctaagtgcactaagaaggctttcacttgatcctggtaatcaaacattcctccaccgagatgtgcaaggcaggctatgaagtgctataccatggagaggttggtagatatttacaagatgtactgccagaggggtttggatagctcaacaaattctgatgatttgagtggttatctagaaaaaatattaagatgtctgtatgaaaaatattttaggattttgatcttctcaacatgttaaagaaggaagaagaaatgcttctagctgtaaaggaaaagaacgtcgaaggagctcgttgaatatggcgagcaattgcttgggatattccgtgaggagcttgcaggctatgaagtgctataccatgcagaggttggcagaaactttgagtcaccacaaataatgactgaaatagtagtgaataaaaaggaagcaaatagctgattgatcaagttgtccattacttggaggaaagattgagagaattcgatgaagagaaaagaagaactaaataagtgccaacagctagaaaaacagagaagatcacttgagtatactattttggaccatgagcgcccctgcgtagctccataagttccaccgccaccaccaggccctcaaggtggaaattctaggaaaatctaaaaggtttttgatgagatctaggaggagaggacagccatggcgctcacgtggcggcctccctcttctcgtagaagggcaagacaaggtccaatcaggaagtcgtcatactctatcaggcgttggagctgctaggcgacatgtgtgggagtggtgttcagcctaacatagttgtctacaactgcttcatgggtattgcaattcgtgagatattaagatcaatgataatatgtgttatttcgtttttatgtaatcattgtgcataaatttgttatcaaataatttgtatgccatcacaacacacggacataaacatgtattgcttcaccatcatataatttcctttgtatttaacaacacaccctgttgtcttccatgtattcctttggtacttgtacacatttcaaatccatatccaatagtgattgtttgtgtcatggattttcaaatatagtatgctctatgctgaatcacaatgagtacatgtttgaaccaatatattttgattatgttagtttttcaccatatcttgc

SEQ ID NO: 25543 - DNA, 2918 bp, Zea Mays
ccacaccctacaccaccgaccaccgtctgcgcttcgcccccaccccacggccgaccatcgccatccgcatccaccactatgtcgcgtgcctcctctcatccaccaccgttgccccctcctcgtcgtcacggctgcccgttgcgtcctagctccacaccgatgatgacgatgaatactgcgcattctgcaagctcagccgctcggccccatagatggaaggtccgccacctcctcccgcgccgtcaatggaaggaaagcctaatctcctcgcccgcagtcctaggaaggtccaccacctcaccacctgccgcgccgcaacgtcaatggaaggcgtggttggtgcaaggagattcttctctgcgacggcaacgccaccagctccttggaggtgttgcggcttctctgcaactacacatattttggttagccttactcaacctttgcatcctgtcttacttgctttctctaactgtagggatttctcgagttaggattgtgtttgcttctgacggtgggcttaactgggtgctatgtgttactgatgtgctattgtagaattagagaactgttgggtgctatgtgttactaatacattgggaattagggaactgttgggtgcttgtgttactgatgtgcttttgtagacggtgccattttttaagtattctcaactatcgagggaggccagattgacatcatcctaactgaggttgatcgatggtgtggtgttcaccgtgaagagcctacaaggagctcaagatcttgtaaaaggtctgttttcctaggattatagttgttctttccattagcgctgctgctacgaacaggatagggtacctgctgctgaaaagcaatcctcttcccaaaaagtctcgagaagctggagcaggttctaatgcttgtcctagaaaagtgacttccaatggtccttaaagctaatgctcgctttttgaaatcacaagaagaattgagaaggtcagatgatgggtcaactacaattggtgatgcaaaggaagaggttgttgcagcaatcattgttgtcaagtcgtctactctatttcagtctatcatacgtggtaatttgcaatatgcttctctaagtgcactaagaaggctttcacttgatcctggtaatcaaacattcctccaccgagatgtgcaaggcaggctatgaagtgctataccatggagaggttggtagatatttacaagatgtactgccagaggggtttggatagctcaacaaattctgatgatttgagtggttatctagaaaaaatattaagatgtctgtatgaaaaatattttaggattttgatcttctcaacatgttaaagaaggaagaagaaatgcttctagctgtaaaggaaaagaacgtcgaaggagctcgttgaatatggcgagcaattgcttgggatattccgtgaggagcttgcaggctatgaagtgctataccatgcagaggttggcagaaactttgagtcaccacaaataatgactgaaatagtagtgaataaaaaggaagcaaatagctgattgatcaagttgtccattacttggaggaaagattgagagaattcgatgaagagaaaagaagaactaaataagtgccaacagctagaaaaacagagaagatcacttgagtatactattttggaccatgagcgcccctgcgtagctccataagttccaccgccaccaccaggccctcaaggcacatgttgaagatcattgataatggggagttctatgaacaagagaaaccccttacttttatatgatttgaagtccttggttctcattttaaagcaggtggaaattctaggaaaatctaaaaggtttttgatgagatctaggaggagaggacagccatggcgctcacgtggcggcctccctcttctcgtagaagggcaagacaaggtccaatcaggaagtcgtcatactctatcaggtctgcgattttgttttcatgtaatcgttctgcactaatattttatctaataatttatgtgtcgatgaaatcgcaacgcacgaacatttaactatctcacttcaatcagggcaactaacaagagaccatgaagttgaacaatgttttggcaagtgttaatttgaaattcatatgattgttcacgtcatatggtatatggatgatactgttttgggcaaaaaccaacagagtccttgtttgcacatgtactattcagtggttattatttatttatttattcacatcacatataaccaattagtgtcattatcttgcgaggaggacatcaaactatcttagagagtagatgttactgtttaatatcaatgcctactggatagaacactgtattttcagttataacatggtttatggaatatgtgagctaacatgcaatatatggcatctgtatcatttcaaaattttcatctgcttctcctgttccttggagcacaatggatatatgtgttgctttacccattgcttgtttgtgagggagagatgctctaaacaggcgttggagctgctaggcgacatgtgtgggagtggtgttcagcctaacatagttgtctacaactgcttcatgggtattgcaattcgtgagatattaagatcaatgataatatgtgttatttcgtttttatgtaatcattgtgcataaatttgttatcaaataatttgtatgccatcacaacacacggacataaacatgtattgcttcaccatcatataatttcctttgtatttaacaacacaccctgttgtcttccatgtattcctttggtacttgtacacatttcaaatccatatccaatagtgattgtttgtgtcatggattttcaaatatagtatgctctatgctgaatcacaatgagtacatgtttgaaccaatatattttgattatgttagtttttcaccatatcttgc

SEQ ID NO: 25544 - DNA, 3514 bp, Zea Mays
ccgcgatgcaaccgccccgcgacgcctgcccacaccctacaccaccgaccaccgtctgcgcttcgcccccaccccacggccgaccatcgccatccgcatccaccactatgtcgcgtgcctcctctcatccaccaccgttgccccctcctcgtcgtcacggctgcccgttgcgtcctagctccacaccgatgatgacgatgaatactgcgcattctgcaagctcagccgctcggccccatagatggaaggtccgccacctcctcccgcgccgtcaatggaaggaaagcctaatctcctcgcccgcagtcctaggaaggtccaccacctcaccacctgccgcgccgcaacgtcaatggaaggcgtggttggtgcaaggagattcttctctgcgacggcaacgccaccagctccttggaggtgttgcggcttctctgcaactacacatattttggttagccttactcaacctttgcatcctgtcttacttgctttctctaactgtagggatttctcgagttaggattgtgtttgcttctgacggtgggcttaactgggtgctatgtgttactgatgtgctattgtagaattagagaactgttgggtgctatgtgttactaatacattgggaattagggaactgttgggtgcttgtgttactgatgtgcttttgtagacggtgccattttttaagtattctcaactatcgagggaggccagattgacatcatcctaactgaggttgatcgatggtgtggtgttcaccgtgaagagcctacaaggagctcaagatcttgtaaaaggtctgttttcctaggattatagttgttctttccattagcgctgctgctacgaacaggatagggtacctgctgctgaaaagcaatcctcttcccaaaaagtctcgagaagctggagcaggttctaatgcttgtcctagaaaagtgacttccaatggtccttaaagctaatgctcgctttttgaaatcacaagaagaattgagaaggtcagatgatgggtcaactacaattggtgatgcaaaggaagaggttgttgcagcaatcattgttgtcaagtcgtctactctatttcagtctatcatacgtggtaatttgcaatatgcttctctaagtgcactaagaaggctttcacttgatcctggtaatcaaacattcctccaccgagatgtgcaaggcaggctatgaagtgctataccatggagaggttggtagatatttacaagatgtactgccagaggggtttggatagctcaacaaattctgatgatttgagtggttatctagaaaaaatattaagatgtctgtatgaaaaatattttaggattttgatcttctcaacatgttaaagaaggaagaagaaatgcttctagctgtaaaggaaaagaacgtcgaaggagctcgttgaatatggcgagcaattgcttgggatattccgtgaggagcttgcaggctatgaagtgctataccatgcagaggttggcagaaactttgagtcaccacaaataatgactgaaatagtagtgaataaaaaggaagcaaatagctgattgatcaagttgtccattacttggaggaaagattgagagaattcgatgaagagaaaagaagaactaaataagtgccaacagctagaaaaacagagaagatcacttgagtatactattttggaccatgagcgcccctgcgtagctccataagttccaccgccaccaccaggccctcaagaaaactgcaattatccatttgttttggctaaatgaggggcatatgatgatgatgagacacccatggatattgatattaaaattaatcttgatgttgatttggaaaaacagataattgcagcaattgatccaaagctacttcaacattggtacgaatcctaagcaattgtggatgttcttgcccatgacccaatggggcttcttattcttttatatcctgtttgaccataggttgtctagttcagccctcttcagatgtacattaagcataaatgatcttaatctatctgaatcatcaaatgctaaagtagatgttgtaggatgtatttgtgcttttctttatgtcacattcaatacattctctctagagcaaattatgattgtactggcctaccgaactgaaactgttcctgcactatggaacttcataaagtggtgccttgcaaaccgaagatggcaacttttttaaagtttgcatcttcattacctgctgatgctcctggttggctccttcccatgtatgtattctgtcccatatagaagtaaggcagtcccccttccttactgtgaaaattctgtcagccaaaaatgttttttgtaacgacttattttatcaatttattgtgtaaaagtgcaacagcttccctcagatgctttgtctttgctccccataccaggcacatgttgaagatcattgataatggggagttctatgaacaagagaaaccccttacttttatatgatttgaagtccttggttctcattttaaagcaggtggaaattctaggaaaatctaaaaggtttttgatgagatctaggaggagaggacagccatggcgctcacgtggcggcctccctcttctcgtagaagggcaagacaaggtccaatcaggaagtcgtcatactctatcagggcaactaacaagagaccatgaagttgaacaatgttttggcaagtgttaatttgaaattcatatgattgttcacgtcatatggtatatggatgatactgttttgggcaaaaaccaacagagtccttgtttgcacatgtactattcagtggttattatttatttatttattcacatcacatataaccaattagtgtcattatcttgcgaggaggacatcaaactatcttagagagtagatgttactgtttaatatcaatgcctactggatagaacactgtattttcagttataacatggtttatggaatatgtgagctaacatgcaatatatggcatctgtatcatttcaaaattttcatctgcttctcctgttccttggagcacaatggatatatgtgttgctttacccattgcttgtttgtgagggagagatgctctaaacaggcgttggagctgctaggcgacatgtgtgggagtggtgttcagcctaacatagttgtctacaactgcttcatgggtattgcaattcgtgagatattaagatcaatgataatatgtgttatttcgtttttatgtaatcattgtgcataaatttgttatcaaataatttgtatgccatcacaacacacggacataaacatgtattgcttcaccatcatataatttcctttgtatttaacaacacaccctgttgtcttccatgtattcctttggtacttgtacacatttcaaatccatatccaatagtgattgtttgtgtcatggattttcaaatatagtatgctctatgctgaatcacaatgagtacatgtttgaaccaatatattttgattatgttagtttttcaccatatcttgc

SEQ ID NO: 25545 - DNA, 3404 bp, Zea Mays
ccgcgatgcaaccgccccgcgacgcctgcccacaccctacaccaccgaccaccgtctgcgcttcgcccccaccccacggccgaccatcgccatccgcatccaccactatgtcgcgtgcctcctctcatccaccaccgttgccccctcctcgtcgtcacggctgcccgttgcgtcctagctccacaccgatgatgacgatgaatactgcgcattctgcaagctcagccgctcggccccatagatggaaggtccgccacctcctcccgcgccgtcaatggaaggaaagcctaatctcctcgcccgcagtcctaggaaggtccaccacctcaccacctgccgcgccgcaacgtcaatggaaggcgtggttggtgcaaggagattcttctctgcgacggcaacgccaccagctccttggaggtgttgcggcttctctgcaactacacatattttggttagccttactcaacctttgcatcctgtcttacttgctttctctaactgtagggatttctcgagttaggattgtgtttgcttctgacggtgggcttaactgggtgctatgtgttactgatgtgctattgtagaattagagaactgttgggtgctatgtgttactaatacattgggaattagggaactgttgggtgcttgtgttactgatgtgcttttgtagacggtgccattttttaagtattctcaactatcgagggaggccagattgacatcatcctaactgaggttgatcgatggtgtggtgttcaccgtgaagagcctacaaggagctcaagatcttgtaaaaggtctgttttcctaggattatagttgttctttccattagcgctgctgctacgaacaggatagggtacctgctgctgaaaagcaatcctcttcccaaaaagtctcgagaagctggagcaggttctaatgcttgtcctagaaaagtgacttccaatggtccttaaagctaatgctcgctttttgaaatcacaagaagaattgagaaggtcagatgatgggtcaactacaattggtgatgcaaaggaagaggttgttgcagcaatcattgttgtcaagtcgtctactctatttcagtctatcatacgtggtaatttgcaatatgcttctctaagtgcactaagaaggctttcacttgatcctggtaatcaaacattcctccaccgagatgtgcaaggcaggctatgaagtgctataccatggagaggttggtagatatttacaagatgtactgccagaggggtttggatagctcaacaaattctgatgatttgagtggttatctagaaaaaatattaagatgtctgtatgaaaaatattttaggattttgatcttctcaacatgttaaagaaggaagaagaaatgcttctagctgtaaaggaaaagaacgtcgaaggagctcgttgaatatggcgagcaattgcttgggatattccgtgaggagcttgcaggctatgaagtgctataccatgcagaggttggcagaaactttgagtcaccacaaataatgactgaaatagtagtgaataaaaaggaagcaaatagctgattgatcaagttgtccattacttggaggaaagattgagagaattcgatgaagagaaaagaagaactaaataagtgccaacagctagaaaaacagagaagatcacttgagtatactattttggaccatgagcgcccctgcgtagctccataagttccaccgccaccaccaggccctcaagataattgcagcaattgatccaaagctacttcaacattggtacgaatcctaagcaattgtggatgttcttgcccatgacccaatggggcttcttattcttttatatcctgtttgaccataggttgtctagttcagccctcttcagatgtacattaagcataaatgatcttaatctatctgaatcatcaaatgctaaagtagatgttgtaggatgtatttgtgcttttctttatgtcacattcaatacattctctctagagcaaattatgattgtactggcctaccgaactgaaactgttcctgcactatggaacttcataaagtggtgccttgcaaaccgaagatggcaacttttttaaagtttgcatcttcattacctgctgatgctcctggttggctccttcccatgtatgtattctgtcccatatagaagtaaggcagtcccccttccttactgtgaaaattctgtcagccaaaaatgttttttgtaacgacttattttatcaatttattgtgtaaaagtgcaacagcttccctcagatgctttgtctttgctccccataccaggcacatgttgaagatcattgataatggggagttctatgaacaagagaaaccccttacttttatatgatttgaagtccttggttctcattttaaagcaggtggaaattctaggaaaatctaaaaggtttttgatgagatctaggaggagaggacagccatggcgctcacgtggcggcctccctcttctcgtagaagggcaagacaaggtccaatcaggaagtcgtcatactctatcagggcaactaacaagagaccatgaagttgaacaatgttttggcaagtgttaatttgaaattcatatgattgttcacgtcatatggtatatggatgatactgttttgggcaaaaaccaacagagtccttgtttgcacatgtactattcagtggttattatttatttatttattcacatcacatataaccaattagtgtcattatcttgcgaggaggacatcaaactatcttagagagtagatgttactgtttaatatcaatgcctactggatagaacactgtattttcagttataacatggtttatggaatatgtgagctaacatgcaatatatggcatctgtatcatttcaaaattttcatctgcttctcctgttccttggagcacaatggatatatgtgttgctttacccattgcttgtttgtgagggagagatgctctaaacaggcgttggagctgctaggcgacatgtgtgggagtggtgttcagcctaacatagttgtctacaactgcttcatgggtattgcaattcgtgagatattaagatcaatgataatatgtgttatttcgtttttatgtaatcattgtgcataaatttgttatcaaataatttgtatgccatcacaacacacggacataaacatgtattgcttcaccatcatataatttcctttgtatttaacaacacaccctgttgtcttccatgtattcctttggtacttgtacacatttcaaatccatatccaatagtgattgtttgtgtcatggattttcaaatatagtatgctctatgctgaatcacaatgagtacatgtttgaaccaatatattttgattatgttagtttttcaccatatcttgc

SEQ ID NO: 25546 - DNA, 3013 bp, Zea Mays
ttcctctatcgcatcgcccagcctaccccgcgatgcaaccgccccgcgacgcctgcccacaccctacaccaccgaccaccgtctgcgcttcgcccccaccccacggccgaccatcgccatccgcatccaccactatgtcgcgtgcctcctctcatccaccaccgttgccccctcctcgtcgtcacggctgcccgttgcgtcctagctccacaccgatgatgacgatgaatactgcgcattctgcaagctcagccgctcggccccatagatggaaggtccgccacctcctcccgcgccgtcaatggaaggaaagcctaatctcctcgcccgcagtcctaggaaggtccaccacctcaccacctgccgcgccgcaacgtcaatggaaggcgtggttggtgcaaggagattcttctctgcgacggcaacgccaccagctccttggaggtgttgcggcttctctgcaactacacatattttggttagccttactcaacctttgcatcctgtcttacttgctttctctaactgtagggatttctcgagttaggattgtgtttgcttctgacggtgggcttaactgggtgctatgtgttactgatgtgctattgtagaattagagaactgttgggtgctatgtgttactaatacattgggaattagggaactgttgggtgcttgtgttactgatgtgcttttgtagacggtgccattttttaagtattctcaactatcgagggaggccagattgacatcatcctaactgaggttgatcgatggtgtggtgttcaccgtgaagagcctacaaggagctcaagatcttgtaaaaggtctgttttcctaggattatagttgttctttccattagcgctgctgctacgaacaggatagggtacctgctgctgaaaagcaatcctcttcccaaaaagtctcgagaagctggagcaggttctaatgcttgtcctagaaaagtgacttccaatggtccttaaagctaatgctcgctttttgaaatcacaagaagaattgagaaggtcagatgatgggtcaactacaattggtgatgcaaaggaagaggttgttgcagcaatcattgttgtcaagtcgtctactctatttcagtctatcatacgtggtaatttgcaatatgcttctctaagtgcactaagaaggctttcacttgatcctggtaatcaaacattcctccaccgagatgtgcaaggcaggctatgaagtgctataccatggagaggttggtagatatttacaagatgtactgccagaggggtttggatagctcaacaaattctgatgatttgagtggttatctagaaaaaatattaagatgtctgtatgaaaaatattttaggattttgatcttctcaacatgttaaagaaggaagaagaaatgcttctagctgtaaaggaaaagaacgtcgaaggagctcgttgaatatggcgagcaattgcttgggatattccgtgaggagcttgcaggctatgaagtgctataccatgcagaggttggcagaaactttgagtcaccacaaataatgactgaaatagtagtgaataaaaaggaagcaaatagctgattgatcaagttgtccattacttggaggaaagattgagagaattcgatgaagagaaaagaagaactaaataagtgccaacagctagaaaaacagagaagatcacttgagtatactattttggaccatgagcgcccctgcgtagctccataagttccaccgccaccaccaggccctcaagaaaactgcaattatccatttgttttggctaaatgaggggcatatgatgatgatgagacacccatggatattgatattaaaattaatcttgatgttgatttggaaaaacagataattgcagcaattgatccaaagctacttcaacattggcacatgttgaagatcattgataatggggagttctatgaacaagagaaaccccttacttttatatgatttgaagtccttggttctcattttaaagcaggtggaaattctaggaaaatctaaaaggtttttgatgagatctaggaggagaggacagccatggcgctcacgtggcggcctccctcttctcgtagaagggcaagacaaggtccaatcaggaagtcgtcatactctatcagggcaactaacaagagaccatgaagttgaacaatgttttggcaagtgttaatttgaaattcatatgattgttcacgtcatatggtatatggatgatactgttttgggcaaaaaccaacagagtccttgtttgcacatgtactattcagtggttattatttatttatttattcacatcacatataaccaattagtgtcattatcttgcgaggaggacatcaaactatcttagagagtagatgttactgtttaatatcaatgcctactggatagaacactgtattttcagttataacatggtttatggaatatgtgagctaacatgcaatatatggcatctgtatcatttcaaaattttcatctgcttctcctgttccttggagcacaatggatatatgtgttgctttacccattgcttgtttgtgagggagagatgctctaaacaggcgttggagctgctaggcgacatgtgtgggagtggtgttcagcctaacatagttgtctacaactgcttcatgggtattgcaattcgtgagatattaagatcaatgataatatgtgttatttcgtttttatgtaatcattgtgcataaatttgttatcaaataatttgtatgccatcacaacacacggacataaacatgtattgcttcaccatcatataatttcctttgtatttaacaacacaccctgttgtcttccatgtattcctttggtacttgtacacatttcaaatccatatccaatagtgattgtttgtgtcatggattttcaaatatagtatgctctatgctgaatcacaatgagtacatgtttgaaccaatatattttgattatgttagtttttcaccatatcttgc

SEQ ID NO: 25547 - DNA, 2767 bp, Zea Mays
ttcctctatcgcatcgcccagcctaccccgcgatgcaaccgccccgcgacgcctgcccacaccctacaccaccgaccaccgtctgcgcttcgcccccaccccacggccgaccatcgccatccgcatccaccactatgtcgcgtgcctcctctcatccaccaccgttgccccctcctcgtcgtcacggctgcccgttgcgtcctagctccacaccgatgatgacgatgaatactgcgcattctgcaagctcagccgctcggccccatagatggaaggtccgccacctcctcccgcgccgtcaatggaaggaaagcctaatctcctcgcccgcagtcctaggaaggtccaccacctcaccacctgccgcgccgcaacgtcaatggaaggcgtggttggtgcaaggagattcttctctgcgacggcaacgccaccagctccttggaggtgttgcggcttctctgcaactacacatattttggttagccttactcaacctttgcatcctgtcttacttgctttctctaactgtagggatttctcgagttaggattgtgtttgcttctgacggtgggcttaactgggtgctatgtgttactgatgtgctattgtagaattagagaactgttgggtgctatgtgttactaatacattgggaattagggaactgttgggtgcttgtgttactgatgtgcttttgtagacggtgccattttttaagtattctcaactatcgagggaggccagattgacatcatcctaactgaggttgatcgatggtgtggtgttcaccgtgaagagcctacaaggagctcaagatcttgtaaaaggtctgttttcctaggattatagttgttctttccattagcgctgctgctacgaacaggatagggtacctgctgctgaaaagcaatcctcttcccaaaaagtctcgagaagctggagcaggttctaatgcttgtcctagaaaagtgacttccaatggtccttaaagctaatgctcgctttttgaaatcacaagaagaattgagaaggtcagatgatgggtcaactacaattggtgatgcaaaggaagaggttgttgcagcaatcattgttgtcaagtcgtctactctatttcagtctatcatacgtggtaatttgcaatatgcttctctaagtgcactaagaaggctttcacttgatcctggtaatcaaacattcctccaccgagatgtgcaaggcaggctatgaagtgctataccatggagaggttggtagatatttacaagatgtactgccagaggggtttggatagctcaacaaattctgatgatttgagtggttatctagaaaaaatattaagatgtctgtatgaaaaatattttaggattttgatcttctcaacatgttaaagaaggaagaagaaatgcttctagctgtaaaggaaaagaacgtcgaaggagctcgttgaatatggcgagcaattgcttgggatattccgtgaggagcttgcaggctatgaagtgctataccatgcagaggttggcagaaactttgagtcaccacaaataatgactgaaatagtagtgaataaaaaggaagcaaatagctgattgatcaagttgtccattacttggaggaaagattgagagaattcgatgaagagaaaagaagaactaaataagtgccaacagctagaaaaacagagaagatcacttgagtatactattttggaccatgagcgcccctgcgtagctccataagttccaccgccaccaccaggccctcaaggtggaaattctaggaaaatctaaaaggtttttgatgagatctaggaggagaggacagccatggcgctcacgtggcggcctccctcttctcgtagaagggcaagacaaggtccaatcaggaagtcgtcatactctatcagggcaactaacaagagaccatgaagttgaacaatgttttggcaagtgttaatttgaaattcatatgattgttcacgtcatatggtatatggatgatactgttttgggcaaaaaccaacagagtccttgtttgcacatgtactattcagtggttattatttatttatttattcacatcacatataaccaattagtgtcattatcttgcgaggaggacatcaaactatcttagagagtagatgttactgtttaatatcaatgcctactggatagaacactgtattttcagttataacatggtttatggaatatgtgagctaacatgcaatatatggcatctgtatcatttcaaaattttcatctgcttctcctgttccttggagcacaatggatatatgtgttgctttacccattgcttgtttgtgagggagagatgctctaaacaggcgttggagctgctaggcgacatgtgtgggagtggtgttcagcctaacatagttgtctacaactgcttcatgggtattgcaattcgtgagatattaagatcaatgataatatgtgttatttcgtttttatgtaatcattgtgcataaatttgttatcaaataatttgtatgccatcacaacacacggacataaacatgtattgcttcaccatcatataatttcctttgtatttaacaacacaccctgttgtcttccatgtattcctttggtacttgtacacatttcaaatccatatccaatagtgattgtttgtgtcatggattttcaaatatagtatgctctatgctgaatcacaatgagtacatgtttgaaccaatatattttgattatgttagtttttcaccatatcttgc

SEQ ID NO: 25548 - DNA, 2342 bp, Zea Mays
cagctttctcctcccttcctctatcgcatcgcccagcctaccccgcgatgcaaccgccccgcgacgcctgcccacaccctacaccaccgaccaccgtctgcgcttcgcccccaccccacggccgaccatcgccatccgcatccaccactatgtcgcgtgcctcctctcatccaccaccgttgccccctcctcgtcgtcacggctgcccgttgcgtcctagctccacaccgatgatgacgatgaatactgcgcattctgcaagctcagccgctcggccccatagatggaaggtccgccacctcctcccgcgccgtcaatggaaggaaagcctaatctcctcgcccgcagtcctaggaaggtccaccacctcaccacctgccgcgccgcaacgtcaatggaaggcgtggttggtgcaaggagattcttctctgcgacggcaacgccaccagctccttggaggtgttgcggcttctctgcaactacacatattttggttagccttactcaacctttgcatcctgtcttacttgctttctctaactgtagggatttctcgagttaggattgtgtttgcttctgacggtgggcttaactgggtgctatgtgttactgatgtgctattgtagaattagagaactgttgggtgctatgtgttactaatacattgggaattagggaactgttgggtgcttgtgttactgatgtgcttttgtagacggtgccattttttaagtattctcaactatcgagggaggccagattgacatcatcctaactgaggttgatcgatggtgtggtgttcaccgtgaagagcctacaaggagctcaagatcttgtaaaaggtctgttttcctaggattatagttgttctttccattagcgctgctgctacgaacaggatagggtacctgctgctgaaaagcaatcctcttcccaaaaagtctcgagaagctggagcaggttctaatgcttgtcctagaaaagtgacttccaatggtccttaaagctaatgctcgctttttgaaatcacaagaagaattgagaaggtcagatgatgggtcaactacaattggtgatgcaaaggaagaggttgttgcagcaatcattgttgtcaagtcgtctactctatttcagtctatcatacgtggtaatttgcaatatgcttctctaagtgcactaagaaggctttcacttgatcctggtaatcaaacattcctccaccgagatgtgcaaggcaggctatgaagtgctataccatggagaggttggtagatatttacaagatgtactgccagaggggtttggatagctcaacaaattctgatgatttgagtggttatctagaaaaaatattaagatgtctgtatgaaaaatattttaggattttgatcttctcaacatgttaaagaaggaagaagaaatgcttctagctgtaaaggaaaagaacgtcgaaggagctcgttgaatatggcgagcaattgcttgggatattccgtgaggagcttgcaggctatgaagtgctataccatgcagaggttggcagaaactttgagtcaccacaaataatgactgaaatagtagtgaataaaaaggaagcaaatagctgattgatcaagttgtccattacttggaggaaagattgagagaattcgatgaagagaaaagaagaactaaataagtgccaacagctagaaaaacagagaagatcacttgagtatactattttggaccatgagcgcccctgcgtagctccataagttccaccgccaccaccaggccctcaaggtggaaattctaggaaaatctaaaaggtttttgatgagatctaggaggagaggacagccatggcgctcacgtggcggcctccctcttctcgtagaagggcaagacaaggtccaatcaggaagtcgtcatactctatcaggtctgcgttggagctgctaggcgacatgtgtgggagtggtgttcagcctaacatagttgtctacaactgcttcatgggtattgcaattcgtgagatattaagatcaatgataatatgtgttatttcgtttttatgtaatcattgtgcataaatttgttatcaaataatttgtatgccatcacaacacacggacataaacatgtattgcttcaccatcatataatttcctttgtatttaacaacacaccctgttgtcttccatgtattcctttggtacttgtacacatttcaaatccatatccaatagtgattgtttgtgtcatggattttcaaatatagtatgctctatgctgaatcacaatgagtacatgtttgaaccaatatattttgattatgttagtttttcaccatatcttgc

SEQ ID NO: 25549 - DNA, 3534 bp, Zea Mays
ccagctttctcctcccttcctctatcgcatcgcccagcctaccccgcgatgcaaccgccccgcgacgcctgcccacaccctacaccaccgaccaccgtctgcgcttcgcccccaccccacggccgaccatcgccatccgcatccaccactatgtcgcgtgcctcctctcatccaccaccgttgccccctcctcgtcgtcacggctgcccgttgcgtcctagctccacaccgatgatgacgatgaatactgcgcattctgcaagctcagccgctcggccccatagatggaaggtccgccacctcctcccgcgccgtcaatggaaggaaagcctaatctcctcgcccgcagtcctaggaaggtccaccacctcaccacctgccgcgccgcaacgtcaatggaaggcgtggttggtgcaaggagattcttctctgcgacggcaacgccaccagctccttggaggtgttgcggcttctctgcaactacacatattttggttagccttactcaacctttgcatcctgtcttacttgctttctctaactgtagggatttctcgagttaggattgtgtttgcttctgacggtgggcttaactgggtgctatgtgttactgatgtgctattgtagaattagagaactgttgggtgctatgtgttactaatacattgggaattagggaactgttgggtgcttgtgttactgatgtgcttttgtagacggtgccattttttaagtattctcaactatcgagggaggccagattgacatcatcctaactgaggttgatcgatggtgtggtgttcaccgtgaagagcctacaaggagctcaagatcttgtaaaaggtctgttttcctaggattatagttgttctttccattagcgctgctgctacgaacaggatagggtacctgctgctgaaaagcaatcctcttcccaaaaagtctcgagaagctggagcaggttctaatgcttgtcctagaaaagtgacttccaatggtccttaaagctaatgctcgctttttgaaatcacaagaagaattgagaaggtcagatgatgggtcaactacaattggtgatgcaaaggaagaggttgttgcagcaatcattgttgtcaagtcgtctactctatttcaggtgcttgtttactccagtccatgcatttgcaatattggttcttcaagaaaaaatcatgagatgtagtcctcaggaggatatttccccctgagctgtgcatttgtgccttttggcaacataggatgctattattattccatttatccaaacttgtcttttttatccaaaatatggccataaaaagttttttgttaaatatgctaacatttgttgaagaaaatatttgcttgtcggagtgaagatgcatatttgttattactactactatctatattcaattatttattaactttaggtaatcggttatagtcagctcaccctgtttgttgtctttatctacttattgggccatcttaatcgaccaactttcaatagttccatgacattagttggttgcaattacaaatccaacaactttaagtgtgcttactatagaactgcagtttagctatttacagagctgtttaccgatttacagaatgagattgctaaattcagtatatcattgtagtaatttcttattacagtacagctcccaccttgtgttgagttaaatacatgtagagtgataggtcctactttgggtgaccagtagctaggcaccttttccagttaacctgtggaaggttatgtttcacgacgcattcagcagaatgtgccccctcagtgctggcggacatgagtgtggctgtttaccagtattaaaaatgtttgtctacagttttatagattgttttgtcctactgcctactatctgacttgaggaagtaccaaggggtttcagttccgtcttcagtggtgcaaacaagattggtgatggtggtttcggttctgtcttcagtgatgcaaacaagattggccactgtaccaacttagtttatttgacctgaaaattgtgagccttatgttttgaactcaaccttgtgacacttttattttatttttgcagtctatcatacgtggtaatttgcaatatgcttctctaagtgcactaagaaggctttcacttgatcctggtaatcaaacattcctccaccgagatgtgcaaggcaggctatgaagtgctataccatggagaggttggtagatatttacaagatgtactgccagaggggtttggatagctcaacaaattctgatgatttgagtggttatctagaaaaaatattaagatgtctgtatgaaaaatattttaggattttgatcttctcaacatgttaaagaaggaagaagaaatgcttctagctgtaaaggaaaagaacgtcgaaggagctcgttgaatatggcgagcaattgcttgggatattccgtgaggagcttgcaggctatgaagtgctataccatgcagaggttggcagaaactttgagtcaccacaaataatgactgaaatagtagtgaataaaaaggaagcaaatagctgattgatcaagttgtccattacttggaggaaagattgagagaattcgatgaagagaaaagaagaactaaataagtgccaacagctagaaaaacagagaagatcacttgagtatactattttggaccatgagcgcccctgcgtagctccataagttccaccgccaccaccaggccctcaagaaaactgcaattatccatttgttttggctaaatgaggggcatatgatgatgatgagacacccatggatattgatattaaaattaatcttgatgttgatttggaaaaacagataattgcagcaattgatccaaagctacttcaacattggcacatgttgaagatcattgataatggggagttctatgaacaagagaaaccccttacttttatatgatttgaagtccttggttctcattttaaagcaggtggaaattctaggaaaatctaaaaggtttttgatgagatctaggaggagaggacagccatggcgctcacgtggcggcctccctcttctcgtagaagggcaagacaaggtccaatcaggaagtcgtcatactctatcaggcgttggagctgctaggcgacatgtgtgggagtggtgttcagcctaacatagttgtctacaactgcttcatgggtattgcaattcgtgagatattaagatcaatgataatatgtgttatttcgtttttatgtaatcattgtgcataaatttgttatcaaataatttgtatgccatcacaacacacggacataaacatgtattgcttcaccatcatataatttcctttgtatttaacaacacaccctgttgtcttccatgtattcctttggtacttgtacacatttcaaatccatatccaatagtgattgtttgtgtcatggattttcaaatatagtatgctctatgctgaatcacaatgagtacatgtttgaaccaatatattttgattatgttagtttttcaccatatcttgc

SEQ ID NO: 25550 - DNA, 1949 bp, Zea Mays
attttaacggtctcccctacctctctagacaaccgaaacagccctccctaccgaaacagcttctcatgttgtacatgccctaaaactgattgcacatcggtcgttgaataaaagggcaatcatctcagcgcagagctcgagcccgcagcctgccatcacctaccaaatccggcgggcgtccagcggatctccatctggtcggcgtggatcggatcttcggtggtgtttctcgtcttcacggcgattagtggcggcgagccgaccacgtccccgcagcagcagtcagcggcggcttgacgcggtcggacgggtacctctagttggcatcagcgagtgggcgcggggcgccgcaagtctcaccgtccgctggtgtagaggccccgagtctcggcgctatggagtgtaggccgcgtgtctccgcttagggagggccaggggtcaacaaagggacttgtcaagtgacaacatcgcggccttcgggtgttggaggtgtccggcctgttggtgccgtaccacaggattggttcattatttgtgggagatctatatttgtcttaccattctgttcccgcttctagtccccaaatcttcacgggctttgccagatcgctggccatctccttggcagccgcttccgctgtcgccagccatcaccaacctgcgcctcatagtggagcccaggaaaggcggtgggactgagcgagggaagaggagatgactagcttgtcgatcacggtgatgacgctgaacctgcatgaaggcgaacagccgagcgagagccccaacagctgggagaagcgccgggacatctgcgtcagcgtcatcaccagctactctcccaccatcctttgcacccagcaaggcttaagatggcaactggactacctacaacagtgcttgccgggttagacctatccagatctactcggaaccagccaagctaatggaagaacccatagaaaaaggataataaaatattatagagcgcgttatagtaggatgtgatgtccaaaccatggtttttgaggccctgtggtgaggcgcggcacccgaccctccctgacaatgcctaggtgtttatgttggatgcctaggcgacaccatactcacattttaggcgtcataaaggtgttatgtagactagagttttagatactagtgcagcacatatatgccttgtttgttctcaattcttgagcctaacacatactagtgcagctaagacagagtacacacactattccagctaagagcagagtacactcaccagtccgtgagcaaaggcagagcaaagagtacaaaagcggcaggtggttgggagatttgggagaccagagcagatgaggtggcaggcagctaggagattcaggagaccagaacagatgaggtggcagagggctgggggatttgggggactagaacagaggaggtggtagggggcgtacacacttactaggcagacaagcagcaggtgtggaccggcgacggtgatggcgagagtctcgaagcgggcaggcaggtgtggtgcgacgggccgacgacctcgggcatttaggctggtgagcagcaggttgtgacagcgacccagaggagcagcttggcagagatttagggtgtgtctggttcgacgtacaagaatggatggaaggggacaaccacattttctatagtgtttggatgagagtcacacgggggcgaggtgaacaccggagcaatttttgatggcgtcgtgatcccaaaaaatcgagaggacggtgtcacctccgcctcatcctactttgacctcaaaccaaacacatccttagagccgcaatcgctgctcagagctcctggtccacccgctgccttcacctttctccgtgaagttgcgcgcacctgcactagatgtctccgaccggtctttttcctgcttgaatagcatatatgtggcaatgctcacacttttctgt

SEQ ID NO: 25551 - DNA, 819 bp, Zea Mays
gcttctcatgttgtacatgccctaaaactgattgcacatcggtcgttgaataaaagggcaatcatctcagcgcagagctcgagcccgcagcctgccatcacctaccaaatccggcgggcgtccagcggatctccatctggtcggcgtggatcggatcttcggtggtgtttctcgtcttcacggcgattagtggcggcgagccgaccacgtccccgcagcagcagtcagcggcggcttgacgcggtcggacgggtacctctagttggcatcagcgagtgggcgcggggcgccgcaagtctcaccgtccgctggtgtagaggccccgagtctcggcgctatggagtgtaggccgcgtgtctccgcttagggagggccaggggtcaacaaagggacttgtcaagtgacaacatcgcggccttcgggtgttggaggtgtccggcctgttggtgccgtaccacaggattggttcattatttgtgggagatctatatttgtcttaccattctgttcccgcttctagtccccaaatcttcacgggctttgccagatcgctggccatctccttggcagccgcttccgctgtcgccagccatcaccaacctgcgcctcatagtggagcccaggaaaggcggtgggactgagcgagggaagaggagatgactagcttgtcgatcacggtgatgacgctgaacctgcatgaaggcgaacagccgagcgagagccccaacagctgggagaagcgccgggacatctgcgtcagcgtcatcaccagctactctcccaccatcctttgcacccagcaaggttaaaaatagtggg

SEQ ID NO: 25552 - DNA, 1650 bp, Zea Mays
caaaggtgctgtatctgctgtgccgctattcaaggtcatctactgatagctttctggtcctaagatcacactgataaaaggactggctctgaattactgccgttgcattctatgatgcaccattgcatgttgtgagcctgaacattgtgaaaaactttgttttatttggtgatattcacaaaagcatatattttcttagttggaaggaacaaggttctcaattgagtctgctggcaaaagattttggttcacttgattgttttgcaactgagttcttaattgatggaagcaccttgagccttgtagtttcagattctgacaagaacgtgcagattttctattatgcccccaaaatggtggagagctggaaggggcaaaagctcctttccagagcagaatttcatgttggagcccatgtgtcgaagtttctgagattacagatgttgcctacacaaggattagcatctgagaagacaaatcgttttgctcttgtatttggaacgttggatggtggaatcggatgcattgcacctgttgatgaattgacatttcgacggctccagagcttgcaaaggaagctcgtagatgccataccccatgtctgtggattgaatccaagatcgttcaggcatttcaagtcaaatggcaaggcacatcgtcctggaccagataacatcattgactttgagcttctttctcactatgagatgatgtctttagaagagcagctcgagattgcgcagcagattggaactacccgctctcagattctttctaactttagtgacttttcactgggcactagtttcttgtaagtggtaacctgtggctaagtaacaccatgcttctgatgaaagtggtgcttgccattcattagccacgtcaagaattaggcccaattccatcaacatggtcacttccaccagttttattgtaaagatggctgctgtaatttagatattaatggtgtaactggaagttgggcgcttggcaactgattgcaaccatatttgtttcgttggactgaagtagtattggaaactgcactgaaaatgaactatctgaagagtttctcgacaacgtctcagcataataaggggatgtttgaatgcactagaactaatagttagttggctaaaagttggtagtagaattagttagctaataaataactatctaactattaactaatttatcaaaaatagctaatagttgaactattagttaagttgtttggatgtgtcaactaattttatacattaactaaaagctatagtgcattcaaacactccctaagtcatgtttggcttagcttttagctaaacaacgaagaccctgtttggaagcaatattatttttaagttaggagaggctaccttggtttttaagaaactgagaatcaaatttttataaactgagtaataaaacttatgtttagaaccatctcaatttctataaactagtgtgttaaaaattggatggtttctataaactgagtcataaagtttatataataaagtttatatgaaaagcatggttttttgagtttggaaaactaatagtatcatcgaaaatctaccattagcttctcaaaataaaaaacctaacaacacttttttttaaaaaaaactttaatagctgagcttcacc

SEQ ID NO: 25553 - DNA, 1860 bp, Zea Mays
gccaataatccaattaatacctacattagaacatggaagataatgatatatgatcagggagtcggtcaatcttatcaatgagcggatataaatttctcttggctagtttccactgccaacggcattcgaaggtgtgttgttctgggcatggaaaaaatggaacgctctcggcccttcaacaatctatccgtccagatttaattaccgaggtggaactaccaagttgcacaggtatttggacagtttactacaagagttctcgtggaaatacaactgacaataatgaatatcatgcttatttgataataagcctagaaagccgcacaatggtgcttcagacaggtgatgatcttggagaggtcactgaaacagttgactataatgttcaagggagcacaattgctgctggtaacttgtttgggaggtgtcgcgtcatacaggtatatgccaagggtgctcgtgtgcttgatggttccttcatgacacaagagctaaacttttctatgcatacttccgaatcgtcattgaattctgagcctcttgcagctgcatctgcttcaattgcagatccatatgttctcttgaaaatgagtgatggatccattcgacttctcataggagatccttcaacctgtactatttctataaatgctcctgccatattcgcaagctcaagtgagcggatatcagcatgtacactatactgtgacagaggacctgagccatggcttagaaagacccatactgatgcatggttatccactgatgttggagaggctattgatgataatgacaattcttctcacgacctgtctgatatatattgcataatttgttatgaaagcggattctggaataggggatcgagatgcttctaaagtttctgtgaagaaagaggaagcagcaaacattaagatagttgagcttgcaatgcatagatggtctgggcagttcagccggccattcctctttggattattgaatgatgggacattgttgtgttatcacgcatattattttgaaggctcagaaagcaatgtgcaatgtgctcctttctcacctcatggtggttcaccggatattggcaatgccactgattcaagactcagaaatttgagattttgtcgagtttcaatagatatctcatcacgagatgacatatcatgtcttgtacgaccaagaataacaattttcaacaatgttggaggttacgagggattatttcttggtggcccaaggccaacctgggtttttgtttgtcgacagcgatttcgggtgcatccacagttatgcgacggtccaattgtagcctttactgttctccacaatgtcaattgttgccgtggccttatttatgtgacatctcagggttttctgaagatatgtcagttgccatctgcatataactatgacaactactggcctgttcaaaaggtccccttgcatggcactccacatcaggtcacatattatggagagcagtcactttatccgcttattgtgtcagttcctcaggttcgccccttaaatcaagttctttcttctatggctgatcaagaattgggtctgcacatggagaacgatgttacaagtggtggtgacctccaagaggtctatactgttgatgaatttgaagttcgtattatggagttgggaaaatccaatggacgttgggagacaaggtccaccattccgatgcaatcatttgaaaacgctttaacagtgcgcatcgttaccttgcaaaacacatctacgaaggaaaatgaaaccctgatggccattggaactgcttatgttcaaggggaggatgttgctgctagaggacgggtgcttctgttctctttcagtaaaagtgaaaat

SEQ ID NO: 25554 - DNA, 3555 bp, Zea Mays
cgcatttcgttcaaaatcgcgcggtcaaatccgagctcggggccatcgccgtcgccgcgcctcccatcccgcgaagatgagctacgcggcgtacaagatgatgcatttgcccaccggaatcgaccattgcgctgccggcttcatcacccactcccccgccgacgctgccgccttctccacgcccgcgcccgcgcccaccgccgccgctggacccgacggcgatattgactccactgcggctagggcaccccggcgagtgggtcctacccccaacctggttgtgtcggcggctaacgtgctcgaggtgtatgccgtgagggccgaggtcgcgactggggccgaggatgcgggtaattcttcgtctaccggcaccatcctggatggtatctccggggctcgactggaacttgtgtgccattacaggcttcacggtaacattgaatcgatggctgtgttgtccgatggcacagagaataggcgagactccattgcagttacgtttaacgatgcaaaaataacatgtctggagtttgatgacagcatcaatggcctgcggacaagctcaatgcattgttttgaaggccctgaatggttccatctgaaaaggggcagggaatcatttgcctggggtcctatcataaaaggggatcctcaaggcagatgtggtgctgtacttgtttatggattacagataataattttgaaagcagctcaggttgggcagagcttagtaggagaggatgaacctacacgcgtgttgagttccactgctgttcggattgaatcttcgtatgtgattgatttacgtgatctagaaatgaatcacatcaaagactttacatttgtgcatggttatattgagcctgtgttggtcatacttcatgagcgagagcctacatgggctgggcgtatctcatcgaagagccaaacatgcatgctatctgcgtttagtataagcatgggtttaaagcaacatccgatgatatggtctgctgcttgccccctcctataagtggcattcttgtgatctgtgcaaattcaatccattatcatagtcagtccacttcttgttcacttgccttgaacagtttctcatcacagcctgacggaagctaaagcaacatggttatcccatgacattgtgatgttttcatcaaagaatggagaaatactattactaacagtggtttatgatgggcgagctgtgcaaagattagatcttatgaaatccaaagcatctgttcttagttcgggtgctacaactcttggaagttcgttcatatttcttggcagtcgtcttgcagatagccttcttgtgcaattttcatgtggcatgccaacatcggttctgcctgatctaacagatgagcctgctgatattgaaagtgatctgcctttctcaaagcgcctaaagaggattccctctgatgttctacaagatgttactagtgttgaggaactttcttttcataataaggcagtgccaaatattgtagattcagcagagaagatctcatttgttgtgagagatgctctgatcaatgttggtcctctgaaagattttgcatatggtttaagaactaattctgatcccaacgcagcaggcattgcgaagcaaagcaattatgagctggtgtgttgttctgggcatggaaaaaatggaacgctctcggcccttcaacaatctatccgtccagatttaattaccgaggtggaactaccaagttgcacaggtatttggacagtttactacaagagttctcgtggaaatacaactgacaataatgaatatcatgcttatttgataataagcctagaaagccgcacaatggtgcttcagacaggtgatgatcttggagaggtcactgaaacagttgactataatgttcaagggagcacaattgctgctggtaacttgtttgggaggtgtcgcgtcatacaggtatatgccaagggtgctcgtgtgcttgatggttccttcatgacacaagagctaaacttttctatgcatacttccgaatcgtcattgaattctgagcctcttgcagctgcatctgcttcaattgcagatccatatgttctcttgaaaatgagtgatggatccattcgacttctcataggagatccttcaacctgtactatttctataaatgctcctgccatattcgcaagctcaagtgagcggatatcagcatgtacactatactgtgacagaggacctgagccatggcttagaaagacccatactgatgcatggttatccactgatgttggagaggctattgatgataatgacaattcttctcacgacctgtctgatatatattgcataatttgttatgaaagcggtaaactggaaatttttgaagtacccagttttaaacgtgtgttctctgtggataattttgtttctggaccagctatcttgtttgatgtgttttctcgtaattctactaaggattctggaataggggatcgagatgcttctaaagtttctgtgaagaaagaggaagcagcaaacattaagatagttgagcttgcaatgcatagatggtctgggcagttcagccggccattcctctttggattattgaatgatgggacattgttgtgttatcacgcatattattttgaaggctcagaaagcaatgtgcaatgtgctcctttctcacctcatggtggttcaccggatattggcaatgccactgattcaagactcagaaatttgagattttgtcgagtttcaatagatatctcatcacgagatgacatatcatgtcttgtacgaccaagaataacaattttcaacaatgttggaggttacgagggattatttcttggtggcccaaggccaacctgggtttttgtttgtcgacagcgatttcgggtgcatccacagttatgcgacggtccaattgtagcctttactgttctccacaatgtcaattgttgccgtggccttatttatgtgacatctcagggttttctgaagatatgtcagttgccatctgcatataactatgacaactactggcctgttcaaaaggtccccttgcatggcactccacatcaggtcacatattatggagagcagtcactttatccgcttattgtgtcagttcctcaggttcgccccttaaatcaagttctttcttctatggctgatcaagaattgggtctgcacatggagaacgatgttacaagtggtggtgacctccaagaggtctatactgttgatgaatttgaagttcgtattatggagttgggaaaatccaatggacgttgggagacaaggtccaccattccgatgcaatcatttgaaaacgctttaacagtgcgcatcgttaccttgcaagtatgtatgtcttctacacttgtatggatactgcactcaaactaaaattttatttaccagaatattattgattttcgcctcagaacacatctacgaaggaaaatgaaaccctgatggccattggaactgcttatgttcaaggggaggatgttgctgctagaggacgggtgcttctgttctctttcagtaaaagtgaaaat

SEQ ID NO: 25555 - DNA, 3635 bp, Zea Mays
aaccccccttcgtcccgtcgcatttcgttcaaaatcgcgcggtcaaatccgagctcggggccatcgccgtcgccgcgcctcccatcccgcgaagatgagctacgcggcgtacaagatgatgcatttgcccaccggaatcgaccattgcgctgccggcttcatcacccactcccccgccgacgctgccgccttctccacgcccgcgcccgcgcccaccgccgccgctggacccgacggcgatattgactccactgcggctagggcaccccggcgagtgggtcctacccccaacctggttgtgtcggcggctaacgtgctcgaggtgtatgccgtgagggccgaggtcgcgactggggccgaggatgcgggtaattcttcgtctaccggcaccatcctggatggtatctccggggctcgactggaacttgtgtgccattacaggtgcaaacaaatggctcttgcctctttgcattcacttttagctgtaaatttcaggcttcacggtaacattgaatcgatggctgtgttgtccgatggcacagagaataggcgagactccattgcagttacgtttaacgatgcaaaaataacatgtctggagtttgatgacagcatcaatggcctgcggacaagctcaatgcattgttttgaaggccctgaatggttccatctgaaaaggggcagggaatcatttgcctggggtcctatcataaaaggggatcctcaaggcagatgtggtgctgtacttgtttatggattacagataataattttgaaagcagctcaggttgggcagagcttagtaggagaggatgaacctacacgcgtgttgagttccactgctgttcggattgaatcttcgtatgtgattgatttacgtgatctagaaatgaatcacatcaaagactttacatttgtgcatggttatattgagcctgtgttggtcatacttcatgagcgagagcctacatgggctgggcgtatctcatcgaagagccaaacatgcatgctatctgcgtttagtataagcatgggtttaaagcaacatccgatgatatggtctgctgctaaacttccacatgatgcatatcaacttcttgcagtgccccctcctataagtggcattcttgtgatctgtgcaaattcaatccattatcatagtcagtccacttcttgttcacttgccttgaacagtttctcatcacagcctgacggaagcccagagattcttaaaacaagttttcatgttgagcttgatgtagctaaagcaacatggttatcccatgacattgtgatgttttcatcaaagaatggagaaatactattactaacagtggtttatgatgggcgagctgtgcaaagattagatcttatgaaatccaaagcatctgttcttagttcgggtgctacaactcttggaagttcgttcatatttcttggcagtcgtcttgcagatagccttcttgtgcaattttcatgtggcatgccaacatcggttctgcctgatctaacagatgagcctgctgatattgaaagtgatctgcctttctcaaagcgcctaaagaggattccctctgatgttctacaagatgttactagtgttgaggaactttcttttcataataaggcagtgccaaatattgtagattcagcagagaagatctcatttgttgtgagagatgctctgatcaatgttggtcctctgaaagattttgcatatggtttaagaactaattctgatcccaacgcagcaggcattgcgaagcaaagcaattatgagctggtgtgttgttctgggcatggaaaaaatggaacgctctcggcccttcaacaatctatccgtccagatttaattaccgaggtggaactaccaagttgcacaggtatttggacagtttactacaagagttctcgtggaaatacaactgacaataatgaatatcatgcttatttgataataagcctagaaagccgcacaatggtgcttcagacaggtgatgatcttggagaggtcactgaaacagttgactataatgttcaagggagcacaattgctgctggtaacttgtttgggaggtgtcgcgtcatacaggtatatgccaagggtgctcgtgtgcttgatggttccttcatgacacaagagctaaacttttctatgcatacttccgaatcgtcattgaattctgagcctcttgcagctgcatctgcttcaattgcagatccatatgttctcttgaaaatgagtgatggatccattcgacttctcataggagatccttcaacctgtactatttctataaatgctcctgccatattcgcaagctcaagtgagcggatatcagcatgtacactatactgtgacagaggacctgagccatggcttagaaagacccatactgatgcatggttatccactgatgttggagaggctattgatgataatgacaattcttctcacgacctgtctgatatatattgcataatttgttatgaaagcggtaaactggaaatttttgaagtacccagttttaaacgtgtgttctctgtggataattttgtttctggaccagctatcttgtttgatgtgttttctcgtaattctactaaggattctggaataggggatcgagatgcttctaaagtttctgtgaagaaagaggaagcagcaaacattaagatagttgagcttgcaatgcatagatggtctgggcagttcagccggccattcctctttggattattgaatgatgggacattgttgtgttatcacgcatattattttgaaggctcagaaagcaatgtgcaatgtgctcctttctcacctcatggtggttcaccggatattggcaatgccactgattcaagactcagaaatttgagattttgtcgagtttcaatagatatctcatcacgagatgacatatcatgtcttgtacgaccaagaataacaattttcaacaatgttggaggttacgagggattatttcttggtggcccaaggccaacctgggtttttgtttgtcgacagcgatttcgggtgcatccacagttatgcgacggtccaattgtagcctttactgttctccacaatgtcaattgttgccgtggccttatttatgtgacatctcagggttttctgaagatatgtcagttgccatctgcatataactatgacaactactggcctgttcaaaaggtccccttgcatggcactccacatcaggtcacatattatggagagcagtcactttatccgcttattgtcaggttcgccccttaaatcaagttctttcttctatggctgatcaagaattgggtctgcacatggagaacgatgttacaagtggtggtgacctccaagaggtctatactgttgatgaatttgaagttcgtattatggagttgggaaaatccaatggacgttgggagacaaggtccaccattccgatgcaatcatttgaaaacgctttaacagtgcgcatcgttaccttgcaaaatattattgattttcgcctcagaacacatctacgaaggaaaatgaaaccctgatggccattggaactgcttatgttcaaggggaggatgttgctgctagaggacgggtgcttctgttctctttcagtaaaagtgaaaat

SEQ ID NO: 25556 - DNA, 3596 bp, Zea Mays
cgaaaccccccttcgtcccgtcgcatttcgttcaaaatcgcgcggtcaaatccgagctcggggccatcgccgtcgccgcgcctcccatcccgcgaagatgagctacgcggcgtacaagatgatgcatttgcccaccggaatcgaccattgcgctgccggcttcatcacccactcccccgccgacgctgccgccttctccacgcccgcgcccgcgcccaccgccgccgctggacccgacggcgatattgactccactgcggctagggcaccccggcgagtgggtcctacccccaacctggttgtgtcggcggctaacgtgctcgaggtgtatgccgtgagggccgaggtcgcgactggggccgaggatgcgggtaattcttcgtctaccggcaccatcctggatggtatctccggggctcgactggaacttgtgtgccattacaggcttcacggtaacattgaatcgatggctgtgttgtccgatggcacagagaataggcgagactccattgcagttacgtttaacgatgcaaaaataacatgtctggagtttgatgacagcatcaatggcctgcggacaagctcaatgcattgttttgaaggccctgaatggttccatctgaaaaggggcagggaatcatttgcctggggtcctatcataaaaggggatcctcaaggcagatgtggtgctgtacttgtttatggattacagataataattttgaaagcagctcaggttgggcagagcttagtaggagaggatgaacctacacgcgtgttgagttccactgctgttcggattgaatcttcgtatgtgattgatttacgtgatctagaaatgaatcacatcaaagactttacatttgtgcatggttatattgagcctgtgttggtcatacttcatgagcgagagcctacatgggctgggcgtatctcatcgaagagccaaacatgcatgctatctgcgtttagtataagcatgggtttaaagcaacatccgatgatatggtctgctgctaaacttccacatgatgcatatcaacttcttgcagtgccccctcctataagtggcattcttgtgatctgtgcaaattcaatccattatcatagtcagtccacttcttgttcacttgccttgaacagtttctcatcacagcctgacggaagcccagagattcttaaaacaagttttcatgttgagcttgatgtagctaaagcaacatggttatcccatgacattgtgatgttttcatcaaagaatggagaaatactattactaacagtggtttatgatgggcgagctgtgcaaagattagatcttatgaaatccaaagcatctgttcttagttcgggtgctacaactcttggaagttcgttcatatttcttggcagtcgtcttgcagatagccttcttgtgcaattttcatgtggcatgccaacatcggttctgcctgatctaacagatgagcctgctgatattgaaagtgatctgcctttctcaaagcgcctaaagaggattccctctgatgttctacaagatgttactagtgttgaggaactttcttttcataataaggcagtgccaaatattgtagattcagcagagaagatctcatttgttgtgagagatgctctgatcaatgttggtcctctgaaagattttgcatatggtttaagaactaattctgatcccaacgcagcaggcattgcgaagcaaagcaattatgagctggtgtgttgttctgggcatggaaaaaatggaacgctctcggcccttcaacaatctatccgtccagatttaattaccgaggtgtggaactaccaagttgcacaggtatttggacagtttactacaagagttctcgtggaaatacaactgacaataatgaatatcatgcttatttgataataagcctagaaagccgcacaatggtgcttcagacaggtgatgatcttggagaggtcactgaaacagttgactataatgttcaagggagcacaattgctgctggtaacttgtttgggaggtgtcgcgtcatacaggtatatgccaagggtgctcgtgtgcttgatggttccttcatgacacaagagctaaacttttctatgcatacttccgaatcgtcattgaattctgagcctcttgcagctgcatctgcttcaattgcagatccatatgttctcttgaaaatgagtgatggatccattcgacttctcataggagatccttcaacctgtactatttctataaatgctcctgccatattcgcaagctcaagtgagcggatatcagcatgtacactatactgtgacagaggacctgagccatggcttagaaagacccatactgatgcatggttatccactgatgttggagaggctattgatgataatgacaattcttctcacgacctgtctgatatatattgcataatttgttatgaaagcggtaaactggaaatttttgaagtacccagttttaaacgtgtgttctctgtggataattttgtttctggaccagctatcttgtttgatgtgttttctcgtaattctactaaggattctggaataggggatcgagatgcttctaaagtttctgtgaagaaagaggaagcagcaaacattaagatagttgagcttgcaatgcatagatggtctgggcagttcagccggccattcctctttggattattgaatgatgggacattgttgtgttatcacgcatattattttgaaggctcagaaagcaatgtgcaatgtgctcctttctcacctcatggtggttcaccggatattggcaatgccactgattcaagactcagaaatttgagattttgtcgagtttcaatagatatctcatcacgagatgacatatcatgtcttgtacgaccaagaataacaattttcaacaatgttggaggttacgagggattatttcttggtggcccaaggccaacctgggtttttgtttgtcgacagcgatttcgggtgcatccacagttatgcgacggtccaattgtagcctttactgttctccacaatgtcaattgttgccgtggccttatttatgtgacatctcagggttttctgaagatatgtcagttgccatctgcatataactatgacaactactggcctgttcaaaaggtccccttgcatggcactccacatcaggtcacatattatggagagcagtcactttatccgcttattgtgtcagttcctcaggttcgccccttaaatcaagttctttcttctatggctgatcaagaattgggtctgcacatggagaacgatgttacaagtggtggtgacctccaagaggtctatactgttgatgaatttgaagttcgtattatggagttgggaaaatccaatggacgttgggagacaaggtccaccattccgatgcaatcatttgaaaacgctttaacagtgcgcatcgttaccttgcaaaatattattgattttcgcctcagaacacatctacgaaggaaaatgaaaccctgatggccattggaactgcttatgttcaaggggaggatgttgctgctagaggacgggtgcttctgttctctttcagtaaaagtgaaaat

SEQ ID NO: 25557 - DNA, 3515 bp, Zea Mays
cgaaaccccccttcgtcccgtcgcatttcgttcaaaatcgcgcggtcaaatccgagctcggggccatcgccgtcgccgcgcctcccatcccgcgaagatgagctacgcggcgtacaagatgatgcatttgcccaccggaatcgaccattgcgctgccggcttcatcacccactcccccgccgacgctgccgccttctccacgcccgcgcccgcgcccaccgccgccgctggacccgacggcgatattgactccactgcggctagggcaccccggcgagtgggtcctacccccaacctggttgtgtcggcggctaacgtgctcgaggtgtatgccgtgagggccgaggtcgcgactggggccgaggatgcgggtaattcttcgtctaccggcaccatcctggatggtatctccggggctcgactggaacttgtgtgccattacaggtgcaaacaaatggctcttgcctctttgcattcacttttagctgtaaatttcaggcttcacggtaacattgaatcgatggctgtgttgtccgatggcacagagaataggcgagactccattgcagttacgtttaacgatgcaaaaataacatgtctggagtttgatgacagcatcaatggcctgcggacaagctcaatgcattgttttgaaggccctgaatggttccatctgaaaaggggcagggaatcatttgcctggggtcctatcataaaaggggatcctcaaggcagatgtggtgctgtacttgtttatggattacagataataattttgaaagcagctcaggttgggcagagcttagtaggagaggatgaacctacacgcgtgttgagttccactgctgttcggattgaatcttcgtatgtgattgatttacgtgatctagaaatgaatcacatcaaagactttacatttgtgcatggttatattgagcctgtgttggtcatacttcatgagcgagagcctacatgggctgggcgtatctcatcgaagagccaaacatgcatgctatctgcgtttagtataagcatgggtttaaagcaacatccgatgatatggtctgctgctaaacttccacatgatgcatatcaacttcttgcagtgccccctcctataagtggcattcttgtgatctgtgcaaattcaatccattatcatagtcagtccacttcttgttcacttgccttgaacagtttctcatcacagcctgacggaagcccagagattcttaaaacaagttttcatgttgagcttgatgtagctaaagcaacatggttatcccatgacattgtgatgttttcatcaaagaatggagaaatactattactaacagtggtttatgatgggcgagctgtgcaaagattagatcttatgaaatccaaagcatctgttcttagttcgggtgctacaactcttggaagttcgttcatatttcttggcagtcgtcttgcagatagccttcttgtgcaattttcatgtggcatgccaacatcggttctgcctgatctaacagatgagcctgctgatattgaaagtgatctgcctttctcaaagcgcctaaagaggattccctctgatgttctacaagatgttactagtgttgaggaactttcttttcataataaggcagtgccaaatattgtagattcagcagagaagatctcatttgttgtgagagatgctctgatcaatgttggtcctctgaaagattttgcatatggtttaagaactaattctgatcccaacgcagcaggcattgcgaagcaaagcaattatgagctggtgtgttgttctgggcatggaaaaaatggaacgctctcggcccttcaacaatctatccgtccagatttaattaccgaggtggaactaccaagttgcacaggtatttggacagtttactacaagagttctcgtggaaatacaactgacaataatgaatatcatgcttatttgataataagcctagaaagccgcacaatggtgcttcagacaggtgatgatcttggagaggtcactgaaacagttgactataatgttcaagggagcacaattgctgctggtaacttgtttgggaggtgtcgcgtcatacaggtatatgccaagggtgctcgtgtgcttgatggttccttcatgacacaagagctaaacttttctatgcatacttccgaatcgtcattgaattctgagcctcttgcagctgcatctgcttcaattgcagatccatatgttctcttgaaaatgagtgatggatccattcgacttctcataggagatccttcaacctgtactatttctataaatgctcctgccatattcgcaagctcaagtgagcggatatcagcatgtacactatactgtgacagaggacctgagccatggcttagaaagacccatactgatgcatggttatccactgatgttggagaggctattgatgataatgacaattcttctcacgacctgtctgatatatattgcataatttgttatgaaagcggattctggaataggggatcgagatgcttctaaagtttctgtgaagaaagaggaagcagcaaacattaagatagttgagcttgcaatgcatagatggtctgggcagttcagccggccattcctctttggattattgaatgatgggacattgttgtgttatcacgcatattattttgaaggctcagaaagcaatgtgcaatgtgctcctttctcacctcatggtggttcaccggatattggcaatgccactgattcaagactcagaaatttgagattttgtcgagtttcaatagatatctcatcacgagatgacatatcatgtcttgtacgaccaagaataacaattttcaacaatgttggaggttacgagggattatttcttggtggcccaaggccaacctgggtttttgtttgtcgacagcgatttcgggtgcatccacagttatgcgacggtccaattgtagcctttactgttctccacaatgtcaattgttgccgtggccttatttatgtgacatctcagggttttctgaagatatgtcagttgccatctgcatataactatgacaactactggcctgttcaaaaggtccccttgcatggcactccacatcaggtcacatattatggagagcagtcactttatccgcttattgtgtcagttcctcaggttcgccccttaaatcaagttctttcttctatggctgatcaagaattgggtctgcacatggagaacgatgttacaagtggtggtgacctccaagaggtctatactgttgatgaatttgaagttcgtattatggagttgggaaaatccaatggacgttgggagacaaggtccaccattccgatgcaatcatttgaaaacgctttaacagtgcgcatcgttaccttgcaaaacacatctacgaaggaaaatgaaaccctgatggccattggaactgcttatgttcaaggggaggatgttgctgctagaggacgggtgcttctgttctctttcagtaaaagtgaaaat

SEQ ID NO: 25558 - DNA, 3483 bp, Zea Mays
gttttctagggttttggtacgaaaccccccttcgtcccgtcgcatttcgttcaaaatcgcgcggtcaaatccgagctcggggccatcgccgtcgccgcgcctcccatcccgcgaagatgagctacgcggcgtacaagatgatgcatttgcccaccggaatcgaccattgcgctgccggcttcatcacccactcccccgccgacgctgccgccttctccacgcccgcgcccgcgcccaccgccgccgctggacccgacggcgatattgactccactgcggctagggcaccccggcgagtgggtcctacccccaacctggttgtgtcggcggctaacgtgctcgaggtgtatgccgtgagggccgaggtcgcgactggggccgaggatgcgggtaattcttcgtctaccggcaccatcctggatggtatctccggggctcgactggaacttgtgtgccattacaggcttcacggtaacattgaatcgatggctgtgttgtccgatggcacagagaataggcgagactccattgcagttacgtttaacgatgcaaaaataacatgtctggagtttgatgacagcatcaatggcctgcggacaagctcaatgcattgttttgaaggccctgaatggttccatctgaaaaggggcagggaatcatttgcctggggtcctatcataaaaggggatcctcaaggcagatgtggtgctgtacttgtttatggattacagataataattttgaaagcagctcaggttgggcagagcttagtaggagaggatgaacctacacgcgtgttgagttccactgctgttcggattgaatcttcgtatgtgattgatttacgtgatctagaaatgaatcacatcaaagactttacatttgtgcatggttatattgagcctgtgttggtcatacttcatgagcgagagcctacatgggctgggcgtatctcatcgaagagccaaacatgcatgctatctgcgtttagtataagcatgggtttaaagcaacatccgatgatatggtctgctgctaaacttccacatgatgcatatcaacttcttgcagtgccccctcctataagtggcattcttgtgatctgtgcaaattcaatccattatcatagtcagtccacttcttgttcacttgccttgaacagtttctcatcacagcctgacggaagcccagagattcttaaaacaagttttcatgttgagcttgatgtagctaaagcaacatggttatcccatgacattgtgatgttttcatcaaagaatggagaaatactattactaacagtggtttatgatgggcgagctgtgcaaagattagatcttatgaaatccaaagcatctgttcttagttcgggtgctacaactcttggaagttcgttcatatttcttggcagtcgtcttgcagatagccttcttgtgcaattttcatgtggcatgccaacatcggttctgcctgatctaacagatgagcctgctgatattgaaagtgatctgcctttctcaaagcgcctaaagaggattccctctgatgttctacaagatgttactagtgttgaggaactttcttttcataataaggcagtgccaaatattgtagattcagcagagaagatctcatttgttgtgagagatgctctgatcaatgttggtcctctgaaagattttgcatatggtttaagaactaattctgatcccaacgcagcaggcattgcgaagcaaagcaattatgagctggtgtgttgttctgggcatggaaaaaatggaacgctctcggcccttcaacaatctatccgtccagatttaattaccgaggtggtggaactaccaagttgcacaggtatttggacagtttactacaagagttctcgtggaaatacaactgacaataatgaatatcatgcttatttgataataagcctagaaagccgcacaatggtgcttcagacaggtgatgatcttggagaggtcactgaaacagttgactataatgttcaagggagcacaattgctgctggtaacttgtttgggaggtgtcgcgtcatacaggtatatgccaagggtgctcgtgtgcttgatggttccttcatgacacaagagctaaacttttctatgcatacttccgaatcgtcattgaattctgagcctcttgcagctgcatctgcttcaattgcagatccatatgttctcttgaaaatgagtgatggatccattcgacttctcataggagatccttcaacctgtactatttctataaatgctcctgccatattcgcaagctcaagtgagcggatatcagcatgtacactatactgtgacagaggacctgagccatggcttagaaagacccatactgatgcatggttatccactgatgttggagaggctattgatgataatgacaattcttctcacgacctgtctgatatatattgcataatttgttatgaaagcggattctggaataggggatcgagatgcttctaaagtttctgtgaagaaagaggaagcagcaaacattaagatagttgagcttgcaatgcatagatggtctgggcagttcagccggccattcctctttggattattgaatgatgggacattgttgtgttatcacgcatattattttgaaggctcagaaagcaatgtgcaatgtgctcctttctcacctcatggtggttcaccggatattggcaatgccactgattcaagactcagaaatttgagattttgtcgagtttcaatagatatctcatcacgagatgacatatcatgtcttgtacgaccaagaataacaattttcaacaatgttggaggttacgagggattatttcttggtggcccaaggccaacctgggtttttgtttgtcgacagcgatttcgggtgcatccacagttatgcgacggtccaattgtagcctttactgttctccacaatgtcaattgttgccgtggccttatttatgtgacatctcagggttttctgaagatatgtcagttgccatctgcatataactatgacaactactggcctgttcaaaaggtccccttgcatggcactccacatcaggtcacatattatggagagcagtcactttatccgcttattgtgtcagttcctcaggttcgccccttaaatcaagttctttcttctatggctgatcaagaattgggtctgcacatggagaacgatgttacaagtggtggtgacctccaagaggtctatactgttgatgaatttgaagttcgtattatggagttgggaaaatccaatggacgttgggagacaaggtccaccattccgatgcaatcatttgaaaacgctttaacagtgcgcatcgttaccttgcaaaacacatctacgaaggaaaatgaaaccctgatggccattggaactgcttatgttcaaggggaggatgttgctgctagaggacgggtgcttctgttctctttcagtaaaagtgaaaat

SEQ ID NO: 25559 - DNA, 3502 bp, Zea Mays
aaatgtcttcgctgagcgaagggttttctagggttttggtacgaaaccccccttcgtcccgtcgcatttcgttcaaaatcgcgcggtcaaatccgagctcggggccatcgccgtcgccgcgcctcccatcccgcgaagatgagctacgcggcgtacaagatgatgcatttgcccaccggaatcgaccattgcgctgccggcttcatcacccactcccccgccgacgctgccgccttctccacgcccgcgcccgcgcccaccgccgccgctggacccgacggcgatattgactccactgcggctagggcaccccggcgagtgggtcctacccccaacctggttgtgtcggcggctaacgtgctcgaggtgtatgccgtgagggccgaggtcgcgactggggccgaggatgcgggtaattcttcgtctaccggcaccatcctggatggtatctccggggctcgactggaacttgtgtgccattacaggcttcacggtaacattgaatcgatggctgtgttgtccgatggcacagagaataggcgagactccattgcagttacgtttaacgatgcaaaaataacatgtctggagtttgatgacagcatcaatggcctgcggacaagctcaatgcattgttttgaaggccctgaatggttccatctgaaaaggggcagggaatcatttgcctggggtcctatcataaaaggggatcctcaaggcagatgtggtgctgtacttgtttatggattacagataataattttgaaagcagctcaggttgggcagagcttagtaggagaggatgaacctacacgcgtgttgagttccactgctgttcggattgaatcttcgtatgtgattgatttacgtgatctagaaatgaatcacatcaaagactttacatttgtgcatggttatattgagcctgtgttggtcatacttcatgagcgagagcctacatgggctgggcgtatctcatcgaagagccaaacatgcatgctatctgcgtttagtataagcatgggtttaaagcaacatccgatgatatggtctgctgctaaacttccacatgatgcatatcaacttcttgcagtgccccctcctataagtggcattcttgtgatctgtgcaaattcaatccattatcatagtcagtccacttcttgttcacttgccttgaacagtttctcatcacagcctgacggaagcccagagattcttaaaacaagttttcatgttgagcttgatgtagctaaagcaacatggttatcccatgacattgtgatgttttcatcaaagaatggagaaatactattactaacagtggtttatgatgggcgagctgtgcaaagattagatcttatgaaatccaaagcatctgttcttagttcgggtgctacaactcttggaagttcgttcatatttcttggcagtcgtcttgcagatagccttcttgtgcaattttcatgtggcatgccaacatcggttctgcctgatctaacagatgagcctgctgatattgaaagtgatctgcctttctcaaagcgcctaaagaggattccctctgatgttctacaagatgttactagtgttgaggaactttcttttcataataaggcagtgccaaatattgtagattcagcagagaagatctcatttgttgtgagagatgctctgatcaatgttggtcctctgaaagattttgcatatggtttaagaactaattctgatcccaacgcagcaggcattgcgaagcaaagcaattatgagctggtgtgttgttctgggcatggaaaaaatggaacgctctcggcccttcaacaatctatccgtccagatttaattaccgaggtggaactaccaagttgcacaggtatttggacagtttactacaagagttctcgtggaaatacaactgacaataatgaatatcatgcttatttgataataagcctagaaagccgcacaatggtgcttcagacaggtgatgatcttggagaggtcactgaaacagttgactataatgttcaagggagcacaattgctgctggtaacttgtttgggaggtgtcgcgtcatacaggtatatgccaagggtgctcgtgtgcttgatggttccttcatgacacaagagctaaacttttctatgcatacttccgaatcgtcattgaattctgagcctcttgcagctgcatctgcttcaattgcagatccatatgttctcttgaaaatgagtgatggatccattcgacttctcataggagatccttcaacctgtactatttctataaatgctcctgccatattcgcaagctcaagtgagcggatatcagcatgtacactatactgtgacagaggacctgagccatggcttagaaagacccatactgatgcatggttatccactgatgttggagaggctattgatgataatgacaattcttctcacgacctgtctgatatatattgcataatttgttatgaaagcggattctggaataggggatcgagatgcttctaaagtttctgtgaagaaagaggaagcagcaaacattaagatagttgagcttgcaatgcatagatggtctgggcagttcagccggccattcctctttggattattgaatgatgggacattgttgtgttatcacgcatattattttgaaggctcagaaagcaatgtgcaatgtgctcctttctcacctcatggtggttcaccggatattggcaatgccactgattcaagactcagaaatttgagattttgtcgagtttcaatagatatctcatcacgagatgacatatcatgtcttgtacgaccaagaataacaattttcaacaatgttggaggttacgagggattatttcttggtggcccaaggccaacctgggtttttgtttgtcgacagcgatttcgggtgcatccacagttatgcgacggtccaattgtagcctttactgttctccacaatgtcaattgttgccgtggccttatttatgtgacatctcagggttttctgaagatatgtcagttgccatctgcatataactatgacaactactggcctgttcaaaaggtccccttgcatggcactccacatcaggtcacatattatggagagcagtcactttatccgcttattgtgtcagttcctcaggttcgccccttaaatcaagttctttcttctatggctgatcaagaattgggtctgcacatggagaacgatgttacaagtggtggtgacctccaagaggtctatactgttgatgaatttgaagttcgtattatggagttgggaaaatccaatggacgttgggagacaaggtccaccattccgatgcaatcatttgaaaacgctttaacagtgcgcatcgttaccttgcaaaacacatctacgaaggaaaatgaaaccctgatggccattggaactgcttatgttcaaggggaggatgttgctgctagaggacgggtgcttctgttctctttcagtaaaagtgaaaat

SEQ ID NO: 25560 - DNA, 2105 bp, Zea Mays
gttcaaaatcgcgcggtcaaatccgagctcggggccatcgccgtcgccgcgcctcccatcccgcgaagatgagctacgcggcgtacaagatgatgcatttgcccaccggaatcgaccattgcgctgccggcttcatcacccactcccccgccgacgctgccgccttctccacgcccgcgcccgcgcccaccgccgccgctggacccgacggcgatattgactccactgcggctagggcaccccggcgagtgggtcctacccccaacctggttgtgtcggcggctaacgtgctcgaggtgtatgccgtgagggccgaggtcgcgactggggccgaggatgcgggtaattcttcgtctaccggcaccatcctggatggtatctccggggctcgactggaacttgtgtgccattacaggcttcacggtaacattgaatcgatggctgtgttgtccgatggcacagagaataggcgagactccattgcagttacgtttaacgatgcaaaaataacatgtctggagtttgatgacagcatcaatggcctgcggacaagctcaatgcattgttttgaaggccctgaatggttccatctgaaaaggggcagggaatcatttgcctggggtcctatcataaaaggggatcctcaaggcagatgtggtgctgtacttgtttatggattacagataataattttgaaagcagctcaggttgggcagagcttagtaggagaggatgaacctacacgcgtgttgagttccactgctgttcggattgaatcttcgtatgtgattgatttacgtgatctagaaatgaatcacatcaaagactttacatttgtgcatggttatattgagcctgtgttggtcatacttcatgagcgagagcctacatgggctgggcgtatctcatcgaagagccaaacatgcatgctatctgcgtttagtataagcatgggtttaaagcaacatccgatgatatggtctgctgctaaacttccacatgatgcatatcaacttcttgcagtgccccctcctataagtggcattcttgtgatctgtgcaaattcaatccattatcatagtcagtccacttcttgttcacttgccttgaacagtttctcatcacagcctgacggaagcccagagattcttaaaacaagttttcatgttgagcttgatgtagctaaagcaacatggttatcccatgacattgtgatgttttcatcaaagaatggagaaatactattactaacagtggtttatgatgggcgagctgtgcaaagattagatcttatgaaatccaaagcatctgttcttagttcgggtgctacaactcttggaagttcgttcatatttcttggcagtcgtcttgcagatagccttcttgtgcaattttcatgtggcatgccaacatcggttctgcctgatctaacagatgagcctgctgatattgaaagtgatctgcctttctcaaagcgcctaaagaggattccctctgatgttctacaagatgttactagtgttgaggaactttcttttcataataaggcagtgccaaatattgtagattcagcagagaagatctcatttgttgtgagagatgctctgatcaatgttggtcctctgaaagattttgcatatggtttaagaactaattctgatcccaacgcagcaggcattgcgaagcaaagcaattatgagctggtgtgttgttctgggcatggaaaaaatggaacgctctcggcccttcaacaatctatccgtccagatttaattaccgaggtgcttcagacaggtgatgatcttggagaggtcactgaaacagttgactataatgttcaagggagcacaattgctgctggtaacttgtttgggaggtgtcgcgtcatacaggtatatgccaagggtgctcgtgtgcttgatggttccttcatgacacaagagctaaacttttctatgcatacttccgaatcgtcattgaattctgagcctcttgcagctgcatctgcttcaattgcagatccatatgttctcttgaaaatgagtgatggatccattcgacttctcataggaggtatggttcatctatatccagtttgcctctga

SEQ ID NO: 25561 - DNA, 2042 bp, Zea Mays
ctttgagagagtgatgtgtagtgctctttgcttcatggactagcctgccatatggactaatatctgcttggctcttttttacacttctacataacacaatgcacaaggaatttcctcgtgtgcactatcgtgtagccaggacaatcgatgcatctactctgacgacactacgagatttggtcccaacaaagcttgctgcttccctgtggaattcccttgtcagatttaagtcaacgatacctgaatttccacaaacagaaacatgtgaactacttattgttgaccggtcaatagatcagattgcaccaattattcatgagtggacgtatgatgctatgtgccatgatctattgtgtatggatggcaacaagtacgtgcaagaggttccaagtaagaatggttcagcaaatgagaaaaaggaggttttgttggaggatcatgatccagtatggcttgagctgcggcatgcacatatagctcatgttaatgaaacgctacatgaaaagatgaccagttttgtatcaaagaacaaagcagctcaactacagcagatctggtggagagttatctaccaagcagttgcagaaaatggttcaagctcttccacaatacagtgatcaaattgacaagctcacccttcatgttgagattgcaggaaaactcaataacataatcaaagaacaccaccttaaagatgttggacagctagagcaagatcttgtgtttggtgatgctgggacaaaagaactaatcagtttcttacgaacccgcatggatgtaagtcgtgaacataagctgcgtttgctgatgatttatgcttccataaacccagagaaatttttcgaaagtgagaaaggtgcaaagctgatgcagcttgcaggattatctgctgatgatatgattgtagtaaataatatgcgctgcttacgtggagctgattctaagaagtcttcagttggggcttttactttgaaatttgatcttcagaagaaaaagcctggtatcaggaaggagcggactggagaagagtcaacatggatgctatctcgattttatcccatcctggaggacttgattgagaaacttagtaagggtgagctaccaaaagatgagtaccactgcatgaatgatcctagtcctagtttccgtggaattccagggagcacatctgctcgaacgagcccagctcatcagccagcccaatccatgagatctagacgaataggtggcacatgggctagacctcggaactccgatgatggttattcgagtgactctgtactgaagcatgcatcaagtgacttcagaaagttgggccagcgcctatttatctttgtaattggaggtgctactcggtctgagttgcgtgttgcccataagctgtcaggcaaactgaagagagaaattatccttggctcctctagtcttgatgacccaccgcagttcatcactaaactgaagatgttatcaaccgaggaactgtcgcttgatgatttgcaaatataacaattccaaggacgattgtccgtggcattctacactgtaattatttatttatttgcatctctacaacgggtttagttttactcccttaaccgaaccacaggtgctcttacacaggctagaggggcatgatattcattcggtagccaatgtcagttacaatcgagtgtacacacatggcagcgaccagagactgtaatataggtggcgtctttattagattggtggatcagtgaagttcaatgttccgaggacttctatttgtcctcagattgctgctattttgtggggaaagtgtatattttttcctcaaaccggtgagattaattcgtgtaataataacaacaaaaagaagagctagagtaagaacaaaaatagtaataataccagtagcaataatgataataatataagagcaatgaatttacaacaagagtatgtctgagacatataggggtttttagtttgagtcaatgtttacaagtcgggcgaccagctggttgagcgagagggccgaccaggcgactaatcgtgattag

SEQ ID NO: 25562 - DNA, 2847 bp, Zea Mays
gaaacctaataccgcgtcgcggtcccatctgccatagacctactcaaaaccccacaccacaccgtctggtcgtccatggagaaaactcgttgagcagattccttgttcctgcagtaaccctgtccaacccccgcagcggcggcaaccacagaaacactgcctgtaaattccattcctccgcgttcggcctccctcatcgcgcgaccgttccctctgctcgaatcggcaagcccgcatttcgagccccggaggtggccgcgaaccctaaccctacagcgaggcgtcgccggagttgtgggggctccgttggccatgtcgatggactcggacagctcgtcgcacagcggcgccgactacaggagtttccgccagatcacccgagaccgtttgttagttgaaatgctgagatcgactcgaaagagctcaaaatcatcatggaaggttctaatcatggacaaacttactgtcaagataatgtcattttcatgcaagatggcagatatcacagaagaaggggtttcattggttgaagacctatacaaacggaggcagccattgccttcaatggatgcaatttattttatgcagcctactaaagaaaatgttgacatattcatgtcggacatgtcaggaaaaaattcattgtacaagaaagcttatgtatttttcagttctcctgtacagagggagttggtagctcatataaaaaaggattcgactgtgctaacacgcatcagtgcacttagtgagatgaacttagaatactttgctattgacagtcagggcttcataactgaccatgacaaggccttggaggagttgtttagtgaagatgcagaaggctcacacaagtacaatgcatgccttaacacaatggctacaagaattgctacagtgtttgcatcattgagggaatttcctcgtgtgcactatcgtgtagccaggacaatcgatgcatctactctgacgacactacgagatttggtcccaacaaagcttgctgcttccctgtggaattcccttgtcagatttaagtcaacgatacctgaatttccacaaacagaaacatgtgaactacttattgttgaccggtcaatagatcagattgcaccaattattcatgagtggacgtatgatgctatgtgccatgatctattgtgtatggatggcaacaagtacgtgcaagaggttccaagtaagaatggttcagcaaatgagaaaaaggaggttttgttggaggatcatgatccagtatggcttgagctgcggcatgcacatatagctcatgttaatgaaacgctacatgaaaagatgaccagttttgtatcaaagaacaaagcagctcaactacagcagatctggtggagagttatctaccaagcagttgcagaaaatggttcaagctcttccacaatacagtgatcaaattgacaagctcacccttcatgttgagattgcaggaaaactcaataacataatcaaagaacaccaccttaaagatgttggacagctagagcaagatcttgtgtttggtgatgctgggacaaaagaactaatcagtttcttacgaacccgcatggatgtaagtcgtgaacataagctgcgtttgctgatgatttatgcttccataaacccagagaaatttttcgaaagtgagaaaggtgcaaagctgatgcagcttgcaggattatctgctgatgatatgattgtagtaaataatatgcgctgcttacgtggagctgattctaagaagtcttcagttggggcttttactttgaaatttgatcttcagaagaaaaagcctggtatcaggaaggagcggactggagaagagtcaacatggatgctatctcgattttatcccatcctggaggacttgattgagaaacttagtaagggtgagctaccaaaagatgagtaccactgcatgaatgatcctagtcctagtttccgtggaattccagggagcacatctgctcgaacgagcccagctcatcagccagcccaatccatgagatctagacgaataggtggcacatgggctagacctcggaactccgatgatggttattcgagtgactctgtactgaagcatgcatcaagtgacttcagaaagttgggccagcgcctatttatctttgtaattggaggtgctactcggtctgagttgcgtgttgcccataagctgtcaggcaaactgaagagagaaattatccttggctcctctagtcttgatgacccaccgcagttcatcactaaactgaagatgttatcaaccgaggaactgtcgcttgatgatttgcaaatataacaattccaaggacgattgtccgtggcattctacactgtaattatttatttatttgcatctctacaacgggtttagttttactcccttaaccgaaccacaggtgctcttacacaggctagaggggcatgatattcattcggtagccaatgtcagttacaatcgagtgtacacacatggcagcgaccagagactgtaatataggtggcgtctttattagattggtggatcagtgaagttcaatgttccgaggacttctatttgtcctcagattgctgctattttgtggggaaagtgtatattttttcctcaaaccggtgagattaattcgtgtaataataacaacaaaaagaagagctagagtaagaacaaaaatagtaataataccagtagcaataatgataataatataagagcaatgaatttacaacaagagtatgtctgagacatataggggtttttagtttgagtcaatgtttacaagtcgggcgaccagctggttgagcgagagggccgaccaggcgactaatcgtgattag

SEQ ID NO: 25563 - DNA, 2895 bp, Zea Mays
cgcgcttttcttcagaatcatctgagcacccgtccatcgcacgaagacctaggcctcaatgacgcgtgggtctagaaacctaataccgcgtcgcggtcccatctgccatagacctactcaaaaccccacaccacaccgtctggtcgtccatggagaaaactcgttgagcagattccttgttcctgcagtaaccctgtccaacccccgcagcggcggcaaccacagaaacactgcctgtaaattccattcctccgcgttcggcctccctcatcgcgcgaccgttccctctgctcgaatcggcaagcccgcatttcgagccccggaggtggccgcgaaccctaaccctacagcgaggcgtcgccggagttgtgggggctccgttggccatgtcgatggactcggacagctcgtcgcacagcggcgccgactacaggagtttccgccagatcacccgagaccgtttgttagttgaaatgctgagatcgactcgaaagagctcaaaatcatcatggaaggttctaatcatggacaaacttactgtcaagataatgtcattttcatgcaagatggcagatatcacagaagaaggggtttcattggttgaagacctatacaaacggaggcagccattgccttcaatggatgcaatttattttatgcagcctactaaagaaaatgttgacatattcatgtcggacatgtcaggaaaaaattcattgtacaagaaagggagttggtagctcatataaaaaaggattcgactgtgctaacacgcatcagtgcacttagtgagatgaacttagaatactttgctattgacagtcagggcttcataactgaccatgacaaggccttggaggagttgtttagtgaagatgcagaaggctcacacaagtacaatgcatgccttaacacaatggctacaagaattgctacagtgtttgcatcattgagggaatttcctcgtgtgcactatcgtgtagccaggacaatcgatgcatctactctgacgacactacgagatttggtcccaacaaagcttgctgcttccctgtggaattcccttgtcagatttaagtcaacgatacctgaatttccacaaacagaaacatgtgaactacttattgttgaccggtcaatagatcagattgcaccaattattcatgagtggacgtatgatgctatgtgccatgatctattgtgtatggatggcaacaagtacgtgcaagaggttccaagtaagaatggttcagcaaatgagaaaaaggaggttttgttggaggatcatgatccagtatggcttgagctgcggcatgcacatatagctcatgttaatgaaacgctacatgaaaagatgaccagttttgtatcaaagaacaaagcagctcaactacagcaggcaagatctggtggagagttatctaccaagcagttgcagaaaatggttcaagctcttccacaatacagtgatcaaattgacaagctcacccttcatgttgagattgcaggaaaactcaataacataatcaaagaacaccaccttaaagatgttggacagctagagcaagatcttgtgtttggtgatgctgggacaaaagaactaatcagtttcttacgaacccgcatggatgtaagtcgtgaacataagctgcgtttgctgatgatttatgcttccataaacccagagaaatttttcgaaagtgagaaaggtgcaaagctgatgcagcttgcaggattatctgctgatgatatgattgtagtaaataatatgcgctgcttacgtggagctgattctaagaagtcttcagttggggcttttactttgaaatttgatcttcagaagaaaaagcctggtatcaggaaggagcggactggagaagagtcaacatggatgctatctcgattttatcccatcctggaggacttgattgagaaacttagtaagggtgagctaccaaaagatgagtaccactgcatgaatgatcctagtcctagtttccgtggaattccagggagcacatctgctcgaacgagcccagctcatcagccagcccaatccatgagatctagacgaataggtggcacatgggctagacctcggaactccgatgatggttattcgagtgactctgtactgaagcatgcatcaagtgacttcagaaagttgggccagcgcctatttatctttgtaattggaggtgctactcggtctgagttgcgtgttgcccataagctgtcaggcaaactgaagagagaaattatccttggctcctctagtcttgatgacccaccgcagttcatcactaaactgaagatgttatcaaccgaggaactgtcgcttgatgatttgcaaatataacaattccaaggacgattgtccgtggcattctacactgtaattatttatttatttgcatctctacaacgggtttagttttactcccttaaccgaaccacaggtgctcttacacaggctagaggggcatgatattcattcggtagccaatgtcagttacaatcgagtgtacacacatggcagcgaccagagactgtaatataggtggcgtctttattagattggtggatcagtgaagttcaatgttccgaggacttctatttgtcctcagattgctgctattttgtggggaaagtgtatattttttcctcaaaccggtgagattaattcgtgtaataataacaacaaaaagaagagctagagtaagaacaaaaatagtaataataccagtagcaataatgataataatataagagcaatgaatttacaacaagagtatgtctgagacatataggggtttttagtttgagtcaatgtttacaagtcgggcgaccagctggttgagcgagagggccgaccaggcgactaatcgtgattag

SEQ ID NO: 25564 - DNA, 3105 bp, Zea Mays
ccgcgcttttcttcagaatcatctgagcacccgtccatcgcacgaagacctaggcctcaatgacgcgtgggtctagaaacctaataccgcgtcgcggtcccatctgccatagacctactcaaaaccccacaccacaccgtctggtcgtccatggagaaaactcgttgagcagattccttgttcctgcagtaaccctgtccaacccccgcagcggcggcaaccacagaaacactgcctgtaaattccattcctccgcgttcggcctccctcatcgcgcgaccgttccctctgctcgaatcggcaagcccgcatttcgagccccggaggtggccgcgaaccctaaccctacagcgaggcgtcgccggagttgtgggggctccgttggccatgtcgatggactcggacagctcgtcgcacagcggcgccgactacaggagtttccgccagatcacccgagaccgtttgttagttgaaatgctgagatcgactcgaaagagctcaaaatcatcatggaaggttctaatcatggacaaacttactgtcaagataatgtcattttcatgcaagatggcagatatcacagaagaaggggtttcattggttgaagacctatacaaacggaggcagccattgccttcaatggatgcaatttattttatgcagcctactaaagaaaatgttgacatattcatgtcggacatgtcaggaaaaaattcattgtacaagaaagcttatgtatttttcagttctcctgtacagagggagttggtagctcatataaaaaaggattcgactgtgctaacacgcatcagtgcacttagtgagatgaacttagaatactttgctattgacagtcagggcttcataactgaccatgacaaggccttggaggagttgtttagtgaagatgcagaaggctcacacaagtacaatgcatgccttaacacaatggctacaagaattgctacagtgtttgcatcattgagggtgcttggtgatgctattgggagattgatgacttatgatctataccacaaacaagcacaaccgagtagccacaagcagaaattcacaacatatgacaaatatgcaatggaaatgtgaagtgaggcaaccaacaaggaagacacagtgatttgtttgaccaaagtttgggcctcaccaagaatttcctcgtgtgcactatcgtgtagccaggacaatcgatgcatctactctgacgacactacgagatttggtcccaacaaagcttgctgcttccctgtggaattcccttgtcagatttaagtcaacgatacctgaatttccacaaacagaaacatgtgaactacttattgttgaccggtcaatagatcagattgcaccaattattcatgagtggacgtatgatgctatgtgccatgatctattgtgtatggatggcaacaagtacgtgcaagaggttccaagtaagaatggttcagcaaatgagaaaaaggaggttttgttggaggatcatgatccagtatggcttgagctgcggcatgcacatatagctcatgttaatgaaacgctacatgaaaagatgaccagttttgtatcaaagaacaaagcagctcaactacagcaggcaagatctggtggagagttatctaccaagcagttgcagaaaatggttcaagctcttccacaatacagtgatcaaattgacaagctcacccttcatgttgagattgcaggaaaactcaataacataatcaaagaacaccaccttaaagatgttggacagctagagcaagatcttgtgtttggtgatgctgggacaaaagaactaatcagtttcttacgaacccgcatggatgtaagtcgtgaacataagctgcgtttgctgatgatttatgcttccataaacccagagaaatttttcgaaagtgagaaaggtgcaaagctgatgcagcttgcaggattatctgctgatgatatgattgtagtaaataatatgcgctgcttacgtggagctgattctaagaagtcttcagttggggcttttactttgaaatttgatcttcagaagaaaaagcctggtatcaggaaggagcggactggagaagagtcaacatggatgctatctcgattttatcccatcctggaggacttgattgagaaacttagtaagggtgagctaccaaaagatgagtaccactgcatgaatgatcctagtcctagtttccgtggaattccagggagcacatctgctcgaacgagcccagctcatcagccagcccaatccatgagatctagacgaataggtggcacatgggctagacctcggaactccgatgatggttattcgagtgactctgtactgaagcatgcatcaagtgacttcagaaagttgggccagcgcctatttatctttgtaattggaggtgctactcggtctgagttgcgtgttgcccataagctgtcaggcaaactgaagagagaaattatccttggctcctctagtcttgatgacccaccgcagttcatcactaaactgaagatgttatcaaccgaggaactgtcgcttgatgatttgcaaatataacaattccaaggacgattgtccgtggcattctacactgtaattatttatttatttgcatctctacaacgggtttagttttactcccttaaccgaaccacaggtgctcttacacaggctagaggggcatgatattcattcggtagccaatgtcagttacaatcgagtgtacacacatggcagcgaccagagactgtaatataggtggcgtctttattagattggtggatcagtgaagttcaatgttccgaggacttctatttgtcctcagattgctgctattttgtggggaaagtgtatattttttcctcaaaccggtgagattaattcgtgtaataataacaacaaaaagaagagctagagtaagaacaaaaatagtaataataccagtagcaataatgataataatataagagcaatgaatttacaacaagagtatgtctgagacatataggggtttttagtttgagtcaatgtttacaagtcgggcgaccagctggttgagcgagagggccgaccaggcgactaatcgtgattag

SEQ ID NO: 25565 - DNA, 2736 bp, Zea Mays
gttcatcttcaaccgcgcttttcttcagaatcatctgagcacccgtccatcgcacgaagacctaggcctcaatgacgcgtgggtctagaaacctaataccgcgtcgcggtcccatctgccatagacctactcaaaaccccacaccacaccgtctggtcgtccatggagaaaactcgttgagcagattccttgttcctgcagtaaccctgtccaacccccgcagcggcggcaaccacagaaacactgcctgtaaattccattcctccgcgttcggcctccctcatcgcgcgaccgttccctctgctcgaatcggcaagcccgcatttcgagccccggaggtggccgcgaaccctaaccctacagcgaggcgtcgccggagttgtgggggctccgttggccatgtcgatggactcggacagctcgtcgcacagcggcgccgactacaggagtttccgccagatcacccgagaccgtttgttagttgaaatgctgagatcgactcgaaagagctcaaaatcatcatggaaggttctaatcatggacaaacttactgtcaagataatgtcattttcatgcaagatggcagatatcacagaagaaggggtttcattggttgaagacctatacaaacggaggcagccattgccttcaatggatgcaatttattttatgcagcctactaaagaaaatgttgacatattcatgtcggacatgtcaggaaaaaattcattgtacaagaaagcttatgtatttttcagttctcctgtacagagggagttggtagctcatataaaaaaggattcgactgtgctaacacgcatcagtgcacttagtgagatgaacttagaatactttgctattgacagtcagggcttcataactgaccatgacaaggccttggaggagttgtttagtgaagatgcagaaggctcacacaagtacaatgcatgccttaacacaatggctacaagaattgctacagtgtttgcatcattgagggaatttcctcgtgtgcactatcgtgtagccaggacaatcgatgcatctactctgacgacactacgagatttggtcccaacaaagcttgctgcttccctgtggaattcccttgtcagatttaagtcaacgatacctgaatttccacaaacagaaacatgtgaactacttattgttgaccggtcaatagatcagattgcaccaattattcatgagtggacgtatgatgctatgtgccatgatctattgtgtatggatggcaacaagtacgtgcaagaggttccaagtaagaatggttcagcaaatgagaaaaaggaggttttgttggaggatcatgatccagtatggcttgagctgcggcatgcacatatagctcatgttaatgaaacgctacatgaaaagatgaccagttttgtatcaaagaacaaagcagctcaactacagcaggcaagatctggtggagagttatctaccaagcagttgcagaaaatggttcaagctcttccacaatacagtgatcaaattgacaagctcacccttcatgttgagattgcaggaaaactcaataacataatcaaagaacaccaccttaaagatgttggacagctagagcaagatcttgtgtttggtgatgctgggacaaaagaactaatcagtttcttacgaacccgcatggatgtaagtcgtgaacataagctgcgtttgctgatgatttatgcttccataaacccagagaaatttttcgaaagtgagaaaggtgcaaagctgatgcagcttgcaggattatctgctgatgatatgattgtagtaaataatatgcgctgcttacgtggagctgattctaagaagtcttcagttggggcttttactttgaaatttgatcttcagaagaaaaagcctggtatcaggaaggagcggactggagaagagtcaacatggatgctatctcgattttatcccatcctggagtgactctgtactgaagcatgcatcaagtgacttcagaaagttgggccagcgcctatttatctttgtaattggaggtgctactcggtctgagttgcgtgttgcccataagctgtcaggcaaactgaagagagaaattatccttggctcctctagtcttgatgacccaccgcagttcatcactaaactgaagatgttatcaaccgaggaactgtcgcttgatgatttgcaaatataacaattccaaggacgattgtccgtggcattctacactgtaattatttatttatttgcatctctacaacgggtttagttttactcccttaaccgaaccacaggtgctcttacacaggctagaggggcatgatattcattcggtagccaatgtcagttacaatcgagtgtacacacatggcagcgaccagagactgtaatataggtggcgtctttattagattggtggatcagtgaagttcaatgttccgaggacttctatttgtcctcagattgctgctattttgtggggaaagtgtatattttttcctcaaaccggtgagattaattcgtgtaataataacaacaaaaagaagagctagagtaagaacaaaaatagtaataataccagtagcaataatgataataatataagagcaatgaatttacaacaagagtatgtctgagacatataggggtttttagtttgagtcaatgtttacaagtcgggcgaccagctggttgagcgagagggccgaccaggcgactaatcgtgattag

SEQ ID NO: 25566 - DNA, 2865 bp, Zea Mays
ctccgttcatcttcaaccgcgcttttcttcagaatcatctgagcacccgtccatcgcacgaagacctaggcctcaatgacgcgtgggtctagaaacctaataccgcgtcgcggtcccatctgccatagacctactcaaaaccccacaccacaccgtctggtcgtccatggagaaaactcgttgagcagattccttgttcctgcagtaaccctgtccaacccccgcagcggcggcaaccacagaaacactgcctgtaaattccattcctccgcgttcggcctccctcatcgcgcgaccgttccctctgctcgaatcggcaagcccgcatttcgagccccggaggtggccgcgaaccctaaccctacagcgaggcgtcgccggagttgtgggggctccgttggccatgtcgatggactcggacagctcgtcgcacagcggcgccgactacaggagtttccgccagatcacccgagaccgtttgttagttgaaatgctgagatcgactcgaaagagctcaaaatcatcatggaaggttctaatcatggacaaacttactgtcaagataatgtcattttcatgcaagatggcagatatcacagaagaaggggtttcattggttgaagacctatacaaacggaggcagccattgccttcaatggatgcaatttattttatgcagcctactaaagaaaatgttgacatattcatgtcggacatgtcaggaaaaaattcattgtacaagaaagcttatgtatttttcagttctcctgtacagagggagttggtagctcatataaaaaaggattcgactgtgctaacacgcatcagtgcacttagtgagatgaacttagaatactttgctattgacagtcagggcttcataactgaccatgacaaggccttggaggagttgtttagtgaagatgcagaaggctcacacaagtacaatgcatgccttaacacaatggctacaagaattgctacagtgtttgcatcattgagggaatttcctcgtgtgcactatcgtgtagccaggacaatcgatgcatctactctgacgacactacgagatttggtcccaacaaagcttgctgcttccctgtggaattcccttgtcagatttaagtcaacgatacctgaatttccacaaacagaaacatgtgaactacttattgttgaccggtcaatagatcagattgcaccaattattcatgagtggacgtatgatgctatgtgccatgatctattgtgtatggatggcaacaagtacgtgcaagaggttccaagtaagaatggttcagcaaatgagaaaaaggaggttttgttggaggatcatgatccagtatggcttgagctgcggcatgcacatatagctcatgttaatgaaacgctacatgaaaagatgaccagttttgtatcaaagaacaaagcagctcaactacagcaggcaagatctggtggagagttatctaccaagcagttgcagaaaatggttcaagctcttccacaatacagtgatcaaattgacaagctcacccttcatgttgagattgcaggaaaactcaataacataatcaaagaacaccaccttaaagatgttggacagctagagcaagatcttgtgtttggtgatgctgggacaaaagaactaatcagtttcttacgaacccgcatggatgtaagtcgtgaacataagctgcgtttgctgatgatttatgcttccataaacccagagaaatttttcgaaagtgagaaaggtgcaaagctgatgcagcttgcaggattatctgctgatgatatgattgtagtaaataatatgcgctgcttacgtggagctgattctaagaagtcttcagttggggcttttactttgaaatttgatcttcagaagaaaaagcctggtatcaggaaggagcggactggagaagagtcaacatggatgctatctcgattttatcccatcctggaggacttgattgagaaacttagtaagggtgagctaccaaaagatgagtaccactgcatgaatgatcctagtcctagtttccgtggaattccagggagcacatctgctcgaacgagcccagctcatcagccagcccaatccatgagatctagacgaataggtggcacatgggctagacctcggaactccgatgatggttattcgagtgactctgtactgaagcatgcatcaagtgacttcagaaagttgggccagcgcctatttatctttgtaattggaggtgctactcggtctgagttgcgtgttgcccataagctgtcaggcaaactgaagagagaaattatccttggctcctctagtcttgatgacccaccgcagttcatcactaaactgaagatgttatcaaccgaggaactgtcgcttgatgatttgcaaatataacaattccaaggacgattgtccgtggcattctacactgctagaggggcatgatattcattcggtagccaatgtcagttacaatcgagtgtacacacatggcagcgaccagagactgtaatataggtggcgtctttattagattggtggatcagtgaagttcaatgttccgaggacttctatttgtcctcagattgctgctattttgtggggaaagtgtatattttttcctcaaaccggtgagattaattcgtgtaataataacaacaaaaagaagagctagagtaagaacaaaaatagtaataataccagtagcaataatgataataatataagagcaatgaatttacaacaagagtatgtctgagacatataggggtttttagtttgagtcaatgtttacaagtcgggcgaccagctggttgagcgagagggccgaccaggcgactaatcgtgattag

SEQ ID NO: 25567 - DNA, 2319 bp, Zea Mays
gcattcggcgttctccgttcatcttcaaccgcgcttttcttcagaatcatctgagcacccgtccatcgcacgaagacctaggcctcaatgacgcgtgggtctagaaacctaataccgcgtcgcggtcccatctgccatagacctactcaaaaccccacaccacaccgtctggtcgtccatggagaaaactcgttgagcagattccttgttcctgcagtaaccctgtccaacccccgcagcggcggcaaccacagaaacactgcctgtaaattccattcctccgcgttcggcctccctcatcgcgcgaccgttccctctgctcgaatcggcaagcccgcatttcgagccccggaggtggccgcgaaccctaaccctacagcgaggcgtcgccggagttgtgggggctccgttggccatgtcgatggactcggacagctcgtcgcacagcggcgccgactacaggagtttccgccagatcacccgagaccgtttgttagttgaaatgctgagatcgactcgaaagagctcaaaatcatcatggaaggttctaatcatggacaaacttactgtcaagataatgtcattttcatgcaagatggcagatatcacagaagaaggggtttcattggttgaagacctatacaaacggaggcagccattgccttcaatggatgcaatttattttatgcagcctactaaagaaaatgttgacatattcatgtcggacatgtcaggaaaaaattcattgtacaagaaagcttatgtatttttcagttctcctgtacagagggagttggtagctcatataaaaaaggattcgactgtgctaacacgcatcagtgcacttagtgagatgaacttagaatactttgctattgacagtcagggcttcataactgaccatgacaaggccttggaggagttgtttagtgaagatgcagaaggctcacacaagtacaatgcatgccttaacacaatggctacaagaattgctacagtgtttgcatcattgagggaatttcctcgtgtgcactatcgtgtagccaggacaatcgatgcatctactctgacgacactacgagatttggtcccaacaaagcttgctgcttccctgtggaattcccttgtcagatttaagtcaacgatacctgaatttccacaaacagaaacatgtgaactacttattgttgaccggtcaatagatcagattgcaccaattattcatgagtggacgtatgatgctatgtgccatgatctattgtgtatggatggcaacaagtacgtgcaagaggttccaagtaagaatggttcagcaaatgagaaaaaggaggttttgttggaggatcatgatccagtatggcttgagctgcggcatgcacatatagctcatgttaatgaaacgctacatgaaaagatgaccagttttgtatcaaagaacaaagcagctcaactacagcaggcaagatctggtggagagttatctaccaagcagttgcagaaaatggttcaagctcttccacaatacagtgatcaaattgacaagctcacccttcatgttgagattgcaggaaaactcaataacataatcaaagaacaccaccttaaagatgttggacagctagagcaagatcttgtgtttggtgatgctgggacaaaagaactaatcagtttcttacgaacccgcatggatgtaagtcgtgaacataagctgcgtttgctgatgatttatgcttccataaacccagagaaatttttcgaaagtgagaaaggtgcaaagctgatgcagcttgcaggattatctgctgatgatatgattgtagtaaataatatgcgctgcttacgtggagctgattctaagaagtcttcagttggggcttttactttgaaatttgatcttcagaagaaaaagcctggtatcaggaaggagcggactggagaagagtcaacatggatgctatctcgattttatcccatcctggaggacttgattgagaaacttagtaagggtgagctaccaaaagatgagtaccactgcatgaatgatcctagtcctagtttccgtggaattccagggagcacatctgctcgaacgagcccagctcatcagccagcccaatccatgagatctagacgaataggtggcacatgggctagacctcggaactccgatgatggttattcgaggtacgtgcaacctagatgtgtgaaaggttatcttctccagttgtttgttgttgtatctatacattgacagtgtcttgctcttccaataaaaaattccctcgattccaaattgtaagtcgatttttttgctttgtc

SEQ ID NO: 25568 - DNA, 3049 bp, Zea Mays
caggacggtcaccgacagctaaaactcctggcccctgggttcctctttttcctccagagatttccgtcccgtccacccagctccaagagtccaagatcccaaccatggtggccgcgacggcactctccttctcctttctgtcactagcaacgacactcttccttctcctcctgcgcagcctcatcaacaacaagaagcgccactgtcgcctcccaccgagcccgccgtcgtccctgcccgtcatcggccacctgcaccttttgaagaagccgctccaccgaacgctgtctgctcttgcggcgcagcacggccctgttctcctcttccgattcggctcccgccgcgttgtccacgtcgccgaccctgccgtcgccgcggagtgtttgagcacccacgacgtcaccttcgccaaccgcccgcggcttccctccgcccgctacctctccaacgactacaccacgttgggctcctcaagctacgggcccaactggcgcaacctccgccgcatcgccaccgtcgacgtcttctcctcgcatcgcgtcctctgctccgcggatgtccgcgccagcgaggtccgtaacatggcgcgccagctcttcaaggccgccgccggggccgacgcctccaggcccgcgcgctgcgacgtgaaggcacgcgcgttcgagatcgcgctgaacaccgtggcgagggtaatcgccgggaagcggtactacggcgacggctcggtggcgtcggaggaggccgagcggttccgtgccatggtccgcgagtacttagcgatgcacggggcatcgaacctgcaggacttcgtgcccgtacttgcactggtggacatcggcggcgtgaacaagcgcgcaataaggctgtccaaggcgcgcaacgagtgggcgcagcggcttatcgacgagcaccgggcggccgccgcggccgggagggagcaggggaagacgatggtcggcgatttgctggagaagcaggcatctgaccccgagacgtacagcgacaaggtcatcagagcgctctgcttgtccatcttgcaagctggaactgacacctcgtcgtccaccatcgagtggggcatggcgctgctactgaatcatcccgccgccatggccaaggccaaagccgagatcgacgaggtcatcggcacagcgcgcatcctggaggaagccgacctgccaaaccttccctacctcggctgcatcatcaaggaaaccctgcgcctccaccccgtcggaccgctcctagcgccgcacgaatcggcctccgactgctcggtcggcggctacgacatccccgcagggacgatgctcctcgtcaatgtgcacgccatgcacagggatgcgcgcgtgtgggaggaaccggaaaggttctccccggagaggttcgagggcgggaatagcgacggcaaatggatgcttccgttcggcatgggccggcggcggtgccccggcgaaggccttgccgtgaagatggtcggtctcgcgctgggtacgcttctgcagtgcttcgagtggagaaggaccggagatgaggaggtcgacatgacggaagcgtccgggctgaccatgcccaagtctgtgccgttggaggcgttctattggccgctgccgcgagctgacctccacgaggaccgaaacaattatcgccagattggccgcttcacctcgacagccacgccaccaccactgcgggtctgcggcagtcggcacatggagctcctgcgggacagcatctccatggtgtccctggctgtcctggtgaccgcggtgtgcgcgcgcgccgcgtcctcgtggctccgccccggtctccctcgcctggcgtcgttgctcccgatggtcgcctttcttgccgcggctcccctggctttctcctctgcaatcatccggggacttgcaggcttcttcctcgggtggctcggcgtgttcaaggtcgtcctcctggccgtcggccgcggcccgcttgaccccgccctccccgttctcccgttcgtcttcaccacagcgcttcccgttaagctcagatgcagcagcaccggcgctgcagcagcgtgcagggccaaatcggtctccctcgtctcgtgcgcggtcaaggtcgcggtcatagccgccatcctccatgtgtaccagtacacggaccagctgcatctctacactcgcctcgctctgtacagcgtccacatctactgcttcttggacttcctcctcccgtgcatcgcggcggctggcggcgccctcggcatggatatggagccgcagttcgacaagccgtacctggcgtcgtccctacgcgacttctggggccggcggtggaacctcgtggtgtcggacatcctccggccgtctgtctacggccccgtgcgcgcgcgcgccgggaaggcaccggccgtcctggccacgttcctcgtgtccgggctgatgcacgaggtcatgatttactacctcaccctgcgatcacccaccggtgagatgacggccttcttcctgctccatggcgtctgctgtattgccgaggagtcgtgcgcgcggcggtggatgcagtggggttggaggccgccgccgcgacccgtggctacgctgctcgtggtggtgttcgtggccggcaccgcattctggctcttcttcccgcaaatttgcagggaaggaatggaggagttactgctcgaggagtgggcagcggtaggggcgttcttcaacgacgccgcccgaaagctgctccagatgttcacgtgaagacttgaaagtcggcagtcggcaccagcagactcgttccaatcctctagagataattagtagctatggttttagctgtgttcacagagctaacaacaatagcaatagctatttgagaaacatatagtgtgtttggtttgagaaacgaagtggtgtatctctttctcacttttcacttttttatttggtttgtgaattttatttggtttgtgaaatagaataaattgatccatcatcacctcattcctcataaactaataattagtatataaatgaggagtggttgattacaccaaaattgatggaatgtctatact

SEQ ID NO: 25569 - DNA, 2977 bp, Zea Mays
ctagagtttcgactgcggggggtgttagagatatcgtgattgtgttgtaataggactgtgtgtaatgggcttaggcccaacatctctattataaatatatcacccaacccagtttagggttagggttttcagtccaatagtcactaatggcaggcttctaatagataaattgtgtttttttggcaaagggtgctaatagactatggtatcacgtcaaatcaaaacattatgcacaagctatcaaatatgcaatccatttcatgtttcatctgattcattcttccagaaaaagggaagaaaggttgttttggagaatcttatagatgaaaatgatagtttggcatttatatgaaatactgcctgatttaagaaacaagttgttggggccttactcttccaaaggtcctcaaaaacttaactaacatgtttttcagtataacatactgtcacagaaggcttcggctttaagatgaaggtgtgcatggtatgaaggtgcggtctgaaagaaggataaacttgttccgaagctgtggctgaagaagcttcggcttagcacgaggacgatggtgaaagatgaaaccgacctaaaggagaaaagaccgcttagtccttgacagcttaccttatggtcaacagtaaatgtcagggacatgaatgtaattttgtccaggctgcgtcctgtgcatataaatagatgaacagtaacaccgtactgttcacgctgaattgtaatcactctcgcgtcactctcgcttttccaccttttatcaagccgaaagtataaatgtaatataatgtcattgatgtttatccatgtttataaaataagaatataaataatctaatgatgatttgtgatgattgtttatattcttttgtgtttcatatctccctatttacattttgttcactaaaatgatgaaggtatgcccctcatgaccttcgtctgaaaatcattatatcccaagggagataatgcttcggaggacgaaggtctctaatcattaacaattgtgttgctttgttcttgatgtatagcatcagagaacaaggatcaacacaagcaatagtatcacaaattagataacactgacatcataaaaggtaagtcagcgattctaaagctggtgtagtatttatcacatctccataagcataaatagttcatggcagcttgatgttgtttttttaatagtgcctaactagttcgcagatgcaccgtaacattgttatatctatgtctgaaacctgagatataattaggcaccagggacaatgaatgaaaaaaaggaaatgccattgttaacggcgtgaacagcacaatctagttcaaataattgcttttgtgaaactattgattcatataagcaggaacaactgttttggtgaccatcttcagttttaacatgtgttgcttattttcatgttcagttttgtaaggttaagaacattattcacagggacaagcgaaaatgtctctagttgagttggttaggtggtctgattagcagtcctcaggtccagagtttgaattccagtaggtgcaaattttaggctaaggtcaaaaaaaggtcactcgttggttcccctggttgtgtgcacacgagatggactggcccatgggaggcgaatcctcgtgtaggggctgggagtactcaaagcacgagtaaagatctggcatataggagagagaccctcatgttgcacaggggcagctttcgtgacctttctcggtcgaggctctcattgagcttcttttaatataatatcgtgcgagcggtcttaccggccgagcttttttcattcacagggacagtttctgatatgccaactgcaacatgtaagagatttagttttaagtggagaagggaggagattgaagattgaacaatgtacttggattttgaaatttaagtcatatgggattaggaagcagctttagctatttggttaactgatcaagcagcaacctgggttagaaaggataccaaagttagctcagaggagtttagctactcatatttcacacatgttataagggtttatctattaagatgtgtaatccaaaagccgaaactggtatagtactgatggttaacaaaaagcggaaactgatatagcactgatggttaactaatagtttatgaaaacaattcatttcaagcaatgatatatttagttttacattccaaatttatggaaaaatgtggaacattgcacaaaagacacattgcacaaaagatagaagaaaatcaatttcttatttagacaggtttaaagcattaaccactaccacaaacaatgcccatcctattagcattatagaaaatggcatgttgtccataatttgaatcatcgcattatagaacataaataaatgtgaccaacccacgagaaatgagatgatttaactaaggaaatatgcacataaatttaagctgagaaagaaatatcaacctatgttgttgggtgcattaccacatctcccacacaaccagttgagctagactcacttcctactttataaaacttaggtcatgcccaatgttttcataccgtaacagttagctcctcagacgccaagttagggagctgtcactatcagacacagttcaaactccgaaccctagtgaacgaaaaataaaggccccgcattggcaacccaaaaataataataatggcagtgtgccataacgtattacagcgtggccatacaggggtaatagcaggtaccagtgcagccctataggactcaagcctggatccaaggtcgtatctaggtggtgtgtttcgttgcattatttccaagagtggcacatcaacttacaagttataatggatgaatgaaataatcactctcaatgcatagctcacagtttcataagctagttagaactcacttcaaatagttacatagttttgtgaccaaatatgccatgtgaacgatgtagttactttcaatattatttaaatttag

SEQ ID NO: 25570 - DNA, 1602 bp, Zea Mays
cccatctccctgctcgccgccatggccgcgtcgacgtggatctgtacccgcgacatggctcatcctggcctacaattccaatttcgattcctatggggaacgtgttgtgctgttgtgagatctaggtgaggccatggttatcccgtttgaaaccatgttttcgggcttcgaattttccatacccttctcgggcttgttttccttcccattctcaggcgaggtcgagcaacagaggacgctggcaacaattaacttgccctccggagcggagggcgaggaggccaagaagaggaaggagagcatggagctgttcccacggagcgccggcgtcaaggatgatgctgcccctaggtgcgtactgctgctgcttcatatcatctaaatccatttcgattttggttttgcgcaacagttattaggtagtagcagaactcgaacctagttgtcttaggtctcgtctcgtggacaaaaggccaagcaatcaatttgactctggaacatagtaatctgagtttaatgagtgttcataagtggaacatgttataagggggtctaaaatatagttaagccggatggtgaatgacagagcatgttatctatgagtagcatccttgtagtccagtctgtgttgacattccctggtcaaagttgtatctttgtagtcttaagaagttatcgtctttgttgaaacactgtcttctgcaaggatcgacacaatgtttccttttatcaggcaaagcaaccaacatgctcagagattgtacctaacgtttatcattaactaccaaggaataacagaaaaacagagtagataattgatttgctaagctgaagtagcattctatatgcattattcttagtgttcatctatgtaatatttgtcagagagcaagaagataaagagaagcctaagcagctcacaatcttctatggcgggaaggcgctggtatttgacgatttctccacagacaaggcaaaggatctgatgcagctggccagcaagggtagcccagtagtacagaacgctgttttgcctcaaccctctgcaactgctgctgtcactactgacaaggccgtgctggacccagtcatcagcttggctgctgctaagaagcctactcacacagatacttctgatatgcctattatgaggaaggcttctcttcaccgcttccttgagaagagaaggatcgcctcggtgcaaagaccatatcaaactgctccttcagatgtagcaccagtcaaggagaccgagagccagccatggctcggattaggaccgaatgctgtgaagtccaacctgaatctgagctgtgattctgaaatatttgcaaacagttttctccttcatcatcttcagatagtcagtgtgaaacaataacatttcaaccaattgttacgaggtgctgacatgggtgtatggctagctataaaaaaggggtaggttacttttcaactcatacctttttcaggcttttggctaagataaagtgtagtgggcgcctatgtcatgtgtctggcgtacatgcctagaggggatctgatcccactgattggggataggatagataggatcttgccaatctgggatagtgatcaatc

SEQ ID NO: 25571 - DNA, 575 bp, Zea Mays
agaaaactcgaggtcgagtttcaatcaagtaggggagaatgatgagggacatcacatgcaagttacacaccagggattcatcaaaaagttggcgtcaggctggatcagatggaagcagtcagctgattctaaaagaaccttctaccaatgttgtcctagctgatcatgttacaacaaagaaatgggagaaaattgttgatttcgatgaccaccttgatgatattagcaaggattggtcgaacccaggcctccttgactgaattttcatgattgatctcgctatactgttttggaacttcgctagaaatgaggtggtgaagctcgtcctgctgtgctatggatttctctcagtcgcaacgagttgtaagcactaagcacggatttcattttaatgtaaatgagtgattttgtaacaattacagttcaaaatgctaaaattatgcagagaccatgagattgtttcaaggtcatgacaattattacgagttgtcacaaacaatttttgttcgtacatgactcttattttaaagaatgaaagttcacataaatttaagtgaaatgttgtagacgaaggg

SEQ ID NO: 25572 - DNA, 1064 bp, Zea Mays
ctctccctcagatatatttcttcaccgtcggcattcggatatgtctgtgccgctggtcctcacctcagctcagccgcgcacatgctggctacctgcgcgtggcggccgccaggtcatcttctccatctctcccatggcgctcggcttcctcttcctgccctctcccatggcgcccgttcttcccctggtcgcccatggcgcgcccccgctccctggtttctccagctcagcctcctctccattttcctcagccgcgcctgctccctctgtccatccctggctacgtgtggtgcttctccatggctgcgcccgctgctcgctcccgtgcttttctctctccctggacgcgcgcgctacgacttcccctgtcgcgaccccgccgtggaactcccagctcgtgctcacaatcgccatcgcttatgcgtccactctagcatctccctcatgcgtcctctgcgcgagcgagtccgccttggtccgaccagcgatacctccgccggctccctgatgctcgcgcgcgtcagctacttctccgcctatcgcacttgattcctgtaggtctcgccctccgagctcctctcggtcgccagacatgcatcgctgctgacctccctcatctgatcaggccctacaacagtagcatgtcttctcgtcaagctcgtggtcgtggctccctgatgccccgtcatccctgttctccctcacaacgtgagctcgcctctgtgtgttcgtatggtgccacagcggtctcataccagcaaccactgccgatgtccgtggttaggatagcaggtagggtgttcagaaaataccttaatgatcgacatcatcttaatccgtgtgtagtgatctgtatttccttgtgatggtatggtatgtcatatgtgtgtgtagcagtatacgactgtcgtggaaggctagagtgtgtaggcggtgaaggttcatgccgcgtccgcttggtgttcggtaaaacgtccgaaccatgattcatcgtcgagttgcgattatcaaattatttttggtcatggtgagcggatgcgttattcgataattaaataaattaa

SEQ ID NO: 25573 - DNA, 2013 bp, Zea Mays
atggtcgaggagacggttgtgggggatggcgaggcgagcacgagcgccgcttcggcccacgccagcatcgcggcgcgggcgggtgacggcgggacgcggagggcttggggcagcgaagagcgaaggcctggagccggcgacggcgagcagagcaggtatgctcctcttgatagttgtcttttcacaactgccattaccacttcagatgaaagatataattggcctgttccatggcctgaaagacttgatgttagctatgcaagtgtacctgatgattctgcttctaacaaagagaagtttgaagctgatacaaagtattggaaacagctcatttcagaactctgccgagcatatgttgataaagcagggtgctgcctttcaatcatgttggcgtgggccgaagctatatctggagcaccaggagtccagcctctgctatgccctcaaggtggccctcttcttcgaaagggtgcttgtcatgcctacaaagatctgccttagttcagtgcacaatacaaagggggtccttcattcaagcattgcaacttcataacaaaggtgatttgtctatgcttgcagactgtcacaggaattccatgggcattcttaatagagcggtggtttgtctatttttcgactagcctccacagttcttgtcaactccaaaaaaaatccagtattaaatcataatcctatgttcttccaaaatcctgaaatctacaaagatcatagatagcctttgttatgtacagagacttagctcatgaaactgtcaccctgcgactgtccttcatatcctagcagtgcaaacttcacttggatcctgaccttcattccctccttcacaagcttcgtcgtgttcaccagccaatggcccaggacgtcgtgtggcccttttaccacctccgaaatgtcgacgaacatgaggagcttcctggactatagctggatcggaggtcaggatgtcatatgtgttaaacaaagtcattcttcaacagtttcaactactaatcttaagttgcacctggagaatcttagcgatttttactttctgatgggaagaaccactccccaatacttcggaaggcaaaggatggcaagagcacggtgcctgatgtttttgtcaggatagtgcagcattctaataacctgcatctttctagctactctgaaacatcaatcaaggatgtatatatttttttatatgacttagtatcaattcgctctctcttgatatggtgaaaaaaattatatgtccgttattccaaatagggcctgacagttacctgttcgaaaaggggaggagaagcatacttacccaaccactccaatattccaaacatgattggagactccatgatatgtgtcccataagtcttgataaacctgatattcacaaggtccaagtcaacaagagtgactatgacaatgtgaaggttgtcctctacctcaaaaaagtggaacaagaggagctggagaagctcgcacgcaaggcgcagttgctgccctgggtggcctgggttggtatcacgatgttgctggagaaaggcgctgacgttaacgcgcgcaactactgcggccaggtcttgagttctaagcagcctctccgcatttgtggggaaggcctatctcggtttatcccttctacagaccccacttatgttggagcctctgacactgggtttgccctctttttggttactagggcagattacttgagtggtcgaacatcactgcattttgctacacatgatggatttgttcggtgtattaggcttttagttgcagactttgtcccgagtgtggccttggaggatattgcttcttctgtggtggatggtggtgattgccagacaaacagtgggagcagtcctaattcatcgtcggggcagaagtttaatgaatcgtatgtgttgtcaatgaatctcattttattatttgaaacaatcacgatttaaatgtaactaattttttagaataatcacgatttagtattcatataagtcagcttat

SEQ ID NO: 25574 - DNA, 1702 bp, Zea Mays
atggtcgaggagacggttgtgggggatggcgaggcgagcacgagcgccgcttcggcccacgccagcatcgcggcgcgggcgggtgacggcgggacgcggagggcttggggcagcgaagagcgaaggcctggagccggcgacggcgagcagagcaggtatgctcctcttgatagttgtcttttcacaactgccattaccacttcagatgaaagatataattggcctgttccatggcctgaaagacttgatgttagctatgcaagtgtacctgatgattctgcttctaacaaagagaagtttgaagctgatacaaagtattggaaacagctcatttcagaactctgccgagcatatgttgataaagcagggtgctgcctttcaatcatgttggcgtgggccgaagctatatctggagcaccaggagtccagcctctgctatgccctcaaggtggccctcttcttcgaaaggaagttattgggggagataggaagcaccaaagcagattggatgagaacaagggctctattattcttaatttcaccaatttgtgtgcaatgtggaattatgctaatgtgcaatggccccattctgtagggtgcttgtcatgcctacaaagatctgccttagttcagtgcacaatacaaagggggtccttcattcaagcattgcaacttcataacaaagtgcaaacttcacttggatcctgaccttcattccctccttcacaagcttcgtcgtgttcaccagccaatggcccaggacgtcgtgtggcccttttaccacctccgaaatgtcgacgaacatgaggagcttcctggactatagctggatcggaggtcaggatgtcatatgtgttaaacaaagtcattcttcaacagtttcaactactaatcttaagttgcacctggagaatcttagcgatttttactttctgatgggaagaaccactccccaatacttcggaaggcaaaggatggcaagagcacggtacaactctttttgtattcagtttgcattgtcatatattgggccaaaatttctctaagctaatccatttcattacaggtgcctgatgtttttgtcaggatagtgcagcattctaataacctgcatctttctagctactctgaaacatcaatcaaggatgtatatatttttttatatgacttagtatcaattcgctctctcttgatatggtgaaaaaaattatatgtccgttattccaaatagggcctgacagttacctgttcgaaaaggggaggagaagcatacttacccaaccactccaatattccaaacatgattggagactccatgatatgtgtcccataagtcttgataaacctgatattcacaaggtccaagtcaacaagagtgactatgacaatgtgaaggttgtcctctacctcaaaaaagtggaacaagaggagctggagaagctcgcacgcaaggcgcagttgctgccctgggtggcctgggttggtatcacgatgttgctggagaaaggcgctgacgttaacgcgcgcaactactgcggccaggtcttgagttctaagcagcctctccgcatttgtggggaaggcctatctcggtttatcccttctacagaccccacttatgttggagcctctgacactggactgcactgatgcatgcgtgtcggcatgggcactaggaggtggtgcagatgcttcttctctt

SEQ ID NO: 25575 - DNA, 187 bp, Zea Mays
gagaaagtagccaactcgtatgagaaagtttgttgccaaggtcgccagaccggagcaactccgtcattcgtcgtcaacagcatgccgcccatgtcgaggagttgccaacatgtgccgcatcgaggtcaaggacaggtaccacaagataaggagcatgatgctacgatgagtccgtgagaggtctagg

SEQ ID NO: 25576 - DNA, 402 bp, Zea Mays
gagaaagtagccaactcgtatgagaaagtttgttgccaaggtcgccagaccggagcaactccgtcattcgtcgtcaacagcatgccgcccatgtcgaggagttgccaacatgtgccgcatcgaggtcaaggacaggtaccacaagataaggatcatgatgctgtgatgagttcgtgagaggtctaggtcgtcgtctcacaatcaactatggttgctgcatctttgtctttgtatgatttaattatttgactattttgtatagaactacattatatattaatgatgtgacattcgtttctgtaccatgagtcatcatatgtgtgagacttgatcctagcacacatttgattcgtgcccgggtttgcccccataaatctgggtgtgacagaagttgtatcagag

SEQ ID NO: 25577 - DNA, 827 bp, Zea Mays
ttgcagagtatagggaggtcctcgggtcgaactcctgcgatggcttttcggacaagggattccgatgcttccttcttccttaatccgtagcgggttttctcgaactagtggaactttggaaaggcctcgcagtggatccctaggcattcaccttggaagtgtctaagggtctagctaaccctggttaatcggaaaacacatcttgtgggtaaagatgtgcaacctctgcagagtgtaaaactggtatatcagtcgtgctcacggtcaagagtgactcaggactctcgcatgattaacttatggaactaaacttaatctgtcatatgcattgcattgtgggtgttattattaattgtgatctcttatttaatttgggttggtatcaacttatacttagtaactgctaataaaactttgaccaactttaaaagcaatgctcagctttaaccatttcctttggtaagccttacttcacatgagccccattgtaagtgagctcatgcacattattccccacaacttgttgagcgatgaacgtatgtgagctcacccttgttgtactcacatttccccaggtcaaggacaggtaccacaagataaggatcatgatgctgtgatgagttcgtgagaggtctaggtcgtcgtctcacaatcaactatggttgctgcatctttgtctttgtatgatttaattatttgactattttgtatagaactacattatatattaatgatgtgacattcgtttctgtaccatgagtcatcatatgtgtgagacttgatcctagcacacatttgattcgtgcccgggtttgcccccataaatc

SEQ ID NO: 25578 - DNA, 793 bp, Zea Mays
gagaaagtagccaactcgtatgagaaagtttgttgccaaggtcgccagaccggagcaactccgtcattcgtcgtcaacagcatgccgcccatgtcgaggagttgccaacatgtgccgcatcgaggtacaacatctaatgctacaagtagtaattcactcgagtttttccagtccgtcgatggcgttcgtcagcatagccgctctctgtggcccaacctcgccgccgccagctaagctcgcaggcataaaccgctatgaccagctcgttgaagtttgagttcctccctaactctagcgacagctttggcgagtaatttctcatcgtccgttcatcttccggggcaacccagaacatcgtcgtgaccagctcatgcgagcttcgtcactgcgcttccggtttgtcgatcggatctctggttcataataaaaaaaccgaaatgaccagcaaaaaccgagatgatcagcaacaaccaaggtaggttaggggtcttttccatatgataggcttgacgctttccacctaataaataaccaccaccatatacccttttttacatgcaagactgctatacaacacaaatttaacagtaaatacaatcatgataagttggcaatagataggtcatacatttgtaaacaaacctttcctaccgtcaatgtcacatatttctgagcaaccctactagtttattaaaaatgtgatatcttataggtcaaataatttgttttaaactgttcaagttatgttagtttcatattaatttttgtgtaagtttaataacattgttttaat

SEQ ID NO: 25579 - DNA, 1615 bp, Zea Mays
accgccgacagaataatcactcagatccgagcgacatcgccgcggccgctgcctgctccccaactcgcaacccttccttcccatctgatggccttggccgcggacaagcgcctcgccgccgcggctccgtacctaccggcggagctcataccggatatcgcgcggcacttgacgacgctccaagacttcttcgccctccgcgccgcctgccgctcctaccgcaccgcgctgccaccctcccgcgccgtcctcgcgtcccagccgccgcaccttctcgtgccccaccacgcctcctccccgtgctcgctggccctcatccaccccttgtgtcgccgcctcctccgcttccgtgcgccctcgccccctttccccagcgctgtcgttgcatccgacggcgcccgcgtcgtcacctttgaccactttgcccgcgagctctccatcatccacctcctttccggcgatcgggttcgcgtccccgacgctcccttcctattctcccgcgcagtccttgccggcgacctcgtcctcctcatcgcacccgggtgggttcagtattgccgcctgggggacggtcgatggcgggaggcgtattgccggctcgggggctgcggcggcagcctcttcggtggcctgtacatgatggtcggcatgctcgctgtcaatggcgtcctatatgcgctcctcaacacctgccaactcgcagtggcagagctgatggacaataaggtcgaattaaagctgcttggaggggaagtgggtgaccatgtcagagatgcttggatggaaagcaaggatttcatgcttggggcgtgtgctggtgtgcccatactcatcttcaaggtatcagtcaagcctgagtacaaggttttccgctgggaacctgcagagcaaagattcacctggaattcgaggggattgcatatatgaggctctgccacgggcagcaggttggagtgagtactcattagttgatgacacttatgaactcgtcactattgactaccaaggtgcaccagatctagatgccttaaggaagcaggtttgggtgcttccgagcttgtgctaatattggaatatgaagattaaattctgatgttgaatccatcgacatcacctaaaggaattgttggtgcttcaggacctgtgacctatatctatactctctctttgacatgttggctgagggccagggccttggactgtgcacatcatcaggaaggtttgatcacatattggtcaatctgtttaaagcaagaaattgtttccaccaatgtatactggccttccaacattggaagaagggtttgaaggaaactcaatattatagattggtcaatctgttcagagcatgttatcatttccaccaatgcatcctggccttctaacattggaagaagggtttaaaggaaaacttcaatattggctagagtcatgctctctgtaaacagtgtaatatccctctttggacctaagtccacccatttacatgtactttttttccttattaacgcaaaaacataatatgcgactcgtgcaaaacactgttttatattgtagactgcactattcgtagagtgaagtttgaaatagagatgatataagagataggatgggt

SEQ ID NO: 25580 - DNA, 1728 bp, Zea Mays
accgccgacagaataatcactcagatccgagcgacatcgccgcggccgctgcctgctccccaactcgcaacccttccttcccatctgatggccttggccgcggacaagcgcctcgccgccgcggctccgtacctaccggcggagctcataccggatatcgcgcggcacttgacgacgctccaagacttcttcgccctccgcgccgcctgccgctcctaccgcaccgcgctgccaccctcccgcgccgtcctcgcgtcccagccgccgcaccttctcgtgccccaccacgcctcctccccgtgctcgctggccctcatccaccccttgtgtcgccgcctcctccgcttccgtgcgccctcgccccctttccccagcgctgtcgttgcatccgacggcgcccgcgtcgtcacctttgaccactttgcccgcgagctctccatcatccacctcctttccggcgatcgggttcgcgtccccgacgctcccttcctattctcccgcgcagtccttgccggcgacctcgtcctcctcatcgcacccgggtgggttcagtattgccgcctgggggacggtcgatggcgggaggcgtattgccggctcgggggctgcggcggcagcctcttcggtggcctgtacatgatggtcggcatgctcgctgtcaatggcgtcctatatgcgctcctcaacacctgccaactcgcagtggcagagctgatggacaataaggtcgaattaaagctgcttggaggggaagtgggtgaccatgtcagagatgcttggatggaaagcaaggatttcatgcttggggcgtgtgctggtgtgcccatactcatcttcaaggtatcagtcaagcctgagtacaaggttttccgctgggaacctgcagagcaaaggtgggtgagagctatgaccctgggaaggcggactcttttcatgtctggcaatggctttgatgcttgggttggtccagattcacctggaattcgaggggattgcatatatgaggctctgccacgggcagcaggttggagtgagtactcattagttgatgacacttatgaactcgtcactattgactaccaaggtgcaccagatctagatgccttaaggaagcaggtttgggtgcttccgagcttgtgctaatattggaatatgaagattaaattctgatgttgaatccatcgacatcacctaaagattatatggcagatgaatgagctacatttagtgcaggaattgttggtgcttcaggacctgtgacctatatctatactctctctttgacatgttggctgagggccagggccttggactgtgcacatcatcaggaaggtttgatcacatattggtcaatctgtttaaagcaagaaattgtttccaccaatgtatactggccttccaacattggaagaagggtttgaaggaaactcaatattatagattggtcaatctgttcagagcatgttatcatttccaccaatgcatcctggccttctaacattggaagaagggtttaaaggaaaacttcaatattggctagagtcatgctctctgtaaacagtgtaatatccctctttggacctaagtccacccatttacatgtactttttttccttattaacgcaaaaacataatatgcgactcgtgcaaaacactgttttatattgtagactgcactattcgtagagtgaagtttgaaatagagatgatataagagataggatgggt

SEQ ID NO: 25581 - DNA, 2209 bp, Zea Mays
accgccgacagaataatcactcagatccgagcgacatcgccgcggccgctgcctgctccccaactcgcaacccttccttcccatctgatggccttggccgcggacaagcgcctcgccgccgcggctccgtacctaccggcggagctcataccggatatcgcgcggcacttgacgacgctccaagacttcttcgccctccgcgccgcctgccgctcctaccgcaccgcgctgccaccctcccgcgccgtcctcgcgtcccagccgccgcaccttctcgtgccccaccacgcctcctccccgtgctcgctggccctcatccaccccttgtgtcgccgcctcctccgcttccgtgcgccctcgccccctttccccagcgctgtcgttgcatccgacggcgcccgcgtcgtcacctttgaccactttgcccgcgagctctccatcatccacctcctttccggcgatcgggttcgcgtccccgacgctcccttcctattctcccgcgcagtccttgccggcgacctcgtcctcctcatcgcacccgggtgggttcagtattgccgcctgggggacggtcgatggcgggaggcgtattgccggctcgggggctgcggcggcagcctcttcggtggcctgtacatgatggtcggcatgctcgctgtcaatggcgtcctatatgcgctcctcaacacctgccaactcgcagtggcagagctgatggacaataaggtcgaattaaagctgcttggaggggaagtgggtgaccatgtcagagatgcttggatggaaagcaaggatttcatgcttggggcgtgtgctggtgtgcccatactcatcttcaaggtatcagtcaagcctgagtacaaggttttccgctgggaacctgcagagcaaagattcacctggaattcgaggggattgcatatatgaggctctgccacgggcagcaggttggagtgagtactcattagttgatgacacttatgaactcgtcactattgactaccaaggtgcaccagatctagatgccttaaggaagcaggtttgggtgcttccgagcttgtgctaatattggaatatgaagattaaattctgatgttgaatccatcgacatcacctaaagattatatggcagatgaatgagctacatttagtggtgtgggatctttctgtttattcttgataattgcaggatgcttgctacttgccaattcagggatgagctactgcaagattctggcttgatttacagattttgttgctttgaattggtcttttccacatctcttttcttttggagaaaaaaatgaaagctttaggcgctccagtttctgttgcaaaccaaatggttcattgacacatgttattgaagctttggctcagcttacaaatctgagtatgctcgaggccttcactttgttaagattacaaggatagttgggtcctatatatgaaataaaattctttgctaaacagtcctacaaaatattgttgggatctttacatggctgatccagactttgcttggtcatttaatcctgttgccatggcaagggcaagttcttgtttttgacttcttttgaaagatagattgaacatgctcaagttgcttatcactaaaaacgtctacctggacaaatttgtaacacctgcagtcctgcactctatctcaagaaggttcctgtgttcatctctccttcccatgctctttcagcaggaattgttggtgcttcaggacctgtgacctatatctatactctctctttgacatgttggctgagggccagggccttggactgtgcacatcatcaggaaggtttgatcacatattggtcaatctgtttaaagcaagaaattgtttccaccaatgtatactggccttccaacattggaagaagggtttgaaggaaactcaatattatagattggtcaatctgttcagagcatgttatcatttccaccaatgcatcctggccttctaacattggaagaagggtttaaaggaaaacttcaatattggctagagtcatgctctctgtaaacagtgtaatatccctctttggacctaagtccacccatttacatgtactttttttccttattaacgcaaaaacataatatgcgactcgtgcaaaacactgttttatattgtagactgcactattcgtagagtgaagtttgaaatagagatgatataagagataggatgggt

SEQ ID NO: 25582 - DNA, 2831 bp, Zea Mays
ctcgcggcgaccttccctctgccatctccaggcccgcgcccctgctctgctctctgtccggccatggccgccgtgacgagaccttcttccccgcacgcagcttttcccctgctcctccggcgccgcgagctccagatcggatttggtctagccgcgcccagctcgccatggccaccgagctcggccctgccctcaacgtcggccatctcctgctccctccaatggcgcgcgcgccctccctgctccatctccctccgcgccacgctcctctctaccgcgttcccgctcagccgaccccgtggctccctgcgcgcgcgttctcccgcgcccagctatcttctctatccctcagctctccctcgcgtcttcatctccctgctgagctcggttccttggctgcatgctcattccccgccccaagctcaccgcggtctattgcttcatctctttctcgcgtcgttcggtctgcgtgtccccgcgcccggttttcgttcccgtcacgccgatccgagctcgccgtcccctttccttgttgtgggggttggtcgttgctgctaggctccgctgatgcgcgcgatttgccagccaagttccttcaccggtggtctcctcgtcacgtgcgctggtcgccttgtgtgctcggccacgggcgacatcgagccgtcgaatcccgccctcctcaacttggcactccttacatagccgtcatcgctcgtattccttactgtgcgcatgagcttcactgtttggttgtcatcgcgcgagctcctctgctagacccgtcgtcatttttcagctccttaccgtgctcggctgttcatcgtcatcatccggccgtgcgatgaattgacagccccggcactcgtcctttgtccgtgtcgtttagaccatggtttccttgtccgagcttcaaatccatagtttgttgctcccgtcaactagctcgccatgacgtttctcgccagtgaagcatagtcgccgcgccctatgtccttgtcgtgctcgtgaagaagttgtggagttgccgtcattcatctccacgtcgtgggtacaacaacgttgtcgttcactccacggaactcgtcgtcaaccttatctccaggagactgatcctggagttgcatgaaaatgtgagaaaagtccgtgcaacaattgctaggagctcgaccggatgtctaaactgagagccgtcgtcgccctcgcagttatcaaatcgattcgatcgtggtacgataattaaacacatgatgtggaaaaccagagctgagtcaaccataagataatgttaagcgtgagcttttccacaagatgatgctgatggattaacctgaagatggataatctaaacaagtgccaagacaaaggatggtcgtcaagtgatcgacgtctaacaaacactaacgtagtgttatccaggcaagccccggtgcatttgccacctccttgctgttttaaaatctttatcaccttgtttgatgcattaggtgataggagttgtgtgccagacaattgctgcatttccttccttggaaaattgattatccttccttgataccctttttgaaaagaattttatgatgcttagccttgctttatcaaacaaaaaaaatattttgttttaaaataaaagtgatgcttcagtgggtgggaatgttttcaaaaataaaacttgatggtggatccatcatggccgtgatgggttcaacatcggaaaagatgtacctctacctggtaccaaactttggggtttaaatgattaaaacgagaccgggcggttgacttgcacgagaagggagtgtcggtgtagtgtctccgtctgattcgattaaggaccgtctcgatgtgggcctactgaccgaggaccctttaactggtcacatgcctcatcatgggtaagctttgcctcgggcggactaatactagaaaggccaacacgcaatgagagtggagagatggcgagagtagcgtgtaccctccgtggcaagaggctggacggtggtgtatttgtgctctcggttggcgtgaacccagtctagtcttaagaaacccggtggcgagttgacatatgcaagggttaagtgctccatatgtcgtgtgattggagatcctcagttgagtatgaatcgattcggatcgccgctacttctcggatatgaagacttggtcactgacttacacatagaaatccagtgaactgaagggttgataaaagacagctagtataggccaagtgcttgaactagaataggaagaactctagatgtaggtaactttacataacctgacaagtaaaaatggatttttaaggatccacccatagtaagcttttctgcaaaagagtcattgattcttgacaagctttaccttgactgcctctaaccagcatacccttgagagtcttttctttagtcgggtaagtcttgttgagtacttgcgtacttagggttttattcccatttttgctgcaggttacgagtcacttgattgtgattggtgttaagcgccggtgggcacgaccttctataagtttaagtacttcttctatacttcttattgagtatggtcacttaagctagcatatatatttcaaaactacaaataatttataacagttcaaagttatttccttgaatcacttttgtaatcactccgatcatgtacattgtaaacttgatgtaacttgtaaaatttggaaataagatttccgctgcaaaatgttggtgtgtgatttgtgtttacttaatcctgtgatcctggttgtaagtggtttatctgaggtccttggggcactcggacagatcctgttaagttatctggtgcacatgcatagc

SEQ ID NO: 25583 - DNA, 4560 bp, Zea Mays
ctgtgttctgcgttatttattcccgataattgtttagataacttttcgtagagcaaaaatgtttttagtaaatttagagctcctaatctataacaaaatagatcttcacggctaagaatcctgatgaaaaaaatgggtacatgttccatgcaagcatgagcaaggattttaccgcaaagtcaaaatggttatgtctacagctattgatataccccgacgtggcgacgtatatgtgttacaacaattacatagatcattttcacagccccccctgcgtgggcactgccccgtgcgacagggcccacgcgcagtgacccaactacaccctgcagtaccgcaggcaatccgcttcccgacacgctgttcaagtggatgcggctacaagtctttcatgcatcggtgtcgtgtattttggtggcaacagagaatcgacactagcaaaatattcttcgtcactggatggttccctgtttactggcttgtcaagaacgctgtccgatattgcgtcaagagtctcctccaagaaagttttcactgtctgcacaaagaacatcacacagttaatgctttaccatttacgagcttctgtcttgagaaaaaaaaacttgaaatatacaagagttgaattttgctcattttcatttcaacgtcaaaatgagccttaaaactaatagtatgccatttgttgtttgagtggcgcaaattttagtgagtggatgtgtcgggaaggttttttgagcctccatttgggagttcttttcctttcttacagaaaggcgaaagggcctctagcctggtggttaaggacttccgagtggcacctccaagtcctaggtttgatttccctcgagagcgtatttccaggcttggttcaaaaaatcttctcgctgtgtcccatctactctcgggttacgatgtcctgccggttgggctgttgtagagtggacagttgatgccggcccgttagtgatgggtcagggttcggggattttctcggccgggaccattgtttcggtcttttcttaatataataccgagatggtggtctttccctccccggccgagttttttttcttacagaaaggatgtgtagcactcctgcgttgttcaataaaaaaactaatattatcgcttgttgtttaacgcattaataaaaatgcatcttcattctgtaattatttgtggaagcagtgatatggcaggagtgaggttctattatcttaccttgcaatgacgcaatgcagagtcagctttgcgtttccataggctgttgccaggttctgagtggaataagtttaacagtggctgtatcaaaatcaagtgattccctctgtcattaacagggttaaaaggaagtgatctcaagtgtatataaaactggaaaaggcaaaatacaattagcactagaattgtcttgtaaaatataaacatttgaaaatgtagctgctacttaattagagaacaacaataccaggccaaacatataaatatgctagatcattagaaatgcttcaggtaagttcatttggcagcatcacaccttttgagtacttttttttgaagcgcaatggcacgagctctgcctttcaattaagatagggaaagagtttatgtacatgtttaaattaaaaaaaacttcaaaacagggcgccagacagcacagaggtgcaataaaccaaaattactcttaagattctacacttcccaggttaaggcccttttgagtacacgtctcaagacatatttattcctgatccaggaacaatcttttatgacaatttttatgcattagcattacaaaactgcaatacactttagtgtaacatggcacaaaattctttgccattacaaaaaaaaaacttgtatccaaatgtgatagaaatataaatgatttgcttaaatggtagattcagatatcctccacttgtcagagtgctcataccgaagtgtttttgtcaccaaaatgtagctcctaccttgacaagttgtctcacatttggcctgctggggccatactggtcaattattgaatcaccataagcttggtagttctcaagtatctaagacagagagttcatagttcagataaagggagtaatagcagatagctcaaataaatatgtcaaccgctaaacctggcgacgagaaatgtatcttgtttgcttgccatagatttccccatccacatgtcctagcatgttccatggactggaaagtccagcaaatatgaaattataaagacgttatctgacattggagttagtacataaatcaaattcttacagaaaagaaaaaccaatgtgaccaatataatctcatatatagggaagaactaaagtgaccactggaactgcaaagcataagatacacttgcagttgttttctaacacaccagacagctttgtgtcatttcgagatctatctaaaagggttcactttagtttgtgttagagcccagatgtggcattagctggctggactgtaacatgggaaaggccagcccatgggtgacacaagaagcaggctcggccaatctgtgtggcaaggggcagtcaggctgctgcattcaccagcaccgttcataggtcctgttcatccacagaaatggtgccagataccatatcatgccatctcctgttctttccttcccttgtatcttttgatccttgccagtaacagtttgcaagttcaaaaaaaaaaaaaaagaacatacttgttataagcagcccggccaaccataactccgtgtgcaccttgtctcatggatgcactaacctataacaaaacaaaagagctgtaatcaaaccaacataaggttaacattcatggaaggtttagtcaacattgtgcagtcccgattagcagggaaatgcagatagttggagatgtctctaatgcgccatatgaaatatctttatcttgagtgtacagcaggttctagttctctaaaaaaattggagcctaaaacagttgataattgatgcattacaaacagaaattcatctatataaggatatacaaaattcaagtcaaccattgttacagaaaatatgcttagaatttcttgcatctttgcaagggatttctgaagggtagccctggtacagtgttgagggctgtttcactgcgtcatcaggtcacagatttcaaaagagttctccacatttgcacaggtaggcttgcctcgatttatctcttcccaggccatactcacgtgggagcctctagcactgtgtccgcccctttttacatgggatttctggttcaggttattccaaagggtaggcctacagatccttgcccctcggattggagaagagttctttgataattgttgggagaagattatccttgctgttggagaactgcagaaaggcctcgactcccttatgaaccatggggcttggaccatttgaaatcactgcaatagatgggtatttgatgctgttcctcctcatttggccatagctttattgctctctatcgaggaattacagtactagggttttgccggggctaatagtatttcttaccttttcacctaatcattgtagtagtatgtgtttaggtcacagtcatatccttgtagtttcctagcgcagatgtgattgtaataactaataacgtctttgggtgtgtgtggtttgtaagggttcttcacctttttctttataatattaatgatgcacaactctcctgcgtgactttatgcaactaaaaagtagctacattttctagccatgataagatcactccactttagaggtcacatgaaatgcaattaccattgtagtttcctagctacattattcaatgaggtcatgaactagtaaccgaaaagaattgaagcaaggcagtgagagactgagagtgagtgaaaggccatttggttcgcaacctggcctggggcacccaggcaggtcgatccaaccccaggtgctaaaacatgaatacgtggaatggatgcttggccaaggcgattttcccaggtcaggaggcaaacaggccctgaatttcattgacactcttctgcaggtaaggaacaccaatggtaatatgagcacttacttgactaacattggttatgccaccatttagagtaaattttatttctgggaagtcccgcaacaaagcaaaatagtactcatatctgcaatcatgttgataagcaaatcttaaaattgttccaaggaaccaaactgacacaaaatgaagcattcagcacaggcatgtcctgatccaattcaataatggcattctcttcgctatctaggtgcagtggctaggattagaaatacacaattcaacaattcccactggtatccactttcttgattatcccagattggatatgaggattaaaaattcagccgtacaacacctaatagttacaaatgtttcaatagctacgataaaagaaagagcagaacaatcacggacatgaccattcctctctagagatattattggtgaccatcataaatgtttccttatgcaaaaagatgggaaaacatacttcaatggaggaatcttccgattctctgcgggactgagaccact

SEQ ID NO: 25584 - DNA, 231 bp, Zea Mays
taaccaataaccactgcaagggtgaagttgttctggtgttccagccagtgttagtcctctcccttactgtagagttaagttgttcctgagctgagtgtcaacctcctgtgtggtgaccagggtcatccaagtgcccacctcgccgcggtcaagcaatcacaagcgattccccagctgtacagtgcaagtttcgtgttctccttaggaagggaggaggaatcaatctaccag

SEQ ID NO: 25585 - DNA, 4984 bp, Zea Mays
gagccacgtaggctagctgatatgttgctggcaccatgcgaggacaccttagctgcatgtcaaacatgtcaggaacaccttgccccatattcaagtatttatagggcatggtccagtaaagaatactccttgcccatcgagctctaaccaataaccactgcaagggtgaagttgttctggtgttccagccagtggtcatccaagtgcccacctcgccgcggtcaagcaatcacaagcgattccccagctgtacagtgcaagtttcgtgttctccttaggtcagtgaagctcacaccatttactacttgtactctaccactgtctgttgctgggaactaggtgtaaaattcgctcaaaaaaataggctgttggatttttggatcccagacttagtgcagaaggctgaaactaggttctagtgtgttgagctctattttggtgcttcataaaaattgttctgaatgttttcaacctaggggtactataccaaagtagtagagctatatctaaggaataactttggttatgtgagtttggtctgttgctttgtaaaaattggagaaaagggttggctaaagtttgtctgtctggctggacacataacagaatttttattcatttctgaaaactgaattgcagcaggatgcctagtttggaattcatttgtgactgattcatggggtattggattaaagtttccatagcaaagctggagaccatagtaaagagagcaagttttataaagtgaggtggacttggttccacataaatttggaagtaaaagtggccaaaaggtggactgtcaggtgttaggattcagacttagaataatatttaagtctgaatttgtgtgtttttattcaatttgggtccttgtggtaattaatccaagaagaattggggtaggaatgttatagcaaagtgaaagaccatgttataaggaacaaatccctttaagcaagttaggcttgaatccacataaagtaggaaataacagctgtccaaaactggactgccagattgactctgactgaattttattcagttagctgtaatagcagttcagtgtgggttagtgctttggaaaggagataagtttatctagggaagagataaagttgcttaagaagttttaaggttttggatgagatataagttggattagttccctggtttatctaagtgaattcaaattggtcactttaatcgagcgttaagaaataggtgcattcttgtcatgtgctttagttgtagtgtttctgttccccacctctccttgtgagagtttgcattacatgtcattagataagcattcatgcatttgtaattgacttgtagaacacctagacgaggtggtatttaaagaagtctactccaatgcctgctcctcaagtggatgaagccatctaactgggtattggatagagggatctagaaccacttcattgcaacaaaggcaagccccggtgcatgcaaccacttctttgtgtttttaaataatttttgcacactttaagtctagtgaaatgtgcattaggtttataggagttgcttggaaaccctttgatgcattgcctaccttgatatccatacctttatagatacttctgatgaagtatcaaaatatggtttacaaaattgcttagccttgcttagaggtaaatcttgtggatagaggttgtcctttgcgttaatgcctaggtcaggggttatcctgaggaaggatggcttctgcctgcaagaatattttcattaggagcaatggtgggatcttactgtaaagttccctgtgatgctcttttcatccttaggaacacaaacaatcctaagggtggaagtacttaaatcgggacttgggctaggaacaggtgatgttccgtccgggtcaattaaggattggatgcgtatgtaggcctgttgatcaaggactatcttaactagccacatgccctggaaatgggacagggtaagcttgaacccggctattccatacgtgaaaagacaaccgcgcactgggcgtgggagatggtgggagtagcgtgtacccttctggctagaggttggatggaggagtactgtgctcccgggtagcgcggaccggttcacgttgtggaggatctgtgggaacggttgacatatgcaagggttaagtgctacatatgttgtgtggttagagatcctcagctgagtaaatcgattcggatcgccgttatatccccggagagtggagacttgatctccgacctgcaacctaagtcaggatgtgaacctcatgaataaaaatgatgttgtattgatgagatggtgaaattagactagatgcaaacagagtctattaatatttaatctagcgttaaaatattgaaagtaaggactcactttagtaagctatttctgcgaaagtatctaagttgattcttgctaaagcctctccttgattcccaaatccagcatatccttgagagtcttttctttagtcgggtaagtcttgctgagtaattccatactcagggttttattccctgttgtttttcaggatataactttgtgctgctgtgatggtgttaagtgccggtgggctcggccttcttatataagtatacccagtctttatcttcttactgaggatggtcatttgagctagcatatatttcaaacttatactcttgtaatcactccgataaaatattgtaaaatttttgtaacctgtaaaatttggtaataagatttcggctgctaaaatattgtgtgtgtgattttttttgttacttaatcctgcggttctggttgtaagtggtttatccgatgtccttggggcaatcggacggatcctgttaagttatctggtgcacatgcatgccgtctgaggtctttgagacgaggacaggtgcatgtgggcccgataccttgggaggttctgccacacggaccacacccagccgagcaaccggggagatcccgttcttcctggtctacggggccgaagcctgtcttcccccggaaattattatgggctccccacgggtccaatctttcgatgagtctatgcaggaacagctacggcgtgaggacgtggacttcatcgacgaacacagatggcgagcgacgatccgaaatgcacagtacaaccaagcactcaggcgctaccaccaacggttcgtgcatagtagggagctcagggtcggggacctagtcctaaggcgagtactgaaccgagaagggctccacaaactctcccccaattgggaaggacccttcaatgtgacgggaatatgccgacccaggtgtgtccgccttgccacaactgaaggagtgtctcttcccaatccctggaacatagagcatctccataagttctacccatagaagcaaaactgggggattgagtttttcttcctttgtaactgggttgcgcatatgtgtatgtcaatccggtgaggtccgccctcgtaaacctggcctcttggtctacacccatgtatatcaagttataaggaagagatttacccctcagatgtgcttttgtgatggttttattctgctacagtttcagatattattttttatctaacccacccatacagttcccacccttgctggtatgatgacatttgaattgagtaagccaagcttgcagttcaggacccctttactgctacagggggtccagcaacttgtgggtccggtttctagagaatgggcgctcgttttcctggagtggtccggagctgtgtagccgcttagcctggttccgtaccctaagcctgcacctccaccactctgcaacgggtactctagtatttggagttgtgatcctgtgggtccgggcatacggcttggcttcccaagttaaatcctgcaggtcctgttgcatgaatcaaaggatggcagataccagacgatgggtcctatgggtgtgcccctaacacttcaaaaccgaagctgtgtgcaggtccaggtcccaatccagacgcaggtagtctcaaaccgtagagactaccccatagggaccgggcaaccaattttctcttaggtatactggtatccagcctcgacacatcgagcctacatcccaggggggccaagtaccaggggaggttggtaacgctacacacagcgaggacaaataacatacaagataagtgctaatactgcttgattaatggttctcaaaagtatgttacaccaccaaaggttattacaaaccgctccctagagggacccttgtcttgtctatgcagattcggctactcgtcatcagtagggtcgcgctggaagcgctcgcccaccagctccatggcgtcttgtacgctctctcgggcggcgtcttcagtggtggccaccggaccagcgatcaccagctccaaagatatggtcgggtcgtgacttcggaagcatgtcaagatatactcaatcaccgcccagcagagcttgctgccctctacctctaggcgggcgccgaggatctggtccaggtgttggaggcgattagcggcggagtccagcaccaggagcgcctcagagatcgacgcaggcagctccgacaccgggatggggcttatccctagcggcaccagtgccgtgctcgcctcgccggccgacgcggcgatgcgctggaccccgctgcggtgctccgtctggagatcttcaagggccttcctggtggcctccacctcttgggaaccctacgccgcctgtgccgcgttgaactagcggacctgctcctccaactccttttctttcttctctgcctcgagctcgtgctcggctagcagctcgcctcgctgcgtgagcatttcctccctgaagccgagatccgtctcccacctagcgaggtccatctctcgcctatctaaggactctcccttcgccttgaggttctcctcggcgagggcggcctcactggccttgccctcgagctcctgctgtgtaacaccccggggtccacaaacaccccggaattctactaaacaacacttctgac

SEQ ID NO: 25586 - DNA, 2846 bp, Zea Mays
gttcaatgtttaaattagggctgggtgctggtgttgtatgagggcatgtgagccacgtaggctagctgatatgttgctggcaccatgcgaggacaccttagctgcatgtcaaacatgtcaggaacaccttgccccatattcaagtatttatagggcatggtccagtaaagaatactccttgcccatcgagctctaaccaataaccactgcaagggtgaagttgttctggtgttccagccagtgttagtcctctcccttactgtagagttaagttgttcctgagctgagtgtcaacctcctgtgtggtgaccagggtcatccaagtgcccacctcgccgcggtcaagcaatcacaagcgattccccagctgtacagtgcaagtttcgtgttctccttaggatataactttgtgctgctgtgatggtgttaagtgccggtgggctcggccttcttatataagtatacccagtctttatcttcttactgaggatggtcatttgagctagcatatatttcaaacttatactcttgtaatcactccgataaaatattgtaaaatttttgtaacctgtaaaatttggtaataagatttcggctgctaaaatattgtgtgtgtgattttttttgttacttaatcctgcggttctggttgtaagtggtttatccgatgtccttggggcaatcggacggatcctgttaagttatctggtgcacatgcatgccgtctgaggtctttgagacgaggacaggtgcatgtgggcccgataccttgggaggttctgccacacggaccacacccagccgagcaaccggggagatcccgttcttcctggtctacggggccgaagcctgtcttcccccggaaattattatgggctccccacgggtccaatctttcgatgagtctatgcaggaacagctacggcgtgaggacgtggacttcatcgacgaacacagatggcgagcgacgatccgaaatgcacagtacaaccaagcactcaggcgctaccaccaacggttcgtgcatagtagggagctcagggtcggggacctagtcctaaggcgagtactgaaccgagaagggctccacaaactctcccccaattgggaaggacccttcaatgtgacgggaatatgccgacccaggtgtgtccgccttgccacaactgaaggagtgtctcttcccaatccctggaacatagagcatctccataagttctacccatagaagcaaaactgggggattgagtttttcttcctttgtaactgggttgcgcatatgtgtatgtcaatccggtgaggtccgccctcgtaaacctggcctcttggtctacacccatgtatatcaagttataaggaagagatttacccctcagatgtgcttttgtgatggttttattctgctacagtttcagatattattttttatctaacccacccatacagttcccacccttgctggtatgatgacatttgaattgagtaagccaagcttgcagttcaggacccctttactgctacagggggtccagcaacttgtgggtccggtttctagagaatgggcgctcgttttcctggagtggtccggagctgtgtagccgcttagcctggttccgtaccctaagcctgcacctccaccactctgcaacgggtactctagtatttggagttgtgatcctgtgggtccgggcatacggcttggcttcccaagttaaatcctgcaggtcctgttgcatgaatcaaaggatggcagataccagacgatgggtcctatgggtgtgcccctaacacttcaaaaccgaagctgtgtgcaggtccaggtcccaatccagacgcaggtagtctcaaaccgtagagactaccccatagggaccgggcaaccaattttctcttaggtatactggtatccagcctcgacacatcgagcctacatcccaggggggccaagtaccaggggaggttggtaacgctacacacagcgaggacaaataacatacaagataagtgctaatactgcttgattaatggttctcaaaagtatgttacaccaccaaaggttattacaaaccgctccctagagggacccttgtcttgtctatgcagattcggctactcgtcatcagtagggtcgcgctggaagcgctcgcccaccagctccatggcgtcttgtacgctctctcgggcggcgtcttcagtggtggccaccggaccagcgatcaccagctccaaagatatggtcgggtcgtgacttcggaagcatgtcaagatatactcaatcaccgcccagcagagcttgctgccctctacctctaggcgggcgccgaggatctggtccaggtgttggaggcgattagcggcggagtccagcaccaggagcgcctcagagatcgacgcaggcagctccgacaccgggatggggcttatccctagcggcaccagtgccgtgctcgcctcgccggccgacgcggcgatgcgctggaccccgctgcggtgctccgtctggagatcttcaagggccttcctggtggcctccacctcttgggaaccctacgccgcctgtgccgcgttgaactagcggacctgctcctccaactccttttctttcttctctgcctcgagctcgtgctcggctagcagctcgcctcgctgcgtgagcatttcctccctgaagccgagatccgtctcccacctagcgaggtccatctctcgcctatctaaggactctcccttcgccttgaggttctcctcggcgagggcggcctcactggccttgccctcgagctcctgctgtgtaacaccccggggtccacaaacaccccggaattctactaaacaacacttctgac

SEQ ID NO: 25587 - DNA, 3982 bp, Zea Mays
gttgaccaggttcaatgtttaaattagggctgggtgctggtgttgtatgagggcatgtgagccacgtaggctagctgatatgttgctggcaccatgcgaggacaccttagctgcatgtcaaacatgtcaggaacaccttgccccatattcaagtatttatagggcatggtccagtaaagaatactccttgcccatcgagctctaaccaataaccactgcaagggtgaagttgttctggtgttccagccagtggtcatccaagtgcccacctcgccgcggtcaagcaatcacaagcgattccccagctgtacagtgcaagtttcgtgttctccttagaacacctagacgaggtggtatttaaagaagtctactccaatgcctgctcctcaagtggatgaagccatctaactgggtattggatagagggatctagaaccacttcattgcaacaaaggcaagccccggtgcatgcaaccacttctttgtgtttttaaataatttttgcacactttaagtctagtgaaatgtgcattaggtttataggagttgcttggaaaccctttgatgcattgcctaccttgatatccatacctttatagatacttctgatgaagtatcaaaatatggtttacaaaattgcttagccttgcttagaggtaaatcttgtggatagaggttgtcctttgcgttaatgcctaggtcaggggttatcctgaggaaggatggcttctgcctgcaagaatattttcattaggagcaatggtgggatcttactgtaaagttccctgtgatgctcttttcatccttaggaacacaaacaatcctaagggtggaagtacttaaatcgggacttgggctaggaacaggtgatgttccgtccgggtcaattaaggattggatgcgtatgtaggcctgttgatcaaggactatcttaactagccacatgccctggaaatgggacagggtaagcttgaacccggctattccatacgtgaaaagacaaccgcgcactgggcgtgggagatggtgggagtagcgtgtacccttctggctagaggttggatggaggagtactgtgctcccgggtagcgcggaccggttcacgttgtggaggatctgtgggaacggttgacatatgcaagggttaagtgctacatatgttgtgtggttagagatcctcagctgagtaaatcgattcggatcgccgttatatccccggagagtggagacttgatctccgacctgcaacctaagtcaggatgtgaacctcatgaataaaaatgatgttgtattgatgagatggtgaaattagactagatgcaaacagagtctattaatatttaatctagcgttaaaatattgaaagtaaggactcactttagtaagctatttctgcgaaagtatctaagttgattcttgctaaagcctctccttgattcccaaatccagcatatccttgagagtcttttctttagtcgggtaagtcttgctgagtaattccatactcagggttttattccctgttgtttttcaggatataactttgtgctgctgtgatggtgttaagtgccggtgggctcggccttcttatataagtatacccagtctttatcttcttactgaggatggtcatttgagctagcatatatttcaaacttatactcttgtaatcactccgataaaatattgtaaaatttttgtaacctgtaaaatttggtaataagatttcggctgctaaaatattgtgtgtgtgattttttttgttacttaatcctgcggttctggttgtaagtggtttatccgatgtccttggggcaatcggacggatcctgttaagttatctggtgcacatgcatgccgtctgaggtctttgagacgaggacaggtgcatgtgggcccgataccttgggaggttctgccacacggaccacacccagccgagcaaccggggagatcccgttcttcctggtctacggggccgaagcctgtcttcccccggaaattattatgggctccccacgggtccaatctttcgatgagtctatgcaggaacagctacggcgtgaggacgtggacttcatcgacgaacacagatggcgagcgacgatccgaaatgcacagtacaaccaagcactcaggcgctaccaccaacggttcgtgcatagtagggagctcagggtcggggacctagtcctaaggcgagtactgaaccgagaagggctccacaaactctcccccaattgggaaggacccttcaatgtgacgggaatatgccgacccaggtgtgtccgccttgccacaactgaaggagtgtctcttcccaatccctggaacatagagcatctccataagttctacccatagaagcaaaactgggggattgagtttttcttcctttgtaactgggttgcgcatatgtgtatgtcaatccggtgaggtccgccctcgtaaacctggcctcttggtctacacccatgtatatcaagttataaggaagagatttacccctcagatgtgcttttgtgatggttttattctgctacagtttcagatattattttttatctaacccacccatacagttcccacccttgctggtatgatgacatttgaattgagtaagccaagcttgcagttcaggacccctttactgctacagggggtccagcaacttgtgggtccggtttctagagaatgggcgctcgttttcctggagtggtccggagctgtgtagccgcttagcctggttccgtaccctaagcctgcacctccaccactctgcaacgggtactctagtatttggagttgtgatcctgtgggtccgggcatacggcttggcttcccaagttaaatcctgcaggtcctgttgcatgaatcaaaggatggcagataccagacgatgggtcctatgggtgtgcccctaacacttcaaaaccgaagctgtgtgcaggtccaggtcccaatccagacgcaggtagtctcaaaccgtagagactaccccatagggaccgggcaaccaattttctcttaggtatactggtatccagcctcgacacatcgagcctacatcccaggggggccaagtaccaggggaggttggtaacgctacacacagcgaggacaaataacatacaagataagtgctaatactgcttgattaatggttctcaaaagtatgttacaccaccaaaggttattacaaaccgctccctagagggacccttgtcttgtctatgcagattcggctactcgtcatcagtagggtcgcgctggaagcgctcgcccaccagctccatggcgtcttgtacgctctctcgggcggcgtcttcagtggtggccaccggaccagcgatcaccagctccaaagatatggtcgggtcgtgacttcggaagcatgtcaagatatactcaatcaccgcccagcagagcttgctgccctctacctctaggcgggcgccgaggatctggtccaggtgttggaggcgattagcggcggagtccagcaccaggagcgcctcagagatcgacgcaggcagctccgacaccgggatggggcttatccctagcggcaccagtgccgtgctcgcctcgccggccgacgcggcgatgcgctggaccccgctgcggtgctccgtctggagatcttcaagggccttcctggtggcctccacctcttgggaaccctacgccgcctgtgccgcgttgaactagcggacctgctcctccaactccttttctttcttctctgcctcgagctcgtgctcggctagcagctcgcctcgctgcgtgagcatttcctccctgaagccgagatccgtctcccacctagcgaggtccatctctcgcctatctaaggactctcccttcgccttgaggttctcctcggcgagggcggcctcactggccttgccctcgagctcctgctgtgtaacaccccggggtccacaaacaccccggaattctactaaacaacacttctgac

SEQ ID NO: 25588 - DNA, 1902 bp, Zea Mays
tcaaacccacacgacttcaggatacaagtggagactctagagtgcaccaggccttcccttcagtctaagaattggcaatgccacacacacaaaaagcaacttaaaacattttagcattgccaaatccttgtacgacaatggcatcaactgccactctaatggaatgcttggtttggtgaatcaaaccattttcgattgggtgatgtatcataaacttgtttactattttttctcaaatacgtaggagagctatgtatcattacgtgagctacgtatcattacgttaacaaggaagaagagctaaaactcccaaaggagcctagacgccacaagaaataactggaatgaaaagggaagagcaaaaatgacgacaacaatgacccagctaaacacaagccaccatattatctagtagcggcctctaagtaagctaacccactagcaccagctacacaccagagattagcctcttcagaaatctgcttaagaataagctgcacattgagaacagctacattgaacactcactatggtgagttccacagggaccaggcgaccaaaataattactgaattcagccctattttagttgctaaggcaacaaatctggaatgcccatccaccagactggggggaccttgtcatcagagtggagagtagaaaggctttcatgctttctgccaataagccaattggaggttatgtcgctccaagctacaagttgaggacaactcttcttgtgcaagagaggacacgtgtggagagaatgttgcagcccatgaaggaaactttgagctctaaagaagatagcccaatgtttcttagagcgatcaccactgaaggaatatccaagaccgagcatatttcagagaagatgttagcagtaattgatgatgttggggcacaaaatgttgtgcaagtgatcactgacaacgctgccaattgcagagctgctggcatcaaagttgagcagaagcaccctcattttttggatcccttgtgttgtgcatactttgaatcttgctttaaggaacatatgtgctcctagggaaattgaagatgtgctttatactgaattctagtggattcacgaagtcattggagatgccagcatgattaaaaatttcatcatgaatcactccatgaggttgtctatgttcaatgaggaaaggaaagtgaaattcattgccattgctgacacaaaatttgcctctgctattgtgatgttgaagagatttattgctataaaagatgctctttcagtgatggtagtgagtgaaaagtgcagtgcgccagtgcctataggaaagataatcctcgtcaagctcgatttgtcaaggagaagattgaatgatctgtggtggtataaaaatgagctattttcttagtttcattgagcctatctatgctatgatacgggaagatgatactgacaagccatgcctctatttgatatgagatgtgggacacaatgatagagaaggtgaagagcgtgatctatcgtcatgaaatgaaagaaccacatgaataatctatcttctactcagctgtgcatgacatcttggtgagtcgatggacaaaaagcaacacgcccttgcattgcttggcacactcactaagcctagtggtgtgatgattttagacatcattgaaatttaattctgtatcaggcttagtttctttgttatgctttctccggtaaactggtgatccgagatactgttgctttcttaaaggcagaggttttcctcttttcaaaataaaaaaagaacacatgcctgccagagaggaatcagagatattgatccaaccaaaacaaacaagactgacaaactacaaacagaagaacaagaaactaaagtgtgggataacctgtccggtcctctcaaaatagtcgttgag

SEQ ID NO: 25589 - DNA, 2064 bp, Zea Mays
acggcatcagcttagttacacacataaaggtataaataattcactgcaaagtaaaatcatacaagaacaaaaataatgtcagaaaaactagacagtgaaggtgcgcgtctgttcaaatacgcgaacatacctttgtcatgctttctgaatttttacaactgtgctccagcgtgctcgaatctatctcctgtcacagaattcgagcaaatgcgaagctcttttatacgacataattataaaaacattgattttgctagattgctagaaacatttcagtcacgttcacaattaaaaaggtacagccagtaccgaagactcccacatgactggatctcgagaactaataaactaagccttgtttgtttgcaccaatccagatctagattaacatggattaaaattaaatctatttcacaatccatgccccaaaataatccaagcctactcagattttttttattcagttaaacccatcatggattataacccaagggtttggtaattttttaaattatgtaacacatggattatatccatagctcattagatatgaaacaaatctatgaaaataatgtacaaatttatattagaatccatgattcaaaagaataactagctttgagtgatacatggattaaatgatgaatttaatcccaccatgggattaggtataaggtatgaatccactcaatccagacccagattaaatctatggtggggtttaatcccttgcaaccgagtaagacctaagttgctaaggcaacaaatctggaatgcccatccaccagactggggggaccttgtcatcagagtggagagtagaaaggctttcatgctttctgccaataagccaattggaggttatgtcgctccaagctacaagttgaggacaactcttcttgtgcaagagaggacacgtgtggagagaatgttgcagcccatgaaggaaactttgagctctaaagaagatagcccaatgtttcttagagcgatcaccactgaaggaatatccaagaccgagcatatttcagagaagatgttagcagtaattgatgatgttggggcacaaaatgttgtgcaagtgatcactgacaacgctgccaattgcagagctgctggcatcaaagttgagcagaagcaccctcattttttggatcccttgtgttgtgcatactttgaatcttgctttaaggaacatatgtgctcctagggaaattgaagatgtgctttatactgaattctagtggattcacgaagtcattggagatgccagcatgattaaaaatttcatcatgaatcactccatgaggttgtctatgttcaatgaggaaaggaaagtgaaattcattgccattgctgacacaaaatttgcctctgctattgtgatgttgaagagatttattgctataaaagatgctctttcagtgatggtagtgagtgaaaagtgcagtgcgccagtgcctataggaaagataatcctcgtcaagctcgatttgtcaaggagaagattgaatgatctgtggtggtataaaaatgagctattttcttagtttcattgagcctatctatgctatgatacgggaagatgatactgacaagccatgcctctatttgatatgagatgtgggacacaatgatagagaaggtgaagagcgtgatctatcgtcatgaaatgaaagaaccacatgaataatctatcttctactcagctgtgcatgacatcttggtgagtcgatggacaaaaagcaacacgcccttgcattgcttggcacactcactaagcctagtggtgtgatgattttagacatcattgaaatttaattctgtatcaggcttagtttctttgttatgctttctccggtaaactggtgatccgagatactgttgctttcttaaaggcagaggttttcctcttttcaaaataaaaaaagaacacatgcctgccagagaggaatcagagatattgatccaaccaaaacaaacaagactgacaaactacaaacagaagaacaagaaactaaagtgtgggataacctgtccggtcctctcaaaatagtcgttgag

SEQ ID NO: 25590 - DNA, 1378 bp, Zea Mays
caacaaccgtgcatggctaccattaggaacctagtaaaataggcatgcatgccgccaggccatgggacaggctacacacctctatttggggggtttcttccccctcggtcactttgatattgggggagtttcacctcccctgccttctcttgtcgacgtctccttctccctccttcctccagcacgagcggcagctgtcggagcacgacagttgcagcgtccttcaggggaggaagaaaggggacgacggcacgagtttaaaccaacaatctctcgtcatatatatcataatagagagtaggacgacaaaagccatgggcagtaatggcagagatcataggcgcggagtcccacgcccgccacctttaccactttacagggattgggaggaggaagaggtcgtcaaggctggtcgacgtcggcagtcgccgttggcgcagtcgtcaacgtcacccgcggccgcagccggcgtcgccaacaagaagaggctgtcgaagcagctgtccatgaaggagaccaccagggaggtcaagtgggagaagcggaagcggcagatacaacggcagaggagcagcatgcgcctgagcgaagccgacgacagggcaggtggcagcactgctgtctgtcctgttgacggcgaggcgagctcgagcgcggagcgggtggccactggtataaccgacggggacctggatgagctgaggggatccatggatctcggcttcaggttcgacgagcagaagggcggccaggacctctgcgacaccctccccgccctcgacttctatttcgccgtcaaccggcaggtgtcggagcccaggatgtcgtttcccacgagcacgagctcagggccgtctctgtcggccaccaagtcctcgcccaacctctgcggcacgcccagcccaggagataaccctctgcttgtgaagacaaggctcaggcactgggctcaagtagtggcttgttcagtgaagcactcgagctgatcctcgtcagtgttttattcacgctcttcttccatacataatacccgtacaagtggttgcgatggcgatgaattagtcgtgtccgagtgaaactagatcaattgaccttgttgctcgatctaatgtcgtcccaggtcacattgttgtggacagatttaattagcgtcgggttggcaaattaaaaaatgtatatgcaaagtactgttaaaggttggcatggtgtaaaaggtgtgagctatctccctaaatcattatgtcacagatttgaaacagtctttccgtatctgcgaaaaaaaacttgtctcgttttatctcttctccacttcctcgtgtgagaggctcccgcacatgatttatcccattttattactccatattttttgcatgtacgg

SEQ ID NO: 25591 - DNA, 909 bp, Zea Mays
ccgcccgcggccgaaccctcccctgcatcccgccggcagccccgcatcccgcagccacgttccttacatcatccgcccgcagtcgcgctccttccatcctccgccctcgttccgccgccctccttccattttgagctttgacggcgtgaatccacaacgatcccttccatcatcgcggatcccgtgctccctcccgcgctccctcagcgcccgcccgtggatccccgacgacgtcaatgactccacgattaaggggatccgaggccaccataaacgcgctcctcccccacgacgtcgatggcgcgcgtgttgagggcgtggggaggaggtgcacggctgccatcaacgctctcctacacccagatctgcgcgcgtctgccctggacttccatggacggctgtccacgcccaccatcggctcaccatggatcacgccccagccgcgtccgccctggactgccatggacggcgctgtgccacatttggaattaataaactagccactattgttgataccatcttggaattaatattttatctacatttaatagtgtggtttatgctctttcattctgttatatggctgcgacgtctatgagatcctgatatccatgaccatgagtaacaccatcaattacatgatatgtcaaattaattcactatttactcccattttgattttttcactctaaacatatttttgaatgtggccaaagagagtgctgatgtcatcattattgatgacagcttctccgctattgtcgtcactgttgcaagatggggtcgatcagtatacatcaacattcagaagtttgtgcagtttcagctcactgtcaatggagtgctcctcttaccgctgcgcaattgctctgggtcaacctgatcatggatacactgggtgcactggcg

SEQ ID NO: 25592 - DNA, 1215 bp, Zea Mays
acttgttccttcttccaaagttctaatccacatgtgattatgttcttcttattattccaattagggactctacaaggatttcagagcaaatggcttacaaacagccacaaacttttaccaagagtttatcttctgataacaagactctcaaaagttctcacaatttttggtgctcacatttgctccctaaatattcaattaatcctttttagaacacacttaaattacttaaaatttgtaaactgcactaaggatcccaaaaacacatttaccagagagcttcagtgatctcacaaacctatagtgcgcgtgtgaactcgaccggaaatggcgcgagttaacgggtcgacgcaggggtaattcacggcgccaaaccacggcggcggagttctgttctggtcagcacaaaatagtagagttaaaaattccaagttgatgagcttcactgaccttacgtgagcacaaaacgagcgccacacggtcgaggaaaccttggaagatccctggccaccgtgaggtgagatgaaactcgatggcactttggagatgcgcgtttggtgcaatggcctgaaaccaagtagggggcacctaggcgatgttgaagtcgcggtagcgctgcggacgcgacgagggagaacgtccgcgagaaggcaggcgacggctggggaatttctagggagccgacgagctgttgcagagagagcagcaggcgacggctggggaatttctagggagccgacgagctgttgcagagagagcagcaggtccagtaggcaacagcgaagttggggagccgagcgccggcacgacgatacaggagctagagacagtggcgttcagcagctccacacaatgatgtgccagagaaggagacgagaacgcgtgcagtttcagccatgatccacggactcccaacacgcaaactccaggaaggaagagatcgtgactggcaagtggtaacaacagaacgacgtgtccaggtgaggcaagtactggggagaccgagcagagaggagagcgggctgagaacaggaatgcgaggggcactacgagaagggagctcggctgctgctgcctaagcgatggggtgaggggatatatgacgtggagaagctagtgctcactgctcagggctgcacgtggatttctggagatgagacaacgcacggagagacttccagggagtacgtgtactagatattggataagaacgag

SEQ ID NO: 25593 - DNA, 1524 bp, Zea Mays
ctctgacttgaatcctacaacttgaacttctagaggattagaacaatcttcaaactacgccaaaaatccagatcccactatgcactcttacttctttatccaaagatcaggtttcacttgttaaacttgttccttcttccaaagttctaatccacatgtgattatgttcttcttattattccaattagggactctacaaggatttcagagcaaatggcttacaaacagccacaaacttttaccaagagtttatcttctgataacaagactctcaaaagttctcacaatttttggtgctcacatttgctccctaaatattcaattaatcctttttagaacacacttaaattacttaaaatttgtaaactgcactaaggatcccaaaaacacatttaccagagagcttcagtgatctcacaaacctatagtgcgcgtgtgaactcgaccggaaatggcgcgagttaacgggtcgacgcaggggtaattcacggcgccaaaccacggcggcggagttctgttctggtcagcacaaaatagtagagttaaaaattccaagttgatgagcttcactgaccttacgtgagcacaaaacgagcgccacacggtcgaggaaaccttggaagatccctggccaccgtgaggtgagatgaaactcgatggcactttggagatgcgcgtttggtgcaatggcctgaaaccaagtagggggcacctaggcgatgttgaagtcgcggtagcgctgcggacgcgacgagggagaacgtccgcgagaaggcaggcgacggctggggaatttctagggagccgacgagctgttgcagagagagcagcaggtccagtaggcaacagcgaagttggggagctgagcgccggcacgacgatacaggagctagagatagtggcgttcagcagctccacacaatgatgtgccagagaaggagacgagaacgcgtgcagtttcagccatgatccacggactcccaacacgcaaactccaggaaggaagagatcgtgactggcaagtggtaacaacagaacgacgtgtccaggtgaggcaagtactggggagaccgagcagagaggagagcgggctgagaacaggaatgcgaggggcactacgagaagggagctcgagacagtggcgttcagcagctccacacaatgatgtgccagagaaggagacgagaacgcgtgcagtttcagccatgatccacggactcccaacacgcaaactccaggaaggaagagatcgtgactggcaagtggtaacaacagaacgacgtgtccaggtgaggcaagtactggggagaccgagcagagaggagagcgggctgagaacaggaatgcgaggggcactacgagaagggagctcggctgctgctgcctaagcgatggggtgaggggatatatgacgtggagaagctagtgctcactgctcagggctgcacgtggatttctggagatgagacaacgcacggagagacttccagggagtacgtgtactagatattggataagaacgag

SEQ ID NO: 25594 - DNA, 5143 bp, Zea Mays
cttgccttaagtaaggacttacttctctgacttgaatcctacaacttgaacttctagaggattagaacaatcttcaaactacgccaaaaatccagatcccactatgcactcttacttctttatccaaagatcaggtttcacttgttaaacttgttccttcttccaaagttctaatccacatgtgattatgttcttcttattattccaattagggactctacaaggatttcagagcaaatggcttacaaacagccacaaacttttaccaagagtttatcttctgataacaagactctcaaaagttctcacaatttttggtgctcacatttgctccctaaatattcaattaatcctttttagaacacacttaaattacttaaaatttgtaaactgcactaaggatcccaaaaacacatttaccagagagcttcagtgatctcacaaacctatagtgcgcgtgtgaactcgaccggaaatggcgcgagttaacgggtcgacgcaggggtaattcacggcgccaaaccacggcggcggagttctgttctggtcagcacaaaatagtagagttaaaaattccaagttgatgagcttcactgaccttacgtgagcacaaaacgagcgccacacggtcgaggaaaccttggaagatccctggccaccgtgaggtgagatgaaactcgatggcactttggagatgcgcgtttggtgcaatggcctgaaaccaagtagggggcacctaggcgatgttgaagtcgcggtagcgctgcggacgcgacgagggagaacgtccgcgagaaggcaggcgacggctggggaatttctagggagccgacgagctgttgcagagagagcagcaggtccagtaggcaacagcgaagttggggagctgagcgccggcacgacgatacaggagctagagatagtggcgttcagcagctccacacaatgatgtgccagagaaggagacgagaacgcgtgcagtttcagccatgatccacggactcccaacacgcaaactccaggaaggaagagatcgtgactggcaagtggtaacaacagaacgacgtgtccaggtgaggcaagtactggggagaccgagcagagaggagagcgggctgagaacaggaatgcgaggggcactacgagaagggagctcggctgctgctgcctaagcgatggggtgaggggatatatgacgtggagaagctagtgctcactgctcagggctgcacgtggatttctggagatgagacaacgcacggagagacttccagggagtacgtgtactagatattggataagaacgagtggaacaaaggagaaaaatttagagaactgagcacatgtacaggataaacatcagtggcatggagatctttttctcactaaaattgaaccggtttcagtcagctgaacaatattcagtccaccaccagcccaacagctcgacttggagcaaagttttcttctaatctaaaataagaacagggagatccttcatcataagaagtattcctccataatagatctccaagtttgatgtaatggtcattcaccaagaattaagagttagaagggtccaacactgaaaggaatacatggtttctaaaaattcagcaaaactgaatacgtttcagaatctgaactgaatttggcaccaaactgaaccctcatttgtaaccccttcgatcctcatgattccaagcaatacatgtcaaccttggttaataaagtttgttcacaaaatgtaactttacaagtttacttcaggaaccttaggtcaaagattcatagatcaaaagttataacgctccagagtgaggtgaatacactaggaaccagctgcagctaactgaataagagactgaacacacatgtctgacagagagaatttcggcacattttactccaacttttgtgcagcaccacgtcacactggcttaaagaaacttgttcactattagatgatattcaactttgatatagaaaatacagtctaaaaccacatagattaatcacaacagagctctaaactgagcactattcactaaaattcagattttagttctgaacaaaaactcagtccaagtaacctgacagtccatatttaggcaaccttttctcctagttccaagtagctttaggggtataatccttaaccaaacgtatacaccaacacatgatcatccacctttgtatagctttcttagcctataactgcatgaatcagctgcaaatgggctccaaactcagcaactttcactgaaattcagttttcaataactgaatataattcagtttcagccacaacacagtcccaatttaagcagttcttactccaattcttgtatggggtcatgtccatcaccctttaaggaagttgttcaccaatatatggtatttaattcctctacaagcaccatagtataaaaccttacaaaacagccacaaaagggctccaaacttggcaccatacaacaaatttaagatttcagaactgaaccaaatgcagttaaagcactatctgtcagtccaactttgagcaagctttctctccaacttttgtgtaggatcaaaccaaagtcacttaaggagacttattcaccatcatatggtatttaattactctatatattctacagcccaaaacctcatggattaggcacaattgatctccaaaaacagctcaaaatactgaaactcaggttcagactactgttttaagtctgaaaactggaaaaatctgtcaatcaacatttggactatcttttctaccagtaaatatagttttgggactatatcacttaataagaattgttatactatcatggatttacaagttttgtatagtggtcattaaccaaaacctcctggattccaaaccacactagcccaacgtttgcatcgaacacagaaattcagaatctgaatttactccaagtctgaatttgacaatctgtgacagctctattttggaccagttttactccaagttccaaatagttttagagctatatgacttaaccaaacttatactcctcatgtagctctataactttgttataatgactatcttcaaaatgtttatagatcagaagttataaaggaccaaaattgcctagttgctactattttcagcaaattccaatttgagctcaaaactgaacttttgtgatttactccaattttcttcacacaacatgggaatctccaaataagaaagttgttttatttcccatgtactacaactttaatatatggacttttagccaatcgtcactagattttgaattccactcttgggctagttttagggcttcaaatgtggctattatttctttcagtgattcgtccacctaagagaaataactccttagtctcaaatccgaccttggcatatagaactcatgtcaaaagtgtccttggtttaagagttgtttgcttacactcaatttcaaacaatgtattcaagccttagggttttgaagttaatccttcggtccaagtatttcttccacttgatctatctttgaaaacaaagttgctatagactctaagacttgcctttagcactcaaagactccaagttcatttgttacttgctcaagagatgacctactcttgtctagcttaggcctagtccttaaactaaactctaaacccaacacacaacatcacacttttgaaaaagtttgacctattgaatgcattctaggtatatcaaaccagataatgcaaatgcttatgatgacatgtcagagttttagttaacgtaacaccaggggtgttacagtcttcccccctaaaaagaaatctcgtcccgagatttaaaactctaggctaggtaatggaaaaggaaatgtgtcactgacttatttccccattacccctacaagacaggggtgtacccttcctggttcacatctaaatactcctctaattcccatgtggttttatcttccgggtgttagttccactgcatcctgcaaacttgataagttttcttcaagtgaccgatccttttgatccaaaacctttatggaatattccaagttggttaaatctggtccaaggttaacatctgaaatctcaacacccagtttgggaacccgaagacatttcttcaactgagatatgtgaaacatgttgtgcactatggaaagatcctttagcaactgtaccttataaactacatttcaatcaaatgaaatgagtttcaagtaggaaaacttagtataaaaaaatcaaagataggtagcatgagtaggatggatgaaacatgtactaagctattacatagggggtttaacttaaaattgtatgtcatgatgcatgctcgtcctattcgtccttgcaactcttgccaacatatagtagttatcacgttctatgacggtggcatacctactcactccgttattgaacactagtcgcactttcctagggtttagttagtgtacctgcagaaaattgcattatagttgtgggttagtggttagcatcttaaactaagccaccttatagtccttaacttaaccatatactatttgcacttcgactattaggacttgcttattcattcttaagttttttttttcaaaatactttggactcaaaatccttttgaagcctatcaaaggattactttaatatccatgataatgggggatcgctccgataccacgctgtgacagccctcccaagttatcaggcccacatgcaccaatccttgccttaatggcctaagatggctgtacacgtgtaccggataacttaacaaggctatcgagttcgccaactggaactcatcatcccaaggatctcccacataacaggtatattacagtaatcacatttaatacacacacattggagatagagcggaagacttttacaaagtacactttacattccagaactcaagttttacatggtagaaagagatgtatttattacaagtcctgatagtactcgaagggcataacttaactacaataattggaagggtgaagcctttccataagagatatataaaaaccttctaagcttcaagtcctccacatgaagtaactaacccaaagataagggaataaaacttctcctacaaaaacaacaagggataaaaccctgagtatgcaattac

SEQ ID NO: 25595 - DNA, 1771 bp, Zea Mays
atctaaaaggttagtcaaattatttctattttttgttctaagtcatgggtgtccggtaatggtgagccgaggtataattaatctttttgtgttctgggctacctaataaaggtatatgccttgttcataatttaatatttcttgatatttgagttagatctggataagctagagaagcgagattatggtgcttagtcatttaccgatatctagcgtttgctccagagtgttgcaagggcctcaccattaattcttttatttcaattttgtgtagcatcatattatctcgcgccattcctctgaaggttcatacatgcgcattttgcatttcattaggtgcgctagttgagcacttgatgcgaagggccagagctgagtcaaccacaagatgatgttaagcatgggcttcttcgcaaggtgatgctgatggatgaacataaggatggatgacttgaacgagtaccaagacaaagtatgatcgtcaagtggtcatctgctaacaacactaacgtagtttttatcccaagcaagccccggtgtatttgccacctccttctgttttaaaaagttttatcaccttgaatgatgcatgcattaggtgataggagttgtgtgatcaaacagttgatgcatttccatccttgattaaaaaaccctaatacctgttttatgaaaatttagtgatgcttagccctgcttattaatttaggattgtttttaaaagatgatgtgtaacacgggatatgggagtttgtgaaataaaaggactttgtgatgatgaacccagtgtggccacgatgatttcatcattcaagtcgggtacctctctcaggtatcaagttttgggaaataatatgaaatgtaggccagacgttgagcaagaaagtttgcccgtctgtgtcgattaaggacggttcgatgtaggcctgttgtgttggagactttgcaactagccacatgcttcggtaagcctgaacttggctattccatacgtgaaaagaaaaccgcgcactgggcgtgggagatggtgggagtagcgtgtaccctcctggctagaggctggacagaggagtactatgctcccgagtagtgcagaccggttcacgttgtgcaggatctgtgggaacaattaacatatgcaagggttaagtgctacatatgtcgtgtggttagggatccccagctgggtataatcggttcgaatcgtcgttgctcctcggtcatggagactcttccctccgaccactcatcgtagttaataagtaaactaagaatatggtaaaagaaagctagaccaggacaagtgaatgctctaaatttgtaaaatctagattcaggaaaagtacttaacttgtgatgttaaatttttgcataaggatccactactagtaagcttttctgcaaaaatgagtctttgaaatttgataaactttaccttgattcccgacaaaccagcatacccttgagagtcttttctttagtcgggtaagtcttgctgagtaattgcgtacccagggttttatttcctgttgtttttcagggtgtcattttgttctgttgtggatggtgccaagtgctggtgggttcagccttcttatataagtatatcccttctatagtttctttaatgtggactgtcacttaagctagcatgtatttcaaattttcaaatattctataacattttaaagtgtaatccttttgaaacactttcttttgtaatcaactctgatgatatatattgtaacccaattataatttgtaactagtg

SEQ ID NO: 25596 - DNA, 1966 bp, Zea Mays
ctcgtctctccctcagaccctcacgacatctgctctcccacgcgtcctgctcacacaggatatcactccctcagttatttcttcctctaatatctcacgagcttggctcgcctcgcctctctgctctctccttgtcctcctgttgccgtgctgcaaaactatagcacgccggagcaatggacgggctcaactacagcaagttgcgctcctcgctccggcctcggctccaagcgttctccggcgtcctcttctccagtttgcgctccctagacgggctcctgcacatggcgtctgtcgccgtcttgcagtttgtccacgatccgcacgatgatccaccagtgctaggctgcgtacacttgactctagctcgcgtatatgccttggatcgagctcgctctctttctctcgtcaaggaccacttcacaaccttgggaaaagacctcaccgtcattgggtactgctgcgatgatgctgaaccccgtcgtcgacaactccagttctacgtcgccgagtccatgtttcgggtagcaggtgcgctagttgagcacttgatgcgaagggccagagctgagtcaaccacaagatgatgttaagcatgggcttcttcgcaaggtgatgctgatggatgaacataaggatggatgacttgaacgagtaccaagacaaagtatgatcgtcaagtggtcatctgctaacaacactaacgtagtttttatcccaagcaagccccggtgtatttgccacctccttctgttttaaaaagttttatcaccttgaatgatgcatgcattaggtgataggagttgtgtgatcaaacagttgatgcatttccatccttgattaaaaaaccctaatacctgttttatgaaaatttagtgatgcttagccctgcttattaatttaggattgtttttaaaagatgatgtgtaacacgggatatgggagtttgtgaaataaaaggactttgtgatgatgaacccagtgtggccacgatgatttcatcattcaagtcgggtacctctctcaggtatcaagttttgggaaataatatgaaatgtaggccagacgttgagcaagaaagtttgcccgtctgtgtcgattaaggacggttcgatgtaggcctgttgtgttggagactttgcaactagccacatgcttcggtaagcctgaacttggctattccatacgtgaaaagaaaaccgcgcactgggcgtgggagatggtgggagtagcgtgtaccctcctggctagaggctggacagaggagtactatgctcccgagtagtgcagaccggttcacgttgtgcaggatctgtgggaacaattaacatatgcaagggttaagtgctacatatgtcgtgtggttagggatccccagctgggtataatcggttcgaatcgtcgttgctcctcggtcatggagactcttccctccgaccactcatcgtagttaataagtaaactaagaatatggtaaaagaaagctagaccaggacaagtgaatgctctaaatttgtaaaatctagattcaggaaaagtacttaacttgtgatgttaaatttttgcataaggatccactactagtaagcttttctgcaaaaatgagtctttgaaatttgataaactttaccttgattcccgacaaaccagcatacccttgagagtcttttctttagtcgggtaagtcttgctgagtaattgcgtacccagggttttatttcctgttgtttttcagggtgtcattttgttctgttgtggatggtgccaagtgctggtgggttcagccttcttatataagtatatcccttctatagtttctttaatgtggactgtcacttaagctagcatgtatttcaaattttcaaatattctataacattttaaagtgtaatccttttgaaacactttcttttgtaatcaactctgatgatatatattgtaacccaattataatttgtaactagtg

SEQ ID NO: 25597 - DNA, 630 bp, Zea Mays
ctcgtctctccctcagaccctcacgacatctgctctcccacgcgtcctgctcacacaggatatcactccctcagttatttcttcctctaatatctcacgagcttggctcgcctcgcctctctgctctctccttgtcctcctgttgccgtgctgcaaaactatagcacgccggagcaatggacgggctcaactacagcaagttgcgctcctcgctccggcctcggctccaagcgttctccggcgtcctcttctccagtttgcgctccctagacgggctcctgcacatggcgtctgtcgccgtcttgcagtttgtccacgatccgcacgatgatccaccagtgctaggctgcgtacacttgactctagctcgcgtatatgccttggatcgagctcgctctctttctctcgtcaaggaccacttcacaaccttgggaaaagacctcaccgtcattgggtactgctgcgatgatgctgaaccccgtcgtcgacaactccagttctacgtcgccgagtccatgtttcgggtagcagtatgagattggcatagagagctagatgggtgttgacacctttttggaggggccaatcatttcaaaagaaccagcggcggtgctctctggtcaggcgcgg

SEQ ID NO: 25598 - DNA, 1844 bp, Zea Mays
cgcagcactaacacccagcccaacccaacagcagccagcaacctcgcaggctcgcaccaccacctcgtccgtcgcagcatcaggccagcagccggcggcgccgggcgccgtcgtgaattaccccaggacttgtcccctccagcaaacggagcgttcagtagagcacgcctcggcgatatcgcggcgacatctgctgcagcccgtggagcccaacgagagcagcatcagcagcagctcccgatcgctcctgctacccacggcctcgcccacgcctgcgtgcgcagcagcagaagcaaagtgattaaccatgattggcagtatagtatcagattcagagttcttcgtggcattctactctgcagctcatttgtagatatatggaattccttccctgagaaatgccgtcctctacaccaccatcagtacaacccacaccaagccttcaaccgttaccatctcctgcagtaagccagagtactcgtattgatgttcgtgagatcaagtccaagatttttaagacgattgggcctgaacgagcaaagaaatactttcagcacctggaaaggttcttatcttcaaaactgagcaagaatgaatttgagaagctttgtcttgttgcacttggccgtgataacctcccattgcacaaccaccttatccgttccatcctacataatgccagtcgagcttgtggcccacctgtaattaatgatcctaggctggtcagaggtgccaccacttctggccatgtgattgttcctcctgtctgggacaatggtggtccgttgaacctaaatgtcaaagagaacagaccattaagcagaagggaaaatctactaacccaaaagccatcactgaatcattgtgacgctattatgctggagaatggtgttcatcatttgagtgatctgaagagatgtacacaatttcaaaacagtgaccatgtggagccacttttcaagcgaccgcgaatggagaaggaaccattcagtttacataattctctgcagagcaatgggtctgctaaggcttcaagagaaaacctgggacaagaaattatacaccaacccgaaggtccagtgcaagcaccacttggcattcagttacgtcctggcaattttggtgtggcccgaatacccctttcttctgtgagttcaaaggatacctctgacacttgtatcgaagttggtgaactctgtgatactttgtcagtgaagaagaggttggacaaaatggcaggagcatctgggttggaaggggtctcgatagagtgtgccaatttgttgaataatggcattgatgttttcatgaagcagttgattggatcttgtgttgaattagttagagcaaggtctcgacatggcaaactaagacatgatgcattgaagcagcagatgtgccgaaaactaataaatggtgtatcagtacatacccatgtttctgggcagagttctattatacctccagagacaaattccatctccatgcaggacttaaaggcagtgatagagttaaacccttgtttgcttgggattaatgcatcactgttactagaaaagatcaattcatatgactagttggatggagctagttgtattcatctcatcacaagatcctatgaccttgatggtctgtcttgtttcatggctgttgtaatcaggccataattttactgacgggtagtggtgaaggcaggtgcattctgtgcagtaccctgattgtttttcatctcatctctggaccactattgggctaaagtgcttcagagataactatgttgctggactccaaacaaattgagccatatcacagatttgatctataaagatgcaggaacactacat

SEQ ID NO: 25599 - DNA, 1821 bp, Zea Mays
cgcagcactaacacccagcccaacccaacagcagccagcaacctcgcaggctcgcaccaccacctcgtccgtcgcagcatcaggccagcagccggcggcgccgggcgccgtcgtgaattaccccaggacttgtcccctccagcaaacggagcgttcagtagagcacgcctcggcgatatcgcggcgacatctgctgcagcccgtggagcccaacgagagcagcatcagcagcagctcccgatcgctcctgctacccacggcctcgcccacgcctgcgtgcgcagcagcagaagcaaagtgattaaccatgattggcagtatagtatcagattcagagttcttcgtggcattctactctgcagctcatttgtagatatatggaattccttccctgagaaatgccgtcctctacaccaccatcagtacaacccacaccaagccttcaaccgttaccatctcctgcagtaagccagagtactcgtattgatgttcgtgagatcaagtccaagatttttaagacgattgggcctgaacgagcaaagaaatactttcagcacctggaaaggttcttatcttcaaaactgagcaagaatgaatttgagaagctttgtcttgttgcacttggccgtgataacctcccattgcacaaccaccttatccgttccatcctacataatgccagtcgagcttgtggcccacctgtaattaatgatcctaggctggtcagaggtgccaccacttctggccatgtgattgttcctcctgtctgggacaatggtggtccgttgaacctaaatgtcaaagagaacagaccattaagcagaagggaaaatctactaacccaaaagccatcactgaatcattgtgacgctattatgctggagaatggtgttcatcatttgagtgatctgaagagatgtacacaatttcaaaacagtgaccatgtggagccacttttcaagcgaccgcgaatggagaaggaaccattcagtttacataattctctgcagagcaatgggtctgctaaggcttcaagagaaaacctgggacaagaaattatacaccaacccgaaggtccagtgcaagcaccacttggcattcagttacgtcctggcaattttggtgtggcccgaatacccctttcttctgtgagttcaaaggatacctctgacacttgtatcgaagttggtgaactctgtgatactttgtcagtgaagaagaggttggacaaaatggcaggagcatctgggttggaaggggtctcgatagagtgtgccaatttgttgaataatggcattgatgttttcatgaagcagttgattggatcttgtgttgaattagttagagcaaggtctcgacatggcaaactaagacatgatgcattgaagcagcagatgtgccgaaaactaataaatggtgtatcagtacatacccatgtttctgggcagagttctattatacctccagagacaaattccatctccatgcaggacttaaaggcagtgatagagttaaacccttgtttgcttgggattaatgcatcactgttactagaaaagatcaattcatatgactagttggatggagctagttgtattcatctcatcacaagatcctatgaccttgatggtctgtcttgtttcatggctgttgtaatcaggccataattttactgacgggtagtggtgaaggcagtactaaactcatttatttcctgcacctaaggaccactattgggctaaagtgcttcagagataactatgttgctggactccaaacaaattgagccatatcacagatttgatctagaacgatccggtc

SEQ ID NO: 25600 - DNA, 1908 bp, Zea Mays
cgcagcactaacacccagcccaacccaacagcagccagcaacctcgcaggctcgcaccaccacctcgtccgtcgcagcatcaggccagcagccggcggcgccgggcgccgtcgtgaattaccccaggacttgtcccctccagcaaacggagcgttcagtagagcacgcctcggcgatatcgcggcgacatctgctgcagcccgtggagcccaacgagagcagcatcagcagcagctcccgatcgctcctgctacccacggcctcgcccacgcctgcgtgcgcagcagcagaagcaaagtgattaaccatgattggcagtatagtatcagattcagagttcttcgtggcattctactctgcagctcatttgtagatatatggaattccttccctgagaaatgccgtcctctacaccaccatcagtacaacccacaccaagccttcaaccgttaccatctcctgcagtaagccagagtactcgtattgatgttcgtgagatcaagtccaagatttttaagacgattgggcctgaacgagcaaagaaatactttcagcacctggaaaggttcttatcttcaaaactgagcaagaatgaatttgagaagctttgtcttgttgcacttggccgtgataacctcccattgcacaaccaccttatccgttccatcctacataatgccagtcgagcttgtggcccacctgtaattaatgatcctaggctggtcagaggtgccaccacttctggccatgtgattgttcctcctgtctgggacaatggtggtccgttgaacctaaatgtcaaagagaacagaccattaagcagaagggaaaatctactaacccaaaagccatcactgaatcattgtgacgctattatgctggagaatggtgttcatcatttgagtgatctgaagagatgtacacaatttcaaaacagtgaccatgtggagccacttttcaagcgaccgcgaatggagaaggaaccattcagtttacataattctctgcagagcaatgggtctgctaaggcttcaagagaaaacctgggacaagaaattatacaccaacccgaaggtccagtgcaagcaccacttggcattcagttacgtcctggcaattttggtgtggcccgaatacccctttcttctgtgagttcaaaggatacctctgacacttgtatcgaagttggtgaactctgtgatactttgtcagtgaagaagaggttggacaaaatggcaggagcatctgggttggaaggggtctcgatagagtgtgccaatttgttgaataatggcattgatgttttcatgaagcagttgattggatcttgtgttgaattagttagagcaaggtctcgacatggcaaactaagacatgatgcattgaagcagcagatgtgccgaaaactaataaatggtgtatcagtacatacccatgtttctgggcagagttctattatacctccagagacaaattccatctccatgcaggacttaaaggcagtgatagagttaaacccttgtttgcttgggattaatgcatcactgttactagaaaagatcaattcatatgactagttggatggagctagttgtattcatctcatcacaagatcctatgaccttgatggtctgtcttgtttcatggctgttgtaatcaggccataattttactgacgggtagtggtgaaggcaggtgcattctgtgcagtaccctgattgtttttcatctcatctctggtacaatcttccagaataaacaaatatctgtattttctgggtgcagtactaaactcatttatttcctgcacctaaggaccactattgggctaaagtgcttcagagataactatgttgctggactccaaacaaattgagccatatcacagatttgatctagaacgatccg

SEQ ID NO: 25601 - DNA, 2101 bp, Zea Mays
cgcagcactaacacccagcccaacccaacagcagccagcaacctcgcaggctcgcaccaccacctcgtccgtcgcagcatcaggccagcagccggcggcgccgggcgccgtcgtgaattaccccaggacttgtcccctccagcaaacggagcgttcagtagagcacgcctcggcgatatcgcggcgacatctgctgcagcccgtggagcccaacgagagcagcatcagcagcagctcccgatcgctcctgctacccacggcctcgcccacgcctgcgtgcgcagcagcagaagcaaagtgattaaccatgattggcagtatagtatcagattcagagttcttcgtggcattctactctgcagctcatttgtagatatatggaattccttccctgagaaatgccgtcctctacaccaccatcagtacaacccacaccaagccttcaaccgttaccatctcctgcagtaagccagagtactcgtattgatgttcgtgagatcaagtccaagatttttaagacgattgggcctgaacgagcaaagaaatactttcagcacctggaaaggttcttatcttcaaaactgagcaagaatgaatttgagaagctttgtcttgttgcacttggccgtgataacctcccattgcacaaccaccttatccgttccatcctacataatgccagtcgagcttgtggcccacctgtaattaatgatcctaggctggtcagaggtgccaccacttctggccatgtgattgttcctcctgtctgggacaatggtggtccgttgaacctaaatgtcaaagagaacagaccattaagcagaagggaaaatctactaacccaaaagccatcactgaatcattgtgacgctattatgctggagaatggtgttcatcatttgagtgatctgaagagatgtacacaatttcaaaacagtgaccatgtggagccacttttcaagcgaccgcgaatggagaaggaaccattcagtttacataattctctgcagagcaatgggtctgctaaggcttcaagagaaaacctgggacaagaaattatacaccaacccgaaggtccagtgcaagcaccacttggcattcagttacgtcctggcaattttggtgtggcccgaatacccctttcttctgtgagttcaaaggatacctctgacacttgtatcgaagttggtgaactctgtgatactttgtcagtgaagaagaggttggacaaaatggcaggagcatctgggttggaaggggtctcgatagagtgtgccaatttgttgaataatggcattgatgttttcatgaagcagttgattggatcttgtgttgaattagttagagcaaggtctcgacatggcaaactaagacatgatgcattgaagcagcagatgtgccgaaaactaataaatggtgtatcagtacatacccatgtttctgggcagagttctattatacctccagagacaaattccatctccatgcaggacttaaaggcagtgatagagttaaacccttgtttgcttgggattaatgcatcactgttactagaaaagatcaattcatatgactagttggatggagctagttgtattcatctcatcacaagatcctatgaccttgatggtctgtcttgtttcatggctgttgtaatcaggccataattttactgacgggtagtggtgaagtactaaactcatttatttcctgcacctaaggaccactattgggctaaagtgcttcagagataactatgttgctggactccaaacaaattgagccatatcacagatttgatctgtaagtttatcacaactaatatgtgcttgcacatttcaacttttttacatttgtagcatagatacagctgttggtagttatttatttgcagtcatttttgtttcaatgtcacaagaaatagaaactatttataaggcatttatcgaggactctagtagtgttgttgtatgagtatattttcagcagaactggtgataacaaggactaaactgacactagtcatgcccaaatattaagatactacagttgtttctcaaagataaacagtggaaacaaccttttgtaagatagtaacgtc

SEQ ID NO: 25602 - DNA, 2384 bp, Zea Mays
ggacgcagcactaacacccagcccaacccaacagcagccagcaacctcgcaggctcgcaccaccacctcgtccgtcgcagcatcaggccagcagccggcggcgccgggcgccgtcgtgaattaccccaggacttgtcccctccagcaaacggagcgttcagtagagcacgcctcggcgatatcgcggcgacatctgctgcagcccgtggagcccaacgagagcagcatcagcagcagctcccgatcgctcctgctacccacggcctcgcccacgcctgcgtgcgcagcagcagaagcaaaggtgagagctctgcgcccccgtcccaatccccccgcctcgatctaacctcacgcgcggggctgccgcggccggcaatggcggaccggcgccaatggcggccgcgtcacttgccagcgcggcctcggactcactatttgggagccgaggagctgaattcgggtgcggaagcttcgctttggggtcggaattgtggtgaccttgattggatcagagaaggcgagctggggattggggagtttgagctctacacccgtgttgtggcagggtttggtattgccgttgattaaccatgattggcagtatagtatcagattcagagttcttcgtggcattctactctgcagctcatttgtagatatatggaattccttccctgagaaatgccgtcctctacaccaccatcagtacaacccacaccaagccttcaaccgttaccatctcctgcagtaagccagagtactcgtattgatgttcgtgagatcaagtccaagatttttaagacgattgggcctgaacgagcaaagaaatactttcagcacctggaaaggttcttatcttcaaaactgagcaagaatgaatttgagaagctttgtcttgttgcacttggccgtgataacctcccattgcacaaccaccttatccgttccatcctacataatgccagtcgagcttgtggcccacctgtaattaatgatcctaggctggtcagaggtgccaccacttctggccatgtgattgttcctcctgtctgggacaatggtggtccgttgaacctaaatgtcaaagagaacagaccattaagcagaagggaaaatctactaacccaaaagccatcactgaatcattgtgacgctattatgctggagaatggtgttcatcatttgagtgatctgaagagatgtacacaatttcaaaacagtgaccatgtggagccacttttcaagcgaccgcgaatggagaaggaaccattcagtttacataattctctgcagagcaatgggtctgctaaggcttcaagagaaaacctgggacaagaaattatacaccaacccgaaggtccagtgcaagcaccacttggcattcagttacgtcctggcaattttggtgtggcccgaatacccctttcttctgtgagttcaaaggatacctctgacacttgtatcgaagttggtgaactctgtgatactttgtcagtgaagaagaggttggacaaaatggcaggagcatctgggttggaaggggtctcgatagagtgtgccaatttgttgaataatggcattgatgttttcatgaagcagttgattggatcttgtgttgaattagttagagcaaggtctcgacatggcaaactaagacatgatgcattgaagcagcagatgtgccgaaaactaataaatggtgtatcagtacatacccatgtttctgggcagagttctattatacctccagagacaaattccatctccatgcaggacttaaaggcagtgatagagttaaacccttgtttgcttgggattaatgcatcactgttactagaaaagatcaattcatatgactagttggatggagctagttgtattcatctcatcacaagatcctatgaccttgatggtctgtcttgtttcatggctgttgtaatcaggccataattttactgacgggtagtggtgaagtactaaactcatttatttcctgcacctaaggaccactattgggctaaagtgcttcagagataactatgttgctggactccaaacaaattgagccatatcacagatttgatctgtaagtttatcacaactaatatgtgcttgcacatttcaacttttttacatttgtagcatagatacagctgttggtagttatttatttgcagtcatttttgtttcaatgtcacaagaaatagaaactatttataaggcatttatcgaggactctagtagtgttgttgtatgagtatattttcagcagaactggtgataacaaggactaaactgacactagtcatgcccaaatattaagatactacagttgtttctcaaagataaacagtggaaacaaccttttgtaagatagtaacgtc

SEQ ID NO: 25603 - DNA, 479 bp, Zea Mays
ctcgcacaggcctaaagctccctgcactagtgcatggtttcttagcgtcgagcttcctgctccacgccagttcctggctcgacgtcggttcccagcgagcacgccagccacccgccccaagacgtgctccctccactgcttgttgtctatgtgcttcacctcgccatcgatcctatcgtcttcaagctgcaccctctagtgctcgtcggtcgtcccttcctgtccatcatcggctctctagaaattccccagtcgtcgcccgacttcattgcctcgccgtttgtcgcgtcgttgttcctgctgtctcatgacattgcgctcctcacacttcgtttcctccaggtcaacgatgcttgtggaaagcccgagtaagtgctccaatgtctgaaattatagtgggtgcgaagagcttgtctgataaatggcatcgttcggtagttgttctctagtgcgtggatggtgtagctgcatgtgtctag

SEQ ID NO: 25604 - DNA, 1740 bp, Zea Mays
ctaaactcccaccgtcttccgtattcagatttttttggccgtagccctatctccttcgcttgggatttttcagccgtcgttctcatccgcgtcgcacagcagctggggaaaaaatcctgccactcagccgccgccctccctctgatatttctcagccatcgttatctcctagcgcgcgctccttgtcttctcccagcgctctccttcactgccgcgccgccctcctcccttctccctgctccttcccatggtgcgcagggcgtcctcccctcgatttcctccgtgcctccttccagtcagcgacgaacgaggttctaggcggccacgtcgttgtccggcacctcgtctgtgtttttctctgtgccacggtcgagctcgccgcgtccctttgtttgagtccgtcaacctccatctcgccccgagctccttccatggctgtcgtcgcctccaagcctggggtattgccgagctcgcccagcccttccccatcacacgccggcggtcctccattcccagccacgccgctctctgctcactggtgctcgcccctgccctctgtctagcgccctccctgctccacctcttcccatggccgcctgcagctctcgtcctccctcaagccctagtcgagcttttctatggcgccctggatgccagcccctttactcgatgcccctactaggttcctggcatgttcgccgagccatcgcccaagctcagcttatccatggcgcagggaacaacaacccctttctgttgatggcatgctgcagccccctccatcacgctatctcctgttctccatttttgctgcagcaagtggacgcccccagccctccattatttgcccatcttccccatggtgccagcagcatgccaacggttcaacgataggtgcagcagtctgcgcgtcgtcaatctcctcacatcagagaattctaggaaaaatcgatgaagaaaacatgtttcagttcggtgcgctctaggtgtttgacgaaatgggagcaccagggaacaatcgtcgttcttgcataaaccaagtcgatttgactgtggtacgctacatgatcacgtgatacggaattcaagaactgagttgatctcaagatgatgaaatgatgagctactccgacaaatgatgtctgtgaatcaacctaatgagaggtggaccgatcaagtgccaagatgaatatggtcgtcaaatgatcgtcatctaaccaacactaacctagtgttatcccagacaagccccggtgcatttgccacctcattctgttttaaaaagttttatcaccttgaatgatgcattaggtgataggagttgtgatcaaacagttgatgcatttccttccttgattagacaaccctaatacccgttttatgaaaatttagtgatgcttagcccttcttattaatttaggatttgtttttttaaaagatgatatgtaacacgggataagggagtttgtgaaataaaatgacttgtgatgatgaagccgttgtggccgcgatgatttcatcattcaggtagggtacctctctcatgtatcaagttttgggaaataatatgtaatgtagaccagacattgagcaggaaagttcgcctgtctgtgtcgattaaggaccgttcgatgtaggcctgttgtggtggagactttgcaactagccacatgcttcggtaagcctgaacctggctattccatacgtgaaaagacaatcgcgcactgggcgtgggagatg

SEQ ID NO: 25605 - DNA, 3079 bp, Zea Mays
tgcctccctggtccgctggtctgcgttctccctgctcggttcctctgccgtgcagctctccggctcgccggcgtttcacccatgcgcgcatgctgatgaggacatcaacactaacacgagtatatctacaccagcagcaccttctccagaccaggcaccatcttccccagtccaggcgccaccccttccacctgggccagtgactcgggcccttgcaagagaattgaactacatcatgttgttaaaaaacgaaggcccagaagattagaagatggcccaacaggaaggcccagatggggcgcctagggaagtcgtgaacagtaaccgcggtactatagcgccggccctactgttcacgtctcttctctatttagtcagagtcatgtttcatttagaacttgagttttgttttacatctagctttagctaccccagaacacgcacaaatacgtgctgtcctctgtgattcaaaactccacctcaagtgatattaatattgctcacatctttttcttgttcgttcttcgattgcgcataggaaacgatcttcatgatcagccgatctcgtatcagcaaggtcggtaaccattgagagttggttcagcgattgcattggcgcttcgggttcgctcgtcgtagtcggatcgtgagggtctacttccaccaaatcggaattatctccactcaccgaaagatcgggcactccagctccatcaagtggtatcagatttccatgttgatcgcctactcaaaactccacatatttctacgacgaaaaggtttctgtttctccaggcaatcgctcatccaatctttcaccggttccacctgttggttgcagttcaccactgtggcttggtaagaacggataagaacttgataacagcattccattgagcgagttgtcaccaccatttccctgttgtcgtcggtttttctccttttggtgttttggtgtttgcgctaactatggcaggagcacacgacacggtggatgcccagttgctggaagtaaggggacaagttgatggacttgctgctgacattaggacgatgcatgaacgacttgattcaacggtcacttcgacgactgagagtttcaaccagcttgaccttgctcaaacggcgactcgcaccacactcgacaccatcctagcatgccttgatgcgttgaccacaaagatggagcaggactacggcggtgacgctgagcaggacgatggagatcaccgtggtcgtgcacgccgtgtggttcgtcatccccctaatgacttattttctaagattaaatttaaaattccaccttttaatggcaaatatgatcctgctgcatatcttgattgggagttagaggttgaacaaaaattttcatgccatgatattgctgcacattctcaggttaaagctgctattagtgaatttactgattttgctttaatttggtggcgtgagtataaaataaaacatcccactgccattccaaccacttgggatcagttgaaagctgtgatgcgacatcgatttgtgccttcgtattatgctcgtgatttgcttaataaaatgcagcattttcagcaaggttctaaatttgttgaggactatttccaggagttacaaaaaggtatgattctttgtgggatattggaggacaacgacactgctatggcacgtttttgtggtggtttaaaccgcgaaatccaggatatacttgattataaggaatattatgtaatgactactttatttgaatatgcttgcaaagctgaacgtgaagtgcagggacgccgctcgaagccatattctaacccttttgcaggacgaagctcgacatccacctcagcaccagttccccctgcgccaaacacgtccagctgaaagggaaatgtgcccttgggccatttctaagtattttggtgattgagtgccaacacaagtgcttaaatgtgaatttatgctcatggatggacaaagtgcaaatcaagagtaaaggtatgtttctaagccttagtacattggttttgtgtactaatatacttgtctaagtgttagaaacagaaagaagaagaaaagagaagagttggttgtgtacagccaaaaggctgtttcggtctggggcaccggactgtccggtggtgcaccggacagtgtccggtgcgccaggctgcctcgggtgaagtggccgctctcgggaattcgccgacggcgtacggctaaaattcaccggactgtccggtgtgcaccggactgtccggtgagccaacggtcggtcgggccaacggtcgaccgcggaatccgcgcgcgacacgtggccgagccaacggtcggaagggggcaccggactgtccggtgtgcaccggacatgtccggtgcaccaacggctcccagatctgcaacggtcggctgtgccattttgggaaagagatcgggcaccggacagtgtccggtgtgcaccggactgtccggtgcgcccgatgacagaaggcaagatcagccttctagaattgctctcaacggctcctagctgccttggggctataaaagggacccctaggcgcatggaggagaaaaccaagcaaccttagagcattcttgatcatccacactcagtctttgcgcatccgtttgtcattctcagtgattcgagctccgttctagtgagaactttgagatagtcttttgagctcgattcttggccgtgtgtttgcgcattttgctgtggatttgtgtgtgttgcttccctcacttactccgtgcttctttgtgaactttaagtgtaagggcgagagactccaatttgtggagattcctcgcaagtgggataaagataagcaaagcaaaacaccgtggtattcaagtgggtctttggaccacttgagaggggttgattgcaaccctcgtccattgggacgccacaatgtaacaccctaaatttgggggtataaaatttctttcctaatattcaccaaattcaggtgttactccctcatttctttgctttccttctatttttcctaaataatggataattattttattatatgttggttgttacactcatgccgttgcataatgtttccaa

SEQ ID NO: 25606 - DNA, 3776 bp, Zea Mays
ccatggttgcctccctggtccgctggtctgcgttctccctgctcggttcctctgccgtgcagctctccggctcgccggcgtttcacccatgcgcgcatgctgatgaggacatcaacactaacacgagtatatctacaccagcagcaccttctccagaccaggcaccatcttccccagtccaggcgccaccccttccacctgggccagtgactcgggcccttgcaagagaattgaactacatcatgttgttaaaaaacgaaggcccagaagattagaagatggcccaacaggaaggcccagatggggcgcctagggaagtcgtgaacagtaaccgcggaaacgatcttcatgatcagccgatctcgtatcagcaaggtcggtaaccattgagagttggttcagcgattgcattggcgcttcgggttcgctcgtcgtagtcggatcgtgagggtctacttccaccaaatcggaattatctccactcaccgaaagatcgggcactccagctccatcaagtggtatcagatttccatgttgatcggtgagtttatcgagtgtttttttctcctacagtccacaaaactacataaaaatttaggttagaccttatcccagcacccttttgagcctcgcactttctttcaataatctgcattgttgaatttgtttgctttcacgtcatttgttgttggttgcattgtgttattccaccattcaaaccctagcgcgccgccaccatattccgtttgatcgcgccacaaaccaagtcaacgccgcttccttatttttctccttcggttacgtaaaaaaacagaaaaaaacaaaccgagtcaacgccgcttccttgtttttctccttccgttacgtaaaaaaaaacagaaacaaaaaaaacagaaaacgaaggagaaaggatacaaagcggttgtctcatctcggccgttttaaacataccttccttaaaccgggcataacgtttcgctcggttgttcaaaaaatctggaatttttacaggagcttgttgacaccattctgaggccggccaacttgcctacgacctgttcggtttcgataaaattgtcaaaaatattcaggaaaataaagaaaaaattcgtcaaagttctcgcacgtttttcagagaacttcctgattttctgtagaccacatctgaactctattttaggtgaaacttcgtgtagctcctattttgttgctccttgtgcttagaaaaatatcaaaaaatcatataaaaaagaaaaacaaaatcacctgtgattcctactagtgcatttttggcctcgctagtacaatatttacggtactgccattctgctagttccatctgtcctttgcacttgtggccagcaatatagttttgtgttttgcactataattcaactttgcattattgtttgatcatgctaatccttgacttgagtgcagcctactcaaaactccacatatttctacgacgaaaaggtttctgtttctccaggcaatcgctcatccaatctttcaccggttccacctgttggttgcagttcaccactgtggcttggtaagaacggataagaacttgataacagcattccattgagcgagttgtcaccaccatttccctgttgtcgtcggtttttctccttttggtgttttggtgtttgcgctaactatggcaggagcacacgacacggtggatgcccagttgctggaagtaaggggacaagttgatggacttgctgctgacattaggacgatgcatgaacgacttgattcaacggtcacttcgacgactgagagtttcaaccagcttgaccttgctcaaacggcgactcgcaccacactcgacaccatcctagcatgccttgatgcgttgaccacaaagatggagcaggactacggcggtgacgctgagcaggacgatggagatcaccgtggtcgtgcacgccgtgtggttcgtcatccccctaatgacttattttctaagattaaatttaaaattccaccttttaatggcaaatatgatcctgctgcatatcttgattgggagttagaggttgaacaaaaattttcatgccatgatattgctgcacattctcaggttaaagctgctattagtgaatttactgattttgctttaatttggtggcgtgagtataaaataaaacatcccactgccattccaaccacttgggatcagttgaaagctgtgatgcgacatcgatttgtgccttcgtattatgctcgtgatttgcttaataaaatgcagcattttcagcaaggttctaaatttgttgaggactatttccaggagttacaaaaaggtatgattctttgtgggatattggaggacaacgacactgctatggcacgtttttgtggtggtttaaaccgcgaaatccaggatatacttgattataaggaatattatgtaatgactactttatttgaatatgcttgcaaagctgaacgtgaagtgcagggacgccgctcgaagccatattctaacccttttgcaggacgaagctcgacatccacctcagcaccagttccccctgcgccaaacacgtccagctgaaagggaaatgtgcccttgggccatttctaagtattttggtgattgagtgccaacacaagtgcttaaatgtgaatttatgctcatggatggacaaagtgcaaatcaagagtaaaggtatgtttctaagccttagtacattggttttgtgtactaatatacttgtctaagtgttagaaacagaaagaagaagaaaagagaagagttggttgtgtacagccaaaaggctgtttcggtctggggcaccggactgtccggtggtgcaccggacagtgtccggtgcgccaggctgcctcgggtgaagtggccgctctcgggaattcgccgacggcgtacggctaaaattcaccggactgtccggtgtgcaccggactgtccggtgagccaacggtcggtcgggccaacggtcgaccgcggaatccgcgcgcgacacgtggccgagccaacggtcggaagggggcaccggactgtccggtgtgcaccggacatgtccggtgcaccaacggctcccagatctgcaacggtcggctgtgccattttgggaaagagatcgggcaccggacagtgtccggtgtgcaccggactgtccggtgcgcccgatgacagaaggcaagatcagccttctagaattgctctcaacggctcctagctgccttggggctataaaagggacccctaggcgcatggaggagaaaaccaagcaaccttagagcattcttgatcatccacactcagtctttgcgcatccgtttgtcattctcagtgattcgagctccgttctagtgagaactttgagatagtcttttgagctcgattcttggccgtgtgtttgcgcattttgctgtggatttgtgtgtgttgcttccctcacttactccgtgcttctttgtgaactttaagtgtaagggcgagagactccaatttgtggagattcctcgcaagtgggataaagataagcaaagcaaaacaccgtggtattcaagtgggtctttggaccacttgagaggggttgattgcaaccctcgtccattgggacgccacaatgtaacaccctaaatttgggggtataaaatttctttcctaatattcaccaaattcaggtgttactccctcatttctttgctttccttctatttttcctaaataatggataattattttattatatgttggttgttacactcatgccgttgcataatgtttccaa

SEQ ID NO: 25607 - DNA, 2045 bp, Zea Mays
cgttgtcttctctagcgacggcgaggcttgagcgctcacgtcccggcgttcccgtgccggtggccaagccagcggccgacgagatggactacctcaggacggtggttccgtcacaactcttggcagagcgcggctccaatcttgtcgtcatcaacccaggatcgggaaatgtgcgaatggggtttgctagtcaggatgtgccattcaatataccacattgcattgcccgacacatcaatccacaagagggcgaagaaccaagattctctgtgcgcgatcagatgctcaactgccatgctacttcatcgcagaatgcagagcgggagagtgcatatgatattattgcagcactgatgaaaatcccatttttggacgatgaagaaatgccttcaccgaaccaaccccttcctccaaagatgggacgtgttgatggcttctcttcgcagcaaaacagagacgataataaattcacttggacagatgtgtcagagagaattattaagccatccacaccattcgataggtcagtatacaaggatgctgaggaagatactctgccaagcacatctgatgatgataatggacaggactttaaagagaataagtataaagaaatgatatttggagaagatgctctgaaaatccctccttcagagtcatactgtctgagtcgcccaattaggagaggccattttaatgtgtcccataattattcagtgcatcaggttttagaagatttacgcactatttggaactggatactgacagaaaagttgcatatcaacccaagagacagaggtctatattctgcaattcttgttcttggggagacatttgacaaccgagaaataaaagagatgctgtctattgtccttcatgatttggggttcagcactgcagttgtacatcaggaagctctatctgcagcgtttggaaatggtttatctacaacttgtgttgtcaacattggtgctcaagttacacaagtagtttgtgttgaggatggagtagctttgccccacacagctctggcgcttccatatggtggagatactgggagcattgatgcagctgtccttgttcattcatatgataatgaaaggtctggtggacatcagaagacaagactatcagcaattaatgttcctcctatgggtcttctttacccaagggttcttgttccagaagagtaccctccacctcctcgatcttggttccaagactatgatgacatgctggaggatacctggcaaacaagtgatggtctttaccctagtgggaatggtgggtttggcatgtgggacagttatccgatgtttcccactagattaaagaaatttgataacattggcctcgtagaggccattattagtagtgtactttcaacaggacgtgttgaccttcaaaagaagctgtttggtagcattcagttggttggtggtgcagcttctacagctggccttgcacaagtgctggagcaaagggttcgcactaaaatttcagcaaaccaatctattgagaaagttgaggtgttgcaatctaggacttatccattatttgttccatggaaaggtggagtggatgcgtggattcatagagaagattggattaaaaatggtgtccacatcgggagtggcagaaaatataaggattcctattttcttcaggcgcaagtaatgtgctactacaacgtataacaggttgttcgaccgtccaaaccatcctagaatatgattggtggactgcgattaaattgcgtacatgatgcatcagttctatgcatgctcgctgctgtctgttcggaggtcatcaactcgggacctggactaagggccttgtcgttcgctcaacccctatgaaaaagtttggctttctaaagatgtagtagaagtactcatttattccctgccaattgaacatttcaaatcttcgtatggtgttaatgaaaaatctgatgtttggattcgtatttatttccaatgataatgtatatgtgcattctcgactgttttggaaagaatgaaaaatcctcgtccgtttgcgta

SEQ ID NO: 25608 - DNA, 2115 bp, Zea Mays
cgttgtcttctctagcgacggcgaggcttgagcgctcacgtcccggcgttcccgtgccggtggccaagccagcggccgacgagatggactacctcaggacggtggttccgtcacaactcttggcagagcgcggctccaatcttgtcgtcatcaacccaggatcgggaaatgtgcgaatggggtttgctagtcaggatgtgccattcaatataccacattgcattgcccgacacatcaatccacaagagggcgaagaaccaagattctctgtgcgcgatcagatgctcaactgccatgctacttcatcgcagaatgcagagcgggagagtgcatatgatattattgcagcactgatgaaaatcccatttttggacgatgaagaaatgccttcaccgaaccaaccccttcctccaaagatgggacgtgttgatggcttctcttcgcagcaaaacagagacgataataaattcacttggacagatgtgtcagagagaattattaagccatccacaccattcgataggtcagtatacaaggatgctgaggaagatactctgccaagcacatctgatgatgataatggacaggactttaaagagaataagtataaagaaatgatatttggagaagatgctctgaaaatccctccttcagagtcatactgtctgagtcgcccaattaggagaggccattttaatgtgtcccataattattcagtgcatcaggttttagaagatttacgcactatttggaactggatactgacagaaaagttgcatatcaacccaagagacagaggtctatattctgcaattcttgttcttggggagacatttgacaaccgagaaataaaagagatgctgtctattgtccttcatgatttggggttcagcactgcagttgtacatcaggaagctctatctgcagcgtttggaaatggtttatctacaacttgtgttgtcaacattggtgctcaagttacacaagtagtttgtgttgaggatggagtagctttgccccacacagctctggcgcttccatatggtggagatgacatctccagatgcttgctttgggttcaacgtcgccatggcacgtggccaaacttccaaactgatccaatgagcaatcctatagatatgctaatgctcaacaaaatcaaagagtcatatagccaaataaagactgggagcattgatgcagctgtccttgttcattcatatgataatgaaaggtctggtggacatcagaagacaagactatcagcaattaatgttcctcctatgggtcttctttacccaagggttcttgttccagaagagtaccctccacctcctcgatcttggttccaagactatgatgacatgctggaggatacctggcaaacaagtgatggtctttaccctagtgggaatggacgtgttgaccttcaaaagaagctgtttggtagcattcagttggttggtggtgcagcttctacagctggccttgcacaagtgctggagcaaagggttcgcactaaaatttcagcaaaccaatctattgagaaagttgaggtgttgcaatctaggacttatccattatttgttccatggaaaggtggagtggatgcgtggattcatagagaagattggattaaaaatggtgtccacatcgggagtggcagaaaatataaggattcctattttcttcaggcgcaagtaatgtgctactacaacgtataacagtatcttatttccgagctacacacgaagacttgcacttatacaggttgttcgaccgtccaaaccatcctagaatatgattggtggactgcgattaaattgcgtacatgatgcatcagttctatgcatgctcgctgctgtctgttcggaggtcatcaactcgggacctggactaagggccttgtcgttcgctcaacccctatgaaaaagtttggctttctaaagatgtagtagaagtactcatttattccctgccaattgaacatttcaaatcttcgtatggtgttaatgaaaaatctgatgtttggattcgtatttatttccaatgataatgtatatgtgcattctcgactgttttggaaagaatgaaaaatcctcgtccgtttgcgta

SEQ ID NO: 25609 - DNA, 2243 bp, Zea Mays
cgttgtcttctctagcgacggcgaggcttgagcgctcacgtcccggcgttcccgtgccggtggccaagccagcggccgacgagatggactacctcaggacggtggttccgtcacaactcttggcagagcgcggctccaatcttgtcgtcatcaacccaggatcgggaaatgtgcgaatggggtttgctagtcaggatgtgccattcaatataccacattgcattgcccgacacatcaatccacaagagggcgaagaaccaagattctctgtgcgcgatcagatgctcaactgccatgctacttcatcgcagaatgcagagcgggagagtgcatatgatattattgcagcactgatgaaaatcccatttttggacgatgaagaaatgccttcaccgaaccaaccccttcctccaaagatgggacgtgttgatggcttctcttcgcagcaaaacagagacgataataaattcacttggacagatgtgtcagagagaattattaagccatccacaccattcggtcagtatacaaggatgctgaggaagatactctgccaagcacatctgatgatgataatggacaggactttaaagagaataagtataaagaaatgatatttggagaagatgctctgaaaatccctccttcagagtcatactgtctgagtcgcccaattaggagaggccattttaatgtgtcccataattattcagtgcatcaggttttagaagatttacgcactatttggaactggatactgacagaaaagttgcatatcaacccaagagacagaggtctatattctgcaattcttgttcttggggagacatttgacaaccgagaaataaaagagatgctgtctattgtccttcatgatttggggttcagcactgcagttgtacatcaggaagctctatctgcagcgtttggaaatggtttatctacaacttgtgttgtcaacattggtgctcaagttacacaagtagtttgtgttgaggatggagtagctttgccccacacagctctggcgcttccatatggtggagatgacatctccagatgcttgctttgggttcaacgtcgccatggcacgtggccaaacttccaaactgatccaatgagcaatcctatagatatgctaatgctcaacaaaatcaaagagtcatatagccaaataaagactgggagcattgatgcagctgtccttgttcattcatatgataatgaaaggtctggtggacatcagaagacaagactatcagcaattaatgttcctcctatgggtcttctttacccaagggttcttgttccagaagagtaccctccacctcctcgatcttggttccaagactatgatgacatgctggaggatacctggcaaacaagtgatggtctttaccctagtgggaatggtgggtttggcatgtgggacagttatccgatgtttcccactagattaaagaaatttgataacattggcctcgtagaggccattattagtagtgtactttcaacaggacgtgttgaccttcaaaagaagctgtttggtagcattcagttggttggtggtgcagcttctacagctggccttgcacaagtgctggagcaaagggttcgcactaaaatttcagcaaaccaatctattgagaaagttgaggtgttgcaatctaggacttatccattatttgttccatggaaaggtggagtgattttgggcgtccttgatattggtaaggatgcgtggattcatagagaagattggattaaaaatggtgtccacatcgggagtggcagaaaatataaggattcctattttcttcaggcgcaagtaatgtgctactacaacgtataacagtatcttatttccgagctacacacgaagacttgcacttatacaggttgttcgaccgtccaaaccatcctagaatatgattggtggactgcgattaaattgcgtacatgatgcatcagttctatgcatgctcgctgctgtctgttcggaggtcatcaactcgggacctggactaagggccttgtcgttcgctcaacccctatgaaaaagtttggctttctaaagatgtagtagaagtactcatttattccctgccaattgaacatttcaaatcttcgtatggtgttaatgaaaaatctgatgtttggattcgtatttatttccaatgataatgtatatgtgcattctcgactgttttggaaagaatgaaaaatcctcgtccgtttgcgta

SEQ ID NO: 25610 - DNA, 2240 bp, Zea Mays
cgttgtcttctctagcgacggcgaggcttgagcgctcacgtcccggcgttcccgtgccggtggccaagccagcggccgacgagatggactacctcaggacggtggttccgtcacaactcttggcagagcgcggctccaatcttgtcgtcatcaacccaggatcgggaaatgtgcgaatggggtttgctagtcaggatgtgccattcaatataccacattgcattgcccgacacatcaatccacaagagggcgaagaaccaagattctctgtgcgcgatcagatgctcaactgccatgctacttcatcgcagaatgcagagcgggagagtgcatatgatattcactgatgaaaatcccatttttggacgatgaagaaatgccttcaccgaaccaaccccttcctccaaagatgggacgtgttgatggcttctcttcgcagcaaaacagagacgataataaattcacttggacagatgtgtcagagagaattattaagccatccacaccattcgataggtcagtatacaaggatgctgaggaagatactctgccaagcacatctgatgatgataatggacaggactttaaagagaataagtataaagaaatgatatttggagaagatgctctgaaaatccctccttcagagtcatactgtctgagtcgcccaattaggagaggccattttaatgtgtcccataattattcagtgcatcaggttttagaagatttacgcactatttggaactggatactgacagaaaagttgcatatcaacccaagagacagaggtctatattctgcaattcttgttcttggggagacatttgacaaccgagaaataaaagagatgctgtctattgtccttcatgatttggggttcagcactgcagttgtacatcaggaagctctatctgcagcgtttggaaatggtttatctacaacttgtgttgtcaacattggtgctcaagttacacaagtagtttgtgttgaggatggagtagctttgccccacacagctctggcgcttccatatggtggagatgacatctccagatgcttgctttgggttcaacgtcgccatggcacgtggccaaacttccaaactgatccaatgagcaatcctatagatatgctaatgctcaacaaaatcaaagagtcatatagccaaataaagactgggagcattgatgcagctgtccttgttcattcatatgataatgaaaggtctggtggacatcagaagacaagactatcagcaattaatgttcctcctatgggtcttctttacccaagggttcttgttccagaagagtaccctccacctcctcgatcttggttccaagactatgatgacatgctggaggatacctggcaaacaagtgatggtctttaccctagtgggaatggtgggtttggcatgtgggacagttatccgatgtttcccactagattaaagaaatttgataacattggcctcgtagaggccattattagtagtgtactttcaacaggacgtgttgaccttcaaaagaagctgtttggtagcattcagttggttggtggtgcagcttctacagctggccttgcacaagtgctggagcaaagggttcgcactaaaatttcagcaaaccaatctattgagaaagttgaggtgttgcaatctaggacttatccattatttgttccatggaaaggtggagtgattttgggcgtccttgatattggtaaggatgcgtggattcatagagaagattggattaaaaatggtgtccacatcgggagtggcagaaaatataaggattcctattttcttcaggcgcaagtaatgtgctactacaacgtataacagtatcttatttccgagctacacacgaagacttgcacttatacaggttgttcgaccgtccaaaccatcctagaatatgattggtggactgcgattaaattgcgtacatgatgcatcagttctatgcatgctcgctgctgtctgttcggaggtcatcaactcgggacctggactaagggccttgtcgttcgctcaacccctatgaaaaagtttggctttctaaagatgtagtagaagtactcatttattccctgccaattgaacatttcaaatcttcgtatggtgttaatgaaaaatctgatgtttggattcgtatttatttccaatgataatgtatatgtgcattctcgactgttttggaaagaatgaaaaatcctcgtccgtttgcgta

SEQ ID NO: 25611 - DNA, 2125 bp, Zea Mays
cgttgtcttctctagcgacggcgaggcttgagcgctcacgtcccggcgttcccgtgccggtggccaagccagcggccgacgagatggactacctcaggacggtggttccgtcacaactcttggcagagcgcggctccaatcttgtcgtcatcaacccagatgctcaactgccatgctacttcatcgcagaatgcagagcgggagagtgcatatgatattattgcagcactgatgaaaatcccatttttggacgatgaagaaatgccttcaccgaaccaaccccttcctccaaagatgggacgtgttgatggcttctcttcgcagcaaaacagagacgataataaattcacttggacagatgtgtcagagagaattattaagccatccacaccattcgataggtcagtatacaaggatgctgaggaagatactctgccaagcacatctgatgatgataatggacaggactttaaagagaataagtataaagaaatgatatttggagaagatgctctgaaaatccctccttcagagtcatactgtctgagtcgcccaattaggagaggccattttaatgtgtcccataattattcagtgcatcaggttttagaagatttacgcactatttggaactggatactgacagaaaagttgcatatcaacccaagagacagaggtctatattctgcaattcttgttcttggggagacatttgacaaccgagaaataaaagagatgctgtctattgtccttcatgatttggggttcagcactgcagttgtacatcaggaagctctatctgcagcgtttggaaatggtttatctacaacttgtgttgtcaacattggtgctcaagttacacaagtagtttgtgttgaggatggagtagctttgccccacacagctctggcgcttccatatggtggagatgacatctccagatgcttgctttgggttcaacgtcgccatggcacgtggccaaacttccaaactgatccaatgagcaatcctatagatatgctaatgctcaacaaaatcaaagagtcatatagccaaataaagactgggagcattgatgcagctgtccttgttcattcatatgataatgaaaggtctggtggacatcagaagacaagactatcagcaattaatgttcctcctatgggtcttctttacccaagggttcttgttccagaagagtaccctccacctcctcgatcttggttccaagactatgatgacatgctggaggatacctggcaaacaagtgatggtctttaccctagtgggaatggtgggtttggcatgtgggacagttatccgatgtttcccactagattaaagaaatttgataacattggcctcgtagaggccattattagtagtgtactttcaacaggacgtgttgaccttcaaaagaagctgtttggtagcattcagttggttggtggtgcagcttctacagctggccttgcacaagtgctggagcaaagggttcgcactaaaatttcagcaaaccaatctattgagaaagttgaggtgttgcaatctaggacttatccattatttgttccatggaaaggtggagtgattttgggcgtccttgatattggtaaggatgcgtggattcatagagaagattggattaaaaatggtgtccacatcgggagtggcagaaaatataaggattcctattttcttcaggcgcaagtaatgtgctactacaacgtataacagtatcttatttccgagctacacacgaagacttgcacttatacaggttgttcgaccgtccaaaccatcctagaatatgattggtggactgcgattaaattgcgtacatgatgcatcagttctatgcatgctcgctgctgtctgttcggaggtcatcaactcgggacctggactaagggccttgtcgttcgctcaacccctatgaaaaagtttggctttctaaagatgtagtagaagtactcatttattccctgccaattgaacatttcaaatcttcgtatggtgttaatgaaaaatctgatgtttggattcgtatttatttccaatgataatgtatatgtgcattctcgactgttttggaaagaatgaaaaatcctcgtccgtttgcgta

SEQ ID NO: 25612 - DNA, 2121 bp, Zea Mays
cgttgtcttctctagcgacggcgaggcttgagcgctcacgtcccggcgttcccgtgccggtggccaagccagcggccgacgagatggactacctcaggacggtggttccgtcacaactcttggcagagcgcggctccaatcttgtcgtcatcaacccaggatcgggaaatgtgcgaatggggtttgctagtcaggatgtgccattcaatataccacattgcattgcccgacacatcaatccacaagagggcgaagaaccaagattctctgtgcgcgatcagatgctcaactgccatgctacttcatcgcagaatgcagagcgggagagtgcatatgatattattgcagcactgatgaaaatcccatttttggacgatgaagaaatgccttcaccgaaccaaccccttcctccaaagatgggacgtgttgatggcttctcttcgcagcaaaacagagacgataataaattcacttggacagatgtgtcagagagaattattaagccatccacaccattcggtcagtatacaaggatgctgaggaagatactctgccaagcacatctgatgatgataatggacaggactttaaagagaataagtataaagaaatgatatttggagaagatgctctgaaaatccctccttcagagtcatactgtctgagtcgcccaattaggagaggccattttaatgtgtcccataattattcagtgcatcaggttttagaagatttacgcactatttggaactggatactgacagaaaagttgcatatcaacccaagagacagaggtctatattctgcaattcttgttcttggggagacatttgacaaccgagaaataaaagagatgctgtctattgtccttcatgatttggggttcagcactgcagttgtacatcaggaagctctatctgcagcgtttggaaatggtttatctacaacttgtgttgtcaacattggtgctcaagttacacaagtagtttgtgttgaggacatctccagatgcttgctttgggttcaacgtcgccatggcacgtggccaaacttccaaactgatccaatgagcaatcctatagatatgctaatgctcaacaaaatcaaagagtcatatagccaaataaagactgggagcattgatgcagctgtccttgttcattcatatgataatgaaaggtctggtggacatcagaagacaagactatcagcaattaatgttccaagactatgatgacatgctggaggatacctggcaaacaagtgatggtctttaccctagtgggaatggtgggtttggcatgtgggacagttatccgatgtttcccactagattaaagaaatttgataacattggcctcgtagaggccattattagtagtgtactttcaacaggacgtgttgaccttcaaaagaagctgtttggtagcattcagttggttggtggtgcagcttctacagctggccttgcacaagtgctggagcaaagggttcgcactaaaatttcagcaaaccaatctattgagaaagttgaggtgttgcaatctaggacttatccattatttgttccatggaaaggtggagtgattttgggcgtccttgatattggtaaggatgcgtggattcatagagaagattggattaaaaatggtgtccacatcgggagtggcagaaaatataaggattcctattttcttcaggcgcaagtaatgtgctactacaacgtataacagtatcttatttccgagctacacacgaagacttgcacttatacaggttgttcgaccgtccaaaccatcctagaatatgattggtggactgcgattaaattgcgtacatgatgcatcagttctatgcatgctcgctgctgtctgttcggaggtcatcaactcgggacctggactaagggccttgtcgttcgctcaacccctatgaaaaagtttggctttctaaagatgtagtagaagtactcatttattccctgccaattgaacatttcaaatcttcgtatggtgttaatgaaaaatctgatgtttggattcgtatttatttccaatgataatgtatatgtgcattctcgactgttttggaaagaatgaaaaatcctcgtccgtttgcgta

SEQ ID NO: 25613 - DNA, 2204 bp, Zea Mays
cgttgtcttctctagcgacggcgaggcttgagcgctcacgtcccggcgttcccgtgccggtggccaagccagcggccgacgagatggactacctcaggacggtggttccgtcacaactcttggcagagcgcggctccaatcttgtcgtcatcaacccaggatcgggaaatgtgcgaatggggtttgctagtcaggatgtgccattcaatataccacattgcattgcccgacacatcaatccacaagagggcgaagaaccaagattctctgtgcgcgatcagatgctcaactgccatgctacttcatcgcagaatgcagagcgggagagtgcatatgatattattgcagcactgatgaaaatcccatttttggacgatgaagaaatgccttcaccgaaccaaccccttcctccaaagatgggacgtgttgatggcttctcttcgcagcaaaacagagacgataataaattcacttggacagatgtgtcagagagaattattaagccatccacaccattcgataggtcagtatacaaggatgctgaggaagatactctgccaagcacatctgatgatgataatggacaggactttaaagagaataagtataaagaaatgatatttggagaagatgctctgaaaatccctccttcagagtcatactgtctgagtcgcccaattaggagaggccattttaatgtgtcccataattattcagtgcatcaggttttagaagatttacgcactatttggaactggatactgacagaaaagttgcatatcaacccaagagacagaggtctatattctgcaattcttgttcttggggagacatttgacaaccgagaaataaaagagatgctgtctattgtccttcatgatttggggttcagcactgcagttgtacatcaggaagctctatctgcagcgtttggaaatggtttatctacaacttgtgttgtcaacattggtgctcaagttacacaagtagtttgtgttgaggatggagtagctttgccccacacagctctggcgcttccatatggtggagatgacatctccagatgcttgctttgggttcaacgtcgccatggcacgtggccaaacttccaaactgatccaatgagcaatcctatagatatgctaatgctcaacaaaatcaaagagtcatatagccaaataaagactgggagcattgatgcagctgtccttgttcattcatatgataatgaaaggtctggtggacatcagaagacaagactatcagcaattaatgttcctcctatgggtcttctttacccaagggttcttgttccagaagagtaccctccacctcctcgatcttggttccaagactatgatgacatgctggaggatacctggcaaacaagtgatggtctttaccctagtgggaatggtgggtttggcatgtgggacagttatccgatgtttcccactagattaaagaaatttgataacattggcctcgtagaggccattattagtagtgtactttcaacaggacgtgttgaccttcaaaagaagctgtttggtagcattcagttggttggtggtgcagcttctacagctggccttgcacaagtgctggagcaaagggttcgcactaaaatttcagcaaaccaatctattgagaaagttgaggtgttgcaatctaggacttatccattatttgttccatggaaaggtggagtgattttgggcgtccttgatattggtaaggatgcgtggattcatagagaagattggattaaaaatggtgtccacatcgggagtggcagaaaatataaggattcctattttcttcaggcgcaagtaatgtgctactacaacgtataacaggttgttcgaccgtccaaaccatcctagaatatgattggtggactgcgattaaattgcgtacatgatgcatcagttctatgcatgctcgctgctgtctgttcggaggtcatcaactcgggacctggactaagggccttgtcgttcgctcaacccctatgaaaaagtttggctttctaaagatgtagtagaagtactcatttattccctgccaattgaacatttcaaatcttcgtatggtgttaatgaaaaatctgatgtttggattcgtatttatttccaatgataatgtatatgtgcattctcgactgttttggaaagaatgaaaaatcctcgtccgtttgcgta

SEQ ID NO: 25614 - DNA, 2010 bp, Zea Mays
cgttgtcttctctagcgacggcgaggcttgagcgctcacgtcccggcgttcccgtgccggtggccaagccagcggccgacgagatggactacctcaggacggtggttccgtcacaactcttggcagagcgcggctccaatcttgtcgtcatcaacccaggatcgggaaatgtgcgaatggggtttgctagtcaggatgtgccattcaatataccacattgcattgcccgacacatcaatccacaagagggcgaagaaccaagattctctgtgcgcgatcagatgctcaactgccatgctacttcatcgcagaatgcagagcgggagagtgcatatgatattattgcagcactgatgaaaatcccatttttggacgatgaagaaatgccttcaccgaaccaaccccttcctccaaagatgggacgtgttgatggcttctcttcgcagcaaaacagagacgataataaattcacttggacagatgtgtcagagagaattattaagccatccacaccattcgataggtcagtatacaaggatgctgaggaagatactctgccaagcacatctgatgatgataatggacaggactttaaagagaataagtataaagaaatgatatttggagaagatgctctgaaaatccctccttcagagtcatactgtctgagtcgcccaattaggagaggccattttaatgtgtcccataattattcagtgcatcaggttttagaagatttacgcactatttggaactggatactgacagaaaagttgcatatcaacccaagagacagaggtctatattctgcaattcttgttcttggggagacatttgacaaccgagaaataaaagagatgctgtctattgtccttcatgatttggggttcagcactgcagttgtacatcaggaagctctatctgcagcgtttggaaatggtttatctacaacttgtgttgtcaacattggtgctcaagttacacaagtagtttgtgttgaggatggagtagctttgccccacacagctctggcgcttccatatggtggagatactgggagcattgatgcagctgtccttgttcattcatatgataatgaaaggtctggtggacatcagaagacaagactatcagcaattaatgttcctcctatgggtcttctttacccaagggttcttgttccagaagagtaccctccacctcctcgatcttggttccaagactatgatgacatgctggaggatacctggcaaacaagtgatggtctttaccctagtgggaatggacgtgttgaccttcaaaagaagctgtttggtagcattcagttggttggtggtgcagcttctacagctggccttgcacaagtgctggagcaaagggttcgcactaaaatttcagcaaaccaatctattgagaaagttgaggtgttgcaatctaggacttatccattatttgttccatggaaaggtggagtgattttgggcgtccttgatattggtaaggatgcgtggattcatagagaagattggattaaaaatggtgtccacatcgggagtggcagaaaatataaggattcctattttcttcaggcgcaagtaatgtgctactacaacgtataacagtatcttatttccgagctacacacgaagacttgcacttatacaggttgttcgaccgtccaaaccatcctagaatatgattggtggactgcgattaaattgcgtacatgatgcatcagttctatgcatgctcgctgctgtctgttcggaggtcatcaactcgggacctggactaagggccttgtcgttcgctcaacccctatgaaaaagtttggctttctaaagatgtagtagaagtactcatttattccctgccaattgaacatttcaaatcttcgtatggtgttaatgaaaaatctgatgtttggattcgtatttatttccaatgataatgtatatgtgcattctcgactgttttggaaagaatgaaaaatcctcgtccgtttgcgta

SEQ ID NO: 25615 - DNA, 2085 bp, Zea Mays
cgttgtcttctctagcgacggcgaggcttgagcgctcacgtcccggcgttcccgtgccggtggccaagccagcggccgacgagatggactacctcaggacggtggttccgtcacaactcttggcagagcgcggctccaatcttgtcgtcatcaacccaggatcgggaaatgtgcgaatggggtttgctagtcaggatgtgccattcaatataccacattgcattgcccgacacatcaatccacaagagggcgaagaaccaagattctctgtgcgcgatcagaatgcagagcgggagagtgcatatgatattattgcagcactgatgaaaatcccatttttggacgatgaagaaatgccttcaccgaaccaaccccttcctccaaagatgggacgtgttgatggcttctcttcgcagcaaaacagagacgataataaattcacttggacagatgtgtcagagagaattattaagccatccacaccattcgataggtcagtatacaaggatgctgaggaagatactctgccaagcacatctgatgatgataatggacaggactttaaagagaataagtataaagaaatgatatttggagaagatgctctgaaaatccctccttcagagtcatactgtctgagtcgcccaattaggagaggccattttaatgtgtcccataattattcagtgcatcaggttttagaagatttacgcactatttggaactggatactgacagaaaagttgcatatcaacccaagagacagaggtctatattctgcaattcttgttcttggggagacatttgacaaccgagaaataaaagagatgctgtctattgtccttcatgatttggggttcagcactgcagttgtacatcaggaagctctatctgcagcgtttggaaatggtttatctacaacttgtgttgtcaacattggtgctcaagttacacaagtagtttgtgttgaggatggagtagctttgccccacacagctctggcgcttccatatggtggagatactgggagcattgatgcagctgtccttgttcattcatatgataatgaaaggtctggtggacatcagaagacaagactatcagcaattaatgttcctcctatgggtcttctttacccaagggttcttgttccagaagagtaccctccacctcctcgatcttggttccaagactatgatgacatgctggaggatacctggcaaacaagtgatggtctttaccctagtgggaatggtgggtttggcatgtgggacagttatccgatgtttcccactagattaaagaaatttgataacattggcctcgtagaggccattattagtagtgtactttcaacaggacgtgttgaccttcaaaagaagctgtttggtagcattcagttggttggtggtgcagcttctacagctggccttgcacaagtgctggagcaaagggttcgcactaaaatttcagcaaaccaatctattgagaaagttgaggtgttgcaatctaggacttatccattatttgttccatggaaaggtggagtgattttgggcgtccttgatattggtaaggatgcgtggattcatagagaagattggattaaaaatggtgtccacatcgggagtggcagaaaatataaggattcctattttcttcaggcgcaagtaatgtgctactacaacgtataacagtatcttatttccgagctacacacgaagacttgcacttatacaggttgttcgaccgtccaaaccatcctagaatatgattggtggactgcgattaaattgcgtacatgatgcatcagttctatgcatgctcgctgctgtctgttcggaggtcatcaactcgggacctggactaagggccttgtcgttcgctcaacccctatgaaaaagtttggctttctaaagatgtagtagaagtactcatttattccctgccaattgaacatttcaaatcttcgtatggtgttaatgaaaaatctgatgtttggattcgtatttatttccaatgataatgtatatgtgcattctcgactgttttggaaagaatgaaaaatcctcgtccgtttgcgta

SEQ ID NO: 25616 - DNA, 2220 bp, Zea Mays
cgttgtcttctctagcgacggcgaggcttgagcgctcacgtcccggcgttcccgtgccggtggccaagccagcggccgacgagatggactacctcaggacggtggttccgtcacaactcttggcagagcgcggctccaatcttgtcgtcatcaacccaggatcgggaaatgtgcgaatggggtttgctagtcaggatgtgccattcaatataccacattgcattgcccgacacatcaatccacaagagggcgaagaaccaagattctctgtgcgcgatcagatgctcaactgccatgctacttcatcgcagaatgcagagcgggagagtgcatatgatattattgcagcactgatgaaaatcccatttttggacgatgaagaaatgccttcaccgaaccaaccccttcctccaaagatgggacgtgttgatggcttctcttcgcagcaaaacagagacgataataaattcacttggacagatgtgtcagagagaattattaagccatccacaccattcgataggtcagtatacaaggatgctgaggaagatactctgccaagcacatctgatgatgataatggacaggactttaaagagaataagtataaagaaatgatatttggagaagatgctctgaaaatccctccttcagagtcatactgtctgagtcgcccaattaggagaggccattttaatgtgtcccataattattcagtgcatcaggttttagaagatttacgcactatttggaactggatactgacagaaaagttgcatatcaacccaagagacagaggtctatattctgcaattcttgttcttggggagacatttgacaaccgagaaataaaagagatgctgtctattgtccttcatgatttggggttcagcactgcagttgtacatcaggaagctctatctgcagcgtttggaaatggtttatctacaacttgtgttgtcaacattggtgctcaagttacacaagtagtttgtgttgaggatggagtagctttgccccacacagctctggcgcttccatatggtggagatgacatctccagatgcttgctttgggttcaacgtcgccatggcacgtggccaaacttccaaactgatccaatgagcaatcctatagatatgctaatgctcaacaaaatcaaagagtcatatagccaaataaagactgggagcattgatgcagctgtccttgttcattcatatgataatgaaaggtctggtggacatcagaagacaagactatcagcaattaatgttcctcctatgggtcttctttacccaagggttcttgttccagaagagtaccctccacctcctcgatcttggttccaagactatgatgacatgctggaggatacctggcaaacaagtgatggtctttaccctagtgggaatggtgggtttggcatgtgggacagttatccgatgtttcccactagattaaagaaatttgataacattggcctcgtagaggccattattagtagtgtactttcaacaggacgtgttgaccttcaaaagaagctgtttggtagcattcagttggttggtggtgcagcttctacagctggccttgcacaagtgctggagcaaagggttcgcactaaaatttcagcaaaccaatctattgagaaagttgaggtgttgcaatctaggacttatccattatttgttccatggaaaggtggagtggatgcgtggattcatagagaagattggattaaaaatggtgtccacatcgggagtggcagaaaatataaggattcctattttcttcaggcgcaagtaatgtgctactacaacgtataacagtatcttatttccgagctacacacgaagacttgcacttatacaggttgttcgaccgtccaaaccatcctagaatatgattggtggactgcgattaaattgcgtacatgatgcatcagttctatgcatgctcgctgctgtctgttcggaggtcatcaactcgggacctggactaagggccttgtcgttcgctcaacccctatgaaaaagtttggctttctaaagatgtagtagaagtactcatttattccctgccaattgaacatttcaaatcttcgtatggtgttaatgaaaaatctgatgtttggattcgtatttatttccaatgataatgtatatgtgcattctcgactgttttggaaagaatgaaaaatcctcgtccgtttgcgta

SEQ ID NO: 25617 - DNA, 2084 bp, Zea Mays
cgttgtcttctctagcgacggcgaggcttgagcgctcacgtcccggcgttcccgtgccggtggccaagccagcggccgacgagatggactacctcaggacggtggttccgtcacaactcttggcagagcgcggctccaatcttgtcgtcatcaacccaggatcgggaaatgtgcgaatggggtttgctagtcaggatgtgccattcaatataccacattgcattgcccgacacatcaatccacaagagggcgaagaaccaagattctctgtgcgcgatcagatgctcaactgccatgctacttcatcgcagaatgcagagcgggagagtgcatatgatattattgcagcactgatgaaaatcccatttttggacgatgaagaaatgccttcaccgaaccaaccccttcctccaaagatgggacgtgttgatggcttctcttcgcagcaaaacagagacgataataaattcacttggacagatgtgtcagagagaattattaagccatccacaccattcggtcagtatacaaggatgctgaggaagatactctgccaagcacatctgatgatgataatggacaggactttaaagagaataagtataaagaaatgatatttggagaagatgctctgaaaatccctccttcagagtcatactgtctgagtcgcccaattaggagaggccattttaatgtgtcccataattattcagtgcatcaggttttagaagatttacgcactatttggaactggatactgacagaaaagttgcatatcaacccaagagacagaggtctatattctgcaattcttgttcttggggagacatttgacaaccgagaaataaaagagatgctgtctattgtccttcatgatttggggttcagcactgcagttgtacatcaggaagctctatctgcagcgtttggaaatggtttatctacaacttgtgttgtcaacattggtgctcaagttacacaagtagtttgtgttgaggatggagtagctttgccccacacagctctggcgcttccatatggtggagatactgggagcattgatgcagctgtccttgttcattcatatgataatgaaaggtctggtggacatcagaagacaagactatcagcaattaatgttcctcctatgggtcttctttacccaagggttcttgttccagaagagtaccctccacctcctcgatcttggttccaagactatgatgacatgctggaggatacctggcaaacaagtgatggtctttaccctagtgggaatggtgggtttggcatgtgggacagttatccgatgtttcccactagattaaagaaatttgataacattggcctcgtagaggccattattagtagtgtactttcaacaggacgtgttgaccttcaaaagaagctgtttggtagcattcagttggttggtggtgcagcttctacagctggccttgcacaagtgctggagcaaagggttcgcactaaaatttcagcaaaccaatctattgagaaagttgaggtgttgcaatctaggacttatccattatttgttccatggaaaggtggagtggatgcgtggattcatagagaagattggattaaaaatggtgtccacatcgggagtggcagaaaatataaggattcctattttcttcaggcgcaagtaatgtgctactacaacgtataacagtatcttatttccgagctacacacgaagacttgcacttatacaggttgttcgaccgtccaaaccatcctagaatatgattggtggactgcgattaaattgcgtacatgatgcatcagttctatgcatgctcgctgctgtctgttcggaggtcatcaactcgggacctggactaagggccttgtcgttcgctcaacccctatgaaaaagtttggctttctaaagatgtagtagaagtactcatttattccctgccaattgaacatttcaaatcttcgtatggtgttaatgaaaaatctgatgtttggattcgtatttatttccaatgataatgtatatgtgcattctcgactgttttggaaagaatgaaaaatcctcgtccgtttgcgta

SEQ ID NO: 25618 - DNA, 2192 bp, Zea Mays
cgttgtcttctctagcgacggcgaggcttgagcgctcacgtcccggcgttcccgtgccggtggccaagccagcggccgacgagatggactacctcaggacggtggttccgtcacaactcttggcagagcgcggctccaatcttgtcgtcatcaacccaggatcgggaaatgtgcgaatggggtttgctagtcaggatgtgccattcaatataccacattgcattgcccgacacatcaatccacaagagggcgaagaaccaagattctctgtgcgcgatcagatgctcaactgccatgctacttcatcgcagaatgcagagcgggagagtgcatatgatattattgcagcactgatgaaaatcccatttttggacgatgaagaaatgccttcaccgaaccaaccccttcctccaaagatgggacgtgttgatggcttctcttcgcagcaaaacagagacgataataaattcacttggacagatgtgtcagagagaattattaagccatccacaccattcggtcagtatacaaggatgctgaggaagatactctgccaagcacatctgatgatgataatggacaggactttaaagagaataagtataaagaaatgatatttggagaagatgctctgaaaatccctccttcagagtcatactgtctgagtcgcccaattaggagaggccattttaatgtgtcccataattattcagtgcatcaggttttagaagatttacgcactatttggaactggatactgacagaaaagttgcatatcaacccaagagacagaggtctatattctgcaattcttgttcttggggagacatttgacaaccgagaaataaaagagatgctgtctattgtccttcatgatttggggttcagcactgcagttgtacatcaggaagctctatctgcagcgtttggaaatggtttatctacaacttgtgttgtcaacattggtgctcaagttacacaagtagtttgtgttgaggacatctccagatgcttgctttgggttcaacgtcgccatggcacgtggccaaacttccaaactgatccaatgagcaatcctatagatatgctaatgctcaacaaaatcaaagagtcatatagccaaataaagactgggagcattgatgcagctgtccttgttcattcatatgataatgaaaggtctggtggacatcagaagacaagactatcagcaattaatgttcctcctatgggtcttctttacccaagggttcttgttccagaagagtaccctccacctcctcgatcttggttccaagactatgatgacatgctggaggatacctggcaaacaagtgatggtctttaccctagtgggaatggtgggtttggcatgtgggacagttatccgatgtttcccactagattaaagaaatttgataacattggcctcgtagaggccattattagtagtgtactttcaacaggacgtgttgaccttcaaaagaagctgtttggtagcattcagttggttggtggtgcagcttctacagctggccttgcacaagtgctggagcaaagggttcgcactaaaatttcagcaaaccaatctattgagaaagttgaggtgttgcaatctaggacttatccattatttgttccatggaaaggtggagtgattttgggcgtccttgatattggtaaggatgcgtggattcatagagaagattggattaaaaatggtgtccacatcgggagtggcagaaaatataaggattcctattttcttcaggcgcaagtaatgtgctactacaacgtataacagtatcttatttccgagctacacacgaagacttgcacttatacaggttgttcgaccgtccaaaccatcctagaatatgattggtggactgcgattaaattgcgtacatgatgcatcagttctatgcatgctcgctgctgtctgttcggaggtcatcaactcgggacctggactaagggccttgtcgttcgctcaacccctatgaaaaagtttggctttctaaagatgtagtagaagtactcatttattccctgccaattgaacatttcaaatcttcgtatggtgttaatgaaaaatctgatgtttggattcgtatttatttccaatgataatgtatatgtgcattctcgactgttttggaaagaatgaaaaatcctcgtccgtttgcgta

SEQ ID NO: 25619 - DNA, 2188 bp, Zea Mays
gccaaagttatcgttgtcttctctagcgacggcgaggcttgagcgctcacgtcccggcgttcccgtgccggtggccaagccagcggccgacgagatggactacctcaggacggtggttccgtcacaactcttggcagagcgcggctccaatcttgtcgtcatcaacccaggatcgggaaatgtgcgaatggggtttgctagtcaggatgtgccattcaatataccacattgcattgcccgacacatcaatccacaagagggcgaagaaccaagattctctgtgcgcgatcagatgctcaactgccatgctacttcatcgcagaatgcagagcgggagagtgcatatgatattattgcagcactgatgaaaatcccatttttggacgatgaagaaatgccttcaccgaaccaaccccttcctccaaagatgggacgtgttgatggcttctcttcgcagcaaaacagagacgataataaattcacttggacagatgtgtcagagagaattattaagccatccacaccattcgataggtcagtatacaaggatgctgaggaagatactctgccaagcacatctgatgatgataatggacaggactttaaagagaataagtataaagaaatgatatttggagaagatgctctgaaaatccctccttcagagtcatactgtctgagtcgcccaattaggagaggccattttaatgtgtcccataattattcagtgcatcaggttttagaagatttacgcactatttggaactggatactgacagaaaagttgcatatcaacccaagagacagaggtctatattctgcaattcttgttcttggggagacatttgacaaccgagaaataaaagagatgctgtctattgtccttcatgatttggggttcagcactgcagttgtacatcaggaagctctatctgcagcgtttggaaatggtttatctacaacttgtgttgtcaacattggtgctcaagttacacaagtagtttgtgttgaggatggagtagctttgccccacacagctctggcgcttccatatggtggagatgacatctccagatgcttgctttgggttcaacgtcgccatggcacgtggccaaacttccaaactgatccaatgagcaatcctatagatatgctaatgctcaacaaaatcaaagagtcatatagccaaataaagactgggagcattgatgcagctgtccttgttcattcatatgataatgaaaggtctggtggacatcagaagacaagactatcagcaattaatgttcctcctatgggtcttctttacccaagggttcttgttccagaagagtaccctccacctcctcgatcttggttccaagactatgatgacatgctggaggatacctggcaaacaagtgatggtctttaccctagtgggaatggtgggtttggcatgtgggacagttatccgatgtttcccactagattaaagaaatttgataacattggcctcgtagaggccattattagtagtgtactttcaacaggacgtgttgaccttcaaaagaagctgtttggtagcattcagttggttggtggtgcagcttctacagctggccttgcacaagtgctggagcaaagggttcgcactaaaatttcagcaaaccaatctattgagaaagttgaggtgttgcaatctaggacttatccattatttgttccatggaaaggtggagtgattttgggcgtccttgatattggtaaggatgcgtggattcatagagaagattggattaaaaatggtgtccacatcgggagtggcagaaaatataaggattcctattttcttcaggcgcaagttgttcgaccgtccaaaccatcctagaatatgattggtggactgcgattaaattgcgtacatgatgcatcagttctatgcatgctcgctgctgtctgttcggaggtcatcaactcgggacctggactaagggccttgtcgttcgctcaacccctatgaaaaagtttggctttctaaagatgtagtagaagtactcatttattccctgccaattgaacatttcaaatcttcgtatggtgttaatgaaaaatctgatgtttggattcgtatttatttccaatgataatgtatatgtgcattctcgactgttttggaaagaatgaaaaatcctcgtccgtttgcgta

SEQ ID NO: 25620 - DNA, 1305 bp, Zea Mays
agttatcgttgtcttctctagcgacggcgaggcttgagcgctcacgtcccggcgttcccgtgccggtggccaagccagcggccgacgagatggactacctcaggacggtggttccgtcacaactcttggcagagcgcggctccaatcttgtcgtcatcaacccaggatcgggaaatgtgcgaatggggtttgctagtcaggatgtgccattcaatataccacattgcattgcccgacacatcaatccacaagagggcgaagaaccaagattctctgtgcgcgatcagatgctcaactgccatgctacttcatcgcagaatgcagagcgggagagtgcatatgatattattgcagcactgatgaaaatcccatttttggacgatgaagaaatgccttcaccgaaccaaccccttcctccaaagatgggacgtgttgatggcttctcttcgcagcaaaacagagacgataataaattcacttggacagatgtgtcagagagaattattaagccatccacaccattcgataggtcagtatacaaggatgctgaggaagatactctgccaagcacatctgatgatgataatggacaggactttaaagagaataagtataaagaaatgatatttggagaagatgctctgaaaatccctccttcagagtcatactgtctgagtcgcccaattaggagaggccattttaatgtgtcccataattattcagtgcatcaggttttagaagatttacgcactatttggaactggatactgacagaaaagttgcatatcaacccaagagacagaggtctatattctgcaattcttgttcttggggagacatttgacaaccgagaaataaaagagatgctgtctattgtccttcatgatttggggttcagcactgcagttgtacatcaggaagctctatctgcagcgtttggaaatggtttatctacaacttgtgttgtcaacattggtgctcaagttacacaagtagtttgtgttgaggatggagtagctttgccccacacagctctggcgcttccatatggtggagatgacatctccagatgcttgctttgggttcaacgtcgccatggcacgtggccaaacttccaaactgatccaatgagcaatcctatagatatgctaatgctcaacaaaatcaaagagtcatatagccaaataaagactgggagcattgatgcagctgtccttgttcattcatatgataatgaaaggtctggtggacatcagaagacaagactatcagcaattaataagggagcatttatgttcatgcctg

SEQ ID NO: 25621 - DNA, 905 bp, Zea Mays
ccaaagttatcgttgtcttctctagcgacggcgaggcttgagcgctcacgtcccggcgttcccgtgccggtggccaagccagcggccgacgagatggactacctcaggacggtggttccgtcacaactcttggcagagcgcggctccaatcttgtcgtcatcaacccaggatcgggaaatgtgcgaatggggtttgctagtcaggatgtgccattcaatataccacattgcattgcccgacacatcaatccacaagagggcgaagaaccaagattctctgtgcgcgatcagatgctcaactgccatgctacttcatcgcagaatgcagagcgggagagtgcatatgatattattgcagcactgatgaaaatcccatttttggacgatgaagaaatgccttcaccgaaccaaccccttcctccaaagatgggacgtgttgatggcttctcttcgcagcaaaacagagacgataataaattcacttggacagatgtgtcagagagaattattaagccatccacaccattcggtcagtatacaaggatgctgaggaagatactctgccaagcacatctgatgatgataatggacaggactttaaagagaataagtataaagaaatgatatttggagaagatgctctgaaaatccctccttcagagtcatactgtctgagtcgcccaattaggagaggccattttaatgtgtcccataattattcagtgcatcaggttttagaagatttacgcactatttggaactggatactgacagaaaagttgcatatcaacccaagagacagaggtctatattctgcaattcttgttcttggggagacatttgacaaccgaggtggtacattttttttatctgtgtcgtgatggtgtatcctacgttatcctttg

SEQ ID NO: 25622 - DNA, 1438 bp, Zea Mays
agaaccgctaagtcgacgagagtcgacgagagttccgtgactcacgcaatttatcgagcacctagtgaacatcacactagtacattaatttattaaacgattgaactattctgaataattcatcggcttaccatgaccggaacgatttaataatcgtagaacaacgatgagtattggttcaggcttcctatcaaacacttagcaagggttgtgttcgaaggcggcttacaggggaagagctcgacaggggcttcagagctcaatacaagtggcacacaactggcagatagagcgtcgggatcgacgggcacgtcgcgacgcggtgtgggttgacgacgaagaataaaggggctactggcttcgacttcagcaccaaatctcctttcaaaattataattggcttgaacttcacacgaacaatgatgagaccgtggttcaggctttacgtcgagtacttggcaggcgtcacagttggctttcgctgtcttcgccgcccacaccaagaacttctctcccaaacacaagcaagggaccacaccacaggtattcgacgaaatcaacataggactgcagcaaagcttctggaataggaagatggcaacaaggtcgacgatcaggcgcggcgctaatgcaagaatgcagaacccaaggtaccatggcgcagaagcgcgcgagatccagcgtccaaggctgagcagcaggggcaccgaaggagcaaggacgcagagacgtgccatgggaacttcacggctagtgagagcgcgcgtcgcacgcaggaaacacggcgaccatggcgagggagcagagacggcgcgcagggctgaatccgagctggagctcgcagcaaccgggagcagcaaccggcgagcaaagaactgagtggacaagggagcaggcgcggccatggtggagactgggcagagcaccggcaaaggagagaggtggggcgagggtggccggacagagggagcaggcgcgcgcgttaaggctggagcaggagcacgccggcgagctcgcgcggccgacaagcaaagcaggagggagctccggccggactcggcagaggaagctgggggtcgcgatttccatggccgagcagagaaccggcaagggcgcggcggccagcgccatagcggggcggagttcggggaggagctcgacagagcgcgagccagcagagagcgcggccaagcagaggagcctcgcgcgcggccatggaagatggggacgagctgtaggggagctcgtaggggatccaacgccgggagctcggttgggcgagctgaggaaggtggagaagaggccgagcgtgagggactcaactccagggagaggcgcagagagaagctccagcagccgattgcggagggaggcaagatttgtcgggagctgagcgcagagggaggtgtcgtgagcagatgaagcctccaggcttccg

SEQ ID NO: 25623 - DNA, 544 bp, Zea Mays
gataacactaggttagtgttgttagacgatgtccacttgacgatcatccttgtcctagcacttgatcaggcaggttcgtccatcagcatcaccatgcggagtagcccgcggttggggtcgacttgggtcgtcttccgcatcacacaattaattatcgtacctcatgagatgcacaattcacatgtatgagcataaagtaactggatgatacagaaaagaaaatcgaatacttagcggcaagacatcgacacaatcctacgtaagcactagacacctataactcactgaacacaacaatcatgattttctagttttactagatttaactcaaacatcaaggaacaatagattatatgcacgtctactttccttagctaaggcccaacaccagaagactatcaaacctacattcatttattaggaaaacaatagaccatatgagttccacctttctatttgattaaagcataatactgaaagactaattacttagactcattattttgggacacgaaactcgaagtatggaccgaaacaacttaac

SEQ ID NO: 25624 - DNA, 2927 bp, Zea Mays
ccatttccttctacaacgactaatcctgaaattggcattggagttgcctatggctcctgtagcaataggagaatggatggcatcagcctgcatcgccaagatggttagcaaagtgtgctcttacctagaagaccagtatgaataccaaagggatgatgcaaaggataaactaaccaagctcaagaataatctctggaagataccattcgtgctggacaaagcttcaagcttgcaaaccaaagatcccagtatgaaaagttggcaagggagtataaaagatgctgcttaccaggctgtggatgttcttgatttatttgactatcgcttttttgaagcaaaagctgaagacatagaaaaggtgctggccgagtcatctgattatgctactgttaactcttcatcctccgcaacaaccaacaccactgcctctaccagcagcagctcaacagtaaaacggtcagttcgtgttctgaagcgtgtccttttttctgatgaagaccttaataagttaattgcaattttggaaaagtttgataagatttctagtgagatgcaaacattcttagagcttgttaacccaaggaataagaagccaggaaaggcacttcagtggcgcagaacaacctctatgctagctgacttgaacagcatcagtaacttagatctagttcagagaatacttgagaaaaagctaaatgggagcaaggttttggtagtactcgatgatgtttggaacgaaatgagcagcaaatgggaaacattgtgcaagcccctccagtttgctagtatgggcagcaaagtggtgcttactactcgaagtgaaaaggttgcaaagataaatggagcaacagagataatacatttagatgggttgaaaggcaaagagtatttggatcatttccagcaatgcgcgtttgacaacgcaacaccgtcagattttccaagattggtgcaaattggtgaacaattggcaatgaaattggctggttcaccactagcagctaagacggtaggagctgaactgaaactgaagctacaggaagaccactggaaggctgtccttcagctcaaattgtggcagattgaacagacagcagatgatattatgccagcattacgattgagctatgagcatcttccagatcacttgaagcagtgctttgtttactttgcattgtttcctaagaactaccaacatcgggatgatgtgctcatacagatgtggcgagcccatggttacattcaaaaggaaacatcagatgaaaatgcatatcgttatattaatgatctcttacagctttcattcattaagaaagcagccaatctagataaccattatgttgttcatgacttgctacatgatttggcagaatcaatctccaatggagaacactttcgaattgaagatgattttcatgttagtattccaagaaatgtgcggcacctatatgtcaatgcaagcaatatttctaaggtgtgcatgagtttggttgaatcccaggagggattggcagaatccccggatttgaagaaaaatctaaggagcctaataatatgcaagcaccatgctcctggagaaagaatccctccagataacttcaacgatgttcttaaagaaacgctgcatgatctaaggagcttacgtgtgctcgtactacaacatccagatggtattctgccagataatattgaacatctagtccaccttaggtatctcgacataagtgaaagcaagatattcaccagtatcccaaaatcattattcagattataccatttacaggggtttattctccagtcatattgtcagcataatctagggaaagaactgcagaagcacattagtaggctgacagctgagccagttaaaatacttagccccatccagaagtcgaggcatcaaaatgataggccaaaggagattggaggtctaggaataacagacctggataaatttggcagagccctccgactacagtggttacaatcacaacaagattggttggaccaaaccaagccttgggcaggaatcgaggttgcctgcaacaagttagaccagcttctcttcagtaccaccaccgtaatcatggttggaaatgggaagaaagtgcggttctggcaccataattggctcgatggtgaggcccctagaaggctagaaacctggcacaactctattcaagtttgcaaaaagggaaaataaaatggtccatcagcagctccacaacaatgcttggatccaatcaattcttgacaacgccacaacaaccacacacgtggaagaactcgtctcattctgttaggattcagaacatacaactaaagcccaagatgcaagattccaaagtgtggaagtggacagccaatggtccacactccaatcgcttggctaaccgggttcagttcgaaggatcatatgggacatacagaacgagccaaatctggaaagcatatacagaaaataaatgctgagttttcacctggattctcatgcagaacaaaattctcatggcggacgactcacaattgacaggatgtccgtatccagaaaactgcagcatgtgcaacaagcgtctggagatgggattacacctagtgtttggtttgaggaatcactccatccaaaaagaagtggagcgacctcgttattcatattagtactaactaactattatgctttctctaccctttcgacaaatcggtttggaaccaagtctagcttccttcacacattaagattctttaatgtttccctcaacatggtacttactgaccataagtcagtgattttgcatcaaatattaatgattaaaacgattccatcacagtctcagttttaccatttctgataatgcagactagatttcaagtagttacagaaagaattgtagtgggccgtggtgtgcaacaagctgctgcacggttct

SEQ ID NO: 25625 - DNA, 494 bp, Zea Mays
ggatattttgagctatggggctgatccaatcccttgtttgagctaggatataacctgagtgaagctgatgcatgaaagccatgtaggctagtttatgtgttgctggcacactgtgaacacatctccactgcatgttgagctagtacagtgatatctgtcccatgttcagttgtttaaaaggcttaatcgagtgaagttttcctccctgccctgaactctacctacagaccactgtaaagagtatgaaattcgtgtattcttgctggtgtaaccccctcccccagtccttagctttgctctaacccagaaccgagtgcatcaagccctaggtggtgaccacaactgctgatcccccacttcaccatggccagaacacctagaagaagtggtgtttgaaggagaagtctactccagtggctgttgatcaagtggaggagccatctaactgggtatttaatagagggatctggaaccccttctctgcaacaaaggca

SEQ ID NO: 25626 - DNA, 1417 bp, Zea Mays
aaatcgtcaatacaaatcgtatttctaccgacactgtagaaatacgatatctagtgacggttttattaagaaatcgctattaaaaatagcacagacggttgataactgaatccacatgtaaaaatatattgtcctgtagattttaagcttttttttactagtgatgagctctgccacacttgaaaccatccaaattctccaccgcatccacctcgatcctcttgttggcagcaccagcagcgtcctcgtattgagttcatagcagcgaagccatcatcataatgatttcagccactgttcttgtatgtacatgtagaatccgtatgttctgtcctcgcccccctgtggatcaagcacaggcccggcaatcgcagcggcggcgaacatggcggcagtgacgctaggaacagaaaccgacgggtccatactctgcccatcctcgttgaactccgtggtaggaatcaagccgacggtgggactcacgagccgggccggcgtcatccccgtctctccgcggcaggacacagtcgggccgatctgccgcacagtggctgacgccgtccacgtgctcgatgcgatcgtgggctacgacgaacctgacgcggtggctacgggagcagcggccaaatacatccctgacggtggatacgcgcagttcctcaagatggatgggttgcggggcaagcgaattggcgtcccagctgggttcttcggcttcccagatggatccgtcaggcagatggtgtaccagcagcacctcgacacgctcaggcgacatggagcggtggtgacagaggacctttcgattgcgaacctggatgtgatacagaacgccactgtgagtggggagctggcagctctagcagcagagttcaagatcgccctgaacgcatatctgtcgtccgatctgtcacgctcccccgtggcctccctggctgaactaatagtgttcaacaatgcgcacccggatgaggagatgctcaaacagttcgggcaactcatcttcttggtggcccagaacaccaccggcatcggcgcggcagagacggcggcgatccagcagctggacgatctgacggcgggtggcgtggagaaggtgatgcggcagcaccagctggatgccatcgtggcgccagactcgagctcggccacggtcctcgccatcggtggcctccctgggatcgccgttccggctggctacgatgagctgggagcaccctttggtatcaccttcggcgggctcaagggctatgagtcaaggctgattgagatcgcgtatgcgtttgagcaggctactaaggcaaggaagcctcccatgttcaagaactagagaacatatatacatatatatatactattcaccatctaaggtgatgaattcaacagtgcataagcatatcacgtggctcttttctcc

SEQ ID NO: 25627 - DNA, 1093 bp, Zea Mays
ggcacggaggagggacgcgagaggcgacgcgtgcggcgagcaagcggcggcgtgcggcgagcaagcgactacgccgtggagtgcgacctacagcctgcagcctccaggagtaaagttcataagaggaagaggaatgggtaaagaaacagaggtcaatgaatatgaactacagagggctgccaacataagagaaaatatgaagaggatgagatctcttaatctccctgtacctagtactatggttaatgaagcaaatggatcacatcgagccagcaagaaacacaagacaaggaaattagcatattcaactaatggtcctactttgcgatcaaggactcaaagggatattgttgacgataaccatgaggatagtacttctgaaaatagttatggagaatctaaatatcccatcaatgatgaagagcaacctactgggcatcataatataaggaaaggaaggggcccaaccttgaagaagaacatatattcaaatagtggtgggcctaaaatctccattacccttaatgaatatggccaacctgttggtaggaacatcaaagagtttggtaatttcataggaactttggtgaggaaaaatatcccggtttcttctgaggattggagactagttgattctaaaaagaagttcgagttatggacaaaagtgaaggaatactatgagttggatgaatctggtatagattatgttataacatctgcagcaaaaaagtggagagagtttaaggctgacctaaagatgaaatactttgatgaaacattgagttttgaagagcttattgctaaaagggatcaaagggtgaaagaatctgattgggagtggttgataacttattggatgtctccagaagctgaagttcgtacaaacagaggtaaagataaccgttcaaagttgactatgtcacatgcagctggcagcaaaagttatgctcgtgtggggcatgaactggccgaacaacaaggacgtcctgcgagaagagatgaaatatatgttaaaacacacacgcgtaagaacaaagaaggggatattgtacctctacctggagcagaaatatttattgtgaacaaaagataa

SEQ ID NO: 25628 - DNA, 815 bp, Zea Mays
aaaacaatcaaggtaagataggtgatgtttcaatagaatggttgaagtaagaattcattaccgagggaagttataaggaagcaacgagattaccacgggtgtgcaaaataaaatgaccgctcatggattattaagaaacaagggtggtcaaggatatgttaactgaaatgtcttgaacagtcatcggggtatgaaagataagcatacataaaaatatgagagtatgcaagactccaaggacacgagcatactaagaccaagggaatagaaattgtcgaaaggtaatgacttaacaacgaaatatgaagggatctcaaaagacgggaaggtcatgaaaacaaaaacagaaatgtaaaaataggcaaccgagtttttagggttaagtgtttgaattaaggggtaagggtatggaagaatccaaaagatgcagcatgtcaataccaaaggaataaagattgccaaacggtagcaacttaatgacgaaagaggagagaaccccaaaaagacaagaaggttatggttagggggcatatacaaagatgtcacaagcacaagagtaagattagatctagtagattgagaaaggttagaccataatagaataaaatacttttggcaagggggcatatagaagcataacatagaattagctgatgtggctaatattttgaagcagcaacaaggatgaggtgaagtaataatcaataagtccttaaaacggccaatgctactctaggttaacggtcctacagtcagcacggctttgataccacttatgtcacacccggttttgaaggtaaaccgaatgcgaacca

SEQ ID NO: 25629 - DNA, 832 bp, Zea Mays
gacttttgttagttggtttgtatagagtttgaacgggtaagtcgccttatttagagtccttaaaagatacgcctagaagcgtggcgtcatcgcttttttagaaagaaccttgtgtatttttaaaatgaaccagcagtctagatggcctcggacgcggcctccagctccacgcactccgacctcctccaggtacgcccgccaggccccatcctcctaacccgatcgctactctcctgaaccctgtgtcgtcacaagagcgcgaggaggtcgtggcggagcgcgctctacactgtgtgtatgcggaggcggtggccatggcagaggagaaccatgttgttgccggcgccggccagaagctctactggtcccggcaaaccagagccactgcggttcaacgcctgcgtttcgcggctcattgctgcctgcacgctctgacatgtaccctcccaaaaaagagggatgaaaacaaccacacactgtgggactcctgaagacgacatttgggttgatggtgaattcagttgtatgagccagagaaccaaacattatgggaggagaaccagtttctaaaaatggtatctaaaaggatgactcggggttgaaggagcttcatataactaaacctagcatggctgtttaggaaaagatggaatggaactcaaatttttgtggccgcacaagtgtggagacttgaattcatatatacttatttatgctcaacgttagcacaaacagttaatgactaagtttttcaattagtatttcattttggatttagaggacacttgtgtatgagttattttacaatgcttatttatgagatatgagtgac

SEQ ID NO: 25630 - DNA, 1629 bp, Zea Mays
gacttttgttagttggtttgtatagagtttgaacgggtaagtcgccttatttagagtccttaaaagatacgcctagaagcgtggcgtcatcgcttttttagaaagaaccttgtgtatttttaaaatgaaccagcagtctagatggcctcggacgcggcctccagctccacgcactccgacctcctccaggtacgcccgccaggccccatcctcctaacccgatcgctactctcctgaaccctgtgtcgtcacaagagcgcgaggaggtcgtggcggagcgcgctctacactgtgtgtatgcggaggcggtggccatggcagaggagaaccatgttgttgccggcgccggccagaagctctactggtcccggcaaaccagagccactgcggttcaacgcctgcgtttcgcggctcattgctgcctgcacgctctgacatgtaccctcccagtaagtttctatggcctaggcatccttgtttgtgaacaagcgtctagctgtgaaaagttttagaaatttagcagtatagcagttacagttttaccttaattcctatgccactgagagctacaaactcaaagatacatcacctactgtatatttgagaattctcaatggtaacttttgatgtttcagctacggagaaacatgtttattgacaaatattctataccttgatttatcgcattatagggtagcataaagcatggaaaagaaatatgaaaaaacaaatagttcatcattagtttcaaattagctaatatctagcttgccccaaattcacattcaagcttgtcatctgacaaaccatatacccttgacggctgaaagtaccaaccttatcgctccaaatctgtttgttcagatatgcatgtcttgacttattccttcacaaatagtagactactgttacttattgtcttaaacaagaaccttcagcaactcccttcattctacgttgcaccttatgtatatgtctttgcttggttatggtcgtaagctttgatctaatttcttccaaatgaataaaaaaagtgtgttgatatttgacggtttgggctccactttggcaatcatgcctgcttgcagtgtcaaacaacaaagtcgcagtaattgtgttcagcttgtttgttcttgccgtatgtagaaaaagagggatgaaaacaaccacacactgtgggactcctgaagacgacatttgggttgatggtgaattcagttgtatgagccagagaaccaaacattatgggaggagaaccagtttctaaaaatggtatctaaaaggatgactcggggttgaaggagcttcatataactaaacctagcatggctgtttaggtaagatgttacatccatataacctttacgatatgtcacaatgtgcggtgttgaactgtctctaactactaattattgccttctccaagtttttgtacaggaaaagatggaatggaactcaaatttttgtggccgcacaagtgtggagacttgaattcatatatacttatttatgctcaacgttagcacaaacagttaatgactaagtttttcaattagtatttcattttggatttagaggacacttgtgtatgagttattttacaatgcttatttatgagatatgagtgac

SEQ ID NO: 25631 - DNA, 1928 bp, Zea Mays
gacttttgttagttggtttgtatagagtttgaacgggtaagtcgccttatttagagtccttaaaagatacgcctagaagcgtggcgtcatcgcttttttagaaagaaccttgtgtatttttaaaatgaaccagcagtctagatggcctcggacgcggcctccagctccacgcactccgacctcctccaggtacgcccgccaggccccatcctcctaacccgatcgctactctcctgaaccctgtgtcgtcacaagagcgcgaggaggtcgtggcggagcgcgctctacactgtgtgtatgcggaggcggtggccatggcagaggagaaccatgttgttgccggcgccggccagaagctctactggtcccggcaaaccagagccactgcggttcaacgcctgcgtttcgcggctcattgctgcctgcacgctctgacatgtaccctcccaaaaaagagggatgaaaacaaccacacactgtgggactcctgaagacgacatttgggttgatggtgaattcagttgtatgagccagagaaccaaacattatgggaggagaaccagtttctaaaaatggtatctaaaaggatgactcgggcaacatgtcaggcgattaggcatgtgtgctatatggggctgagtgttggcctactaagagacgacatatccaacaactaagtgcttaccctaacttgcttgggactaaaagactatgttgatattgatgttgtgatggtgtggaggcaacacaacaagagtggacccaacatatgactttagtgatgtttgtttagtggccagaagactgtgcaggtctatattccttgttgataagttcccttctgtgaagcagactgatctatcatgcctaaccactcgccttctccatcgcagcttgttatatttctgcttgctttagtgtctgtaccttggatgttgattccaaaacctcttcttttgaagaaacaaaatcagcatagtactcgtatatttttattactattatactatttacagggtagccgtggaatatgtgttgcaattttcctgtagcattggaagaggagcattttggtgcttctgccggtttctagttgttggtttgcaaccaaccggtaacttttattgtcacctattttacccaaaatagcttgacatgtcatttgatggttttcaagaaatgtgttgtggtttcgaaagaatgataatgtcatataaaaaaatcacatatctatgatttttagtccggatagctgccttcctagcattacctatttattgaaaaattatagcagtctttcaaattcacatgataataacaaagtagtatcaatgaactaaataatgtgtccacctgtaagcaaaagatgtctggtttgctggagcacttgtctcgggatacacagaggcaaagtttggatcatgatattggtccaactattgctcatttcttgaaatgtttcatgggaacatttcttggaaagtttggatcatgatattggtccagctattgtttgatgagatagcaaatgttcgagaacggttgttcgacttcttggtgaatgagatgatagacattggtggatcatgcagggttgaaggagcttcatataactaaacctagcatggctgtttaggtaagatgttacatccatataacctttacgatatgtcacaatgtgcggtgttgaactgtctctaactactaattattgccttctccaagtttttgtacaggaaaagatggaatggaactcaaatttttgtggccgcacaagtgtggagacttgaattcatatatacttatttatgctcaacgttagcacaaacagttaatgactaagtttttcaattagtatttcattttggatttagaggacacttgtgtatgagttattttacaatgcttatttatgagatatgagtgac

SEQ ID NO: 25632 - DNA, 875 bp, Zea Mays
agtcactctctctcctagccatgccctgagacttacataggggaccatgctgtcagcgccaacctcccaacaaaatgcccctaatccagcgcggcgtaaaaaccatggccgcagtctccccagcttggtaggtcaccgagtccatcctgtcaagcctataaggaaggggaagggcgtcctcggccacgtgcacacacctcacaaaaccatagggcgctttggctctgagcaccgcaccatgaagagagaaagggagggaaggcgaaggttgccaccgtcggactcgcgctacgctggtgtccagaagctgtggatacccagggaggctcatcggggcctatcggacgaatacgcggtgttgccggggtcgagaatcgagcggcccaatgacgatttctcgtcgcacttcaacgtccaccgccataccacgcttgaccgtgggcggagcttgtggtttcgcaatccctgacaagcaaacaaccgaggatccctatactcaacaggttgaaaatacagagcaggagctcattgaaggcaagttgtgcccttgatcacttttcttgaccaaataatgttcctgttaatcattatgatctgcataggttaaatttgataggacccaataggtcaccctagtttggtcatctttataccttgtaaccactgaacttttgggtagtacaagctattgcttttgtggttttgggtgttaagatacacatttttcatgatcatgccttttattaccaatgagttatttactattcatgacaagatcattatattaattggaacatggagcgaccacccgggaaaatagtgctaccacaagggtggtatgggacgcccttggctaactaattaggaaaactagt

SEQ ID NO: 25633 - DNA, 1197 bp, Zea Mays
cttccctcttcatccgctcgctccgtctcccgcgctcctgccatcccctccggccactccgaccttccgtggagggagattccttgcccggtgggaatctcagggctgatttgaagactgtcggcaaagatccatcgaggaggcggcgattccatcccgaatcacgacatccggcctaagcgaaggagctgaataggcgcgcatcaccctcgtcgtcctagccgtcaccggctccttgctagtccccgaaccctatccctccgccgtcctcaaggtgcaggtccacctgatgctacacaactcgcctgccgagctcgacgtcccatcgtcggcttcctctctccagggtccaggcaagtcctcgaaccctttccctccgcccgtcccttagaggggcaggagcatacgtatcatcgtcttttgcaataactagtaacggttgcgcgccttgcgtgcgtggataaaaaattgcacgcatggataaaaagtgtacatggataaaaaacgtaatgtaaatgataattacagtattatgtcgtttagaagatgtgcatacacattttgcaattgtagagataattcagtaagctgttcatacacattttacaaaggtagagaaggggctaattctgtctttttcatcttctgaaattagtttcttatatttacacaatttcttctaaagttaaacatgaatacatccataattataccgtgtgcataaaataagcaccttagaacttcatagagtgttcatgtagaagcctagaaggcaatatttctttttccaaattcatacctgttatgctgtcgtggaatactttgtttgtagcaccattacctccaatgcaaggatgtttagtatgggcgtctggaagcagatgcgcagaaggcacaagctgcttcagtgaaggggcagaagcagagctaggcgcagaaggcacaagaagatcaagttcaggcgcagaaggcacaagttgtgtcttctctaattttttgtttggaaagtgtcaaaaattaatgactgatgtgatccttttccttattttcttttctatttttggtatatatacatatattagatttggaaggggtgtaacgtatgtaacgtatgtgaacatgattttttggtatatatatcagatttggaatcagatctgaaatgatgttatatatatttttcttattttcctttct

SEQ ID NO: 25634 - DNA, 305 bp, Zea Mays
atcaacaatagaagtttcaactaatcagcttactaggatgaagcctgcaacggtggcactgctcattttgttgaacatgatgtgcatagttgcatactttgatcatggaacgatggctgaagaaaccaccttgctggcaaattcgtatggaagaaatgaaggaaccaagggcatacatcatggaagaaagctgatggacaatagtattggttcaaaccagttgtttcttactgagataagactacttgataaaaaaactcggccgggagggaactacacgccaccaccggtgataccagcaccag

SEQ ID NO: 25635 - DNA, 880 bp, Zea Mays
gccctagttgcaaggcaaaacccactcgcattgtcaatcaatgtttcttatatataccacaattgtcttcagtacacatgcatacacccaagcttggcatgatacatgcaatattgaaaacaatatggcaaaggaatatgcaattcttatagtccttattagcatggtacttgtggtctcctgcaatgttgtggacggtagtgcagcagacatgaggcatgcaacgcttccacgcaaaggtctaaaggaagacatcaagctcgccatcaatggagtgaattctccggttagcagtatatctggacaggcatctagcaactctgaaaccggcacagacaacgatatgtcaagcgctacagcctttacctcaaaggtgaccactacccaaggtagccaccgtggctacgagatccacgggttccaaggcagtaagatcagccccccatgatgatcgagtgattcatattagggcaatcaaatcatcagttattaatgaacaataggtatctataagggaaccaactatcaaaacaacatatctaataatcatatgttgtacttgtgtggatgtgtgtagtaccaagttgtgtattacaagttgtactacagtgtgatggcgttttccatgtggtatagcataactatgaagctttggattctcagtagtttccaaagcacatgtttatgatacacatgtattgaactgctagtacaaataaagtcgatgtctatcaatacttaatcctatcttatatgtgaaatatccaataaaatacatatgtggtactcttaccattctacataggacaagcacttattttttatttcaaaacccacaatatcagcatagaaattatccttacgtgatatgtaaaatttg

SEQ ID NO: 25636 - DNA, 3776 bp, Zea Mays
gtccctccggcctccagcctccagcctccaggccagcaagcaaacagtagcgcagtatatattggcaaagcatccctttctcgtttcctcgctcgcagtcgcaacacgtttccacgccgtccctccgcttacccggccggccatccccattcccatccttttctcctcctcctcctcagccggccaagctcgctaccgcctcggcgctcctcctccggctcggaatgcgcgatgcgagggctccgcagctccagcagcgagcccatggcggcgtcggcgtcgtcgtcgtcctcctcgtcctcctcgcaggcgccgccagcggccagcagcaggcgcagccgccgccggtagtacctccggcggacctgccggacgtggagaggcagctcaacaacctgaccaacgacatcgcagtcaccatctccgacaagttcagcttctgcgttgccgacctggaggaggactggaacgaggccttcaactacacgtccgacctcagcttcgtggatcggtgcctcacggagacccaaggcgacctggtccagcgtctatgcacgccggacgaagtgaagttctacctggcaagcctgtacgaccgcgacggcgacaagaacatcaacctcaagacgaacataaactgcaacatctcgtcctgggggagggggtgcgacgccggatgggcctgcgccgccgacccggtggtcgtcgttcgggatcccaggaacggcgtcccgctcagagcgaggggctgccaggcatgctgcgagggcttcttctgcccgcgcggcctcacttgcatgctcccttgtccgctaggctcctactgcccacgcgccacggcgaaccagacgactggcctctgcgacccgtacaagtaccagatcaccccgaactcgacgaacggttgcggaggcgctgacatgtgggccgatatccagagcaccgaagagatcttctgcccggctggttaccactgtccgagcacaacaaggaaggacaactgcagcactgggcactattgtaggctcggttccaccgctcaagagaagtgcataataaagggctcctgcgatgagaacacggagaacgaaaacgtcaagatccttggagcttgcatagtgggtgctctgtgcctgctgctactggtcatatacaactgctcggacaagttcctcagcatccgcgagcggaggaaagcgaggtcgagggagaacgccatccagctggcccggcagcagctgaaggcgcaggaggggtggagggcggcgaaacagtttgcgaggaggcatgtgagcggcatgcagggccatctctcgcgcacgttctcgagacgggtgtcgtttcggcagccggtggacccgcacagctccagccgcagggtgcaggaggcgccgctgatgacgcaggagatgtcagactctgccgtgtttgcgtccgagagcaggagcgagatcacggaggtggtgatgccgtcggttgttgtcgacgtcagcgacggcggagaggtcgtcgtggtggacacgaaggaggacaagcctgcgcccaagggaaagcacaggtccacccatacacaggtgttcaagtacgcgtacggcgagatcgagaaggagaagttccagcagcagcaggagagcaggaacctgaccttcaccggggtggttgccatggccaaggatcagcagagggagataacgaggccgttgatcaaggtcgagttcagggacctgacgttgatgctcgggaataataagaagaagaagctgctgaggtccatcaacggcgagctccggccggggcgtgtgactgctgtcatgggcccgtcaggcgccggcaagaccacgttcctcaacgccgtcaccgggaagctcaacggctacaagatgacgggctctgtcctcgttaatggaaaggacgtcaacatccgctcttacaagaagatcattggcttcgtgccgcaagacgacatcgtccatgggaacctcaccgtggaggaaaacctctggttcagtgcaaagtgcaggctacctgcaagcatgaagcatcgcgacaaggtgctggtagtggagagagtaatcgactctctggaccttcaggggaccaggaactcgttggtgggaaccgtggaaaagcgcgggatttctggcgggcagaggaagcgcgtcaacgtgggcatcgagatggtgatggagccatcccttctaatcctggacgagccaacgtctggcctggacagctcctcgtcgcagctcctcctcagagctctccggcacgaggcgctggaaggcgtcaatgtctgtgctgtcgtccaccaacccagctacacgttgtacaacatgttcgacgatctgatgctgctcgcgaaaggaggcttggtggtctacaacggccccgtaaagacggtcgaggagtacttcacgacgactctcgggatccatgtccccgaccgtgtcaacccgccagaccactacattgacatccttgagggcatcgttaagcctgagtctgctggcatcatcaaagccaagcatctgccagtgcactggatgcttcacaatggttatgaagtgccaagcgacatgcaggacgatgccaaggagatcggcgaacagaccccacagttgaggtccggctcctcagtttctgctggctcaacccctcactgcctccccctcaggaacgccttcgcagaagagcgcgaccgtctcgagcaacatttgtcgaaacccaaggacctgtctagcagaaaaacggcagggatactcatgcagtacaaatactacttgggaagggtcacgaagcagcggctgcgtgaagctaggctgctcatggttgatttcctgatacttggcctagctggtatctgcttagggacgatagcgaagctcagtgacaagacattcgggatgcctggctacatatacactatcattgcagtttctcttctgtgcaagattgcagcactgcggtcattctcactggagcggctgcagtacttcagggaaagagagtctgggatgagctctctggcatactttcttgctagggacacgattgatcatttcagtacggttgtgaagcccatcatttacctgtctatgttctactacttcaataacccaagatcaacgattgccgacaactacatcgtgctcctcgcgcttgtgtattgtgtgacggggatcggatacactttcgctatctgcttcagtcctggctcagcgcagctgtgttctgcacttgtaccggttgttctgaccctgttagccactcaaaagagcactccgacattcatcaagagactgtgctactcaaaatgggcgttggagggcttcataattgtaaatgccaagaagtatcctggagtctggcttataactcgctgcggcctgctgttccagaatcagtttgatatccacaactacaagctctgcattctgattttgttcatgtatggtctcttcttcaggatggtggcatttgctgcaatgattttactcaagaagagatgaatgtagtagtttaggtgtaccgtttagttcatatctaatttcttcattcatttgcacatgtgtaaatcatttcggatgagaggttttatagcactgaccagtgtacagatgagaaaaaaaggcaaatacaaattcagattttttttggcattattctttttatattaggtgtacatccccatctctgaaatcctgtgcttgcactagaaaaaagaggattcaacaaaattgttacccgaactattagatctaaagtgtaccatacat

SEQ ID NO: 25637 - DNA, 3554 bp, Zea Mays
gtccctccggcctccagcctccagcctccaggccagcaagcaaacagtagcgcagtatatattggcaaagcatccctttctcgtttcctcgctcgcagtcgcaacacgtttccacgccgtccctccgcttacccggccggccatccccattcccatccttttctcctcctcctcctcagccggccaagctcgctaccgcctcggcgctcctcctccggctcggaatgcgcgatgcgagggctccgcagctccagcagcgagcccatggcggcgtcggcgtcgtcgtcgtcctcctcgtcctcctcgcaggcgccgccagcggccagcagcaggcgcagccgccgccggtagtacctccggcggacctgccggacgtggagaggcagctcaacaacctgaccaacgacatcgcagtcaccatctccgacaagttcagcttctgcgttgccgacctggaggaggactggaacgaggccttcaactacacgtccgacctcagcttcgtggatcggtgcctcacggagacccaaggcgacctggtccagcgtctatgcacgccggacgaagtgaagttctacctggcaagcctgtacgaccgcgacggcgacaagaacatcaacctcaagacgaacataaactgcaacatctcgtcctgggggagggggtgcgacgccggatgggcctgcgccgccgacccggtggtcgtcgttcgggatcccaggaacggcgtcccgctcagagcgaggggctgccaggcatgctgcgagggcttcttctgcccgcgcggcctcacttgcatgctcccttgtccgctaggctcctactgcccacgcgccacggcgaaccagacgactggcctctgcgacccgtacaagtaccagatcaccccgaactcgacgaacggttgcggaggcgctgacatgtgggccgatatccagagcaccgaagagatcttctgcccggctggttaccactgtccgagcacaacaaggaaggacaactgcagcactgggcactattgtaggctcggttccaccgctcaagagaagtgcataataaagggctcctgcgatgagaacacggagaacgaaaacgtcaagatccttggagcttgcatagtgggtgctctgtgcctgctgctactggtcatatacaactgctcggacaagttcctcagcatccgcgagcggaggaaagcgaggtcgagggagaacgccatccagctggcccggcagcagctgaaggcgcaggaggggtggagggcggcgaaacagtttgcgaggaggcatgtgagcggcatgcagggccatctctcgcgcacgttctcgagacgggtgtcgtttcggcagccggtggacccgcacagctccagccgcagggtgcaggaggcgccgctgatgacgcaggagatcaggaacctgaccttcaccggggtggttgccatggccaaggatcagcagagggagataacgaggccgttgatcaaggtcgagttcagggacctgacgttgatgctcgggaataataagaagaagaagctgctgaggtccatcaacggcgagctccggccggggcgtgtgactgctgtcatgggcccgtcaggcgccggcaagaccacgttcctcaacgccgtcaccgggaagctcaacggctacaagatgacgggctctgtcctcgttaatggaaaggacgtcaacatccgctcttacaagaagatcattggcttcgtgccgcaagacgacatcgtccatgggaacctcaccgtggaggaaaacctctggttcagtgcaaagtgcaggctacctgcaagcatgaagcatcgcgacaaggtgctggtagtggagagagtaatcgactctctggaccttcaggggaccaggaactcgttggtgggaaccgtggaaaagcgcgggatttctggcgggcagaggaagcgcgtcaacgtgggcatcgagatggtgatggagccatcccttctaatcctggacgagccaacgtctggcctggacagctcctcgtcgcagctcctcctcagagctctccggcacgaggcgctggaaggcgtcaatgtctgtgctgtcgtccaccaacccagctacacgttgtacaacatgttcgacgatctgatgctgctcgcgaaaggaggcttggtggtctacaacggccccgtaaagacggtcgaggagtacttcacgacgactctcgggatccatgtccccgaccgtgtcaacccgccagaccactacattgacatccttgagggcatcgttaagcctgagtctgctggcatcatcaaagccaagcatctgccagtgcactggatgcttcacaatggttatgaagtgccaagcgacatgcaggacgatgccaaggagatcggcgaacagaccccacagttgaggtccggctcctcagtttctgctggctcaacccctcactgcctccccctcaggaacgccttcgcagaagagcgcgaccgtctcgagcaacatttgtcgaaacccaaggacctgtctagcagaaaaacggcagggatactcatgcagtacaaatactacttgggaagggtcacgaagcagcggctgcgtgaagctaggctgctcatggttgatttcctgatacttggcctagctggtatctgcttagggacgatagcgaagctcagtgacaagacattcgggatgcctggctacatatacactatcattgcagtttctcttctgtgcaagattgcagcactgcggtcattctcactggagcggctgcagtacttcagggaaagagagtctgggatgagctctctggcatactttcttgctagggacacgattgatcatttcagtacggttgtgaagcccatcatttacctgtctatgttctactacttcaataacccaagatcaacgattgccgacaactacatcgtgctcctcgcgcttgtgtattgtgtgacggggatcggatacactttcgctatctgcttcagtcctggctcagcgcagctgtgttctgcacttgtaccggttgttctgaccctgttagccactcaaaagagcactccgacattcatcaagagactgtgctactcaaaatgggcgttggagggcttcataattgtaaatgccaagaagtatcctggagtctggcttataactcgctgcggcctgctgttccagaatcagtttgatatccacaactacaagctctgcattctgattttgttcatgtatggtctcttcttcaggatggtggcatttgctgcaatgattttactcaagaagagatgaatgtagtagtttaggtgtaccgtttagttcatatctaatttcttcattcatttgcacatgtgtaaatcatttcggatgagaggttttatagcactgaccagtgtacagatgagaaaaaaaggcaaatacaaattcagattttttttggcattattctttttatattaggtgtacatccccatctctgaaatcctgtgcttgcactagaaaaaagaggattcaacaaaattgttacccgaactattagatctaaagtgtaccatacat

SEQ ID NO: 25638 - DNA, 3757 bp, Zea Mays
gtccctccggcctccagcctccagcctccaggccagcaagcaaacagtagcgcagtatatattggcaaagcatccctttctcgtttcctcgctcgcagtcgcaacacgtttccacgccgtccctccgcttacccggccggccatccccattcccatccttttctcctcctcctcctcagccggccaagctcgctaccgcctcggcgctcctcctccggctcggaatgcgcgatgcgagggctccgcagctccagcagcgagcccatggcggcgtcggcgtcgtcgtcgtcctcctcgtcctcctcgcaggcgccgccagcggccagcagcaggcgcagccgccgccggtagtacctccggcggacctgccggacgtggagaggcagctcaacaacctgaccaacgacatcgcagtcaccatctccgacaagttcagcttctgcgttgccgacctggaggaggactggaacgaggccttcaactacacgtccgacctcagcttcgtggatcggtgcctcacggagacccaaggcgacctggtccagcgtctatgcacgccggacgaagtgaagttctacctggcaagcctgtacgaccgcgacggcgacaagaacatcaacctcaagacgaacataaactgcaacatctcgtcctgggggagggggtgcgacgccggatgggcctgcgccgccgacccggtggtcgtcgttcgggatcccaggaacggcgtcccgctcagagcgaggggctgccaggcatgctgcgagggcttcttctgcccgcgcggcctcacttgcatgctcccttgtccgctaggctcctactgcccacgcgccacggcgaaccagacgactggcctctgcgacccgtacaagtaccagatcaccccgaactcgacgaacggttgcggaggcgctgacatgtgggccgatatccagagcaccgaagagatcttctgcccggctggttaccactgtccgagcacaacaaggaaggacaactgcagcactgggcactattgtaggctcggttccaccgctcaagagaagtgcataataaagggctcctgcgatgagaacacggagaacgaaaacgtcaagatccttggagcttgcatagtgggtgctctgtgcctgctgctactggtcatatacaactgctcggacaagttcctcagcatccgcgagcggaggaaagcgaggtcgagggagaacgccatccagctggcccggcagcagctgaaggcgcaggaggggtggagggcggcgaaacagtttgcgaggaggcatgtgagcggcatgcagggccatctctcgcgcacgttctcgagacgggtgtcgtttcggcagccggtggacccgcacagctccagccgcagggtgcaggaggcgccgctgatgacgcaggagatgtcagactctgccgtgtttgcgtccgagagcaggagcgagatcacggaggtggtgatgccgtcggttgttgtcgacgtcagcgacggcggagaggtcgtcgtggtggacacgaaggaggacaagcctgcgcccaagggaaagcacaggtccacccatacacaggtgttcaagtacgcgtacggcgagatcgagaaggagaagttccagcagcagcaggagagcaggaacctgaccttcaccggggtggttgccatggccaaggatcagcagagggagataacgaggccgttgatcaaggtcgagttcagggacctgacgttgatgctcgggaataataagaagaagaagctgctgaggtccatcaacggcgagctccggccggggcgtgtgactgctgtcatgggcccgtcaggcgccggcaagaccacgttcctcaacgccgtcaccgggaagctcaacggctacaagatgacgggctctgtcctcgttaatggaaaggacgtcaacatccgctcttacaagaagatcattggcttcgtgccgcaagacgacatcgtccatgggaacctcaccgtggaggaaaacctctggttcagtgcaaagtgcagcatcgcgacaaggtgctggtagtggagagagtaatcgactctctggaccttcaggggaccaggaactcgttggtgggaaccgtggaaaagcgcgggatttctggcgggcagaggaagcgcgtcaacgtgggcatcgagatggtgatggagccatcccttctaatcctggacgagccaacgtctggcctggacagctcctcgtcgcagctcctcctcagagctctccggcacgaggcgctggaaggcgtcaatgtctgtgctgtcgtccaccaacccagctacacgttgtacaacatgttcgacgatctgatgctgctcgcgaaaggaggcttggtggtctacaacggccccgtaaagacggtcgaggagtacttcacgacgactctcgggatccatgtccccgaccgtgtcaacccgccagaccactacattgacatccttgagggcatcgttaagcctgagtctgctggcatcatcaaagccaagcatctgccagtgcactggatgcttcacaatggttatgaagtgccaagcgacatgcaggacgatgccaaggagatcggcgaacagaccccacagttgaggtccggctcctcagtttctgctggctcaacccctcactgcctccccctcaggaacgccttcgcagaagagcgcgaccgtctcgagcaacatttgtcgaaacccaaggacctgtctagcagaaaaacggcagggatactcatgcagtacaaatactacttgggaagggtcacgaagcagcggctgcgtgaagctaggctgctcatggttgatttcctgatacttggcctagctggtatctgcttagggacgatagcgaagctcagtgacaagacattcgggatgcctggctacatatacactatcattgcagtttctcttctgtgcaagattgcagcactgcggtcattctcactggagcggctgcagtacttcagggaaagagagtctgggatgagctctctggcatactttcttgctagggacacgattgatcatttcagtacggttgtgaagcccatcatttacctgtctatgttctactacttcaataacccaagatcaacgattgccgacaactacatcgtgctcctcgcgcttgtgtattgtgtgacggggatcggatacactttcgctatctgcttcagtcctggctcagcgcagctgtgttctgcacttgtaccggttgttctgaccctgttagccactcaaaagagcactccgacattcatcaagagactgtgctactcaaaatgggcgttggagggcttcataattgtaaatgccaagaagtatcctggagtctggcttataactcgctgcggcctgctgttccagaatcagtttgatatccacaactacaagctctgcattctgattttgttcatgtatggtctcttcttcaggatggtggcatttgctgcaatgattttactcaagaagagatgaatgtagtagtttaggtgtaccgtttagttcatatctaatttcttcattcatttgcacatgtgtaaatcatttcggatgagaggttttatagcactgaccagtgtacagatgagaaaaaaaggcaaatacaaattcagattttttttggcattattctttttatattaggtgtacatccccatctctgaaatcctgtgcttgcactagaaaaaagaggattcaacaaaattgttacccgaactattagatctaaagtgtaccatacat

SEQ ID NO: 25639 - DNA, 307 bp, Zea Mays
ggataactatcctcctggcatctcgggcgcagcacgttcctccattccccggccatctccgtgaaccgagaaagagagagagggctgagagccgcctcggtcggtgtcgggcaaagtcatgacgccaaccgcgtgaagaagctgagggaggtcctcaagtggtgttggtcccgtacggtgcattgccttgcatcggggtggtcggagcgcggggaattgcacaccgtagttgatctcgcctccgcgcaatctagtcaccgcggtcgggcccattcgctgcacaatctccgaagagcaagtggatgag

SEQ ID NO: 25640 - DNA, 316 bp, Zea Mays
aaaccgaccgagccacaaacttcacccctgcattttctcccttctccgtccaggccctggtgcccgtgaatctcgtgcggcaagtgggcgccaccgccggactacgccaggtgcccagttcctcgtcgagaattgtagctcatagcccaactttcattggagggccagatttcacaaaatacaagggggagattttgatctttattttttggaagaaggttgctacaaaggttggtttatgttttcttttaccaatttttgtttatccatgatatatttagttggtaggaaatgcttgtttatgtttctcttgcca

SEQ ID NO: 25641 - DNA, 1403 bp, Zea Mays
gtgaagttcatcgattcactccatcgaacagccgccagtgtcgttcacctcgccactcatcctcagtctcttgaacccagccatccctgctgctcgcttccctctcttcctccctgctcgcctcgacgaagccaagtctggccatcaccttcctagcctcgcgcgctttctccctgcgcaggacgccaccgatcctgctccatcccggacgtcgtggtctccgacctcgagcacccagctcgctccctccctagcaacaactcctagcgcttggccttcctctacgcgagcgcttagagctgtgcctatcgtgtgctggtctcagctaagcaccgtctgctccagcgtcactcgccccctggccaccggttcgtcctcagtccacccctgcctgctcggctcagcgtggaggctggccatcggacgccaccatcttgtgccaagttccaggcaattcttcccctgaagtccggcactagctatggtggtcggcgttcgctcagaccgagctctggcctccggctagactcgccagccacgctagctctgcgtccacctcgtcatgggctcttcggcaactctgtccaagtaacagcaccagcctccctgggctcgtctcctcgtccagcgcccctcgttcctcgacctcgctgcgtggcatcgcaatcggctgctaactcctgtcgccaagcaagctaccagtccatgcacgccgtcgtctagtccctgctcccttcaaggccattgtcttccaccacccgactatcatctccatgggtgctagtcgtcctcctcaagctccgtcatggcgtcatggtgcttgactgcactccactatctcacagcactggctgtagaccttgttggccctccccacgttgaatcagcaagctccgccatcgtcactcagctacacgcctccacctcgatggcccgtatcaggtgcattgcacgtaagtctgtgatcccctttttgccttcccgcctggtggagcgtcccctgcgtcgcacggtgccaggtcagttcagtcacctggagagactgcatcgtcgcctgcacgaggagcaggagcaacaggactcttcctccttgcctcaacaggaggtggagtctgataggccgccttcccctgcacctcagccagagatgccccctgcaccacctcaggacatcccggctgctggaggagaccctgacggagacggagacgacgccgacgccggtggcagttcgagccacgacacagagctttcggagaagctggagccggatggatggatcgctagacccatcactcgtgacgctgctcgcgggtgtcacttccacgacgctctcgataccctattgcgtcgggcctttgaccgagacacttggtctatcgagtaccgttgtgtagtctacc

SEQ ID NO: 25642 - DNA, 2780 bp, Zea Mays
atggctccgttcggcgacggcggctggggtggcgacggaggggaggcgctgctggggcgggacccgctgcgcagtggcagcgcgccgccgacgatggaggccggcgcggaggcagcggtggcggcggagagggtgtttggcagcgttggtggcggcgcctcgttcttctccggtatcgacgggcgcgggttgggcgcgaggatggacgaggtcaccatgcgccacggtgctgccggagttcaggaacattttggcaattctgcatctttatctgttagaccacatggccaacagtttaatggtacaggagacttggatgaacagcagtttggactgagcagagttcatagtggtggtgttatggcaaactactctgcatctgacatgggtcccctttggacagatatgaatccagacaatgttgactattgcagaaatatccagaatcgctccatgtcaaacattggaaagatgaatgcttatggcaatagggatcttagtgcttcctacatgtttgattctaatcttttagatgctttatctgggctgaggctgtctaatagtctagtaatggaccaatggaatcatggggaagggcaactagacgaaatactcgagtgtcaaagagatttctcaaaaattggtgatgaaaatcgatcacctttggttggtaatgtttttcgtgcatctaggtcggatgtgcatccactgccaatatatggacatggcatttcacagaggcagaccagtgcattagatggttccaatgtttcaaggttcagtcgccatcacataaagggtgttgatcacttatctttggctgctgaacgggtagctgcaatgcaatcaggcaacctgcgtagaggaaccaatctttctcgcaatgcgtatatgactaatatggtcaaccccatgagcaacagatactacagtaatacagacttggatttggttagtagtcgaagggcgttccttgatgatctacttgcacaacagtatctgcaggaggataatctgtcatatgatgatagtaggatctatcatggcgagcctcgtttttcctcttcaagaatgcaaagacctggatctcatttttatccaaattcgaggaacattctatcccatggtgatcggcaatcacggttcttctccctcaatagaaaggcaatgggtagaaatattggatcacaggtctatcatgacaatgcattagcaaactacctggatgtgccttctttggataatgcagatagaaatggagctgattcagtggagttaattgatgtagtgggccacgttaaggaagttagtatggatcaatatggaagccggtttattcaacaaaaacttgaaattgcatcaccggatgaccgggaaaaaatatttccagagatattatccaacgtcattgttctaacaactgatgtttttggcaattatgttatccagaagtttttcgagttcgccacagaaagtcagttaatccaattggcagatcaactcaaaggtcgaattttggaacttagcctccagatgtatggttgcagggtagttcagaaggttttggaggtagttggtatggatcaaaaggtcgacattgttcatgagctcaagaattatattctgaaatgtattggcgatcaaaatggtaaccatgtgattcagaaatgcattgagtgtgttcctgaagaccgcattccatttgttattgatcctatactttcacaaatccttgttctgtgtacccatcaatatggctgcagagttattcagagagttctggagcattgccatgatcctgtgactcaaagtgctattatgaatgaaattatgcagcagaccttccatttgacagatgataagtttgggaactatgttgttcaacatgtgttggaacacggaaagccagaagagcgttccgtcatcattcaaaagctgtctgggcaagtggtcaccttgagcaagcaaaagtttgcttctaatgtcattgagaaatgtttggaatttggaactcctgaagaacgtgatagccttattggggaaatcatttcttctggtcaaacatttcaggagctgatgaaggatcagtttggtaactatgttgtacagaaagtccttgagacatgtgacgacaaatacctagagatgatcctctcgagcatcaaattgcacttgaatgaactgaagaactacacgtacgggaagcacatcgtagcacgtgtggagaagctaatcgttacaggagagaatcgagcaaggatggcgtccatgagtggccagcatcagcagcagcaacctaacaactgtacagctgtagacgaacactagtcctgtgtatgcgttggcgtcaaatacggactgcacactaatcccttgttaggcattggcgtcagatacgacgagcaggtggtataagtgactccggaggaatctggtttttaatacatggtttatttaatagggtacttgcagataaccagggatttatgttacctgtatctaaccaggcgtggtgtttttcgggaactcaggttgttagatgagagcagctgtaaatccttctggccatgtacaagtttattacagtggataatagatgtacattgtgctggagcattagcttttggtagtaggtgagatcggtgctgtgtaatatgtttctgttccagtgctgttggttcaaatcgtatgctcgtttttttctttctttcatggctatctttcttgactgtgaaagattgttccccgttaacgtttcaaatgcacgtgatggccaaaag

SEQ ID NO: 25643 - DNA, 1859 bp, Zea Mays
ccttgttgttgttttttttttgaatgaatgaatggtattgacacgtgggtccatctcagaggcaaaacaaactattaccaaacggctcctataagcccgtccctctccgatccctcggcccgcgctctctgctcccatccccgcctcgtccgttaccataaatctagcttgggctctaatctaaccgagggaacaggtgggatatgaggaactcggtgtcggagcggagcttcctcatcgagagcgacgatgacgacgatgccgccgtggaggacgggaagcggcgcggccttggcggcggcggcggcggcgacgacgacgacgacgggtccgactcctcgtcgccgtgcgacagcccgcgggtggtggcggcgcggtgcagccagccgagttcgtacacgcagcaatggccgcagagctacaggcaatccattgacatgtacagcagtgtgcactctcccaacctgagcttcttgggcacgccatcactgagccggttgtccaactcgttcctcacaaactcattccgggggaagccacctgagatcatctccagcttaatcaagccattactgccgacaagcattgcttccgccagcgatgaccagcagcagcagcagcatgaggacgtccggaagagctcccattacctgccaccatcacgcaaggcgtcgtcgctgcagaggatccccgaggaccagagacctatggttgggggccatgaggtgggtccctaccggcagtgctcctatacccaaggggtcatgaacggagtgaatgtcttatgtggtgtggggatcctgtcaacaccttatgctgtcaagcagggtggctggcttggactggtgatactagcggtattgggtgcactggcttggtacactggcatacttctgcgccgttgcctggacagcaaggatgggctcgagacttaccctgacatcggacatgctgcctttggtactgctggccgtatcatcatctcgataatactgtatatggaactatatgcatgttgcattgagtatttgatcttagagagcgataacttatcaaagttgttcccaaatgcacacctaaccatgggtaacttgactctggattcacatatgctatttgccatcttgactgctcttgtcgtcatgcctaccacttggcttcgtgatctcagctgcctcagcttcatttcagctggtggagtcattgcatctatcgtcattgtctcctgcttgttctgggtgggacttgttgatcacgttggcacagtcgagagtgaagggacggcactgaaccttcctggaatccccattgccatcgggttgtatgggtattgctactcaggccatggagtgttcccaaacatctactcttctctgaagaaaagcaaccagttccctgctgttcttttcacctgtatcgctctgtctactgttctgttcgctgctgctgcaatcatgggatacattatgttcggtgaatctacagagtcccaattcacactgaacttacccccaaatcttgtggcttccaagattgcggtctggactacggtgacgaatccaataaccaaatatgcgctgaccatgactcctctagccctgagtttggaggaactgctacctccaaataagcagacatacccgaacataatgatgcttagatccgctctggtggtatcttcccttattattgctctgtccgttccattttttggacttgtcatgtcactggtcgggtcttttctcaccatgtttgtggcctatattctaccatgtgcctgctttttgtctatcctcaggagtaaagtgacctggtatcagatttttttggcagaaaaatacagtgttccatgtgttctt

SEQ ID NO: 25644 - DNA, 3724 bp, Zea Mays
atggaggccccaccctccgccctcccgtggtggctcgccaccactgcctgctccgcgccgccgacgcccgccgcgtcctccgtcgccggccgcctcgccttcctcttcctctccccctgcctgcagcgcgcgctgctcgccgcgatcgacctcctattcctcgtcgttgcgctcgccgtcatcctacgcgcccgcctcgcccggagcaacgatggcctgagcctcggcctcgaccaccgcgagcgggagcccctcctcgccaagccggccaccacggaccaggcgccgcctcccctccgccgtagctggagcttccagcacggcctagcgctcgcgacttccgcggtccaagcggcggccgcccttgtgcttctacttctcctcgcgttgctgcgccgcagcgggaggaccacggggctgcttgcggcggagtgcgcgttcctcgccgcgcacgccgtcgcgcacctcgcggccgcatgggttgtcgcggtggagaagaacacggcagggacgtcacccgcgcgactccacccactccacctcaggttcttctggctcgccacggccgctttcgccgcgctctacgccgggtgcgcggctgcgcggtacgccgccgccgagccgctcgtccccgatgacccgcttgcgttcgcgtggctggctctctcgctcccgctactctatttctcggccaccggctccaccggcctcgtcgtcgattccaatggtggtggtcgtgccgccgccgccacggaggagacgtacgccacggcgtcgtggttctcgctagccacgttcggatggatcaacccgctcatcgccaagggctccagagcgacgctcgcggccgaccaagtcccgcccgtggcgccgcccgacaccgccgaggcggcgtacgtgctcttcacctccaactggcccgcgccggcgccaggttcgtccaaggctcagcgcccggtgctcaccgcgctgctgcgctccttctggccgcagttccttctcaccgccgtgctcggcgtcgcgcacctctcggtcatgtacatcggcccgtcgcttgtggaccggttcgtcgaattcgtgcgacgcggcggggagttcacggaggggctgcagctcgtcgctgtcctcctcgttggcaaggcggccgagacgctggcgtcgcaccactacgagttccagggccagaagctgggcatgcgcatcaacgccgcgctgctcgccgctgtgtaccggaagtctctgcggctgtccacgggcgcgcgccgggcgcacggcgccggtgcgatcgtgaactacatggaggtggacgcccaagaggtggctgacgtcacgcaccagctccacaacctttggctcatgccactggagatcgccgtcgctcttgcccttctctacacccacctcggccccgccgtgctcactgcggtcgctgctatcgccgtggtcaccgtggtcgtggcctttgccaacaagctcaacatcgagtaccagttcaagttcctcgccaagcgcgacgagcgcatgaaggccatcaccgagctgcttaactacatcggcgtcatcaagctgcaggcgtgggaggagacgttcgggaacaagatccgcaagctccgggaagaagagctcgggtggctagccaagtccatgtacttcatgtgtgctaacaccgtcgtgctctggagcggccctctcgccatgaccgtgcttgtgttcggcacgtgcgtgttgactggcatccagctcgatgccgggaaggtcttcacggcgaccgcattcttccgaatgctggacggacctatgcagagcttccccgaggcgatcgctgctgtgacgcaggcaaccgtgtctgttggcaggcttgatagataccttcttgatgcagagcttgatgactcggcagtggagcaggtggacggcaccggcattgacactagcgcggtggtcgtggaggtgtgtgacggtgtttttgcgtgggacatgaggggaaacaagcagaggaaagaaagtgaggatggtgaaagcgaggaggagaaagatgtggaggggacaccggtactggagacggtgctgaaggggatcaatgttgaggtaaggaagggtgaacttgtggcagtggttgggatggtaggatctggcaagtcatcactgctttcttgcatcatgggggagatggagaagatctccggcacggttagagtatgtgggagcactgcatatgtttcacagactgcttggatccaaaatgggaccattcaagagaatatcttatttggacagccgatgtatgctgaaagatataaagaagtcattcattcttgctgcctggaaaaagattttgaaatgatggaatttggagaccagactgaaataggagagcgaggaatcaatctcagtggtgggcagaaacagcgtattcagctcgccagagcagtctaccaacattgtgatatatatcttcttgatgatgtctttagtgctgttgatgcacacactggttcaaatatctttaaggagtgtctaagggggacacttaaggggaagaccgtcatacttgttacacaccaaatggatttcttgcacaatgtggaaaacatatttgtaagttagatgctacaccattgcagttacttatcaggtcatgagagatggtatgattgcacaatcaggaaagtatgatgaattaatagaagcagattctgattttgccgatcttgttgctgctcatgacagttcaatggaactggtggagcaacgttgtcaagtagagaaacctgaacattttcagcctactacagtagttagaatcccttctctacgctctagatccattggaaagggtgagaaggtggttgttgcaccagaaatagaagcagccacttctaagattataaaagaagaggaaagggagagtggtcaagtaagttggcgagtgtacaagctgtatatgacagaggcctggggctggtggggagttatgggcatggtttcctttgcagtcgtgtggcagtgctctgatatggctagtgactattggctatcatatgaaacgtcaggcggcattcaatttaacccatcgttgttcattggagtgtatgtggccatagctgctttttcaatggtccttcaagtaatcaagactcttcttgagacagttttgggtcttcaaacagctcagatatttttcgagaagatgtttgacagcattctgcatgcccctatgtcatttttcgataccactccttcaggaaggattctcagtcgggcatcgtctgaccaaacgaccattgatgttgtgctggcatttttcattggtctgacaatttcaatgtacatttcagtattgagcaccattattgtcacttgtcaggttgcctggccatcagttgtagctgtaattccacttctattattgaacatttggtacaggaatctctatcttgcaacctcacgggagttaactcgacttgaaggagtgacaaaggcaccggttattgatcacttgtctgaaactgttcttggtgtcacaactataagatgtttcaaaaaggagaaagaatttttccatgagaatttagacaaaattaattcaagtttgcgcatgtacttccacaactatgccgcaaatgaatggcttggtttccgactggagctaattggaacacttctattgtcaataactgcatttctcatgatcagcctgcccagtaattttatcaagaaaggt

SEQ ID NO: 25645 - DNA, 3739 bp, Zea Mays
ccgcctcgtcgcacccaaacccaaatgtgaggtaccaccacgggccacttgccagtgatggaggccccaccctccgccctcccgtggtggctcgccaccactgcctgctccgcgccgccgacgcccgccgcgtcctccgtcgccggccgcctcgccttcctcttcctctccccctgcctgcagcgcgcgctgctcgccgcgatcgacctcctattcctcgtcgttgcgctcgccgtcatcctacgcgcccgcctcgcccggagcaacgatggcctgagcctcggcctcgaccaccgcgagcgggagcccctcctcgccaagccggccaccacggaccaggcgccgcctcccctccgccgtagctggagcttccagcacggcctagcgctcgcgacttccgcggtccaagcggcggccgcccttgtgcttctacttctcctcgcgttgctgcgccgcagcgggaggaccacggggctgcttgcggcggagtgcgcgttcctcgccgcgcacgccgtcgcgcacctcgcggccgcatgggttgtcgcggtggagaagaacacggcagggacgtcacccgcgcgactccacccactccacctcaggttcttctggctcgccacggccgctttcgccgcgctctacgccgggtgcgcggctgcgcggtacgccgccgccgagccgctcgtccccgatgacccgcttgcgttcgcgtggctggctctctcgctcccgctactctatttctcggccaccggctccaccggcctcgtcgtcgattccaatggtggtggtcgtgccgccgccgccacggaggagacgtacgccacggcgtcgtggttctcgctagccacgttcggatggatcaacccgctcatcgccaagggctccagagcgacgctcgcggccgaccaagtcccgcccgtggcgccgcccgacaccgccgaggcggcgtacgtgctcttcacctccaactggcccgcgccggcgccaggttcgtccaaggctcagcgcccggtgctcaccgcgctgctgcgctccttctggccgcagttccttctcaccgccgtgctcggcgtcgcgcacctctcggtcatgtacatcggcccgtcgcttgtggaccggttcgtcgaattcgtgcgacgcggcggggagttcacggaggggctgcagctcgtcgctgtcctcctcgttggcaaggcggccgagacgctggcgtcgcaccactacgagttccagggccagaagctgggcatgcgcatcaacgccgcgctgctcgccgctgtgtaccggaagtctctgcggctgtccacgggcgcgcgccgggcgcacggcgccggtgcgatcgtgaactacatggaggtggacgcccaagaggtggctgacgtcacgcaccagctccacaacctttggctcatgccactggagatcgccgtcgctcttgcccttctctacacccacctcggccccgccgtgctcactgcggtcgctgctatcgccgtggtcaccgtggtcgtggcctttgccaacaagctcaacatcgagtaccagttcaagttcctcgccaagcgcgacgagcgcatgaaggccatcaccgagctgcttaactacatcggcgtcatcaagctgcaggcgtgggaggagacgttcgggaacaagatccgcaagctccgggaagaagagctcgggtggctagccaagtccatgtacttcatgtgtgctaacaccgtcgtgctctggagcggccctctcgccatgaccgtgcttgtgttcggcacgtgcgtgttgactggcatccagctcgatgccgggaaggtcttcacggcgaccgcattcttccgaatgctggacggacctatgcagagcttccccgaggcgatcgctgctgtgacgcaggcaaccgtgtctgttggcaggcttgatagataccttcttgatgcagagcttgatgactcggcagtggagcaggtggacggcaccggcattgacactagcgcggtggtcgtggaggtgtgtgacggtgtttttgcgtgggacatgaggggaaacaagcagaggaaagaaagtgaggatggtgaaagcgaggaggagaaagatgtggaggggacaccggtactggagacggtgctgaaggggatcaatgttgaggtaaggaagggtgaacttgtggcagtggttgggatggtaggatctggcaagtcatcactgctttcttgcatcatgggggagatggagaagatctccggcacgagtatgtgggagcactgcatatgtttcacagactgcttggatccaaaatgggaccattcaagagaatatcttatttggacagccgatgtatgctgaaagatataaagaagtcattcattcttgctgcctggaaaaagattttgaaatgatggaatttggagaccagactgaaataggagagcgaggaatcaatctcagtggtgggcagaaacagcgtattcagctcgccagagcagtctaccaacattgtgatatatatcttcttgatgatgtctttagtgctgttgatgcacacactggttcaaatatctttaaggagtgtctaagggggacacttaaggggaagaccgtcatacttgttacacaccaaatggatttcttgcacaatgtggaaaacatatttgtcatgagagatggtatgattgcacaatcaggaaagtatgatgaattaatagaagcagattctgattttgccgatcttgttgctgctcatgacagttcaatggaactggtggagcaacgttgtcaagtagagaaacctgaacattttcagcctactacagtagttagaatcccttctctacgctctagatccattggaaagggtgagaaggtggttgttgcaccagaaatagaagcagccacttctaagattataaaagaagaggaaagggagagtggtcaagtaagttggcgagtgtacaagctgtatatgacagaggcctggggctggtggggagttatgggcatggtttcctttgcagtcgtgtggcagtgctctgatatggctagtgactattggctatcatatgaaacgtcaggcggcattcaatttaacccatcgttgttcattggagtgtatgtggccatagctgctttttcaatggtccttcaagtaatcaagactcttcttgagacagttttgggtcttcaaacagctcagatatttttcgagaagatgtttgacagcattctgcatgcccctatgtcatttttcgataccactccttcaggaaggattctcagtcgggcatcgtctgaccaaacgaccattgatgttgtgctggcatttttcattggtctgacaatttcaatgtacatttcagtattgagcaccattattgtcacttgtcaggttgcctggccatcagttgtagctgtaattccacttctattattgaacatttggtacaggaatctctatcttgcaacctcacgggagttaactcgacttgaaggagtgacaaaggcaccggttattgatcacttgtctgaaactgttcttggtgtcacaactataagatgtttcaaaaaggagaaagaatttttccatgagaatttagacaaaattaattcaagtttgcgcatgtacttccacaactatgccgcaaatgaatggcttggtttccgactggagctaattggaacacttctattgtcaataactgcatttctcatgatcagcctgcccagtaattttatcaagaaaggt

SEQ ID NO: 25646 - DNA, 1636 bp, Zea Mays
gccaaattttctacttcgatatcgtcggcgcccctcgccccgtccgcaccggcgttggcgttcacagtcgcagagtattccgcgccgccgcgttacgttccttgaccagtcgccgttcaccaacgctcactaggactaggttagagtatgtgggagcactgcatatgtttcacagactgcttggatccaaaatgggaccattcaagagaatatcttatttggacagccgatgtatgctgaaagatataaagaagtcattcattcttgctgcctggaaaaagattttgaaatgatggaatttggagaccagactgaaataggagagcgaggaatcaatctcagtggtgggcagaaacagcgtattcagctcgccagagcagtctaccaacattgtgatatatatcttcttgatgatgtctttagtgctgttgatgcacacactggttcaaatatctttaaggagtgtctaagggggacacttaaggggaagaccgtcatacttgttacacaccaaatggatttcttgcacaatgtggaaaacatatttgtcatgagagatggtatgattgcacaatcaggaaagtatgatgaattaatagaagcagattctgattttgccgatcttgttgctgctcatgacagttcaatggaactggtggagcaacgttgtcaagtagagaaacctgaacattttcagcctactacagtagttagaatcccttctctacgctctagatccattggaaagggtgagaaggtggttgttgcaccagaaatagaagcagccacttctaagattataaaagaagaggaaagggagagtggtcaagtaagttggcgagtgtacaagctgtatatgacagaggcctggggctggtggggagttatgggcatggtttcctttgcagtcgtgtggcagtgctctgatatggctagtgactattggctatcatatgaaacgtcaggcggcattcaatttaacccatcgttgttcattggagtgtatgtggccatagctgctttttcaatggtccttcaagtaatcaagactcttcttgagacagttttgggtcttcaaacagctcagatatttttcgagaagatgtttgacagcattctgcatgcccctatgtcatttttcgataccactccttcaggaaggattctcagtcgggcatcgtctgaccaaacgaccattgatgttgtgctggcatttttcattggtctgacaatttcaatgtacatttcagtattgagcaccattattgtcacttgtcaggttgcctggccatcagttgtagctgtaattccacttctattattgaacatttggtacaggaatctctatcttgcaacctcacgggagttaactcgacttgaaggagtgacaaaggcaccggttattgatcacttgtctgaaactgttcttggtgtcacaactataagatgtttcaaaaaggagaaagaatttttccatgagaatttagacaaaattaattcaagtttgcgcatgtacttccacaactatgccgcaaatgaatggcttggtttccgactggagctaattggaacacttctattgtcaataactgcatttctcatgatcagcctgcccagtaattttatcaagaaaggt

SEQ ID NO: 25647 - DNA, 3863 bp, Zea Mays
ctagtgccaaattttctacttcgatatcgtcggcgcccctcgccccgtccgcaccggcgttggcgttcacagtcgcagagtattccgcgccgccgcgttacgttccttgaccagtcgccgttcaccaacgctcactaggactagaacttcgccacggcctcccgcctcgtcgcacccaaacccaaatgtgaggtaccaccacgggccacttgccagtgatggaggccccaccctccgccctcccgtggtggctcgccaccactgcctgctccgcgccgccgacgcccgccgcgtcctccgtcgccggccgcctcgccttcctcttcctctccccctgcctgcagcgcgcgctgctcgccgcgatcgacctcctattcctcgtcgttgcgctcgccgtcatcctacgcgcccgcctcgcccggagcaacgatggcctgagcctcggcctcgaccaccgcgagcgggagcccctcctcgccaagccggccaccacggaccaggcgccgcctcccctccgccgtagctggagcttccagcacggcctagcgctcgcgacttccgcggtccaagcggcggccgcccttgtgcttctacttctcctcgcgttgctgcgccgcagcgggaggaccacggggctgcttgcggcggagtgcgcgttcctcgccgcgcacgccgtcgcgcacctcgcggccgcatgggttgtcgcggtggagaagaacacggcagggacgtcacccgcgcgactccacccactccacctcaggttcttctggctcgccacggccgctttcgccgcgctctacgccgggtgcgcggctgcgcggtacgccgccgccgagccgctcgtccccgatgacccgcttgcgttcgcgtggctggctctctcgctcccgctactctatttctcggccaccggctccaccggcctcgtcgtcgattccaatggtggtggtcgtgccgccgccgccacggaggagacgtacgccacggcgtcgtggttctcgctagccacgttcggatggatcaacccgctcatcgccaagggctccagagcgacgctcgcggccgaccaagtcccgcccgtggcgccgcccgacaccgccgaggcggcgtacgtgctcttcacctccaactggcccgcgccggcgccaggttcgtccaaggctcagcgcccggtgctcaccgcgctgctgcgctccttctggccgcagttccttctcaccgccgtgctcggcgtcgcgcacctctcggtcatgtacatcggcccgtcgcttgtggaccggttcgtcgaattcgtgcgacgcggcggggagttcacggaggggctgcagctcgtcgctgtcctcctcgttggcaaggcggccgagacgctggcgtcgcaccactacgagttccagggccagaagctgggcatgcgcatcaacgccgcgctgctcgccgctgtgtaccggaagtctctgcggctgtccacgggcgcgcgccgggcgcacggcgccggtgcgatcgtgaactacatggaggtggacgcccaagaggtggctgacgtcacgcaccagctccacaacctttggctcatgccactggagatcgccgtcgctcttgcccttctctacacccacctcggccccgccgtgctcactgcggtcgctgctatcgccgtggtcaccgtggtcgtggcctttgccaacaagctcaacatcgagtaccagttcaagttcctcgccaagcgcgacgagcgcatgaaggccatcaccgagctgcttaactacatcggcgtcatcaagctgcaggcgtgggaggagacgttcgggaacaagatccgcaagctccgggaagaagagctcgggtggctagccaagtccatgtacttcatgtgtgctaacaccgtcgtgctctggagcggccctctcgccatgaccgtgcttgtgttcggcacgtgcgtgttgactggcatccagctcgatgccgggaaggtcttcacggcgaccgcattcttccgaatgctggacggacctatgcagagcttccccgaggcgatcgctgctgtgacgcaggcaaccgtgtctgttggcaggcttgatagataccttcttgatgcagagcttgatgactcggcagtggagcaggtgtgtgacggtgtttttgcgtgggacatgaggggaaacaagcagaggaaagaaagtgaggatggtgaaagcgaggaggagaaagatgtggaggggacaccggtactggagacggtgctgaaggggatcaatgttgaggtaaggaagggtgaacttgtggcagtggttgggatggtaggatctggcaagtcatcactgctttcttgcatcatgggggagatggagaagatctccggcacggttagagtatgtgggagcactgcatatgtttcacagactgcttggatccaaaatgggaccattcaagagaatatcttatttggacagccgatgtatgctgaaagatataaagaagtcattcattcttgctgcctggaaaaagattttgaaatgatggaatttggagaccagactgaaataggagagcgaggaatcaatctcagtggtgggcagaaacagcgtattcagctcgccagagcagtctaccaacattgtgatatatatcttcttgatgatgtctttagtgctgttgatgcacacactggttcaaatatctttaaggagtgtctaagggggacacttaaggggaagaccgtcatacttgttacacaccaaatggatttcttgcacaatgtggaaaacatatttgtcatgagagatggtatgattgcacaatcaggaaagtatgatgaattaatagaagcagattctgattttgccgatcttgttgctgctcatgacagttcaatggaactggtggagcaacgttgtcaagtagagaaacctgaacattttcagcctactacagtagttagaatcccttctctacgctctagatccattggaaagggtgagaaggtggttgttgcaccagaaatagaagcagccacttctaagattataaaagaagaggaaagggagagtggtcaagtaagttggcgagtgtacaagctgtatatgacagaggcctggggctggtggggagttatgggcatggtttcctttgcagtcgtgtggcagtgctctgatatggctagtgactattggctatcatatgaaacgtcaggcggcattcaatttaacccatcgttgttcattggagtgtatgtggccatagctgctttttcaatggtccttcaagtaatcaagactcttcttgagacagttttgggtcttcaaacagctcagatatttttcgagaagatgtttgacagcattctgcatgcccctatgtcatttttcgataccactccttcaggaaggattctcagtcgggcatcgtctgaccaaacgaccattgatgttgtgctggcatttttcattggtctgacaatttcaatgtacatttcagtattgagcaccattattgtcacttgtcaggttgcctggccatcagttgtagctgtaattccacttctattattgaacatttggtacaggaatctctatcttgcaacctcacgggagttaactcgacttgaaggagtgacaaaggcaccggttattgatcacttgtctgaaactgttcttggtgtcacaactataagatgtttcaaaaaggagaaagaatttttccatgagaatttagacaaaattaattcaagtttgcgcatgtacttccacaactatgccgcaaatgaatggcttggtttccgactggagctaattggaacacttctattgtcaataactgcatttctcatgatcagcctgcccagtaattttatcaagaaaggt

SEQ ID NO: 25648 - DNA, 2160 bp, Zea Mays
caaatccttgttaccggtatattgctctatggtggcattagggaagaatatttcctcttgtttactttgttgtatgatgatattaggatgaagggtgtttgcccaaatccattgtcgctcctgcccccaacggtgcacgacctcacctcttctgccatggcgctctcccaaccccttgttgccgctccctccatggccgctctccccctgctcgacgtacttgcatctacaggagctcgcctagccccactctctagccagctcgaaccgacgtcgggctctggctgtcaatcgtgtcaccagggctgtcctcttccgctgccactcgttggaccttgcccctgctgtgccgccggcagcccccctcgccctctcctccctagcgttcgtccttgtctcccatgaccgagctcgtcctggcactagacctctccacctctgtggcaccagcgccctcaagtcctatgccaatgcccccatctccttccccatgccaagtcccatggctgctgtcctccaaccccatgctatgacgcgccctgcaggtgttcgatggaatggccgtaaggagctttgtgttgtgtgtagccccatttgcgacaccgtcgacccctgatgaggttctgttctcgccctatcgttttagagcttgacctcgattactaatgtgtgaattgtgtgtatgtgtgtgttgatgaggagtgaaatccctgtggttggatgttagtgtgggaagtctggttacgtcgctcaccaggtgctcggcgaagggcatgaaccagggatcatcgctgtgtctatggtagccgagtcaaaaatttcgttatggtgaactgatttgtttcttgcgctatccgttggaaaaattggttagacattgtaggggtgttatttatcttgtcaatagcaggtgtgttgtgggtcgacctccaaatgcttttaccggtatattgctctatggcggcattagggaagaatctttcctcttgtttactttgttgtatgatgatatttggatgaatggcacttggatggatatgtagttgcatagtgtgattaagttgactcttcatttgcgtgatgtgagagataggtttataacactagattaagagaagtgaatgtattcgtggttatgaagccgcgtttcttgcattgatgtgattgtgataatttgtatgaagtgattgtgtcatgtgaagcttaagtttaaaatgattattatgataggagtacttaggtgaatatatcggcgaagcatgagcgaatagacgttatgtttgtaaactacaatttattagcaatgtaatttatgatactcatattgtcttcttaaccacctatgtttaacatttaaacactataggccttttgcttataaaagtagagttaatagtgctatacaatgtctagtaatactctacttattaaatcagaggtagtgactttcctgtctagttaatatatggctagacctataagaggtttggttaatttaatagtgcaaagaacatgtttaatgcttgttgtttggtattgcatgaccagttttagttatgcagctagttcaatgaagtaaaccatgttttatgcacagatgttatatataacaattgtagtcaacttctatatcttgcttgtgtaaaaaatttcatgaccgtaggtttagtagtttaggagttatggtttttccaaatctagtctcagaatctgtccaaattttgtacaaatttcgaaaatgaccttgtttgtacaaatttcgaaaatttccaaattttgaaccaggaatcagtttgttgggggccttctcctccctaaggtcctcaaaaacataattaaccatttgttttcagcacaagctattacaggaaacttcgtcttccgaagtacaagcttctcccttatgacgaaggcacacaagatgaaggaggatccaaagaggataagagtaaacgtcgaagttaccaccagatgaacagcttcggtcacaatgaagatgatgagtaatgatgatgaccaaaaggggaaaagactacctaatccttaataatttgtattatgatcatgtgtaaatgttgaggacataaatgtacttttgctcgggctacgtcccgtgcctataaatagatgaacactaacaccatactgttaatgatggat

SEQ ID NO: 25649 - DNA, 1474 bp, Zea Mays
gagagatcagagagggagagatatggagcggggagggaaatgagagggaggaggttaggaggattacttggtggtggtggtggtcccactccaatggatgtaagtacaactgttcaggagatatctaacactgatgttactgttttggaaggacacagttcagaggtttttgcttgtgcgtggagtccaactagttctcttctagcttctgggagactcaactgctagaatctggacaattccatatggtccatgtggttccgacatgcaaccatattctcctggtgttcatgttttgaaacattttaaaggtcggaccaatgaaaagagcaaggatgtcaccacgcttgactggaatggtgaaggtacactactcgctacgggctcctacgatggacaggcaagaatatggagtagagatggagacctgaagcagacactgttcaaacataagggacccatattttcattgaaatggaataagaaaggagattttctcctaagtggaagtgttgataaaactgctattgtttgggatacaaagacatgggaatgcaagcagcagtttgaatttcattcagctccaacactagatgttgattggagaaataataactcctttgcaacatgttcaaccgataacatgatctatgtttgcaagattggggaacagcgtccaattaaagcattcagtggtcatcagagtgaagttaatgctataaagtgggatccgactggttcttttttggcttcatgttctgatgattggacagcaaagatatggagtatgaaacaagacaaatgtatatttgatttcaaggagcataccaaggcccaggaacaaacaatcctaatcagcagttgcttttggctagcgcatcttttgattcaaccatcaagctttgggaagttgagcagggacgccttctgtacagcttgtccggtcataggcaaccagtgtattctgttgcatttagccctgacggcgagtacttagcgagtgggtccctggatcagtgcctacacatctggtctgtgaaagaaggcagggtcctgaagacctacagaggtactgggggcatattcgaagtgtgctggaacatagaaggcaccaagattgctgcctgtttctccaacaacaccgtctgcgtcatggatttccggatgtagcccaaccagtaggggtagcgacgtagtgcagatcaagcctaaaacaagtctggatcacaagcccttcccatggaaacgtgtgaagagagcggaattgttagcagaatgcagatcttaggtggtggtttttttttttgcccatgtacagttcttttttcctaggttatactgtagcgatgcgttagtagcatggaaatgttttggtggcaatcctcctaatttctgaatgcaatcttaccatatttaaactcttaagtattccatcgttttatatagtcgagaaatacaaatttccattattgac

SEQ ID NO: 25650 - DNA, 2512 bp, Zea Mays
cgaagaacttttaacggcctttattgatttccgtcaaacggttttagtcttttaacaactcacggtacacaacagtttttttacagctcacaacccacaacagttttttcacagccacgacccaactaaatagacccttactcaccatttgcctgctccagtcttagccgtccaaaaagtatcagatgaggtgttttagcacagaagtggagcgacctagttttacaaacgcaacaacacgactcactttagagagcggtaatgttgagggagacaaatctctctccaccatcgcaccgcgccgtcctcgccctcgccgctgcgcccctcccgcgtcttccgcctgctccggcggcgctctcgcctgcgccgcctgctatggggctgctcacgtcggcggagctcaactacctcgtcttccgctacctccaggagtcaggttttattcatgctgcatttactctaggttatgaagctgggatccataagtgtggcattgatggtaatgcagtcccacctggtgctcttatcactattgtgcagaaaggcctccaatacattgaactggaagcaagtagcgatgagaattatgatgaagttgagagggattttgcgcttttggagccacttgaaatcatcacaaaagatgttgaagagttgcaacagattgtgaaaaggaggaaaattgagagatctcaaactgaacttgagaaggataagggaaaagagaaagaacgtaacgaggagcatgaacgacgtccttgtggcgaaagggagagggaacaacatgaaaaagaaaaagagcaagtcagggacaaggacaaatctgaaaaagatagggaccatgataaagagaaggagaaagagagagaaaggcagcatgcagagcgtactgataaggttaaacacgaggatgattctcttgttggtgcaggtcccactccaatggatgtaagtacaactgttcaggagatatctaacactgatgttactgttttggaaggacacagttcagaggtttttgcttgtgcgtggagtccaactagttctcttctagcttctggatcaggagactcaactgctagaatctggacaattccatatggtccatgtggttccgacatgcaaccatattctcctggtgttcatgttttgaaacattttaaaggtcggaccaatgaaaagagcaaggatgtcaccacgcttgactggaatggtgaaggtacactactcgctacgggctcctacgatggacaggcaagaatatggagtagagatggagacctgaagcagacactgttcaaacataagggacccatattttcattgaaatggaataagaaaggagattttctcctaagtggaagtgttgataaaactgctattgtttgggatacaaagacatgggaatgcaagcagcagtttgaatttcattcagctccaacactagatgttgattggagaaataataactcctttgcaacatgttcaaccgataacatgatctatgtttgcaagattggggaacagcgtccaattaaagcattcagtggtcatcagagtgaagttaatgctataaagtgggatccgactggttcttttttggcttcatgttctgatgattggacagcaaagatatggagtatgaaacaagacaaatgtatatttgatttcaaggagcataccaaggaaatatacactattcggtggagcccaacaggcccaggaacaaacaatcctaatcagcagttgcttttggctaggaaaacgcgtatcattgcattaagaaagaagatgaaaaggtcaaaaggccttacaacacacccctacaaacccaacacaacaacaactaaaaaaaatcacctttaaacagaacaaagaccagaccaccagcatgtattttctctcataggcgcatcttttgattcaaccatcaagctttgggaagttgagcagggacgccttctgtacagcttgtccggtcataggcaaccagtgtattctgttgcatttagccctgacggcgagtacttagcgagtgggtccctggatcagtgcctacacatctggtctgtgaaagaaggcagggtcctgaagacctacagaggtactgggggcatattcgaagtgtgctggaacatagaaggcaccaagattgctgcctgtttctccaacaacaccgtctgcgtcatggatttccggatgtagcccaaccagtaggggtagcgacgtagtgcagatcaagcctaaaacaagtctggatcacaagcccttcccatggaaacgtgtgaagagagcggaattgttagcagaatgcagatcttaggtggtggtttttttttttgcccatgtacagttcttttttcctaggttatactgtagcgatgcgttagtagcatggaaatgttttggtggcaatcctcctaatttctgaatgcaatcttaccatatttaaactcttaagtattccatcgttttatatagtcgagaaatacaaatttccattattgac

SEQ ID NO: 25651 - DNA, 2229 bp, Zea Mays
atcgaagaacttttaacggcctttattgatttccgtcaaacggttttagtcttttaacaactcacggtacacaacagtttttttacagctcacaacccacaacagttttttcacagccacgacccaactaaatagacccttactcaccatttgcctgctccagtcttagccgtccaaaaagtatcagatgaggtgttttagcacagaagtggagcgacctagttttacaaacgcaacaacacgactcactttagagagcggtaatgttgagggagacaaatctctctccaccatcgcaccgcgccgtcctcgccctcgccgctgcgcccctcccgcgtcttccgcctgctccggcggcgctctcgcctgcgccgcctgctatggggctgctcacgtcggcggagctcaactacctcgtcttccgctacctccaggagtcaggttttattcatgctgcatttactctaggttatgaagctgggatccataagtgtggcattgatggtaatgcagtcccacctggtgctcttatcactattgtgcagaaaggcctccaatacattgaactggaagcaagtagcgatgagaattatgatgaagttgagagggattttgcgcttttggagccacttgaaatcatcacaaaagatgttgaagagttgcaacagattgtgaaaaggaggaaaattgagagatctcaaactgaacttgagaaggataagggaaaagagaaagaacgtaacgaggagcatgaacgacgtccttgtggcgaaagggagagggaacaacatgaaaaagaaaaagagcaagtcagggacaaggacaaatctgaaaaagatagggaccatgataaagagaaggagaaagagagagaaaggcagcatgcagagcgtactgataaggttaaacacgaggatgattctcttgttggtgcaggagactcaactgctagaatctggacaattccatatggtccatgtggttccgacatgcaaccatattctcctggtgttcatgttttgaaacattttaaaggtcggaccaatgaaaagagcaaggatgtcaccacgcttgactggaatggtgaaggtacactactcgctacgggctcctacgatggacaggcaagaatatggagtagagatggagacctgaagcagacactgttcaaacataagggacccatattttcattgaaatggaataagaaaggagattttctcctaagtggaagtgttgataaaactgctattgtttgggatacaaagacatgggaatgcaagcagcagtttgaatttcattcagctccaacactagatgttgattggagaaataataactcctttgcaacatgttcaaccgataacatgatctatgtttgcaagattggggaacagcgtccaattaaagcattcagtggtcatcagagtgaagttaatgctataaagtgggatccgactggttcttttttggcttcatgttctgatgattggacagcaaagatatggagtatgaaacaagacaaatgtatatttgatttcaaggagcataccaaggaaatatacactattcggtggagcccaacaggcccaggaacaaacaatcctaatcagcagttgcttttggctagcgcatcttttgattcaaccatcaagctttgggaagttgagcagggacgccttctgtacagcttgtccggtcataggcaaccagtgtattctgttgcatttagccctgacggcgagtacttagcgagtgggtccctggatcagtgcctacacatctggtctgtgaaagaaggcagggtcctgaagacctacagaggtactgggggcatattcgaagtgtgctggaacatagaaggcaccaagattgctgcctgtttctccaacaacaccgtctgcgtcatggatttccggatgtagcccaaccagtaggggtagcgacgtagtgcagatcaagcctaaaacaagtctggatcacaagcccttcccatggaaacgtgtgaagagagcggaattgttagcagaatgcagatcttaggtggtggtttttttttttgcccatgtacagttcttttttcctaggttatactgtagcgatgcgttagtagcatggaaatgttttggtggcaatcctcctaatttctgaatgcaatcttaccatatttaaactcttaagtattccatcgttttatatagtcgagaaatacaaatttccattattgac

SEQ ID NO: 25652 - DNA, 2198 bp, Zea Mays
atcgaagaacttttaacggcctttattgatttccgtcaaacggttttagtcttttaacaactcacggtacacaacagtttttttacagctcacaacccacaacagttttttcacagccacgacccaactaaatagacccttactcaccatttgcctgctccagtcttagccgtccaaaaagtatcagatgaggtgttttagcacagaagtggagcgacctagttttacaaacgcaacaacacgactcactttagagagcggtaatgttgagggagacaaatctctctccaccatcgcaccgcgccgtcctcgccctcgccgctgcgcccctcccgcgtcttccgcctgctccggcggcgctctcgcctgcgccgcctgctatggggctgctcacgtcggcggagctcaactacctcgtcttccgctacctccaggagtcaggttttattcatgctgcatttactctaggttatgaagctgggatccataagtgtggcattgatggtaatgcagtcccacctggtgctcttatcactattgtgcagaaaggcctccaatacattgaactggaagcaagtagcgatgagaattatgatgaagttgagagggattttgcgcttttggagccacttgaaatcatcacaaaagatgttgaagagttgcaacagattgtgaaaaggaggaaaattgagagatctcaaactgaacttgagaaggataagggaaaagagaaagaacgtaacgaggagcatgaacgacgtccttgtggcgaaagggagagggaacaacatgaaaaagaaaaagagcaagtcagggacaaggacaaatctgaaaaagatagggaccatgataaagagaaggagaaagagagagaaaggcagcatgcagagcgtactgataaggttaaacacgaggatgattctcttgttggtgcaggagactcaactgctagaatctggacaattccatatggtccatgtggttccgacatgcaaccatattctcctggtgttcatgttttgaaacattttaaaggtcggaccaatgaaaagagcaaggatgtcaccacgcttgactggaatggtgaaggtacactactcgctacgggctcctacgatggacaggcaagaatatggagtagagatggagacctgaagcagacactgttcaaacataagggacccatattttcattgaaatggaataagaaaggagattttctcctaagtggaagtgttgataaaactgctattgtttgggatacaaagacatgggaatgcaagcagcagtttgaatttcattcagctccaacactagatgttgattggagaaataataactcctttgcaacatgttcaaccgataacatgatctatgtttgcaagattggggaacagcgtccaattaaagcattcagtggtcatcagagtgaagttaatgctataaagtgggatccgactggttcttttttggcttcatgttctgatgattggacagcaaagatatggagtatgaaacaagacaaatgtatatttgatttcaaggagcataccaaggcccaggaacaaacaatcctaatcagcagttgcttttggctagcgcatcttttgattcaaccatcaagctttgggaagttgagcagggacgccttctgtacagcttgtccggtcataggcaaccagtgtattctgttgcatttagccctgacggcgagtacttagcgagtgggtccctggatcagtgcctacacatctggtctgtgaaagaaggcagggtcctgaagacctacagaggtactgggggcatattcgaagtgtgctggaacatagaaggcaccaagattgctgcctgtttctccaacaacaccgtctgcgtcatggatttccggatgtagcccaaccagtaggggtagcgacgtagtgcagatcaagcctaaaacaagtctggatcacaagcccttcccatggaaacgtgtgaagagagcggaattgttagcagaatgcagatcttaggtggtggtttttttttttgcccatgtacagttcttttttcctaggttatactgtagcgatgcgttagtagcatggaaatgttttggtggcaatcctcctaatttctgaatgcaatcttaccatatttaaactcttaagtattccatcgttttatatagtcgagaaatacaaatttccattattgac

SEQ ID NO: 25653 - DNA, 1328 bp, Zea Mays
cttagctctagaagattcatcactattgtctttgttctgttttattcatgctgcatttactctaggttatgaagctgggatccataagtgtggcattgatggtaatgcagtcccacctggtgctcttatcactattgtgcagaaaggcctccaatacattgaactggaagcaagtagcgatgagaattatgatgaagttgagagggattttgcgcttttggagccacttgaaatcatcacaaaagatgttgaagagttgcaacagattgtgaaaaggaggaaaattgagagatctcaaactgaacttgagaaggataagggaaaagagaaagaacgtaacgaggagcatgaacgacgtccttgtggcgaaagggagagggaacaacatgaaaaagaaaaagagcaagtcagggacaaggacaaatctgaaaaagatagggaccatgataaagagaaggagaaagagagagaaaggcagcatgcagagcgtactgataaggttaaacacgaggatgattctcttgttggtgcagatcaggagactcaactgctagaatctggacaattccatatggtccatgtggttccgacatgcaaccatattctcctggtgttcatgttttgaaacattttaaaggtcggaccaatgaaaagagcaaggatgtcaccacgcttgactggaatggtgaaggtacactactcgctacgggctcctacgatggacaggcaagaatatggagtagagatggagacctgaagcagacactgttcaaacataagggacccatattttcattgaaatggaataagaaaggagattttctcctaagtggaagtgttgataaaactgctattgtttgggatacaaagacatgggaatgcaagcagcagtttgaatttcattcagctccaacactagatgttgattggagaaataataactcctttgcaacatgttcaaccgataacatgatctatgtttgcaagattggggaacagcgtccaattaaagcattcagtggtcatcagagtgaagttaatgctataaagtgggatccgactggttcttttttggcttcatgttctgatgattggacagcaaagatatggagtatgaaacaagacaaatgtatatttgatttcaaggagcataccaaggaaatatacactattcggtggagcccaacaggcccaggaacaaacaatcctaatcagcagttgcttttggctagctccaatgaacaaaagaaaaattttcttggacatcagtgggtattttgggacagcgcgcatggttctgcaattaccagcttgataatgcaagtacc

SEQ ID NO: 25654 - DNA, 962 bp, Zea Mays
cgaagaacttttaacggcctttattgatttccgtcaaacggttttagtcttttaacaactcacggtacacaacagtttttttacagctcacaacccacaacagttttttcacagccacgacccaactaaatagacccttactcaccatttgcctgctccagtcttagccgtccaaaaagtatcagatgaggtgttttagcacagaagtggagcgacctagttttacaaacgcaacaacacgactcactttagagagcggtaatgttgagggagacaaatctctctccaccatcgcaccgcgccgtcctcgccctcgccgctgcgcccctcccgcgtcttccgcctgctccggcggcgctctcgcctgcgccgcctgctatggggctgctcacgtcggcggagctcaactacctcgtcttccgctacctccaggagtcaggttttattcatgctgcatttactctaggttatgaagctgggatccataagtgtggcattgatggtaatgcagtcccacctggtgctcttatcactattgtgcagaaaggcctccaatacattgaactggaagcaagtagcgatgagaattatgatgaagttgagagggattttgcgcttttggagccacttgaaatcatcacaaaagatgttgaagagttgcaacagattgtgaaaaggaggaaaattgagagatctcaaactgaacttgagaaggataagggaaaagagaaagaacgtaacgaggagcatgaacgacgtccttgtggcgaaagggagagggaacaacatgaaaaagaaaaagagcaagtcagggacaaggacaaatctgaaaaagatagggaccatgataaagagaaggagaaagagagagaaaggcagcatgcagagcgtactgataaggttaaacacgaggatgattctcttgttggtgcaggacgatgggggatgaacactaaagagga

SEQ ID NO: 25655 - DNA, 1317 bp, Zea Mays
cagctctctctctcccctagtccctgccatggccgccgttccctggtcggagtttcttctagctccgatctcctccctacggcgcccgagctccatggctgctgcgttcttcagccgacgcgtcctgccgagtccctctccatccccacggcgtcctgcttgcccagctttcatccatggccggagccctcccatgtcacgtcccagccaagcccctgcctcgatccctgtccgggcctggcggttgcgctgctctggtgcccaggctctagcgcgctcgtcatcagctcgacatctcctcgagctcgcccctgtcttcctgctcggcgcccaaattcctgctcgcctttgcgtcgcgcgcgtagcgttccgttgttcctacgcgtgctgccgcgaagctctctgttcagttcgcctccatcgtgttgtcgtgcgcgcgaaattgctcgctccccgctatcgtcgtttcctcgtgccccgctggtcgtgcgcccctgcagctccctgttcggcaaaatgtgtggaccagtgctcgtcgcgtgttgggaagatcggcaccgatgttcttgccgaatattgattgtttgattttggggagatcgacgcacgcatggtgttcgatgaatggctcaaaccggatagccttgtcgaaatcatagctcctagtcgattcggacatggtacgtgaattaaccacgcgatgcggagaaccagaactgatcgaccacaagatggtgctgatgaacggaactggagatggacagacgaagcaagtatcgggacaaaggatggtcgtcaagtgatcgacgcctaacaaacactaacctagtgttacccagggcaagccccggtgcatgcaaccccttccttgtgtttttaaataatttctgcacactttaagtctagtgaaatgtgcattcggtttataggagttgcttggaaccttttgatgcattgccttccttgctatccacacctatataggtacttctggtgaagtatcaaaacatgatttacaaaaatgcttagccctgcttagatcttgtggatagaggttgtccttagcctagctcgagaaaggattgcttctgtctgcaagaatattttcattgagagcgtggtgggatcttactgcaaagttccctttgatgctcttttcatcctaaggaatacaaacaatcctaagggtggaagtacttaaatcgggacttgggctaggagcaggtgatgctccgcccgggtcaattaaggattggatgcgtatgtaggcctgatagatcaaggactatcttaactggccacatgccctggaaatgg

SEQ ID NO: 25656 - DNA, 2242 bp, Zea Mays
ttcctttgtgtaaaggtgaagccttggagtttttttagtgtcaagggacaactgattagctctcaatatggagatctgtttcccctgctgctgagatgcaggagtttgttcattcgctctcttatttaatccatgtattccctaaccaagtggataatgcgtctcgcatgaaaaaacggataaacaacatgaccaaatggatttctgcccaaatgcatgaccaactgttaatatgagtgaactctcaacccttggcttaccgagggtactgagaggacctgctcaatgtcaaaagttgatcaacaagttggttttgactaacttgtaactgcccaatgaacaaaggttgagtttagagatcgatttgtcgagttatctaaactcactttggttcagcccatcctgagaaagtacttacaaaaatcaagttaaaatcgattgataaccacctagttatcgctctagtcatgtctcgatcgcctcgcgtgtgcttttcccagcatgtgtgatcatgtcgagtcgtgactagtgctggataaacaggattggttgcgaagtcaacatcaacggatttcttcgttgatattttacgagtctttatcatttctctgggacttggattttctggctagccacgggtcaactgtggtgttgttcgccatccgcacttgtcacgtgtgctatgagcttacataaccacttgttggtaaacctctttctgtgtgttttacccaagatggtgcatctggttctgtttgggtaagatcgtgtatttaccgctcgcccaatagactcagatagtacaatgtcatcagaaaaagcaaactgcacacatggaaccttatgtgttcctctggcagacatggtctctattggtggacatttctgaattagcataaggcgatgcatgttatgtccactagagaaacctcatcctgagacacttgccttcgctcagaactgccttatgattaccgctgatatggacgtgggttacatgcttctctactcttgaaagtctttcgctccgaatctcgggacgagattcttttaagggggaagggctgtaacaccccaggtgtttatattccgctcgacgatgagtacgaatttaagcacgtaatcagtggataagacagatgttaaattttaggcatcttcgcctttcgcgattttaatatcgcatctgtttcgtcggtcgcgagttcgacatcggttgtatctatccgggctcttcctaaattttcgtgatgttcggaacatcgttgttctgaaaatcgttgcgtccggtgactatttaaaaattcatcgctcgcacggatacgaattcggaagctcgacccactgggtgatttgtatcccgaacaaattaatttgaactcaacgactaaaatgttcggggcaaaataatttgtgtcgcgcgaactcgtgcgcgaggttaagatctaatttatccgtccgcacgctgttttggcgacgaaatcgcgtatacgttcgcggatttggtttcggctaatttcggtcgaatcatgtagagcagattaaaataccgaagccgaactcgtgtcgatctggtccgtttatatcgtggccggaatagtcacgaaaattatctaaactaatcttagtcagaatcgtaaatctcggatgttctgtttcaggatccgaggaaataatgtgtatagccgtttattatatcgcgcatcgattctttgctcgtcgctagaaatcctgatctgaaatatctgcgattttccattaaaaaaagagaaattaaaaaaatcccagcagtcctatcctctacagccgcccctgatattgtcaaccgtccgttggcacttatcctcccaccgttcaattctcctctccctctgatattttcaacgagctcagatttttggctaattgccttatcctgcagcaaccggtctctctctccctctgatttttcttgccgatcatcagccgtcgtcctcatctgttcgcgcaatcaagaaaaatcaggccccgtcttcatcctttcagcagccgcaagctccagctcttgtccgtaccggccaccgccccagcctgtcgatctcatctccctgtgattttttatcagccgtcggggggagaaaaatcttccctgttcttatcccctcgtcgccctgctcagattttctagccaccgctgtactgatattttggcgcgcgatgcctattccttgcgcgctcctctctgccgagcggcttcttcacg

SEQ ID NO: 25657 - DNA, 1399 bp, Zea Mays
tgcagcaaccggtctctctctccctctgatttttcttgccgatcatcagccgtcgtcctcatctgttcgcgcaatcaagaaaaatcaggccccgtcttcatcctttcagcagccgcaagctccagctcttgtccgtaccggccaccgccccagcctgtcgatctcatctccctgtgattttttatcagccgtcggggggagaaaaatcttccctgttcttatcccctcgtcgccctgctcagattttctagccaccgctgtactgatattttggcgcgcgatgcctattccttgcgcgctcctctctgccgagcggcttcttcacgcgtgtctctctctccctggtgcctgctcgcgacaagctcctgctcccttccgtggtcgcgtgctcagctctactgcaggccgcgcccagcttctctccctcggcgctcacagctctctctctcccctagtccctgccatggccgccgttccctggtcggagtttcttctagctcggatctcctccctacggcgcccgagctccatggctgctgcgttcttcagccgacgcgtcctgccgagtccttctccatccccacggcgtcctgcttgcccagctttcatccatggccggagccctcccatgtcacgtcccagccaagcccctgcctcgatccctgtccgggcctggcggttgcgctgctctggtgcccaggctctagcgcgctcgtcatcagctcgacatctcctcgagctcgcccctgtcttcctgctcggcgcccaaattcctgctcgcctttgcgtcgcgcgcgtagcgttccgttgtttctacgcgtgctgccgcgaagctctctgttcagttcacctccatcgcgttgtcgtgcgcgcgaaattgctcgctccacgctatcgtcgtttcctcgtgcccgctggtcgtgcgcccctgcagctccctgttcggcaaaatgtgtggaccagtgctcgtcgcgtgttgggaagatcggcaccgatgttcttgccgaatattgattgtttgattttggggagatcgacgcacgcatggtgttcgatgaatggctcaaaccggatagccttgtcgaaatcatagctccgagtcgattcggacatggtaagcggatccatttatttcccgtgagtataaggaatagttggattggataaatatagttgtcgcgatgattatcctattgtgagcttacgtgtcgtagttatatttgtcgtaagataaaatgtcttagcatgcattgtggtatggttagtgtttgtggcagtggttcgattattcattgacgtagactcctgatagtgatttgcgggtttagttgggataagctggcgcagaaccaaaaattagtgcgatatttaacgtaatcccgaattagtattcattaat

SEQ ID NO: 25658 - DNA, 864 bp, Zea Mays
ggtttagaaagttagctaggtttcactgctcgtgcctcgagcaccacggcggcggcggcagcgggactgttctggccgacgacggcatcgatgacgacgagccttcaacgggccaagcgcaggcactggcgtcgcaccaaacttggattctgagcggtggaagaaatggtggctaacgacgcctcgggggtatagggctctgcaagctaggaagctcttgtttatttttttcttgtgttatttgtcattgtattaccatgttttgtctgatggttaaagaaccgcctttatgctatggtgaatttatttaaccttgcagcgccttaatcagttgatctctagccaattatataatctgcctagattatataatccatttgccatagattcatttgcaggagtgttaaaacagctcgttgttttgggatttgccgcctcaagtttcatctagctacctccaacaaacccttcaatctccatggctacatcgatatcaactcaatatactaacgaggaggaaattaaaaggaagagaaagaagcgaaagagagttgttgtattagcctagtgtacaataaagaccaagcaaatggagagggtgctaaaacagcagctgaaagttcaaaggaaatgggaaaagagaatgatatcggaggcaaggatgctccatattctgtatcttcctcgagtagtttaaaaagacaaagatcagatgattcatttaactctatatggtgtgataagtttgacatgtatctgcattgaaagatgatggtccaaagctaccctcttccgccgaagttctcgccacattacaagaggttgagggacttgatgaagacacagaacttgagctttatgaca

SEQ ID NO: 25659 - DNA, 655 bp, Zea Mays
ggtttagaaagttagctaggtttcactgctcgtgcctcgagcaccacggcggcggcggcagcgggactgttctggccgacgacggcatcgatgacgacgagccttcaacgggccaagcgcaggcactggcgtcgcaccaaacttggattctgagcggtggaagaaatggtggctaacgacgcctcgggggagtgttaaaacagctcgttgttttgggatttgccgcctcaagtttcatctagctacctccaacaaacccttcaatctccatggctacatcgatatcaactcaatatactaacgaggaggaaattaaaaggaagagaaagaagcgaaagagagttgttgtattagcctagtgtacaataaagaccaagcaaatggagagggtgctaaaacagcagctgaaagttcaaaggaaatgggaaaagagaatgatatcggaggcaaggatgctccatattctgtatcttcctcgagtagtttaaaaagacaaagatcagatgattcatttaactctatatggtgtgataagtttgacatgtatctgcattgaaagatgatggtccaaagctaccctcttccgccgaagttctcgccacattacaagaggttgagggacttgatgaagacacagaacttgagctttatgaca

SEQ ID NO: 25660 - DNA, 568 bp, Zea Mays
ggtttagaaagttagctaggtttcactgctcgtgcctcgagcaccacggcggcggcggcagcgggactgttctggccgacgacggcatcgatgacgacgagggagtgttaaaacagctcgttgttttgggatttgccgcctcaagtttcatctagctacctccaacaaacccttcaatctccatggctacatcgatatcaactcaatatactaacgaggaggaaattaaaaggaagagaaagaagcgaaagagagttgttgtattagcctagtgtacaataaagaccaagcaaatggagagggtgctaaaacagcagctgaaagttcaaaggaaatgggaaaagagaatgatatcggaggcaaggatgctccatattctgtatcttcctcgagtagtttaaaaagacaaagatcagatgattcatttaactctatatggtgtgataagtttgacatgtatctgcattgaaagatgatggtccaaagctaccctcttccgccgaagttctcgccacattacaagaggttgagggacttgatgaagacacagaacttgagctttatgaca

SEQ ID NO: 25661 - DNA, 655 bp, Zea Mays
caattcaccatttcagcccatttcctatccctgaaattttagcctatgcacgtttcagaccctcacccgtcggaaaggtttagaaagttagctaggtttcactgctcgtgcctcgagcaccacggcggcggcggcagcgggactgttctggccgacgacggcatcgatgacgacgagattcatttgcaggagtgttaaaacagctcgttgttttgggatttgccgcctcaagtttcatctagctacctccaacaaacccttcaatctccatggctacatcgatatcaactcaatatactaacgaggaggaaattaaaaggaagagaaagaagcgaaagagagttgttgtattagcctagtgtacaataaagaccaagcaaatggagagggtgctaaaacagcagctgaaagttcaaaggaaatgggaaaagagaatgatatcggaggcaaggatgctccatattctgtatcttcctcgagtagtttaaaaagacaaagatcagatgattcatttaactctatatggtgtgataagtttgacatgtatctgcattgaaagatgatggtccaaagctaccctcttccgccgaagttctcgccacattacaagaggttgagggacttgatgaagacacagaacttgagctttatgaca

SEQ ID NO: 25662 - DNA, 998 bp, Zea Mays
attcaattcaccatttcagcccatttcctatccctgaaattttagcctatgcacgtttcagaccctcacccgtcggaaaggtttagaaagttagctaggtttcactgctcgtgcctcgagcaccacggcggcggcggcagcgggactgttctggccgacgacggcatcgatgacgacgagtttttgctacttcttttagtcattttacctcccctggccctggcgagttgcacagccttcaacgggccaagcgcaggcactggcgtcgcaccaaacttggattctgagcggtggaagaaatggtggctaacgacgcctcgggggtatagggctctgcaagctaggaagctcttgtttatttttttcttgtgttatttgtcattgtattaccatgttttgtctgatggttaaagaaccgcctttatgctatggtgaatttatttaaccttgcagcgccttaatcagttgatctctagccaattatataatctgcctagattatataatccatttgccatagattcatttgcaggagtgttaaaacagctcgttgttttgggatttgccgcctcaagtttcatctagctacctccaacaaacccttcaatctccatggctacatcgatatcaactcaatatactaacgaggaggaaattaaaaggaagagaaagaagcgaaagagagttgttgtattagcctagtgtacaataaagaccaagcaaatggagagggtgctaaaacagcagctgaaagttcaaaggaaatgggaaaagagaatgatatcggaggcaaggatgctccatattctgtatcttcctcgagtagtttaaaaagacaaagatcagatgattcatttaactctatatggtgtgataagtttgacatgtatctgcattgaaagatgatggtccaaagctaccctcttccgccgaagttctcgccacattacaagaggttgagggacttgatgaagacacagaacttgagctttatgaca

SEQ ID NO: 25663 - DNA, 751 bp, Zea Mays
caaaacatatatttctagacttttcttttacagcccgtttggtttacaggaattggtctgaattgaatcagtttccatttctcggcccgtttggctgtccatagaattcaattcaccatttcagcccatttcctatccctgaaattttagcctatgcacgtttcagaccctcacccgtcggaaaggtttagaaagttagctaggtttcactgctcgtgcctcgagcaccacggcggcggcggcagcgggactgttctggccgacgacggcatcgatgacgacgaggagtgttaaaacagctcgttgttttgggatttgccgcctcaagtttcatctagctacctccaacaaacccttcaatctccatggctacatcgatatcaactcaatatactaacgaggaggaaattaaaaggaagagaaagaagcgaaagagagttgttgtattagcctagtgtacaataaagaccaagcaaatggagagggtgctaaaacagcagctgaaagttcaaaggaaatgggaaaagagaatgatatcggaggcaaggatgctccatattctgtatcttcctcgagtagtttaaaaagacaaagatcagatgattcatttaactctatatggtgtgataagtttgacatgtatctgcattgaaagatgatggtccaaagctaccctcttccgccgaagttctcgccacattacaagaggttgagggacttgatgaagacacagaacttgagctttatgaca

SEQ ID NO: 25664 - DNA, 352 bp, Zea Mays
ttaattccaggactacaagatccatcgagatgaaattcacaacaaacttgtccagataatgagagagaggttgcttgcaaatcttagaaaattaccccaaattgtggaaggctggaatggcccagaggataatgacgtgcagccgagtcaatttgctaaagctgttacaaaggaagttacctatttgcatcgcattctttcccaaacattgcttgaggttgaggtgcaaacaatattcaggcaagtggttcaaatattccattcacatattacagaagcattttcaaaattggaagtcaatactccctctggcaaagaataggtatgctgcttatttgtgcatcttttagca

SEQ ID NO: 25665 - DNA, 1459 bp, Zea Mays
atcaaatacaaattggccactaggtacatttacagcaagcagctgaagtgaaaagaatagttgagtgggtcatgggaaaccttgatggaacgttaggtgttgatgctagtaatcctacgttacaacatggtggtacagttattcctgatacccaagaaaatgactcttcaagaggctctaatactcttacacggagtacttccaagatcccatttgtccaaggaaaaacaaatgatttttccattataaattcgttaaagaatgttcgggctgatgtcttgagagagaacactgaagcagttttcgcggcttgtgatgctgcccatggacggtgggctaagctgctaggtgttcgttctgctttacatcccagattggaggcaggttgggttacaacattcgtggaatcctacatcaacaatcgaagcaattcgttgattatcagcataatgttcggatgacaaaaatcaaggcagttctagatcaagagacgtgggttgctgtggatgttcctgaagagtttcaagcaatcgttctttcactttcatccacttattcttctgttaatggcatggagatgcctagcactgatgataactcaaagtttagtgatcatcggtctacaagtcaagaaccgacatattcagctaaaaatattgctgataatggcaaagtaacatccgggactggtgaaaacaaggttgaattcacttcacagactgaaaataatgttgccgggaatctaaagtccaccttgcaaacgattgtacatggaggtgttggctatcatatggtaaactgtggtttaatactgttgaagatgttatccgaatacgttgacatcagtaaatgtttaccatcactatctttggaggtggtccaacgtgttgtggaaatattaaagcttttcaacactaggacttgccaacttgttctcggtgcaggagccatgcaggtgtctggacttaaatcaattacgtccaaacatttagctttggcgagtcaaatcattagttttatgcattctttaattccagatatcaggcgagtacttttcctgaaaatacctgaagcgcgcaaacatctgttaatgtctgagctggatagagtagctcaggactacaagatccatcgagatgaaattcacaacaaacttgtccagataatgagagagaggttgcttgcaaatcttagaaaattaccccaaattgtggaaggctggaatggcccagaggataatgacgtgcagccgagtcaatttgctaaagctgttacaaaggaagttacctatttgcatcgcattctttcccaaacattgcttgaggttgaggtgcaaacaatattcaggcaagtggttcaaatattccattcacatattacagaagcattttcaaaattggaagtcaatactccctctggcaaagaataggtatgctgcttatttgtgcatcttttagca

SEQ ID NO: 25666 - DNA, 1518 bp, Zea Mays
gcacatcaaatacaaattggccactaggtacatttacagcaagcagctgaagtgaaaagaatagttgagtgggtcatgggaaaccttgatggaacgttaggtgttgatgctagtaatcctacgttacaacatggtggtacagttattcctgatacccaagaaaatgactcttcaagaggctctaatactcttacacggagtacttccaagatcccatttgtccaaggaaaaacaaatgatttttccattataaattcgttaaagaatgttcgggctgatgtcttgagagagaacactgaagcagttttcgcggcttgtgatgctgcccatggacggtgggctaagctgctaggtgttcgttctgctttacatcccaggttaaggcttcaagaattcttgatcatctacaacataacagaagaatttatagctgctacagaaaagattggaggcaggttgggttacaacattcgtggaatcctacatcaacaatcgaagcaattcgttgattatcagcataatgttcggatgacaaaaatcaaggcagttctagatcaagagacgtgggttgctgtggatgttcctgaagagtttcaagcaatcgttctttcactttcatccacttattcttctgttaatggcatggagatgcctagcactgatgataactcaaagtttagtgatcatcggtctacaagtcaagaaccgacatattcagctaaaaatattgctgataatggcaaagtaacatccgggactggtgaaaacaaggttgaattcacttcacagactgaaaataatgttgccgggaatctaaagtccaccttgcaaacgattgtacatggaggtgttggctatcatatgtggtttaatactgttgaagatgttatccgaatacgttgacatcagtaaatgtttaccatcactatctttggaggtggtccaacgtgttgtggaaatattaaagcttttcaacactaggacttgccaacttgttctcggtgcaggagccatgcaggtgtctggacttaaatcaattacgtccaaacatttagctttggcgagtcaaatcattagttttatgcattctttaattccagatatcaggcgagtacttttcctgaaaatacctgaagcgcgcaaacatctgttaatgtctgagctggatagagtagctcaggactacaagatccatcgagatgaaattcacaacaaacttgtccagataatgagagagaggttgcttgcaaatcttagaaaattaccccaaattgtggaaggctggaatggcccagaggataatgacgtgcagccgagtcaatttgctaaagctgttacaaagttacctatttgcatcgcattctttcccaaacattgcttgaggttgaggtgcaaacaatattcaggcaagtggttcaaatattccattcacatattacagaagcattttcaaaattggaagtcaatactccctctggcaaagaataggtatgctgcttatttgtgcatcttttagca

SEQ ID NO: 25667 - DNA, 1537 bp, Zea Mays
attttgtattaaatgggtgcacatcaaatacaaattggccactaggtacatttacagcaagcagctgaagtgaaaagaatagttgagtgggtcatgggaaaccttgatggaacgttaggtgttgatgctagtaatcctacgttacaacatggtggtacagttattcctgatacccaagaaaatgactcttcaagaggctctaatactcttacacggagtacttccaagatcccatttgtccaaggaaaaacaaatgatttttccattataaattcgttaaagaatgttcgggctgatgtcttgagagagaacactgaagcagttttcgcggcttgtgatgctgcccatggacggtgggctaagctgctaggtgttcgttctgctttacatcccaggttaaggcttcaagaattcttgatcatctacaacataacagaagaatttatagctgctacagaaaaggttgggttacaacattcgtggaatcctacatcaacaatcgaagcaattcgttgattatcagcataatgttcggatgacaaaaatcaaggcagttctagatcaagagacgtgggttgctgtggatgttcctgaagagtttcaagcaatcgttctttcactttcatccacttattcttctgttaatggcatggagatgcctagcactgatgataactcaaagtttagtgatcatcggtctacaagtcaagaaccgacatattcagctaaaaatattgctgataatggcaaagtaacatccgggactggtgaaaacaaggttgaattcacttcacagactgaaaataatgttgccgggaatctaaagtccaccttgcaaacgattgtacatggaggtgttggctatcatatggtaaactgtggtttaatactgttgaagatgttatccgaatacgttgacatcagtaaatgtttaccatcactatctttggaggtggtccaacgtgttgtggaaatattaaagcttttcaacactaggacttgccaacttgttctcggtgcaggagccatgcaggtgtctggacttaaatcaattacgtccaaacatttagctttggcgagtcaaatcattagttttatgcattctttaattccagatatcaggcgagtacttttcctgaaaatacctgaagcgcgcaaacatctgttaatgtctgagctggatagagtagctcaggactacaagatccatcgagatgaaattcacaacaaacttgtccagataatgagagagaggttgcttgcaaatcttagaaaattaccccaaattgtggaaggctggaatggcccagaggataatgacgtgcagccgagtcaatttgctaaagctgttacaaaggaagttacctatttgcatcgcattctttcccaaacattgcttgaggttgaggtgcaaacaatattcaggcaagtggttcaaatattccattcacatattacagaagcattttcaaaattggaagtcaatactccctctggcaaagaataggtatgctgcttatttgtgcatcttttagca

SEQ ID NO: 25668 - DNA, 1631 bp, Zea Mays
tgaggtttacttggttcagctaagcaatctttatgttgccctctatagcctatgtcctgattgtttaatttgttttcatgacatgtgattttgtattaaatgggtgcacatcaaatacaaattggccactaggtacatttacagcaagcagctgaagtgaaaagaatagttgagtgggtcatgggaaaccttgatggaacgttaggtgttgatgctagtaatcctacgttacaacatggtggtacagttattcctgatacccaagaaaatgactcttcaagaggctctaatactcttacacggagtacttccaagatcccatttgtccaaggaaaaacaaatgatttttccattataaattcgttaaagaatgttcgggctgatgtcttgagagagaacactgaagcagttttcgcggcttgtgatgctgcccatggacggtgggctaagctgctaggtgttcgttctgctttacatcccaggttaaggcttcaagaattcttgatcatctacaacataacagaagaatttatagctgctacagaaaagattggaggcaggttgggttacaacattcgtggaatcctacatcaacaatcgaagcaattcgttgattatcagcataatgttcggatgacaaaaatcaaggcagttctagatcaagagacgtgggttgctgtggatgttcctgaagagtttcaagcaatcgttctttcactttcatccacttattcttctgttaatggcatggagatgcctagcactgatgataactcaaagtttagtgatcatcggtctacaagtcaagaaccgacatattcagctaaaaatattgctgataatggcaaagtaacatccgggactggtgaaaacaaggttgaattcacttcacagactgaaaataatgttgccgggaatctaaagtccaccttgcaaacgattgtacatggaggtgttggctatcatatggtaaactgtggtttaatactgttgaagatgttatccgaatacgttgacatcagtaaatgtttaccatcactatctttggaggtggtccaacgtgttgtggaaatattaaagcttttcaacactaggacttgccaacttgttctcggtgcaggagccatgcaggtgtctggacttaaatcaattacgtccaaacatttagctttggcgagtcaaatcattagttttatgcattctttaattccagatatcaggcgagtacttttcctgaaaatacctgaagcgcgcaaacatctgttaatgtctgagctggatagagtagctcaggactacaagatccatcgagatgaaattcacaacaaacttgtccagataatgagagagaggttgcttgcaaatcttagaaaattaccccaaattgtggaaggctggaatggcccagaggataatgacgtgcagccgagtcaatttgctaaagctgttacaaagttacctatttgcatcgcattctttcccaaacattgcttgaggttgaggtgcaaacaatattcaggcaagtggttcaaatattccattcacatattacagaagcattttcaaaattggaagtcaatactccctctggcaaagaataggtatgctgcttatttgtgcatcttttagca

SEQ ID NO: 25669 - DNA, 1634 bp, Zea Mays
cccttattgaggtttacttggttcagctaagcaatctttatgttgccctctatagcctatgtcctgattgtttaatttgttttcatgacatgtgattttgtattaaatgggtgcacatcaaatacaaattggccactaggtacatttacagcaagcagctgaagtgaaaagaatagttgagtgggtcatgggaaaccttgatggaacgttaggtgttgatgctagtaatcctacgttacaacatggtggtacagttattcctgatacccaagaaaatgactcttcaagaggctctaatactcttacacggagtacttccaagatcccatttgtccaaggaaaaacaaatgatttttccattataaattcgttaaagaatgttcgggctgatgtcttgagagagaacactgaagcagttttcgcggcttgtgatgctgcccatggacggtgggctaagctgctaggtgttcgttctgctttacatcccaggttaaggcttcaagaattcttgatcatctacaacataacagaagaatttatagctgctacagaaaagattggaggcaggttgggttacaacattcgtggaatcctacatcaacaatcgaagcaattcgttgattatcagcataatgttcggatgacaaaaatcaaggcagttctagatcaagagacgtgggttgctgtggatgttcctgaagagtttcaagcaatcgttctttcactttcatccacttattcttctgttaatggcatggagatgcctagcactgatgataactcaaagtttagtgatcatcggtctacaagtcaagaaccgacatattcagctaaaaatattgctgataatggcaaagtaacatccgggactggtgaaaacaaggttgaattcacttcacagactgaaaataatgttgccgggaatctaaagtccaccttgcaaacgattgtacatggaggtgttggctatcatatgtggtttaatactgttgaagatgttatccgaatacgttgacatcagtaaatgtttaccatcactatctttggaggtggtccaacgtgttgtggaaatattaaagcttttcaacactaggacttgccaacttgttctcggtgcaggagccatgcaggtgtctggacttaaatcaattacgtccaaacatttagctttggcgagtcaaatcattagttttatgcattctttaattccagatatcaggcgagtacttttcctgaaaatacctgaagcgcgcaaacatctgttaatgtctgagctggatagagtagctcaggactacaagatccatcgagatgaaattcacaacaaacttgtccagataatgagagagaggttgcttgcaaatcttagaaaattaccccaaattgtggaaggctggaatggcccagaggataatgacgtgcagccgagtcaatttgctaaagctgttacaaaggaagttacctatttgcatcgcattctttcccaaacattgcttgaggttgaggtgcaaacaatattcaggcaagtggttcaaatattccattcacatattacagaagcattttcaaaattggaagtcaatactccctctggcaaagaataggtatgctgcttatttgtgcatcttttagca

SEQ ID NO: 25670 - DNA, 1661 bp, Zea Mays
aagatcctaggaaaatttgatcctgggtaaattagctcttgtgttcagggataaagtatacttggataagccctgcactgtttttatcccttattgaggtttacttggttcagctaagcaatctttatgttgccctctatagcctatgtcctgattgtttaatttgttttcatgacatgtgattttgtattaaatgggtgcacatcaaatacaaattggccactaggtacatttacagcaagcagctgaagtgaaaagaatagttgagtgggtcatgggaaaccttgatggaacgttaggtgttgatgctagtaatcctacgttacaacatggtggtacagttattcctgatacccaagaaaatgactcttcaagaggctctaatactcttacacggagtacttccaagatcccatttgtccaaggaaaaacaaatgatttttccattataaattcgttaaagaatgttcgggctgatgtcttgagagagaacactgaagcagttttcgcggcttgtgatgctgcccatggacggtgggctaagctgctaggtgttcgttctgctttacatcccaggttaaggcttcaagaattcttgatcatctacaacataacagaagaatttatagctgctacagaaaagattggaggcaggttgggttacaacattcgtggaatcctacatcaacaatcgaagcaattcgttgattatcagcataatgttcggatgacaaaaatcaaggcagttctagatcaagagacgtgggttgctgtggatgttcctgaagagtttcaagcaatcgttctttcactttcatccacttattcttctgttaatggcatggagatgcctagcactgatgataactcaaagtttagtgatcatcggtctacaagtcaagaaccgacatattcagctaaaaatattgctgataatggcaaagtaacatccgggactggtgaaaacaaggttgaattcacttcacagactgaaaataatgttgccgggaatctaaagtccaccttgcaaacgattgtacatggaggtgttggctatcatatggtaaactgtggtttaatactgttgaagatgttatccgaatacgttgacatcagtaaatgtttaccatcactatctttggaggtggtccaacgtgttgtggaaatattaaagcttttcaacactaggacttgccaacttgttctcggtgcaggagccatgcaggtgtctggacttaaatcaattacgtccaaacatttagctttggcgagtcaaatcattagttttatgcattctttaattccagatatcaggcgagtacttttcctgaaaatacctgaagcgcgcaaacatctgttaatgtctgagctggatagagtagctcaggactacaagatccatcgagatgaaattcacaacaaacttgtccagataatgagagagaggttgcttgcaaatcttagaaaattaccccaaattgtggaaggctggaatggcccagaggataatgacgtgcagccgagtcaatttgctaaagctgttacaaaggcaagtggttcaaatattccattcacatattacagaagcattttcaaaattggaagtcaatactccctctggcaaagaataggtatgctgcttatttgtgcatcttttagca

SEQ ID NO: 25671 - DNA, 1834 bp, Zea Mays
ctcactttttgttactgagagtctgttcattttgataatttctgtattgggttagggattcagatggaggcatgatctgaacaaagacaaacttcctgctgttctcagaatttaccgggatacacttataactgttatgaaagcttcaatcaaaaccacagtaggagagttactcccagttttaactgccagaccaatagattctgactcagtaactggagacagagctaccgatgctgatgctggaggccagtccttagcaaataagttgcggagtctttcatctgaaggatttgttcaacttttatctgccattttcaggatagtacaggtacatttacagcaagcagctgaagtgaaaagaatagttgagtgggtcatgggaaaccttgatggaacgttaggtgttgatgctagtaatcctacgttacaacatggtggtacagttattcctgatacccaagaaaatgactcttcaagaggctctaatactcttacacggagtacttccaagatcccatttgtccaaggaaaaacaaatgatttttccattataaattcgttaaagaatgttcgggctgatgtcttgagagagaacactgaagcagttttcgcggcttgtgatgctgcccatggacggtgggctaagctgctaggtgttcgttctgctttacatcccaggttaaggcttcaagaattcttgatcatctacaacataacagaagaatttatagctgctacagaaaagattggaggcaggttgggttacaacattcgtggaatcctacatcaacaatcgaagcaattcgttgattatcagcataatgttcggatgacaaaaatcaaggcagttctagatcaagagacgtgggttgctgtggatgttcctgaagagtttcaagcaatcgttctttcactttcatccacttattcttctgttaatggcatggagatgcctagcactgatgataactcaaagtttagtgatcatcggtctacaagtcaagaaccgacatattcagctaaaaatattgctgataatggcaaagtaacatccgggactggtgaaaacaaggttgaattcacttcacagactgaaaataatgttgccgggaatctaaagtccaccttgcaaacgattgtacatggaggtgttggctatcatatggtaaactgtggtttaatactgttgaagatgttatccgaatacgttgacatcagtaaatgtttaccatcactatctttggaggtggtccaacgtgttgtggaaatattaaagcttttcaacactaggacttgccaacttgttctcggtgcaggagccatgcaggtgtctggacttaaatcaattacgtccaaacatttagctttggcgagtcaaatcattagttttatgcattctttaattccagatatcaggcgagtacttttcctgaaaatacctgaagcgcgcaaacatctgttaatgtctgagctggatagagtagctcaggactacaagatccatcgagatgaaattcacaacaaacttgtccagataatgagagagaggttgcttgcaaatcttagaaaattaccccaaattgtggaaggctggaatggcccagaggataatgacgtgcagccgagtcaatttgctaaagctgttacaaaggaagttacctatttgcatcgcattctttcccaaacattgcttgaggttgaggtgcaaacaatattcaggcaagtggttcaaatattccattcacatattacagaagcattttcaaaattggaagtcaatactccctctggcaaagaataggtatgctgcttatttgtgcatcttttagca

SEQ ID NO: 25672 - DNA, 1875 bp, Zea Mays
ctaaagttttgtcttcaacatgtgcccagtagaagcaaataaaatcatgtgggtaatgtagatgaggaggaaagttttattctcagggatcgactcctccccctcattatttgcctactgaggacggacaaacttcctgctgttctcagaatttaccgggatacacttataactgttatgaaagcttcaatcaaaaccacagtaggagagttactcccagttttaactgccagaccaatagattctgactcagtaactggagacagagctaccgatgctgatgctggaggccagtccttagcaaataagttgcggagtctttcatctgaaggatttgttcaacttttatctgccattttcaggatagtacaggtacatttacagcaagcagctgaagtgaaaagaatagttgagtgggtcatgggaaaccttgatggaacgttaggtgttgatgctagtaatcctacgttacaacatggtggtacagttattcctgatacccaagaaaatgactcttcaagaggctctaatactcttacacggagtacttccaagatcccatttgtccaaggaaaaacaaatgatttttccattataaattcgttaaagaatgttcgggctgatgtcttgagagagaacactgaagcagttttcgcggcttgtgatgctgcccatggacggtgggctaagctgctaggtgttcgttctgctttacatcccaggttaaggcttcaagaattcttgatcatctacaacataacagaagaatttatagctgctacagaaaagattggaggcaggttgggttacaacattcgtggaatcctacatcaacaatcgaagcaattcgttgattatcagcataatgttcggatgacaaaaatcaaggcagttctagatcaagagacgtgggttgctgtggatgttcctgaagagtttcaagcaatcgttctttcactttcatccacttattcttctgttaatggcatggagatgcctagcactgatgataactcaaagtttagtgatcatcggtctacaagtcaagaaccgacatattcagctaaaaatattgctgataatggcaaagtaacatccgggactggtgaaaacaaggttgaattcacttcacagactgaaaataatgttgccgggaatctaaagtccaccttgcaaacgattgtacatggaggtgttggctatcatatggtaaactgtggtttaatactgttgaagatgttatccgaatacgttgacatcagtaaatgtttaccatcactatctttggaggtggtccaacgtgttgtggaaatattaaagcttttcaacactaggacttgccaacttgttctcggtgcaggagccatgcaggtgtctggacttaaatcaattacgtccaaacatttagctttggcgagtcaaatcattagttttatgcattctttaattccagatatcaggcgagtacttttcctgaaaatacctgaagcgcgcaaacatctgttaatgtctgagctggatagagtagctcaggactacaagatccatcgagatgaaattcacaacaaacttgtccagataatgagagagaggttgcttgcaaatcttagaaaattaccccaaattgtggaaggctggaatggcccagaggataatgacgtgcagccgagtcaatttgctaaagctgttacaaaggaagttacctatttgcatcgcattctttcccaaacattgcttgaggttgaggtgcaaacaatattcaggcaagtggttcaaatattccattcacatattacagaagcattttcaaaattggaagtcaatactccctctggcaaagaataggtatgctgcttatttgtgcatcttttagca

SEQ ID NO: 25673 - DNA, 1883 bp, Zea Mays
ccaggatgttcgagacgagttcttcatctatgttcttctttgtagatgccatctcatatggtaatgtagatgaggaggaaagttttattctcagggatcgactcctccccctcattatttgcctactgaggacggacaaacttcctgctgttctcagaatttaccgggatacacttataactgttatgaaagcttcaatcaaaaccacagtaggagagttactcccagttttaactgccagaccaatagattctgactcagtaactggagacagagctaccgatgctgatgctggaggccagtccttagcaaataagttgcggagtctttcatctgaaggatttgttcaacttttatctgccattttcaggatagtacaggtacatttacagcaagcagctgaagtgaaaagaatagttgagtgggtcatgggaaaccttgatggaacgttaggtgttgatgctagtaatcctacgttacaacatggtggtacagttattcctgatacccaagaaaatgactcttcaagaggctctaatactcttacacggagtacttccaagatcccatttgtccaaggaaaaacaaatgatttttccattataaattcgttaaagaatgttcgggctgatgtcttgagagagaacactgaagcagttttcgcggcttgtgatgctgcccatggacggtgggctaagctgctaggtgttcgttctgctttacatcccaggttaaggcttcaagaattcttgatcatctacaacataacagaagaatttatagctgctacagaaaagattggaggcaggttgggttacaacattcgtggaatcctacatcaacaatcgaagcaattcgttgattatcagcataatgttcggatgacaaaaatcaaggcagttctagatcaagagacgtgggttgctgtggatgttcctgaagagtttcaagcaatcgttctttcactttcatccacttattcttctgttaatggcatggagatgcctagcactgatgataactcaaagtttagtgatcatcggtctacaagtcaagaaccgacatattcagctaaaaatattgctgataatggcaaagtaacatccgggactggtgaaaacaaggttgaattcacttcacagactgaaaataatgttgccgggaatctaaagtccaccttgcaaacgattgtacatggaggtgttggctatcatatggtaaactgtggtttaatactgttgaagatgttatccgaatacgttgacatcagtaaatgtttaccatcactatctttggaggtggtccaacgtgttgtggaaatattaaagcttttcaacactaggacttgccaacttgttctcggtgcaggagccatgcaggtgtctggacttaaatcaattacgtccaaacatttagctttggcgagtcaaatcattagttttatgcattctttaattccagatatcaggcgagtacttttcctgaaaatacctgaagcgcgcaaacatctgttaatgtctgagctggatagagtagctcaggactacaagatccatcgagatgaaattcacaacaaacttgtccagataatgagagagaggttgcttgcaaatcttagaaaattaccccaaattgtggaaggctggaatggcccagaggataatgacgtgcagccgagtcaatttgctaaagctgttacaaaggaagttacctatttgcatcgcattctttcccaaacattgcttgaggttgaggtgcaaacaatattcaggcaagtggttcaaatattccattcacatattacagaagcattttcaaaattggaagtcaatactccctctggcaaagaataggtatgctgcttatttgtgcatcttttagca

SEQ ID NO: 25674 - DNA, 1702 bp, Zea Mays
ttcctctattaccaacagtgtggacccctaatctgggtaatgtagatgaggaggaaagttttattctcagggatcgactcctccccctcattatttgcctactgaggacgctggaggccagtccttagcaaataagttgcggagtctttcatctgaaggatttgttcaacttttatctgccattttcaggatagtacaggtacatttacagcaagcagctgaagtgaaaagaatagttgagtgggtcatgggaaaccttgatggaacgttaggtgttgatgctagtaatcctacgttacaacatggtggtacagttattcctgatacccaagaaaatgactcttcaagaggctctaatactcttacacggagtacttccaagatcccatttgtccaaggaaaaacaaatgatttttccattataaattcgttaaagaatgttcgggctgatgtcttgagagagaacactgaagcagttttcgcggcttgtgatgctgcccatggacggtgggctaagctgctaggtgttcgttctgctttacatcccaggttaaggcttcaagaattcttgatcatctacaacataacagaagaatttatagctgctacagaaaagattggaggcaggttgggttacaacattcgtggaatcctacatcaacaatcgaagcaattcgttgattatcagcataatgttcggatgacaaaaatcaaggcagttctagatcaagagacgtgggttgctgtggatgttcctgaagagtttcaagcaatcgttctttcactttcatccacttattcttctgttaatggcatggagatgcctagcactgatgataactcaaagtttagtgatcatcggtctacaagtcaagaaccgacatattcagctaaaaatattgctgataatggcaaagtaacatccgggactggtgaaaacaaggttgaattcacttcacagactgaaaataatgttgccgggaatctaaagtccaccttgcaaacgattgtacatggaggtgttggctatcatatggtaaactgtggtttaatactgttgaagatgttatccgaatacgttgacatcagtaaatgtttaccatcactatctttggaggtggtccaacgtgttgtggaaatattaaagcttttcaacactaggacttgccaacttgttctcggtgcaggagccatgcaggtgtctggacttaaatcaattacgtccaaacatttagctttggcgagtcaaatcattagttttatgcattctttaattccagatatcaggcgagtacttttcctgaaaatacctgaagcgcgcaaacatctgttaatgtctgagctggatagagtagctcaggactacaagatccatcgagatgaaattcacaacaaacttgtccagataatgagagagaggttgcttgcaaatcttagaaaattaccccaaattgtggaaggctggaatggcccagaggataatgacgtgcagccgagtcaatttgctaaagctgttacaaaggaagttacctatttgcatcgcattctttcccaaacattgcttgaggttgaggtgcaaacaatattcaggcaagtggttcaaatattccattcacatattacagaagcattttcaaaattggaagtcaatactccctctggcaaagaataggtatgctgcttatttgtgcatcttttagca

SEQ ID NO: 25675 - DNA, 1958 bp, Zea Mays
atcctatcctatcttaactggctcctattctaactctgctatctttgggacagatcaaacttgatcctatcctatcttcaatcagagtcgcttaaggtcttcctctattaccaacagtgtggacccctaatctgggtaatgtagatgaggaggaaagttttattctcagggatcgactcctccccctcattatttgcctactgaggacggacaaacttcctgctgttctcagaatttaccgggatacacttataactgttatgaaagcttcaatcaaaaccacagtaggagagttactcccagttttaactgccagaccaatagattctgactcagtaactggagacagagctaccgatgctgatgctggaggccagtccttagcaaataagttgcggagtctttcatctgaaggatttgttcaacttttatctgccattttcaggatagtacaggtacatttacagcaagcagctgaagtgaaaagaatagttgagtgggtcatgggaaaccttgatggaacgttaggtgttgatgctagtaatcctacgttacaacatggtggtacagttattcctgatacccaagaaaatgactcttcaagaggctctaatactcttacacggagtacttccaagatcccatttgtccaaggaaaaacaaatgatttttccattataaattcgttaaagaatgttcgggctgatgtcttgagagagaacactgaagcagttttcgcggcttgtgatgctgcccatggacggtgggctaagctgctaggtgttcgttctgctttacatcccaggttaaggcttcaagaattcttgatcatctacaacataacagaagaatttatagctgctacagaaaagattggaggcaggttgggttacaacattcgtggaatcctacatcaacaatcgaagcaattcgttgattatcagcataatgttcggatgacaaaaatcaaggcagttctagatcaagagacgtgggttgctgtggatgttcctgaagagtttcaagcaatcgttctttcactttcatccacttattcttctgttaatggcatggagatgcctagcactgatgataactcaaagtttagtgatcatcggtctacaagtcaagaaccgacatattcagctaaaaatattgctgataatggcaaagtaacatccgggactggtgaaaacaaggttgaattcacttcacagactgaaaataatgttgccgggaatctaaagtccaccttgcaaacgattgtacatggaggtgttggctatcatatggtaaactgtggtttaatactgttgaagatgttatccgaatacgttgacatcagtaaatgtttaccatcactatctttggaggtggtccaacgtgttgtggaaatattaaagcttttcaacactaggacttgccaacttgttctcggtgcaggagccatgcaggtgtctggacttaaatcaattacgtccaaacatttagctttggcgagtcaaatcattagttttatgcattctttaattccagatatcaggcgagtacttttcctgaaaatacctgaagcgcgcaaacatctgttaatgtctgagctggatagagtagctcaggactacaagatccatcgagatgaaattcacaacaaacttgtccagataatgagagagaggttgcttgcaaatcttagaaaattaccccaaattgtggaaggctggaatggcccagaggataatgacgtgcagccgagtcaatttgctaaagctgttacaaaggaagttacctatttgcatcgcattctttcccaaacattgcttgaggttgaggtgcaaacaatattcaggcaagtggttcaaatattccattcacatattacagaagcattttcaaaattggaagtcaatactccctctggcaaagaataggtatgctgcttatttgtgcatcttttagca

SEQ ID NO: 25676 - DNA, 2946 bp, Zea Mays
gatctgacacccctcccacccaaccttgcttcgctcccgcgcctcccagatccgatcttcccatgcctcacttccgctgatcccactgccgccgcggaccgccgcgatggcgtcgcgcccgcctctccgcaccacctccgtcgcctccgtctcatcctccaccgagtcccccacctccaccggcccccccggcggcgtcccgcagtccatcaccgcgctcctcaacaacccgctcccctccgccgccgcctcctcgtactcctggttgtcctggccgcctcccaccatcacgctacccgatgcggctccaccaccgccgtcgcatccctgcgaggtcactcgcgccgacttcgcgccctaccttgccgctgtctccgaccccttcgcgcgcttcgccgacatccgcctccacgccagcgccgagctcgccgccgcctctgacgccgagggcgccccagcggtctcctctggcctcgccgcctgcctccgcgaggtgcccgcgctcttcttcaaggaggacttcgcgctcgaggacgggcccaccttccaggtcgcctgcccgctcgatgatgaagcgctgcaggagcgcctcggacagcaccttgacgtcgttgaagcccaccttgtgcgggagatagcgctccggtccgagtccttctacgaagcgcagggccggctgcgcgggcttgatggggagatagtcacgactgtagggaggatccgcgagctcagagaggtggtccgggttctcacgggggacctcgtcggggcagcgaggcaggtgcaagagctcaatgctacccgaggcaaccttgtgacgctgcagcagaagctaactgtcatcctgtatgtcagccaggcgcttaccgcgctcaagctgcttgtcgcagcagcagattgtgctggtgccctcgatgtcattgataacttgcaaaatctgctagatactgatgaacttgctgggctttattgcttttggcatattcgagatcagctgggaacatcactagattcagtgaacagcagaatttgtgcatgctgctgttcctgatggaaaagctgtagatgttatgattttatcaactgtgaaaagaaaggcttccagcccattgaatgggacggaccatgagggtaatgtagatgaggaggaaagttttattctcagggatcgactcctccccctcattatttgcctactgaggacggacaaacttcctgctgttctcagaatttaccgggatacacttataactgttatgaaagcttcaatcaaaaccacagtaggagagttactcccagttttaactgccagaccaatagattctgactcagtaactggagacagagctaccgatgctgatgctggaggccagtccttagcaaataagttgcggagtctttcatctgaaggatttgttcaacttttatctgccattttcaggatagtacaggtacatttacagcaagcagctgaagtgaaaagaatagttgagtgggtcatgggaaaccttgatggaacgttaggtgttgatgctagtaatcctacgttacaacatggtggtacagttattcctgatacccaagaaaatgactcttcaagaggctctaatactcttacacggagtacttccaagatcccatttgtccaaggaaaaacaaatgatttttccattataaattcgttaaagaatgttcgggctgatgtcttgagagagaacactgaagcagttttcgcggcttgtgatgctgcccatggacggtgggctaagctgctaggtgttcgttctgctttacatcccaggttaaggcttcaagaattcttgatcatctacaacataacagaagaatttatagctgctacagaaaagattggaggcaggttgggttacaacattcgtggaatcctacatcaacaatcgaagcaattcgttgattatcagcataatgttcggatgacaaaaatcaaggcagttctagatcaagagacgtgggttgctgtggatgttcctgaagagtttcaagcaatcgttctttcactttcatccacttattcttctgttaatggcatggagatgcctagcactgatgataactcaaagtttagtgatcatcggtctacaagtcaagaaccgacatattcagctaaaaatattgctgataatggcaaagtaacatccgggactggtgaaaacaaggttgaattcacttcacagactgaaaataatgttgccgggaatctaaagtccaccttgcaaacgattgtacatggaggtgttggctatcatatgtggtttaatactgttgaagatgttatccgaatacgttgacatcagtaaatgtttaccatcactatctttggaggtggtccaacgtgttgtggaaatattaaagcttttcaacactaggacttgccaacttgttctcggtgcaggagccatgcaggtgtctggacttaaatcaattacgtccaaacatttagctttggcgagtcaaatcattagttttatgcattctttaattccagatatcaggcgagtacttttcctgaaaatacctgaagcgcgcaaacatctgttaatgtctgagctggatagagtagctcaggactacaagatccatcgagatgaaattcacaacaaacttgtccagataatgagagagaggttgcttgcaaatcttagaaaattaccccaaattgtggaaggctggaatggcccagaggataatgacgtgcagccgagtcaatttgctaaagctgttacaaaggaagttacctatttgcatcgcattctttcccaaacattgcttgaggttgaggtgcaaacaatattcaggcaagtggttcaaatattccattcacatattacagaagcattttcaaaattggaagtcaatactccctctggcaaagaataggtatgctgcttatttgtgcatcttttagca

SEQ ID NO: 25677 - DNA, 3243 bp, Zea Mays
gatctgacacccctcccacccaaccttgcttcgctcccgcgcctcccagatccgatcttcccatgcctcacttccgctgatcccactgccgccgcggaccgccgcgatggcgtcgcgcccgcctctccgcaccacctccgtcgcctccgtctcatcctccaccgagtcccccacctccaccggcccccccggcggcgtcccgcagtccatcaccgcgctcctcaacaacccgctcccctccgccgccgcctcctcgtactcctggttgtcctggccgcctcccaccatcacgctacccgatgcggctccaccaccgccgtcgcatccctgcgaggtcactcgcgccgacttcgcgccctaccttgccgctgtctccgaccccttcgcgcgcttcgccgacatccgcctccacgccagcgccgagctcgccgccgcctctgacgccgagggcgccccagcggtctcctctggcctcgccgcctgcctccgcgaggtgcccgcgctcttcttcaaggaggacttcgcgctcgaggacgggcccaccttccaggtcgcctgcccgctcgatgatgaagcgctgcaggagcgcctcggacagcaccttgacgtcgttgaagcccaccttgtgcgggagatagcgctccggtccgagtccttctacgaagcgcagggccggctgcgcgggcttgatggggagatagtcacgactgtagggaggatccgcgagctcagagaggtggtccgggttctcacgggggacctcgtcggggcagcgaggcaggtgcaagagctcaatgctacccgaggcaaccttgtgacgctgcagcagaagctaactgtcatcctgtatgtcagccaggcgcttaccgcgctcaagctgcttgtcgcagcagcagattgtgctggtgccctcgatgtcattgataacttgcaaaatctgctagatactgatgaacttgctgggctttattgcttttggcatattcgagatcagctgggaacatcactagattcagtgaacagcattctttcagcagaatttgtgcatgctgctgttcctgatggaaaagctgtagatgttatgattttatcaactgtgaaaagaaaggcttccagcccattgaatgggacggaccatgagggtaatgtagatgaggaggaaagttttattctcagggatcgactcctccccctcattatttgcctactgaggacggacaaacttcctgctgttctcagaatttaccgggatacacttataactgttatgaaagcttcaatcaaaaccacagtaggagagttactcccagttttaactgccagaccaatagattctgactcagtaactggagacagagctaccgatgctgatgctggaggccagtccttagcaaataagttgcggagtctttcatctgaaggatttgttcaacttttatctgccattttcaggatagtacaggtaaattaactcttaataagaattccattttcctattttgggagttgggacaaagatcctaggaaaatttgatcctgggtaaattagctcttgtgttcagggataaagtatacttggataagccctgcactgtttttatcccttattgaggtttacttggttcagctaagcaatctttatgttgccctctatagcctatgtcctgattgtttaatttgttttcatgacatgtgattttgtattaaatgggtgcacatcaaatacaaattggccactaggtacatttacagcaagcagctgaagtgaaaagaatagttgagtgggtcatgggaaaccttgatggaacgttaggtgttgatgctagtaatcctacgttacaacatggtggtacagttattcctgatacccaagaaaatgactcttcaagaggctctaatactcttacacggagtacttccaagatcccatttgtccaaggaaaaacaaatgatttttccattataaattcgttaaagaatgttcgggctgatgtcttgagagagaacactgaagcagttttcgcggcttgtgatgctgcccatggacggtgggctaagctgctaggtgttcgttctgctttacatcccaggttaaggcttcaagaattcttgatcatctacaacataacagaagaatttatagctgctacagaaaagattggaggcaggttgggttacaacattcgtggaatcctacatcaacaatcgaagcaattcgttgattatcagcataatgttcggatgacaaaaatcaaggcagttctagatcaagagacgtgggttgctgtggatgttcctgaagagtttcaagcaatcgttctttcactttcatccacttattcttctgttaatggcatggagatgcctagcactgatgataactcaaagtttagtgatcatcggtctacaagtcaagaaccgacatattcagctaaaaatattgctgataatggcaaagtaacatccgggactggtgaaaacaaggttgaattcacttcacagactgaaaataatgttgccgggaatctaaagtccaccttgcaaacgattgtacatggaggtgttggctatcatatggtaaactgtggtttaatactgttgaagatgttatccgaatacgttgacatcagtaaatgtttaccatcactatctttggaggtggtccaacgtgttgtggaaatattaaagcttttcaacactaggacttgccaacttgttctcggtgcaggagccatgcaggtgtctggacttaaatcaattacgtccaaacatttagctttggcgagtcaaatcattagttttatgcattctttaattccagatatcaggcgagtacttttcctgaaaatacctgaagcgcgcaaacatctgttaatgtctgagctggatagagtagctcaggactacaagatccatcgagatgaaattcacaacaaacttgtccagataatgagagagaggttgcttgcaaatcttagaaaattaccccaaattgtggaaggctggaatggcccagaggataatgacgtgcagccgagtcaatttgctaaagctgttacaaaggaagttacctatttgcatcgcattctttcccaaacattgcttgaggttgaggtgcaaacaatattcaggcaagtggttcaaatattccattcacatattacagaagcattttcaaaattggaagtcaatactccctctggcaaagaataggtatgctgcttatttgtgcatcttttagca

SEQ ID NO: 25678 - DNA, 2946 bp, Zea Mays
ctccctctcttctccccttcgtccaggggctagatctgacacccctcccacccaaccttgcttcgctcccgcgcctcccagatccgatcttcccatgcctcacttccgctgatcccactgccgccgcggaccgccgcgatggcgtcgcgcccgcctctccgcaccacctccgtcgcctccgtctcatcctccaccgagtcccccacctccaccggcccccccggcggcgtcccgcagtccatcaccgcgctcctcaacaacccgctcccctccgccgccgcctcctcgtactcctggttgtcctggccgcctcccaccatcacgctacccgatgcggctccaccaccgccgtcgcatccctgcgaggtcactcgcgccgacttcgcgccctaccttgccgctgtctccgaccccttcgcgcgcttcgccgacatccgcctccacgccagcgccgagctcgccgccgcctctgacgccgagggcgccccagcggtctcctctggcctcgccgcctgcctccgcgaggtgcccgcgctcttcttcaaggaggacttcgcgctcgaggacgggcccaccttccaggtcgcctgcccgctcgatgatgaagcgctgcaggagcgcctcggacagcaccttgacgtcgttgaagcccaccttgtgcgggagatagcgctccggtccgagtccttctacgaagcgcagggccggctgcgcgggcttgatggggagatagtcacgactgtagggaggatccgcgagctcagagaggtggtccgggttctcacgggggacctcgtcggggcagcgaggcaggtgcaagagctcaatgctacccgaggcaaccttgtgacgctgcagcagaagctaactgtcatcctgtatgtcagccaggcgcttaccgcgctcaagctgcttgtcgcagcagcagattgtgctggtgccctcgatgtcattgataacttgcaaaatctgctactgggaacatcactagattcagtgaacagcattctttcagcagaatttgtgcatgctgctgttcctgatggaaaagctgtagatgttatgattttatcaactgtgaaaagaaaggcttccagcccattgaatgggacggaccatgagggtaatgtagatgaggaggaaagttttattctcagggatcgactcctccccctcattatttgcctactgaggacggacaaacttcctgctgttctcagaatttaccgggatacacttataactgttatgaaagcttcaatcaaaaccacagtaggagagttactcccagttttaactgccagaccaatagattctgactcagtaactggagacagagctaccgatgctgatgctggaggccagtccttagcaaataagttgcggagtctttcatctgaaggatttgttcaacttttatctgccattttcaggatagtacaggtacatttacagcaagcagctgaagtgaaaagaatagttgagtgggtcatgggaaaccttgatggaacgttaggtgttgatgctagtaatcctacgttacaacatggtggtacagttattcctgatacccaagaaaatgactcttcaagaggctctaatactcttacacggagtacttccaagatcccatttgtccaaggaaaaacaaatgatttttccattataaattcgttaaagaatgttcgggctgatgtcttgagagagaacactgaagcagttttcgcggcttgtgatgctgcccatggacggtgggctaagctgctaggtgttcgttctgctttacatcccaggttaaggcttcaagaattcttgatcatctacaacataacagaagaatttatagctgctacagaaaagattggaggcaggttgggttacaacattcgtggaatcctacatcaacaatcgaagcaattcgttgattatcagcataatgttcggatgacaaaaatcaaggcagttctagatcaagagacgtgggttgctgtggatgttcctgaagagtttcaagcaatcgttctttcactttcatccacttattcttctgttaatggcatggagatgcctagcactgatgataactcaaagtttagtgatcatcggtctacaagtcaagaaccgacatattcagctaaaaatattgctgataatggcaaagtaacatccgggactggtgaaaacaaggttgaattcacttcacagactgaaaataatgttgccgggaatctaaagtccaccttgcaaacgattgtacatggaggtgttggctatcatatggtaaactgtggtttaatactgttgaagatgttatccgaatacgttgacatcagtaaatgtttaccatcactatctttggaggtggtccaacgtgttgtggaaatattaaagcttttcaacactaggacttgccaacttgttctcggtgcaggagccatgcaggtgtctggacttaaatcaattacgtccaaacatttagctttggcgagtcaaatcattagttttatgcattctttaattccagatatcaggcgagtacttttcctgaaaatacctgaagcgcgcaaacatctgttaatgtctgagctggatagagtagctcaggactacaagatccatcgagatgaaattcacaacaaacttgtccagataatgagagagaggttgcttgcaaatcttagaaaattaccccaaattgtggaaggctggaatggcccagaggataatgacgtgcagccgagtcaatttgctaaagctgttacaaaggaagttacctatttgcatcgcattctttcccaaacattgcttgaggttgaggtgcaaacaatattcaggcaagtggttcaaatattccattcacatattacagaagcattttcaaaattggaagtcaatactccctctggcaaagaataggtatgctgcttatttgtgcatcttttagca

SEQ ID NO: 25679 - DNA, 3017 bp, Zea Mays
agaaactccaggagaaaaaaaaaacattcacctgctccctctcttctccccttcgtccaggggctagatctgacacccctcccacccaaccttgcttcgctcccgcgcctcccagatccgatcttcccatgcctcacttccgctgatcccactgccgccgcggaccgccgcgatggcgtcgcgcccgcctctccgcaccacctccgtcgcctccgtctcatcctccaccgagtcccccacctccaccggcccccccggcggcgtcccgcagtccatcaccgcgctcctcaacaacccgctcccctccgccgccgcctcctcgtactcctggttgtcctggccgcctcccaccatcacgctacccgatgcggctccaccaccgccgtcgcatccctgcgaggtcactcgcgccgacttcgcgccctaccttgccgctgtctccgaccccttcgcgcgcttcgccgacatccgcctccacgccagcgccgagctcgccgccgcctctgacgccgagggcgccccagcggtctcctctggcctcgccgcctgcctccgcgaggtgcccgcgctcttcttcaaggaggacttcgcgctcgaggacgggcccaccttccaggtcgcctgcccgctcgatgatgaagcgctgcaggagcgcctcggacagcaccttgacgtcgttgaagcccaccttgtgcgggagatagcgctccggtccgagtccttctacgaagcgcagggccggctgcgcgggcttgatggggagatagtcacgactgtagggaggatccgcgagctcagagaggtggtccgggttctcacgggggacctcgtcggggcagcgaggcaggtgcaagagctcaatgctacccgaggcaaccttgtgacgctgcagcagaagctaactgtcatcctgtatgtcagccaggcgcttaccgcgctcaagctgcttgtcgcagcagcagattgtgctggtgccctcgatgtcattgataacttgcaaaatctgctagatactgatgaacttgctgggctttattgcttttggcatattcgagatcagctgggaacatcactagattcagtgaacagaatttgtgcatgctgctgttcctgatggaaaagctgtagatgttatgattttatcaactgtgaaaagaaaggcttccagcccattgaatgggacggaccatgagggtaatgtagatgaggaggaaagttttattctcagggatcgactcctccccctcattatttgcctactgaggacggacaaacttcctgctgttctcagaatttaccgggatacacttataactgttatgaaagcttcaatcaaaaccacagtaggagagttactcccagttttaactgccagaccaatagattctgactcagtaactggagacagagctaccgatgctgatgctggaggccagtccttagcaaataagttgcggagtctttcatctgaaggatttgttcaacttttatctgccattttcaggatagtacaggtacatttacagcaagcagctgaagtgaaaagaatagttgagtgggtcatgggaaaccttgatggaacgttaggtgttgatgctagtaatcctacgttacaacatggtggtacagttattcctgatacccaagaaaatgactcttcaagaggctctaatactcttacacggagtacttccaagatcccatttgtccaaggaaaaacaaatgatttttccattataaattcgttaaagaatgttcgggctgatgtcttgagagagaacactgaagcagttttcgcggcttgtgatgctgcccatggacggtgggctaagctgctaggtgttcgttctgctttacatcccaggttaaggcttcaagaattcttgatcatctacaacataacagaagaatttatagctgctacagaaaagattggaggcaggttgggttacaacattcgtggaatcctacatcaacaatcgaagcaattcgttgattatcagcataatgttcggatgacaaaaatcaaggcagttctagatcaagagacgtgggttgctgtggatgttcctgaagagtttcaagcaatcgttctttcactttcatccacttattcttctgttaatggcatggagatgcctagcactgatgataactcaaagtttagtgatcatcggtctacaagtcaagaaccgacatattcagctaaaaatattgctgataatggcaaagtaacatccgggactggtgaaaacaaggttgaattcacttcacagactgaaaataatgttgccgggaatctaaagtccaccttgcaaacgattgtacatggaggtgttggctatcatatggtaaactgtggtttaatactgttgaagatgttatccgaatacgttgacatcagtaaatgtttaccatcactatctttggaggtggtccaacgtgttgtggaaatattaaagcttttcaacactaggacttgccaacttgttctcggtgcaggagccatgcaggtgtctggacttaaatcaattacgtccaaacatttagctttggcgagtcaaatcattagttttatgcattctttaattccagatatcaggcgagtacttttcctgaaaatacctgaagcgcgcaaacatctgttaatgtctgagctggatagagtagctcaggactacaagatccatcgagatgaaattcacaacaaacttgtccagataatgagagagaggttgcttgcaaatcttagaaaattaccccaaattgtggaaggctggaatggcccagaggataatgacgtgcagccgagtcaatttgctaaagctgttacaaaggaagttacctatttgcatcgcattctttcccaaacattgcttgaggttgaggtgcaaacaatattcaggcaagtggttcaaatattccattcacatattacagaagcattttcaaaattggaagtcaatactccctctggcaaagaataggtatgctgcttatttgtgcatcttttagca

SEQ ID NO: 25680 - DNA, 3021 bp, Zea Mays
gagaaactccaggagaaaaaaaaaacattcacctgctccctctcttctccccttcgtccaggggctagatctgacacccctcccacccaaccttgcttcgctcccgcgcctcccagatccgatcttcccatgcctcacttccgctgatcccactgccgccgcggaccgccgcgatggcgtcgcgcccgcctctccgcaccacctccgtcgcctccgtctcatcctccaccgagtcccccacctccaccggcccccccggcggcgtcccgcagtccatcaccgcgctcctcaacaacccgctcccctccgccgccgcctcctcgtactcctggttgtcctggccgcctcccaccatcacgctacccgatgcggctccaccaccgccgtcgcatccctgcgaggtcactcgcgccgacttcgcgccctaccttgccgctgtctccgaccccttcgcgcgcttcgccgacatccgcctccacgccagcgccgagctcgccgccgcctctgacgccgagggcgccccagcggtctcctctggcctcgccgcctgcctccgcgaggtgcccgcgctcttcttcaaggaggacttcgcgctcgaggacgggcccaccttccaggtcgcctgcccgctcgatgatgaagcgctgcaggagcgcctcggacagcaccttgacgtcgttgaagcccaccttgtgcgggagatagcgctccggtccgagtccttctacgaagcgcagggccggctgcgcgggcttgatggggagatagtcacgactgtagggaggatccgcgagctcagagaggtggtccgggttctcacgggggacctcgtcggggcagcgaggcaggtgcaagagctcaatgctacccgaggcaaccttgtgacgctgcagcagaagctaactgtcatcctgtatgtcagccaggcgcttaccgcgctcaagctgcttgtcgcagcagcagattgtgctggtgccctcgatgtcattgataacttgcaaaatctgctagatactgatgaacttgctgggctttattgcttttggcatattcgagatcagctgggaacatcactagattcagtgaacagcagaatttgtgcatgctgctgttcctgatggaaaagctgtagatgttatgattttatcaactgtgaaaagaaaggcttccagcccattgaatgggacggaccatgagggtaatgtagatgaggaggaaagttttattctcagggatcgactcctccccctcattatttgcctactgaggacggacaaacttcctgctgttctcagaatttaccgggatacacttataactgttatgaaagcttcaatcaaaaccacagtaggagagttactcccagttttaactgccagaccaatagattctgactcagtaactggagacagagctaccgatgctgatgctggaggccagtccttagcaaataagttgcggagtctttcatctgaaggatttgttcaacttttatctgccattttcaggatagtacaggtacatttacagcaagcagctgaagtgaaaagaatagttgagtgggtcatgggaaaccttgatggaacgttaggtgttgatgctagtaatcctacgttacaacatggtggtacagttattcctgatacccaagaaaatgactcttcaagaggctctaatactcttacacggagtacttccaagatcccatttgtccaaggaaaaacaaatgatttttccattataaattcgttaaagaatgttcgggctgatgtcttgagagagaacactgaagcagttttcgcggcttgtgatgctgcccatggacggtgggctaagctgctaggtgttcgttctgctttacatcccaggttaaggcttcaagaattcttgatcatctacaacataacagaagaatttatagctgctacagaaaagattggaggcaggttgggttacaacattcgtggaatcctacatcaacaatcgaagcaattcgttgattatcagcataatgttcggatgacaaaaatcaaggcagttctagatcaagagacgtgggttgctgtggatgttcctgaagagtttcaagcaatcgttctttcactttcatccacttattcttctgttaatggcatggagatgcctagcactgatgataactcaaagtttagtgatcatcggtctacaagtcaagaaccgacatattcagctaaaaatattgctgataatggcaaagtaacatccgggactggtgaaaacaaggttgaattcacttcacagactgaaaataatgttgccgggaatctaaagtccaccttgcaaacgattgtacatggaggtgttggctatcatatggtaaactgtggtttaatactgttgaagatgttatccgaatacgttgacatcagtaaatgtttaccatcactatctttggaggtggtccaacgtgttgtggaaatattaaagcttttcaacactaggacttgccaacttgttctcggtgcaggagccatgcaggtgtctggacttaaatcaattacgtccaaacatttagctttggcgagtcaaatcattagttttatgcattctttaattccagatatcaggcgagtacttttcctgaaaatacctgaagcgcgcaaacatctgttaatgtctgagctggatagagtagctcaggactacaagatccatcgagatgaaattcacaacaaacttgtccagataatgagagagaggttgcttgcaaatcttagaaaattaccccaaattgtggaaggctggaatggcccagaggataatgacgtgcagccgagtcaatttgctaaagctgttacaaaggaagttacctatttgcatcgcattctttcccaaacattgcttgaggttgaggtgcaaacaatattcaggcaagtggttcaaatattccattcacatattacagaagcattttcaaaattggaagtcaatactccctctggcaaagaataggtatgctgcttatttgtgcatcttttagca

SEQ ID NO: 25681 - DNA, 1493 bp, Zea Mays
gtgattttgtattaaatgggtgcacatcaaatacaaattggccactaggtacatttacagcaagcagctgaagtgaaaagaatagttgagtgggtcatgggaaaccttgatggaacgttaggtgttgatgctagtaatcctacgttacaacatggtggtacagttattcctgatacccaagaaaatgactcttcaagaggctctaatactcttacacggagtacttccaagatcccatttgtccaaggaaaaacaaatgatttttccattataaattcgttaaagaatgttcgggctgatgtcttgagagagaacactgaagcagttttcgcggcttgtgatgctgcccatggacggtgggctaagctgctaggtgttcgttctgctttacatcccaggttaaggcttcaagaattcttgatcatctacaacataacagaagaatttatagctgctacagaaaagattggaggcaggttgggttacaacattcgtggaatcctacatcaacaatcgaagcaattcgttgattatcagcataatgttcggatgacaaaaatcaaggcagttctagatcaagagacgtgggttgctgtggatgttcctgaagagtttcaagcaatcgttctttcactttcatccacttattcttctgttaatggcatggagatgcctagcactgatgataactcaaagtttagtgatcatcggtctacaagtcaagaaccgacatattcagctaaaaatattgctgataatggcaaagtaacatccgggactggtgaaaacaaggttgaattcacttcacagactgaaaataatgttgccgggaatctaaagtccaccttgcaaacgattgtacatggaggtgttggctatcatatggtaaactgtggtttaatactgttgaagatgttatccgaatacgttgacatcagtaaatgtttaccatcactatctttggaggtggtccaacgtgttgtggaaatattaaagcttttcaacactaggacttgccaacttgttctcggtgcaggagccatgcaggtgtctggacttaaatcaattacgtccaaacatttagctttggcgagtcaaatcattagttttatgcattctttaattccagatatcaggcgagtacttttcctgaaaatacctgaagcgcgcaaacatctgttaatgtctgagctggatagagtagctcaggactacaagatccatcgagatgaaattcacaacaaacttgtccagataatgagagagaggttgcttgcaaatcttagaaaattaccccaaattgtggaaggctggaatggcccagaggataatgacgtgcagccgagtcaatttgctaaagctgttacaaaggaagttacctatttgcatcgcattctttcccaaacattgcttgaggttgaggtgcaaacaatattcaggtttgcagaacatgacttggaaaaatacttaaccttgcaatgattaaaatatca

SEQ ID NO: 25682 - DNA, 1772 bp, Zea Mays
aattcacaaccccaaggaaagggagaaagaaccgaggaagctccgactgcgccggtgggggaccgcgcaccccagcggcgccaggcgtccacgggatggtggttcttgtggctactgccgctcggtggcccgggggaagcacggctgcccgggcgcgcccgccggctgcgaggggcagggcccccctccgcgtcgccgccgagcccgagcacaaggcggccacggtcaggtttgaaaaatatagattgttatcatggatgaaaccaataaggcatgacgtcagggcccaaatgtccaatgtaaatgttggtgccggaagttatggaggagatgaagcaaatggccatggagaacatttggatacctctgctaccggagaccccaacaaattagcaaaacaactttcaggatctcgttacctgcaacccgttggtgtcgtgctatttctgtgtgccctggcaactagttttttcgttttctttaaaggacaatcatctgcagttgtagctatgctggcaaaatcaggtttcacggcggcatttacactgatttttgtatctgagattggagataagacgtttttcattgctgcactactcgcgatgcagtatcaaagagcactggttttacttgggtcaatggctgctctctccctgatgactattgtgagtgttataattggacggattttccagtctgtgccagcacagttccaaacaacgctacccataggagagtattctgcagttgctctgctggcattctttggtttcaagtcaataaaagatgcattagcacttcctgataatgccaacgggaaccttcaagggaattcagaaagtggagaactggctgaggccgaggagcttgtcaaggaaaaggttgtccttgtccagaaagtgcttgtgttgagaaatcttttcaaaattataattgcttgcttttacactacgtaacctgcaagctggtgcgagtttgcaccatactcatgtgctgatattgagattttgttgaattgtgttcctgacaaattgaagtactcgaaaaagttcccagccttttctctggtctttgctgaaagtcagttactttgttacaggtctctaaaaatctcaccagccctcttgaagtcctttggaagtccttcagtcttgttttctttgctgagtggggagatcgctctatgcttgctacaattgctttgggtgctgctcagtctcctttgggcgttgctagtggagccattgctggacacttgattgcaacagcctttgctattcttggaggagcattcctggccaactacttgtccgagaagctggttggcttgttaggaggagtattatttttgctctttgctgctgcaacgctttttggtgtattctaatctatctgaagaatttgctgttaggggaaagacctcgcagttccagtttggtcttagattttgaagatgaggggcaaacccaagtaggcttggcacatgctgtatgtagatagacgttatccttatcagagatgatttcgatgtgcccaaaattctaccagacagactggaaactgcatcacatggacagcttacagaagttaccattcaaataatttgattagatttgtttaataagaagttactgttttgtgctaaggatctagtgttgacttttgtcaatcatgtgcttgtttttcattcatgggagacaatgacagaaggaatccccaggatgaattgttctgaaaaacaactccccgttaccaaaaaaggaggaaattac

SEQ ID NO: 25683 - DNA, 1360 bp, Zea Mays
aattcacaaccccaaggaaagggagaaagaaccgaggaagaaaaatatagattgttatcatggatgaaaccaataaggcatgacgtcagggcccaaatgtccaatgtaaatgttggtgccggaagttatggaggagatgaagcaaatggccatggagaacatttggatacctctgctaccggagaccccaacaaattagcaaaacaactttcaggatctcgttacctgcaacccgttggtgtcgtgctatttctgtgtgccctggcaactagttttttcgttttctttaaaggacaatcatctgcagttgtagctatgctggcaaaatcaggtttcacggcggcatttacactgatttttgtatctgagattggagataagacgtttttcattgctgcactactcgcgatgcagtatcaaagagcactggttttacttgggtcaatggctgctctctccctgatgactattgtgagtgttataattggacggattttccagtctgtgccagcacagttccaaacaacgctacccataggagagtattctgcagttgctctgctggcattctttggtttcaagtcaataaaagatgcattagcacttcctgataatgccaacgggaaccttcaagggaattcagaaagtggagaactggctgaggccgaggagcttgtcaaggaaaaggtctctaaaaatctcaccagccctcttgaagtcctttggaagtccttcagtcttgttttctttgctgagtggggagatcgctctatgcttgctacaattgctttgggtgctgctcagtctcctttgggcgttgctagtggagccattgctggacacttgattgcaacagcctttgctattcttggaggagcattcctggccaactacttgtccgagaagctggttggcttgttaggaggagtattatttttgctctttgctgctgcaacgctttttggtgtattctaatctatctgaagaatttgctgttaggggaaagacctcgcagttccagtttggtcttagattttgaagatgaggggcaaacccaagtaggcttggcacatgctgtatgtagatagacgttatccttatcagagatgatttcgatgtgcccaaaattctaccagacagactggaaactgcatcacatggacagcttacagaagttaccattcaaataatttgattagatttgtttaataagaagttactgttttgtgctaaggatctagtgttgacttttgtcaatcatgtgcttgtttttcattcatgggagacaatgacagaaggaatccccaggatgaattgttctgaaaaacaactccccgttaccaaaaaaggaggaaattac

SEQ ID NO: 25684 - DNA, 1562 bp, Zea Mays
cacgaataaaatcaattcacaaccccaaggaaagggagaaagaaccgaggaagctccgactgcgccggtgggggaccgcgcaccccagcggcgccaggcgtccacgggatggtggttcttgtggctactgccgctcggtggcccgggggaagcacggctgcccgggcgcgcccgccggctgcgaggggcagggcccccctccgcgtcgccgccgagcccgagcacaaggcggccacggtcagaaaaatatagattgttatcatggatgaaaccaataaggcatgacgtcagggcccaaatgtccaatgtaaatgttggtgccggaagttatggaggagatgaagcaaatggccatggagaacatttggatacctctgctaccggagaccccaacaaattagcaaaacaactttcaggatctcgttacctgcaacccgttggtgtcgtgctatttctgtgtgccctggcaactagttttttcgttttctttaaaggacaatcatctgcagttgtagctatgctggcaaaatcaggtttcacggcggcatttacactgatttttgtatctgagattggagataagacgtttttcattgctgcactactcgcgatgcagtatcaaagagcactggttttacttgggtcaatggctgctctctccctgatgactattgtgagtgttataattggacggattttccagtctgtgccagcacagttccaaacaacgctacccataggagagtattctgcagttgctctgctggcattctttggtttcaagtcaataaaagatgcattagcacttcctgataatgccaacgggaaccttcaagggaattcagaaagtggagaactggctgaggccgaggagcttgtcaaggaaaaggtctctaaaaatctcaccagccctcttgaagtcctttggaagtccttcagtcttgttttctttgctgagtggggagatcgctctatgcttgctacaattgctttgggtgctgctcagtctcctttgggcgttgctagtggagccattgctggacacttgattgcaacagcctttgctattcttggaggagcattcctggccaactacttgtccgagaagctggttggcttgttaggaggagtattatttttgctctttgctgctgcaacgctttttggtgtattctaatctatctgaagaatttgctgttaggggaaagacctcgcagttccagtttggtcttagattttgaagatgaggggcaaacccaagtaggcttggcacatgctgtatgtagatagacgttatccttatcagagatgatttcgatgtgcccaaaattctaccagacagactggaaactgcatcacatggacagcttacagaagttaccattcaaataatttgattagatttgtttaataagaagttactgttttgtgctaaggatctagtgttgacttttgtcaatcatgtgcttgtttttcattcatgggagacaatgacagaaggaatccccaggatgaattgttctgaaaaacaactccccgttaccaaaaaaggaggaaattac
